United States Patent Application Publication US 2026/0015401 A1 - sequence listing, part 2

SEQ ID NO: 5121 - DNA, 1701 bp, synthetic construct
  source 1..1701: mol_type = other DNA
atggccttaccagtgaccgccttgctcctgccgctggccttgctgctccacgccgccaggccggacatccagatgacacagagccctagcagcctgtctgccagcgtgggagacagagtgaccatcacatgcaaggccagcgaccacatcaacaactggctggcctggtatcagcagaagcctggacaggcccctaagctgctgatctacggcgctaccacactggaaacaggcgtgcccagcagattttctggcagcggctctggcaccgactacaccctgacaatatccagcctccagcctgaggacttcgccacctactactgtcagcagagctggaacaccccttggacattcggccagggcaccaagctggaaatcaagagaggcggaggcggaagtggaggcggaggatctggcggcggaggctctcaagttcagcttcaacagcctggcgctgagctggtcaaacctggcgcttctgtgaagatgagctgcaaagccagcggctacgccttcaacagctactggatcaactggatgaagcagaaacccggccagggactcgaatggatcggccaaatctatcccggcgacggcgacaccaactacaacggcaagttcaagggcagagccacactgaccgccgatacctctagcagcacagcctacatgcagctgagcagcctgaccagcgaagatagcgccgtgtacttctgtgcccggtccatcacaacagtcgtgggctgcgctatggactattggggccagggaacaagcgtgaccgtgtctagtacgcgtgcaagaagtgaagatcgctacattctcgagggaggcagctggagccaccctcagtttgaaaaagactacaaagacgatgacgataagggatcagattacaaggatgatgatgacaaggggtcagattataaagacgacgatgataaagggagcgactacaaggacgacgatgacaaggcctggtcccatccccagttcgagaaacaccatcaccaccaccatcatcacactagtggctccggcgagggcagaggaagtctactaacctgcggagatgtggaagaaaatcctggcccacatatgaccgagtacaagcccacggtgcgcctcgccacccgcgacgacgtccccagggccgtacgcaccctcgccgccgcgttcgccgactaccccgccacgcgccacaccgtcgatccggaccgccacatcgagcgggtcaccgagctgcaagaactcttcctcacgcgcgtcgggctcgacatcggcaaggtgtgggtcgcggacgacggcgccgcggtggcggtctggaccacgccggagagcgtcgaagcgggggcggtgttcgccgagatcggcccgcgcatggccgagttgagcggttcccggctggccgcgcagcaacagatggaaggcctcctggcgccgcaccggcccaaggagcccgcgtggttcctggccaccgtcggcgtctcgcccgaccaccagggcaagggtctgggcagcgccgtcgtgctccccggagtggaggcggccgagcgcgccggggtgcccgccttcctggagacctccgcgccccgcaacctccccttctacgagcggctcggcttcaccgtcaccgccgacgtcgaggtgcccgaaggaccgcgcacctggtgcatgacccgcaagcccggtgcctga

SEQ ID NO: 5122 - DNA, 1701 bp, synthetic construct
  source 1..1701: mol_type = other DNA
atggccttaccagtgaccgccttgctcctgccgctggccttgctgctccacgccgccaggccggacatccagatgacacagagccctagcagcctgtctgccagcgtgggagacagagtgaccatcacatgcaaggccagcgaccacatcaacaactggctggcctggtatcagcagaagcctggacaggcccctaagctgctgatctacggcgctaccacactggaaacaggcgtgcccagcagattttctggcagcggctctggcaccgactacaccctgacaatatccagcctccagcctgaggacttcgccacctactactgtcagcagagctggaacaccccttggacattcggccagggcaccaagctggaaatcaagagaggcggaggcggaagtggaggcggaggatctggcggcggaggctctcaagttcagcttcaacagcctggcgctgagctggtcaaacctggcgcttctgtgaagatgagctgcaaagccagcggctacgccttcaacagctactggatcaactggatgaagcagaaacccggccagggactcgaatggatcggccaaatctatcccggcgacggcgacaccaactacaacggcaagttcaagggcagagccacactgaccgccgatacctctagcagcacagcctacatgcagctgagcagcctgaccagcgaagatagcgccgtgtacttctgtgcccggtccatcacaacagtcgtgggctgcgctatggactattggggccagggaacaagcgtgaccgtgtctagtacgcgtgcaagaagtgaagatcgctactatctcgagggaggcagctggagccaccctcagtttgaaaaagactacaaagacgatgacgataagggatcagattacaaggatgatgatgacaaggggtcagattataaagacgacgatgataaagggagcgactacaaggacgacgatgacaaggcctggtcccatccccagttcgagaaacaccatcaccaccaccatcatcacactagtggctccggcgagggcagaggaagtctactaacctgcggagatgtggaagaaaatcctggcccacatatgaccgagtacaagcccacggtgcgcctcgccacccgcgacgacgtccccagggccgtacgcaccctcgccgccgcgttcgccgactaccccgccacgcgccacaccgtcgatccggaccgccacatcgagcgggtcaccgagctgcaagaactcttcctcacgcgcgtcgggctcgacatcggcaaggtgtgggtcgcggacgacggcgccgcggtggcggtctggaccacgccggagagcgtcgaagcgggggcggtgttcgccgagatcggcccgcgcatggccgagttgagcggttcccggctggccgcgcagcaacagatggaaggcctcctggcgccgcaccggcccaaggagcccgcgtggttcctggccaccgtcggcgtctcgcccgaccaccagggcaagggtctgggcagcgccgtcgtgctccccggagtggaggcggccgagcgcgccggggtgcccgccttcctggagacctccgcgccccgcaacctccccttctacgagcggctcggcttcaccgtcaccgccgacgtcgaggtgcccgaaggaccgcgcacctggtgcatgacccgcaagcccggtgcctga

SEQ ID NO: 5123 - DNA, 1701 bp, synthetic construct
  source 1..1701: mol_type = other DNA
atggccttaccagtgaccgccttgctcctgccgctggccttgctgctccacgccgccaggccggacatccagatgacacagagccctagcagcctgtctgccagcgtgggagacagagtgaccatcacatgcaaggccagcgaccacatcaacaactggctggcctggtatcagcagaagcctggacaggcccctaagctgctgatctacggcgctaccacactggaaacaggcgtgcccagcagattttctggcagcggctctggcaccgactacaccctgacaatatccagcctccagcctgaggacttcgccacctactactgtcagcagagctggaacaccccttggacattcggccagggcaccaagctggaaatcaagagaggcggaggcggaagtggaggcggaggatctggcggcggaggctctcaagttcagcttcaacagcctggcgctgagctggtcaaacctggcgcttctgtgaagatgagctgcaaagccagcggctacgccttcaacagctactggatcaactggatgaagcagaaacccggccagggactcgaatggatcggccaaatctatcccggcgacggcgacaccaactacaacggcaagttcaagggcagagccacactgaccgccgatacctctagcagcacagcctacatgcagctgagcagcctgaccagcgaagatagcgccgtgtacttctgtgcccggtccatcacaacagtcgtgggctgcgctatggactattggggccagggaacaagcgtgaccgtgtctagtacgcgtgcaagaagtgaagatcgctacgcgctcgagggaggcagctggagccaccctcagtttgaaaaagactacaaagacgatgacgataagggatcagattacaaggatgatgatgacaaggggtcagattataaagacgacgatgataaagggagcgactacaaggacgacgatgacaaggcctggtcccatccccagttcgagaaacaccatcaccaccaccatcatcacactagtggctccggcgagggcagaggaagtctactaacctgcggagatgtggaagaaaatcctggcccacatatgaccgagtacaagcccacggtgcgcctcgccacccgcgacgacgtccccagggccgtacgcaccctcgccgccgcgttcgccgactaccccgccacgcgccacaccgtcgatccggaccgccacatcgagcgggtcaccgagctgcaagaactcttcctcacgcgcgtcgggctcgacatcggcaaggtgtgggtcgcggacgacggcgccgcggtggcggtctggaccacgccggagagcgtcgaagcgggggcggtgttcgccgagatcggcccgcgcatggccgagttgagcggttcccggctggccgcgcagcaacagatggaaggcctcctggcgccgcaccggcccaaggagcccgcgtggttcctggccaccgtcggcgtctcgcccgaccaccagggcaagggtctgggcagcgccgtcgtgctccccggagtggaggcggccgagcgcgccggggtgcccgccttcctggagacctccgcgccccgcaacctccccttctacgagcggctcggcttcaccgtcaccgccgacgtcgaggtgcccgaaggaccgcgcacctggtgcatgacccgcaagcccggtgcctga

SEQ ID NO: 5124 - DNA, 1701 bp, synthetic construct
  source 1..1701: mol_type = other DNA
atggccttaccagtgaccgccttgctcctgccgctggccttgctgctccacgccgccaggccggacatccagatgacacagagccctagcagcctgtctgccagcgtgggagacagagtgaccatcacatgcaaggccagcgaccacatcaacaactggctggcctggtatcagcagaagcctggacaggcccctaagctgctgatctacggcgctaccacactggaaacaggcgtgcccagcagattttctggcagcggctctggcaccgactacaccctgacaatatccagcctccagcctgaggacttcgccacctactactgtcagcagagctggaacaccccttggacattcggccagggcaccaagctggaaatcaagagaggcggaggcggaagtggaggcggaggatctggcggcggaggctctcaagttcagcttcaacagcctggcgctgagctggtcaaacctggcgcttctgtgaagatgagctgcaaagccagcggctacgccttcaacagctactggatcaactggatgaagcagaaacccggccagggactcgaatggatcggccaaatctatcccggcgacggcgacaccaactacaacggcaagttcaagggcagagccacactgaccgccgatacctctagcagcacagcctacatgcagctgagcagcctgaccagcgaagatagcgccgtgtacttctgtgcccggtccatcacaacagtcgtgggctgcgctatggactattggggccagggaacaagcgtgaccgtgtctagtacgcgtgcaagaagtgaagatcgcgtaaggctcgagggaggcagctggagccaccctcagtttgaaaaagactacaaagacgatgacgataagggatcagattacaaggatgatgatgacaaggggtcagattataaagacgacgatgataaagggagcgactacaaggacgacgatgacaaggcctggtcccatccccagttcgagaaacaccatcaccaccaccatcatcacactagtggctccggcgagggcagaggaagtctactaacctgcggagatgtggaagaaaatcctggcccacatatgaccgagtacaagcccacggtgcgcctcgccacccgcgacgacgtccccagggccgtacgcaccctcgccgccgcgttcgccgactaccccgccacgcgccacaccgtcgatccggaccgccacatcgagcgggtcaccgagctgcaagaactcttcctcacgcgcgtcgggctcgacatcggcaaggtgtgggtcgcggacgacggcgccgcggtggcggtctggaccacgccggagagcgtcgaagcgggggcggtgttcgccgagatcggcccgcgcatggccgagttgagcggttcccggctggccgcgcagcaacagatggaaggcctcctggcgccgcaccggcccaaggagcccgcgtggttcctggccaccgtcggcgtctcgcccgaccaccagggcaagggtctgggcagcgccgtcgtgctccccggagtggaggcggccgagcgcgccggggtgcccgccttcctggagacctccgcgccccgcaacctccccttctacgagcggctcggcttcaccgtcaccgccgacgtcgaggtgcccgaaggaccgcgcacctggtgcatgacccgcaagcccggtgcctga

SEQ ID NO: 5125 - DNA, 1701 bp, synthetic construct
  source 1..1701: mol_type = other DNA
atggccttaccagtgaccgccttgctcctgccgctggccttgctgctccacgccgccaggccggacatccagatgacacagagccctagcagcctgtctgccagcgtgggagacagagtgaccatcacatgcaaggccagcgaccacatcaacaactggctggcctggtatcagcagaagcctggacaggcccctaagctgctgatctacggcgctaccacactggaaacaggcgtgcccagcagattttctggcagcggctctggcaccgactacaccctgacaatatccagcctccagcctgaggacttcgccacctactactgtcagcagagctggaacaccccttggacattcggccagggcaccaagctggaaatcaagagaggcggaggcggaagtggaggcggaggatctggcggcggaggctctcaagttcagcttcaacagcctggcgctgagctggtcaaacctggcgcttctgtgaagatgagctgcaaagccagcggctacgccttcaacagctactggatcaactggatgaagcagaaacccggccagggactcgaatggatcggccaaatctatcccggcgacggcgacaccaactacaacggcaagttcaagggcagagccacactgaccgccgatacctctagcagcacagcctacatgcagctgagcagcctgaccagcgaagatagcgccgtgtacttctgtgcccggtccatcacaacagtcgtgggctgcgctatggactattggggccagggaacaagcgtgaccgtgtctagtacgcgtgcaagaagtgaagatcgcttgaggctcgagggaggcagctggagccaccctcagtttgaaaaagactacaaagacgatgacgataagggatcagattacaaggatgatgatgacaaggggtcagattataaagacgacgatgataaagggagcgactacaaggacgacgatgacaaggcctggtcccatccccagttcgagaaacaccatcaccaccaccatcatcacactagtggctccggcgagggcagaggaagtctactaacctgcggagatgtggaagaaaatcctggcccacatatgaccgagtacaagcccacggtgcgcctcgccacccgcgacgacgtccccagggccgtacgcaccctcgccgccgcgttcgccgactaccccgccacgcgccacaccgtcgatccggaccgccacatcgagcgggtcaccgagctgcaagaactcttcctcacgcgcgtcgggctcgacatcggcaaggtgtgggtcgcggacgacggcgccgcggtggcggtctggaccacgccggagagcgtcgaagcgggggcggtgttcgccgagatcggcccgcgcatggccgagttgagcggttcccggctggccgcgcagcaacagatggaaggcctcctggcgccgcaccggcccaaggagcccgcgtggttcctggccaccgtcggcgtctcgcccgaccaccagggcaagggtctgggcagcgccgtcgtgctccccggagtggaggcggccgagcgcgccggggtgcccgccttcctggagacctccgcgccccgcaacctccccttctacgagcggctcggcttcaccgtcaccgccgacgtcgaggtgcccgaaggaccgcgcacctggtgcatgacccgcaagcccggtgcctga

SEQ ID NO: 5126 - DNA, 1701 bp, synthetic construct
  source 1..1701: mol_type = other DNA
atggccttaccagtgaccgccttgctcctgccgctggccttgctgctccacgccgccaggccggacatccagatgacacagagccctagcagcctgtctgccagcgtgggagacagagtgaccatcacatgcaaggccagcgaccacatcaacaactggctggcctggtatcagcagaagcctggacaggcccctaagctgctgatctacggcgctaccacactggaaacaggcgtgcccagcagattttctggcagcggctctggcaccgactacaccctgacaatatccagcctccagcctgaggacttcgccacctactactgtcagcagagctggaacaccccttggacattcggccagggcaccaagctggaaatcaagagaggcggaggcggaagtggaggcggaggatctggcggcggaggctctcaagttcagcttcaacagcctggcgctgagctggtcaaacctggcgcttctgtgaagatgagctgcaaagccagcggctacgccttcaacagctactggatcaactggatgaagcagaaacccggccagggactcgaatggatcggccaaatctatcccggcgacggcgacaccaactacaacggcaagttcaagggcagagccacactgaccgccgatacctctagcagcacagcctacatgcagctgagcagcctgaccagcgaagatagcgccgtgtacttctgtgcccggtccatcacaacagtcgtgggctgcgctatggactattggggccagggaacaagcgtgaccgtgtctagtacgcgtgcaagaagtgaagatcgcataaggctcgagggaggcagctggagccaccctcagtttgaaaaagactacaaagacgatgacgataagggatcagattacaaggatgatgatgacaaggggtcagattataaagacgacgatgataaagggagcgactacaaggacgacgatgacaaggcctggtcccatccccagttcgagaaacaccatcaccaccaccatcatcacactagtggctccggcgagggcagaggaagtctactaacctgcggagatgtggaagaaaatcctggcccacatatgaccgagtacaagcccacggtgcgcctcgccacccgcgacgacgtccccagggccgtacgcaccctcgccgccgcgttcgccgactaccccgccacgcgccacaccgtcgatccggaccgccacatcgagcgggtcaccgagctgcaagaactcttcctcacgcgcgtcgggctcgacatcggcaaggtgtgggtcgcggacgacggcgccgcggtggcggtctggaccacgccggagagcgtcgaagcgggggcggtgttcgccgagatcggcccgcgcatggccgagttgagcggttcccggctggccgcgcagcaacagatggaaggcctcctggcgccgcaccggcccaaggagcccgcgtggttcctggccaccgtcggcgtctcgcccgaccaccagggcaagggtctgggcagcgccgtcgtgctccccggagtggaggcggccgagcgcgccggggtgcccgccttcctggagacctccgcgccccgcaacctccccttctacgagcggctcggcttcaccgtcaccgccgacgtcgaggtgcccgaaggaccgcgcacctggtgcatgacccgcaagcccggtgcctga

SEQ ID NO: 5127 - DNA, 1701 bp, synthetic construct
  source 1..1701: mol_type = other DNA
atggccttaccagtgaccgccttgctcctgccgctggccttgctgctccacgccgccaggccggacatccagatgacacagagccctagcagcctgtctgccagcgtgggagacagagtgaccatcacatgcaaggccagcgaccacatcaacaactggctggcctggtatcagcagaagcctggacaggcccctaagctgctgatctacggcgctaccacactggaaacaggcgtgcccagcagattttctggcagcggctctggcaccgactacaccctgacaatatccagcctccagcctgaggacttcgccacctactactgtcagcagagctggaacaccccttggacattcggccagggcaccaagctggaaatcaagagaggcggaggcggaagtggaggcggaggatctggcggcggaggctctcaagttcagcttcaacagcctggcgctgagctggtcaaacctggcgcttctgtgaagatgagctgcaaagccagcggctacgccttcaacagctactggatcaactggatgaagcagaaacccggccagggactcgaatggatcggccaaatctatcccggcgacggcgacaccaactacaacggcaagttcaagggcagagccacactgaccgccgatacctctagcagcacagcctacatgcagctgagcagcctgaccagcgaagatagcgccgtgtacttctgtgcccggtccatcacaacagtcgtgggctgcgctatggactattggggccagggaacaagcgtgaccgtgtctagtacgcgtgcaagaagtgaagatcgctccaggctcgagggaggcagctggagccaccctcagtttgaaaaagactacaaagacgatgacgataagggatcagattacaaggatgatgatgacaaggggtcagattataaagacgacgatgataaagggagcgactacaaggacgacgatgacaaggcctggtcccatccccagttcgagaaacaccatcaccaccaccatcatcacactagtggctccggcgagggcagaggaagtctactaacctgcggagatgtggaagaaaatcctggcccacatatgaccgagtacaagcccacggtgcgcctcgccacccgcgacgacgtccccagggccgtacgcaccctcgccgccgcgttcgccgactaccccgccacgcgccacaccgtcgatccggaccgccacatcgagcgggtcaccgagctgcaagaactcttcctcacgcgcgtcgggctcgacatcggcaaggtgtgggtcgcggacgacggcgccgcggtggcggtctggaccacgccggagagcgtcgaagcgggggcggtgttcgccgagatcggcccgcgcatggccgagttgagcggttcccggctggccgcgcagcaacagatggaaggcctcctggcgccgcaccggcccaaggagcccgcgtggttcctggccaccgtcggcgtctcgcccgaccaccagggcaagggtctgggcagcgccgtcgtgctccccggagtggaggcggccgagcgcgccggggtgcccgccttcctggagacctccgcgccccgcaacctccccttctacgagcggctcggcttcaccgtcaccgccgacgtcgaggtgcccgaaggaccgcgcacctggtgcatgacccgcaagcccggtgcctga

SEQ ID NO: 5128 - DNA, 1701 bp, synthetic construct; identical to SEQ ID NO: 5124
  source 1..1701: mol_type = other DNA

SEQ ID NO: 5129 - DNA, 1701 bp, synthetic construct
  source 1..1701: mol_type = other DNA
atggccttaccagtgaccgccttgctcctgccgctggccttgctgctccacgccgccaggccggacatccagatgacacagagccctagcagcctgtctgccagcgtgggagacagagtgaccatcacatgcaaggccagcgaccacatcaacaactggctggcctggtatcagcagaagcctggacaggcccctaagctgctgatctacggcgctaccacactggaaacaggcgtgcccagcagattttctggcagcggctctggcaccgactacaccctgacaatatccagcctccagcctgaggacttcgccacctactactgtcagcagagctggaacaccccttggacattcggccagggcaccaagctggaaatcaagagaggcggaggcggaagtggaggcggaggatctggcggcggaggctctcaagttcagcttcaacagcctggcgctgagctggtcaaacctggcgcttctgtgaagatgagctgcaaagccagcggctacgccttcaacagctactggatcaactggatgaagcagaaacccggccagggactcgaatggatcggccaaatctatcccggcgacggcgacaccaactacaacggcaagttcaagggcagagccacactgaccgccgatacctctagcagcacagcctacatgcagctgagcagcctgaccagcgaagatagcgccgtgtacttctgtgcccggtccatcacaacagtcgtgggctgcgctatggactattggggccagggaacaagcgtgaccgtgtctagtacgcgtgcaagaagtgaagatcgcccgaggctcgagggaggcagctggagccaccctcagtttgaaaaagactacaaagacgatgacgataagggatcagattacaaggatgatgatgacaaggggtcagattataaagacgacgatgataaagggagcgactacaaggacgacgatgacaaggcctggtcccatccccagttcgagaaacaccatcaccaccaccatcatcacactagtggctccggcgagggcagaggaagtctactaacctgcggagatgtggaagaaaatcctggcccacatatgaccgagtacaagcccacggtgcgcctcgccacccgcgacgacgtccccagggccgtacgcaccctcgccgccgcgttcgccgactaccccgccacgcgccacaccgtcgatccggaccgccacatcgagcgggtcaccgagctgcaagaactcttcctcacgcgcgtcgggctcgacatcggcaaggtgtgggtcgcggacgacggcgccgcggtggcggtctggaccacgccggagagcgtcgaagcgggggcggtgttcgccgagatcggcccgcgcatggccgagttgagcggttcccggctggccgcgcagcaacagatggaaggcctcctggcgccgcaccggcccaaggagcccgcgtggttcctggccaccgtcggcgtctcgcccgaccaccagggcaagggtctgggcagcgccgtcgtgctccccggagtggaggcggccgagcgcgccggggtgcccgccttcctggagacctccgcgccccgcaacctccccttctacgagcggctcggcttcaccgtcaccgccgacgtcgaggtgcccgaaggaccgcgcacctggtgcatgacccgcaagcccggtgcctga

SEQ ID NO: 5130 - DNA, 1701 bp, synthetic construct
  source 1..1701: mol_type = other DNA
atggccttaccagtgaccgccttgctcctgccgctggccttgctgctccacgccgccaggccggacatccagatgacacagagccctagcagcctgtctgccagcgtgggagacagagtgaccatcacatgcaaggccagcgaccacatcaacaactggctggcctggtatcagcagaagcctggacaggcccctaagctgctgatctacggcgctaccacactggaaacaggcgtgcccagcagattttctggcagcggctctggcaccgactacaccctgacaatatccagcctccagcctgaggacttcgccacctactactgtcagcagagctggaacaccccttggacattcggccagggcaccaagctggaaatcaagagaggcggaggcggaagtggaggcggaggatctggcggcggaggctctcaagttcagcttcaacagcctggcgctgagctggtcaaacctggcgcttctgtgaagatgagctgcaaagccagcggctacgccttcaacagctactggatcaactggatgaagcagaaacccggccagggactcgaatggatcggccaaatctatcccggcgacggcgacaccaactacaacggcaagttcaagggcagagccacactgaccgccgatacctctagcagcacagcctacatgcagctgagcagcctgaccagcgaagatagcgccgtgtacttctgtgcccggtccatcacaacagtcgtgggctgcgctatggactattggggccagggaacaagcgtgaccgtgtctagtacgcgtgcaagaagtgaagatcgcttcaggctcgagggaggcagctggagccaccctcagtttgaaaaagactacaaagacgatgacgataagggatcagattacaaggatgatgatgacaaggggtcagattataaagacgacgatgataaagggagcgactacaaggacgacgatgacaaggcctggtcccatccccagttcgagaaacaccatcaccaccaccatcatcacactagtggctccggcgagggcagaggaagtctactaacctgcggagatgtggaagaaaatcctggcccacatatgaccgagtacaagcccacggtgcgcctcgccacccgcgacgacgtccccagggccgtacgcaccctcgccgccgcgttcgccgactaccccgccacgcgccacaccgtcgatccggaccgccacatcgagcgggtcaccgagctgcaagaactcttcctcacgcgcgtcgggctcgacatcggcaaggtgtgggtcgcggacgacggcgccgcggtggcggtctggaccacgccggagagcgtcgaagcgggggcggtgttcgccgagatcggcccgcgcatggccgagttgagcggttcccggctggccgcgcagcaacagatggaaggcctcctggcgccgcaccggcccaaggagcccgcgtggttcctggccaccgtcggcgtctcgcccgaccaccagggcaagggtctgggcagcgccgtcgtgctccccggagtggaggcggccgagcgcgccggggtgcccgccttcctggagacctccgcgccccgcaacctccccttctacgagcggctcggcttcaccgtcaccgccgacgtcgaggtgcccgaaggaccgcgcacctggtgcatgacccgcaagcccggtgcctga

SEQ ID NO: 5131 - DNA, 1701 bp, synthetic construct
  source 1..1701: mol_type = other DNA
atggccttaccagtgaccgccttgctcctgccgctggccttgctgctccacgccgccaggccggacatccagatgacacagagccctagcagcctgtctgccagcgtgggagacagagtgaccatcacatgcaaggccagcgaccacatcaacaactggctggcctggtatcagcagaagcctggacaggcccctaagctgctgatctacggcgctaccacactggaaacaggcgtgcccagcagattttctggcagcggctctggcaccgactacaccctgacaatatccagcctccagcctgaggacttcgccacctactactgtcagcagagctggaacaccccttggacattcggccagggcaccaagctggaaatcaagagaggcggaggcggaagtggaggcggaggatctggcggcggaggctctcaagttcagcttcaacagcctggcgctgagctggtcaaacctggcgcttctgtgaagatgagctgcaaagccagcggctacgccttcaacagctactggatcaactggatgaagcagaaacccggccagggactcgaatggatcggccaaatctatcccggcgacggcgacaccaactacaacggcaagttcaagggcagagccacactgaccgccgatacctctagcagcacagcctacatgcagctgagcagcctgaccagcgaagatagcgccgtgtacttctgtgcccggtccatcacaacagtcgtgggctgcgctatggactattggggccagggaacaagcgtgaccgtgtctagtacgcgtgcaagaagtgaagatcgccacaggctcgagggaggcagctggagccaccctcagtttgaaaaagactacaaagacgatgacgataagggatcagattacaaggatgatgatgacaaggggtcagattataaagacgacgatgataaagggagcgactacaaggacgacgatgacaaggcctggtcccatccccagttcgagaaacaccatcaccaccaccatcatcacactagtggctccggcgagggcagaggaagtctactaacctgcggagatgtggaagaaaatcctggcccacatatgaccgagtacaagcccacggtgcgcctcgccacccgcgacgacgtccccagggccgtacgcaccctcgccgccgcgttcgccgactaccccgccacgcgccacaccgtcgatccggaccgccacatcgagcgggtcaccgagctgcaagaactcttcctcacgcgcgtcgggctcgacatcggcaaggtgtgggtcgcggacgacggcgccgcggtggcggtctggaccacgccggagagcgtcgaagcgggggcggtgttcgccgagatcggcccgcgcatggccgagttgagcggttcccggctggccgcgcagcaacagatggaaggcctcctggcgccgcaccggcccaaggagcccgcgtggttcctggccaccgtcggcgtctcgcccgaccaccagggcaagggtctgggcagcgccgtcgtgctccccggagtggaggcggccgagcgcgccggggtgcccgccttcctggagacctccgcgccccgcaacctccccttctacgagcggctcggcttcaccgtcaccgccgacgtcgaggtgcccgaaggaccgcgcacctggtgcatgacccgcaagcccggtgcctga

SEQ ID NO: 5132 - DNA, 1701 bp, synthetic construct; identical to SEQ ID NO: 5127
  source 1..1701: mol_type = other DNA

SEQ ID NO: 5133 - DNA, 1704 bp, synthetic construct
  source 1..1704: mol_type = other DNA
atggccttaccagtgaccgccttgctcctgccgctggccttgctgctccacgccgccaggccggacatccagatgacacagagccctagcagcctgtctgccagcgtgggagacagagtgaccatcacatgcaaggccagcgaccacatcaacaactggctggcctggtatcagcagaagcctggacaggcccctaagctgctgatctacggcgctaccacactggaaacaggcgtgcccagcagattttctggcagcggctctggcaccgactacaccctgacaatatccagcctccagcctgaggacttcgccacctactactgtcagcagagctggaacaccccttggacattcggccagggcaccaagctggaaatcaagagaggcggaggcggaagtggaggcggaggatctggcggcggaggctctcaagttcagcttcaacagcctggcgctgagctggtcaaacctggcgcttctgtgaagatgagctgcaaagccagcggctacgccttcaacagctactggatcaactggatgaagcagaaacccggccagggactcgaatggatcggccaaatctatcccggcgacggcgacaccaactacaacggcaagttcaagggcagagccacactgaccgccgatacctctagcagcacagcctacatgcagctgagcagcctgaccagcgaagatagcgccgtgtacttctgtgcccggtccatcacaacagtcgtgggctgcgctatggactattggggccagggaacaagcgtgaccgtgtctagtacgcgtgcaaagagtgaagatcgctacaggaacctcgagggaggcagctggagccaccctcagtttgaaaaagactacaaagacgatgacgataagggatcagattacaaggatgatgatgacaaggggtcagattataaagacgacgatgataaagggagcgactacaaggacgacgatgacaaggcctggtcccatccccagttcgagaaacaccatcaccaccaccatcatcacactagtggctccggcgagggcagaggaagtctactaacctgcggagatgtggaagaaaatcctggcccacatatgaccgagtacaagcccacggtgcgcctcgccacccgcgacgacgtccccagggccgtacgcaccctcgccgccgcgttcgccgactaccccgccacgcgccacaccgtcgatccggaccgccacatcgagcgggtcaccgagctgcaagaactcttcctcacgcgcgtcgggctcgacatcggcaaggtgtgggtcgcggacgacggcgccgcggtggcggtctggaccacgccggagagcgtcgaagcgggggcggtgttcgccgagatcggcccgcgcatggccgagttgagcggttcccggctggccgcgcagcaacagatggaaggcctcctggcgccgcaccggcccaaggagcccgcgtggttcctggccaccgtcggcgtctcgcccgaccaccagggcaagggtctgggcagcgccgtcgtgctccccggagtggaggcggccgagcgcgccggggtgcccgccttcctggagacctccgcgccccgcaacctccccttctacgagcggctcggcttcaccgtcaccgccgacgtcgaggtgcccgaaggaccgcgcacctggtgcatgacccgcaagcccggtgcctga

SEQ ID NO: 5134 - DNA, 1701 bp, synthetic construct; identical to SEQ ID NO: 5121
  source 1..1701: mol_type = other DNA

SEQ ID NO: 5135 - DNA, 1701 bp, synthetic construct
  source 1..1701: mol_type = other DNA
atggccttaccagtgaccgccttgctcctgccgctggccttgctgctccacgccgccaggccggacatccagatgacacagagccctagcagcctgtctgccagcgtgggagacagagtgaccatcacatgcaaggccagcgaccacatcaacaactggctggcctggtatcagcagaagcctggacaggcccctaagctgctgatctacggcgctaccacactggaaacaggcgtgcccagcagattttctggcagcggctctggcaccgactacaccctgacaatatccagcctccagcctgaggacttcgccacctactactgtcagcagagctggaacaccccttggacattcggccagggcaccaagctggaaatcaagagaggcggaggcggaagtggaggcggaggatctggcggcggaggctctcaagttcagcttcaacagcctggcgctgagctggtcaaacctggcgcttctgtgaagatgagctgcaaagccagcggctacgccttcaacagctactggatcaactggatgaagcagaaacccggccagggactcgaatggatcggccaaatctatcccggcgacggcgacaccaactacaacggcaagttcaagggcagagccacactgaccgccgatacctctagcagcacagcctacatgcagctgagcagcctgaccagcgaagatagcgccgtgtacttctgtgcccggtccatcacaacagtcgtgggctgcgctatggactattggggccagggaacaagcgtgaccgtgtctagtacgcgtgcaagaagtgaagatcgctacccactcgagggaggcagctggagccaccctcagtttgaaaaagactacaaagacgatgacgataagggatcagattacaaggatgatgatgacaaggggtcagattataaagacgacgatgataaagggagcgactacaaggacgacgatgacaaggcctggtcccatccccagttcgagaaacaccatcaccaccaccatcatcacactagtggctccggcgagggcagaggaagtctactaacctgcggagatgtggaagaaaatcctggcccacatatgaccgagtacaagcccacggtgcgcctcgccacccgcgacgacgtccccagggccgtacgcaccctcgccgccgcgttcgccgactaccccgccacgcgccacaccgtcgatccggaccgccacatcgagcgggtcaccgagctgcaagaactcttcctcacgcgcgtcgggctcgacatcggcaaggtgtgggtcgcggacgacggcgccgcggtggcggtctggaccacgccggagagcgtcgaagcgggggcggtgttcgccgagatcggcccgcgcatggccgagttgagcggttcccggctggccgcgcagcaacagatggaaggcctcctggcgccgcaccggcccaaggagcccgcgtggttcctggccaccgtcggcgtctcgcccgaccaccagggcaagggtctgggcagcgccgtcgtgctccccggagtggaggcggccgagcgcgccggggtgcccgccttcctggagacctccgcgccccgcaacctccccttctacgagcggctcggcttcaccgtcaccgccgacgtcgaggtgcccgaaggaccgcgcacctggtgcatgacccgcaagcccggtgcctga

SEQ ID NO: 5136 - DNA, 1701 bp, synthetic construct
  source 1..1701: mol_type = other DNA
atggccttaccagtgaccgccttgctcctgccgctggccttgctgctccacgccgccaggccggacatccagatgacacagagccctagcagcctgtctgccagcgtgggagacagagtgaccatcacatgcaaggccagcgaccacatcaacaactggctggcctggtatcagcagaagcctggacaggcccctaagctgctgatctacggcgctaccacactggaaacaggcgtgcccagcagattttctggcagcggctctggcaccgactacaccctgacaatatccagcctccagcctgaggacttcgccacctactactgtcagcagagctggaacaccccttggacattcggccagggcaccaagctggaaatcaagagaggcggaggcggaagtggaggcggaggatctggcggcggaggctctcaagttcagcttcaacagcctggcgctgagctggtcaaacctggcgcttctgtgaagatgagctgcaaagccagcggctacgccttcaacagctactggatcaactggatgaagcagaaacccggccagggactcgaatggatcggccaaatctatcccggcgacggcgacaccaactacaacggcaagttcaagggcagagccacactgaccgccgatacctctagcagcacagcctacatgcagctgagcagcctgaccagcgaagatagcgccgtgtacttctgtgcccggtccatcacaacagtcgtgggctgcgctatggactattggggccagggaacaagcgtgaccgtgtctagtacgcgtgcaagaagtgaagatcgctacaacctcgagggaggcagctggagccaccctcagtttgaaaaagactacaaagacgatgacgataagggatcagattacaaggatgatgatgacaaggggtcagattataaagacgacgatgataaagggagcgactacaaggacgacgatgacaaggcctggtcccatccccagttcgagaaacaccatcaccaccaccatcatcacactagtggctccggcgagggcagaggaagtctactaacctgcggagatgtggaagaaaatcctggcccacatatgaccgagtacaagcccacggtgcgcctcgccacccgcgacgacgtccccagggccgtacgcaccctcgccgccgcgttcgccgactaccccgccacgcgccacaccgtcgatccggaccgccacatcgagcgggtcaccgagctgcaagaactcttcctcacgcgcgtcgggctcgacatcggcaaggtgtgggtcgcggacgacggcgccgcggtggcggtctggaccacgccggagagcgtcgaagcgggggcggtgttcgccgagatcggcccgcgcatggccgagttgagcggttcccggctggccgcgcagcaacagatggaaggcctcctggcgccgcaccggcccaaggagcccgcgtggttcctggccaccgtcggcgtctcgcccgaccaccagggcaagggtctgggcagcgccgtcgtgctccccggagtggaggcggccgagcgcgccggggtgcccgccttcctggagacctccgcgccccgcaacctccccttctacgagcggctcggcttcaccgtcaccgccgacgtcgaggtgcccgaaggaccgcgcacctggtgcatgacccgcaagcccggtgcctga

SEQ ID NO: 5137 - DNA, 1701 bp, synthetic construct; identical to SEQ ID NO: 5122
  source 1..1701: mol_type = other DNA

SEQ ID NO: 5138 - DNA, 1701 bp, synthetic construct
  source 1..1701: mol_type = other DNA
atggccttaccagtgaccgccttgctcctgccgctggccttgctgctccacgccgccaggccggacatccagatgacacagagccctagcagcctgtctgccagcgtgggagacagagtgaccatcacatgcaaggccagcgaccacatcaacaactggctggcctggtatcagcagaagcctggacaggcccctaagctgctgatctacggcgctaccacactggaaacaggcgtgcccagcagattttctggcagcggctctggcaccgactacaccctgacaatatccagcctccagcctgaggacttcgccacctactactgtcagcagagctggaacaccccttggacattcggccagggcaccaagctggaaatcaagagaggcggaggcggaagtggaggcggaggatctggcggcggaggctctcaagttcagcttcaacagcctggcgctgagctggtcaaacctggcgcttctgtgaagatgagctgcaaagccagcggctacgccttcaacagctactggatcaactggatgaagcagaaacccggccagggactcgaatggatcggccaaatctatcccggcgacggcgacaccaactacaacggcaagttcaagggcagagccacactgaccgccgatacctctagcagcacagcctacatgcagctgagcagcctgaccagcgaagatagcgccgtgtacttctgtgcccggtccatcacaacagtcgtgggctgcgctatggactattggggccagggaacaagcgtgaccgtgtctagtacgcgtgcaagaagtgaagatcgctacacactcgagggaggcagctggagccaccctcagtttgaaaaagactacaaagacgatgacgataagggatcagattacaaggatgatgatgacaaggggtcagattataaagacgacgatgataaagggagcgactacaaggacgacgatgacaaggcctggtcccatccccagttcgagaaacaccatcaccaccaccatcatcacactagtggctccggcgagggcagaggaagtctactaacctgcggagatgtggaagaaaatcctggcccacatatgaccgagtacaagcccacggtgcgcctcgccacccgcgacgacgtccccagggccgtacgcaccctcgccgccgcgttcgccgactaccccgccacgcgccacaccgtcgatccggaccgccacatcgagcgggtcaccgagctgcaagaactcttcctcacgcgcgtcgggctcgacatcggcaaggtgtgggtcgcggacgacggcgccgcggtggcggtctggaccacgccggagagcgtcgaagcgggggcggtgttcgccgagatcggcccgcgcatggccgagttgagcggttcccggctggccgcgcagcaacagatggaaggcctcctggcgccgcaccggcccaaggagcccgcgtggttcctggccaccgtcggcgtctcgcccgaccaccagggcaagggtctgggcagcgccgtcgtgctccccggagtggaggcggccgagcgcgccggggtgcccgccttcctggagacctccgcgccccgcaacctccccttctacgagcggctcggcttcaccgtcaccgccgacgtcgaggtgcccgaaggaccgcgcacctggtgcatgacccgcaagcccggtgcctga

SEQ ID NO: 5139 - DNA, 1701 bp, synthetic construct
  source 1..1701: mol_type = other DNA
atggccttaccagtgaccgccttgctcctgccgctggccttgctgctccacgccgccaggccggacatccagatgacacagagccctagcagcctgtctgccagcgtgggagacagagtgaccatcacatgcaaggccagcgaccacatcaacaactggctggcctggtatcagcagaagcctggacaggcccctaagctgctgatctacggcgctaccacactggaaacaggcgtgcccagcagattttctggcagcggctctggcaccgactacaccctgacaatatccagcctccagcctgaggacttcgccacctactactgtcagcagagctggaacaccccttggacattcggccagggcaccaagctggaaatcaagagaggcggaggcggaagtggaggcggaggatctggcggcggaggctctcaagttcagcttcaacagcctggcgctgagctggtcaaacctggcgcttctgtgaagatgagctgcaaagccagcggctacgccttcaacagctactggatcaactggatgaagcagaaacccggccagggactcgaatggatcggccaaatctatcccggcgacggcgacaccaactacaacggcaagttcaagggcagagccacactgaccgccgatacctctagcagcacagcctacatgcagctgagcagcctgaccagcgaagatagcgccgtgtacttctgtgcccggtccatcacaacagtcgtgggctgcgctatggactattggggccagggaacaagcgtgaccgtgtctagtacgcgtgcaagaagtgaagatcgctacgatctcgagggaggcagctggagccaccctcagtttgaaaaagactacaaagacgatgacgataagggatcagattacaaggatgatgatgacaaggggtcagattataaagacgacgatgataaagggagcgactacaaggacgacgatgacaaggcctggtcccatccccagttcgagaaacaccatcaccaccaccatcatcacactagtggctccggcgagggcagaggaagtctactaacctgcggagatgtggaagaaaatcctggcccacatatgaccgagtacaagcccacggtgcgcctcgccacccgcgacgacgtccccagggccgtacgcaccctcgccgccgcgttcgccgactaccccgccacgcgccacaccgtcgatccggaccgccacatcgagcgggtcaccgagctgcaagaactcttcctcacgcgcgtcgggctcgacatcggcaaggtgtgggtcgcggacgacggcgccgcggtggcggtctggaccacgccggagagcgtcgaagcgggggcggtgttcgccgagatcggcccgcgcatggccgagttgagcggttcccggctggccgcgcagcaacagatggaaggcctcctggcgccgcaccggcccaaggagcccgcgtggttcctggccaccgtcggcgtctcgcccgaccaccagggcaagggtctgggcagcgccgtcgtgctccccggagtggaggcggccgagcgcgccggggtgcccgccttcctggagacctccgcgccccgcaacctccccttctacgagcggctcggcttcaccgtcaccgccgacgtcgaggtgcccgaaggaccgcgcacctggtgcatgacccgcaagcccggtgcctga

SEQ ID NO: 5140 - DNA, 1701 bp, synthetic construct
  source 1..1701: mol_type = other DNA
atggccttaccagtgaccgccttgctcctgccgctggccttgctgctccacgccgccaggccggacatccagatgacacagagccctagcagcctgtctgccagcgtgggagacagagtgaccatcacatgcaaggccagcgaccacatcaacaactggctggcctggtatcagcagaagcctggacaggcccctaagctgctgatctacggcgctaccacactggaaacaggcgtgcccagcagattttctggcagcggctctggcaccgactacaccctgacaatatccagcctccagcctgaggacttcgccacctactactgtcagcagagctggaacaccccttggacattcggccagggcaccaagctggaaatcaagagaggcggaggcggaagtggaggcggaggatctggcggcggaggctctcaagttcagcttcaacagcctggcgctgagctggtcaaacctggcgcttctgtgaagatgagctgcaaagccagcggctacgccttcaacagctactggatcaactggatgaagcagaaacccggccagggactcgaatggatcggccaaatctatcccggcgacggcgacaccaactacaacggcaagttcaagggcagagccacactgaccgccgatacctctagcagcacagcctacatgcagctgagcagcctgaccagcgaagatagcgccgtgtacttctgtgcccggtccatcacaacagtcgtgggctgcgctatggactattggggccagggaacaagcgtgaccgtgtctagtacgcgtgcaagaagtgaagatcgctaccggctcgagggaggcagctggagccaccctcagtttgaaaaagactacaaagacgatgacgataagggatcagattacaaggatgatgatgacaaggggtcagattataaagacgacgatgataaagggagcgactacaaggacgacgatgacaaggcctggtcccatccccagttcgagaaacaccatcaccaccaccatcatcacactagtggctccggcgagggcagaggaagtctactaacctgcggagatgtggaagaaaatcctggcccacatatgaccgagtacaagcccacggtgcgcctcgccacccgcgacgacgtccccagggccgtacgcaccctcgccgccgcgttcgccgactaccccgccacgcgccacaccgtcgatccggaccgccacatcgagcgggtcaccgagctgcaagaactcttcctcacgcgcgtcgggctcgacatcggcaaggtgtgggtcgcggacgacggcgccgcggtggcggtctggaccacgccggagagcgtcgaagcgggggcggtgttcgccgagatcggcccgcgcatggccgagttgagcggttcccggctggccgcgcagcaacagatggaaggcctcctggcgccgcaccggcccaaggagcccgcgtggttcctggccaccgtcggcgtctcgcccgaccaccagggcaagggtctgggcagcgccgtcgtgctccccggagtggaggcggccgagcgcgccggggtgcccgccttcctggagacctccgcgccccgcaacctccccttctacgagcggctcggcttcaccgtcaccgccgacgtcgaggtgcccgaaggaccgcgcacctggtgcatgacccgcaagcccggtgcctga

SEQ ID NO: 5141 - DNA, 822 bp, synthetic construct
  source 1..822: mol_type = other DNA
atggccttaccagtgaccgccttgctcctgccgctggccttgctgctccacgccgccaggccggacatccagatgacacagagccctagcagcctgtctgccagcgtgggagacagagtgaccatcacatgcaaggccagcgaccacatcaacaactggctggcctggtatcagcagaagcctggacaggcccctaagctgctgatctacggcgctaccacactggaaacaggcgtgcccagcagattttctggcagcggctctggcaccgactacaccctgacaatatccagcctccagcctgaggacttcgccacctactactgtcagcagagctggaacaccccttggacattcggccagggcaccaagctggaaatcaagagaggcggaggcggaagtggaggcggaggatctggcggcggaggctctcaagttcagcttcaacagcctggcgctgagctggtcaaacctggcgcttctgtgaagatgagctgcaaagccagcggctacgccttcaacagctactggatcaactggatgaagcagaaacccggccagggactcgaatggatcggccaaatctatcccggcgacggcgacaccaactacaacggcaagttcaagggcagagccacactgaccgccgatacctctagcagcacagcctacatgcagctgagcagcctgaccagcgaagatagcgccgtgtacttctgtgcccggtccatcacaacagtcgtgggctgcgctatggactattggggccagggaacaagcgtgaccgtgtctagtacgcgtgcaagaagtgaagatcgctga

SEQ ID NO: 5142 - DNA, 1701 bp, synthetic construct
  source 1..1701: mol_type = other DNA
atggccttaccagtgaccgccttgctcctgccgctggccttgctgctccacgccgccaggccggacatccagatgacacagagccctagcagcctgtctgccagcgtgggagacagagtgaccatcacatgcaaggccagcgaccacatcaacaactggctggcctggtatcagcagaagcctggacaggcccctaagctgctgatctacggcgctaccacactggaaacaggcgtgcccagcagattttctggcagcggctctggcaccgactacaccctgacaatatccagcctccagcctgaggacttcgccacctactactgtcagcagagctggaacaccccttggacattcggccagggcaccaagctggaaatcaagagaggcggaggcggaagtggaggcggaggatctggcggcggaggctctcaagttcagcttcaacagcctggcgctgagctggtcaaacctggcgcttctgtgaagatgagctgcaaagccagcggctacgccttcaacagctactggatcaactggatgaagcagaaacccggccagggactcgaatggatcggccaaatctatcccggcgacggcgacaccaactacaacggcaagttcaagggcagagccacactgaccgccgatacctctagcagcacagcctacatgcagctgagcagcctgaccagcgaagatagcgccgtgtacttctgtgcccggtccatcacaacagtcgtgggctgcgctatggactattggggccagggaacaagcgtgaccgtgtctagtacgcgtgcaagaagtgaagatcgccgtaggctcgagggaggcagctggagccaccctcagtttgaaaaagactacaaagacgatgacgataagggatcagattacaaggatgatgatgacaaggggtcagattataaagacgacgatgataaagggagcgactacaaggacgacgatgacaaggcctggtcccatccccagttcgagaaacaccatcaccaccaccatcatcacactagtggctccggcgagggcagaggaagtctactaacctgcggagatgtggaagaaaatcctggcccacatatgaccgagtacaagcccacggtgcgcctcgccacccgcgacgacgtccccagggccgtacgcaccctcgccgccgcgttcgccgactaccccgccacgcgccacaccgtcgatccggaccgccacatcgagcgggtcaccgagctgcaagaactcttcctcacgcgcgtcgggctcgacatcggcaaggtgtgggtcgcggacgacggcgccgcggtggcggtctggaccacgccggagagcgtcgaagcgggggcggtgttcgccgagatcggcccgcgcatggccgagttgagcggttcccggctggccgcgcagcaacagatggaaggcctcctggcgccgcaccggcccaaggagcccgcgtggttcctggccaccgtcggcgtctcgcccgaccaccagggcaagggtctgggcagcgccgtcgtgctccccggagtggaggcggccgagcgcgccggggtgcccgccttcctggagacctccgcgccccgcaacctccccttctacgagcggctcggcttcaccgtcaccgccgacgtcgaggtgcccgaaggaccgcgcacctggtgcatgacccgcaagcccggtgcctga

SEQ ID NO: 5143 - DNA, 1701 bp, synthetic construct
  source 1..1701: mol_type = other DNA
atggccttaccagtgaccgccttgctcctgccgctggccttgctgctccacgccgccaggccggacatccagatgacacagagccctagcagcctgtctgccagcgtgggagacagagtgaccatcacatgcaaggccagcgaccacatcaacaactggctggcctggtatcagcagaagcctggacaggcccctaagctgctgatctacggcgctaccacactggaaacaggcgtgcccagcagattttctggcagcggctctggcaccgactacaccctgacaatatccagcctccagcctgaggacttcgccacctactactgtcagcagagctggaacaccccttggacattcggccagggcaccaagctggaaatcaagagaggcggaggcggaagtggaggcggaggatctggcggcggaggctctcaagttcagcttcaacagcctggcgctgagctggtcaaacctggcgcttctgtgaagatgagctgcaaagccagcggctacgccttcaacagctactggatcaactggatgaagcagaaacccggccagggactcgaatggatcggccaaatctatcccggcgacggcgacaccaactacaacggcaagttcaagggcagagccacactgaccgccgatacctctagcagcacagcctacatgcagctgagcagcctgaccagcgaagatagcgccgtgtacttctgtgcccggtccatcacaacagtcgtgggctgcgctatggactattggggccagggaacaagcgtgaccgtgtctagtacgcgtgcaagaagtgaagatcgcgacaggctcgagggaggcagctggagccaccctcagtttgaaaaagactacaaagacgatgacgataagggatcagattacaaggatgatgatgacaaggggtcagattataaagacgacgatgataaagggagcgactacaaggacgacgatgacaaggcctggtcccatccccagttcgagaaacaccatcaccaccaccatcatcacactagtggctccggcgagggcagaggaagtctactaacctgcggagatgtggaagaaaatcctggcccacatatgaccgagtacaagcccacggtgcgcctcgccacccgcgacgacgtccccagggccgtacgcaccctcgccgccgcgttcgccgactaccccgccacgcgccacaccgtcgatccggaccgccacatcgagcgggtcaccgagctgcaagaactcttcctcacgcgcgtcgggctcgacatcggcaaggtgtgggtcgcggacgacggcgccgcggtggcggtctggaccacgccggagagcgtcgaagcgggggcggtgttcgccgagatcggcccgcgcatggccgagttgagcggttcccggctggccgcgcagcaacagatggaaggcctcctggcgccgcaccggcccaaggagcccgcgtggttcctggccaccgtcggcgtctcgcccgaccaccagggcaagggtctgggcagcgccgtcgtgctccccggagtggaggcggccgagcgcgccggggtgcccgccttcctggagacctccgcgccccgcaacctccccttctacgagcggctcggcttcaccgtcaccgccgacgtcgaggtgcccgaaggaccgcgcacctggtgcatgacccgcaagcccggtgcctga

SEQ ID NO: 5144 - DNA, 1701 bp, synthetic construct
  source 1..1701: mol_type = other DNA
atggccttaccagtgaccgccttgctcctgccgctggccttgctgctccacgccgccaggccggacatccagatgacacagagccctagcagcctgtctgccagcgtgggagacagagtgaccatcacatgcaaggccagcgaccacatcaacaactggctggcctggtatcagcagaagcctggacaggcccctaagctgctgatctacggcgctaccacactggaaacaggcgtgcccagcagattttctggcagcggctctggcaccgactacaccctgacaatatccagcctccagcctgaggacttcgccacctactactgtcagcagagctggaacaccccttggacattcggccagggcaccaagctggaaatcaagagaggcggaggcggaagtggaggcggaggatctggcggcggaggctctcaagttcagcttcaacagcctggcgctgagctggtcaaacctggcgcttctgtgaagatgagctgcaaagccagcggctacgccttcaacagctactggatcaactggatgaagcagaaacccggccagggactcgaatggatcggccaaatctatcccggcgacggcgacaccaactacaacggcaagttcaagggcagagccacactgaccgccgatacctctagcagcacagcctacatgcagctgagcagcctgaccagcgaagatagcgccgtgtacttctgtgcccggtccatcacaacagtcgtgggctgcgctatggactattggggccagggaacaagcgtgaccgtgtctagtacgcgtgcaagaagtgaagatcgcaacaggctcgagggaggcagctggagccaccctcagtttgaaaaagactacaaagacgatgacgataagggatcagattacaaggatgatgatgacaaggggtcagattataaagacgacgatgataaagggagcgactacaaggacgacgatgacaaggcctggtcccatccccagttcgagaaacaccatcaccaccaccatcatcacactagtggctccggcgagggcagaggaagtctactaacctgcggagatgtggaagaaaatcctggcccacatatgaccgagtacaagcccacggtgcgcctcgccacccgcgacgacgtccccagggccgtacgcaccctcgccgccgcgttcgccgactaccccgccacgcgccacaccgtcgatccggaccgccacatcgagcgggtcaccgagctgcaagaactcttcctcacgcgcgtcgggctcgacatcggcaaggtgtgggtcgcggacgacggcgccgcggtggcggtctggaccacgccggagagcgtcgaagcgggggcggtgttcgccgagatcggcccgcgcatggccgagttgagcggttcccggctggccgcgcagcaacagatggaaggcctcctggcgccgcaccggcccaaggagcccgcgtggttcctggccaccgtcggcgtctcgcccgaccaccagggcaagggtctgggcagcgccgtcgtgctccccggagtggaggcggccgagcgcgccggggtgcccgccttcctggagacctccgcgccccgcaacctccccttctacgagcggctcggcttcaccgtcaccgccgacgtcgaggtgcccgaaggaccgcgcacctggtgcatgacccgcaagcccggtgcctga

SEQ ID NO: 5145 - DNA, 1701 bp, synthetic construct
  source 1..1701: mol_type = other DNA
atggccttaccagtgaccgccttgctcctgccgctggccttgctgctccacgccgccaggccggacatccagatgacacagagccctagcagcctgtctgccagcgtgggagacagagtgaccatcacatgcaaggccagcgaccacatcaacaactggctggcctggtatcagcagaagcctggacaggcccctaagctgctgatctacggcgctaccacactggaaacaggcgtgcccagcagattttctggcagcggctctggcaccgactacaccctgacaatatccagcctccagcctgaggacttcgccacctactactgtcagcagagctggaacaccccttggacattcggccagggcaccaagctggaaatcaagagaggcggaggcggaagtggaggcggaggatctggcggcggaggctctcaagttcagcttcaacagcctggcgctgagctggtcaaacctggcgcttctgtgaagatgagctgcaaagccagcggctacgccttcaacagctactggatcaactggatgaagcagaaacccggccagggactcgaatggatcggccaaatctatcccggcgacggcgacaccaactacaacggcaagttcaagggcagagccacactgaccgccgatacctctagcagcacagcctacatgcagctgagcagcctgaccagcgaagatagcgccgtgtacttctgtgcccggtccatcacaacagtcgtgggctgcgctatggactattggggccagggaacaagcgtgaccgtgtctagtacgcgtgcaagaagtgaagatcgccttaggctcgagggaggcagctggagccaccctcagtttgaaaaagactacaaagacgatgacgataagggatcagattacaaggatgatgatgacaaggggtcagattataaagacgacgatgataaagggagcgactacaaggacgacgatgacaaggcctggtcccatccccagttcgagaaacaccatcaccaccaccatcatcacactagtggctccggcgagggcagaggaagtctactaacctgcggagatgtggaagaaaatcctggcccacatatgaccgagtacaagcccacggtgcgcctcgccacccgcgacgacgtccccagggccgtacgcaccctcgccgccgcgttcgccgactaccccgccacgcgccacaccgtcgatccggaccgccacatcgagcgggtcaccgagctgcaagaactcttcctcacgcgcgtcgggctcgacatcggcaaggtgtgggtcgcggacgacggcgccgcggtggcggtctggaccacgccggagagcgtcgaagcgggggcggtgttcgccgagatcggcccgcgcatggccgagttgagcggttcccggctggccgcgcagcaacagatggaaggcctcctggcgccgcaccggcccaaggagcccgcgtggttcctggccaccgtcggcgtctcgcccgaccaccagggcaagggtctgggcagcgccgtcgtgctccccggagtggaggcggccgagcgcgccggggtgcccgccttcctggagacctccgcgccccgcaacctccccttctacgagcggctcggcttcaccgtcaccgccgacgtcgaggtgcccgaaggaccgcgcacctggtgcatgacccgcaagcccggtgcctga

SEQ ID NO: 5146 - DNA, 1701 bp, synthetic construct
  source 1..1701: mol_type = other DNA
atggccttaccagtgaccgccttgctcctgccgctggccttgctgctccacgccgccaggccggacatccagatgacacagagccctagcagcctgtctgccagcgtgggagacagagtgaccatcacatgcaaggccagcgaccacatcaacaactggctggcctggtatcagcagaagcctggacaggcccctaagctgctgatctacggcgctaccacactggaaacaggcgtgcccagcagattttctggcagcggctctggcaccgactacaccctgacaatatccagcctccagcctgaggacttcgccacctactactgtcagcagagctggaacaccccttggacattcggccagggcaccaagctggaaatcaagagaggcggaggcggaagtggaggcggaggatctggcggcggaggctctcaagttcagcttcaacagcctggcgctgagctggtcaaacctggcgcttctgtgaagatgagctgcaaagccagcggctacgccttcaacagctactggatcaactggatgaagcagaaacccggccagggactcgaatggatcggccaaatctatcccggcgacggcgacaccaactacaacggcaagttcaagggcagagccacactgaccgccgatacctctagcagcacagcctacatgcagctgagcagcctgaccagcgaagatagcgccgtgtacttctgtgcccggtccatcacaacagtcgtgggctgcgctatggactattggggccagggaacaagcgtgaccgtgtctagtacgcgtgcaagaagtgaagatcgctcgaggctcgagggaggcagctggagccaccctcagtttgaaaaagactacaaagacgatgacgataagggatcagattacaaggatgatgatgacaaggggtcagattataaagacgacgatgataaagggagcgactacaaggacgacgatgacaaggcctggtcccatccccagttcgagaaacaccatcaccaccaccatcatcacactagtggctccggcgagggcagaggaagtctactaacctgcggagatgtggaagaaaatcctggcccacatatgaccgagtacaagcccacggtgcgcctcgccacccgcgacgacgtccccagggccgtacgcaccctcgccgccgcgttcgccgactaccccgccacgcgccacaccgtcgatccggaccgccacatcgagcgggtcaccgagctgcaagaactcttcctcacgcgcgtcgggctcgacatcggcaaggtgtgggtcgcggacgacggcgccgcggtggcggtctggaccacgccggagagcgtcgaagcgggggcggtgttcgccgagatcggcccgcgcatggccgagttgagcggttcccggctggccgcgcagcaacagatggaaggcctcctggcgccgcaccggcccaaggagcccgcgtggttcctggccaccgtcggcgtctcgcccgaccaccagggcaagggtctgggcagcgccgtcgtgctccccggagtggaggcggccgagcgcgccggggtgcccgccttcctggagacctccgcgccccgcaacctccccttctacgagcggctcggcttcaccgtcaccgccgacgtcgaggtgcccgaaggaccgcgcacctggtgcatgacccgcaagcccggtgcctga

SEQ ID NO: 5147 - DNA, 1701 bp, synthetic construct
  source 1..1701: mol_type = other DNA
atggccttaccagtgaccgccttgctcctgccgctggccttgctgctccacgccgccaggccggacatccagatgacacagagccctagcagcctgtctgccagcgtgggagacagagtgaccatcacatgcaaggccagcgaccacatcaacaactggctggcctggtatcagcagaagcctggacaggcccctaagctgctgatctacggcgctaccacactggaaacaggcgtgcccagcagattttctggcagcggctctggcaccgactacaccctgacaatatccagcctccagcctgaggacttcgccacctactactgtcagcagagctggaacaccccttggacattcggccagggcaccaagctggaaatcaagagaggcggaggcggaagtggaggcggaggatctggcggcggaggctctcaagttcagcttcaacagcctggcgctgagctggtcaaacctggcgcttctgtgaagatgagctgcaaagccagcggctacgccttcaacagctactggatcaactggatgaagcagaaacccggccagggactcgaatggatcggccaaatctatcccggcgacggcgacaccaactacaacggcaagttcaagggcagagccacactgaccgccgatacctctagcagcacagcctacatgcagctgagcagcctgaccagcgaagatagcgccgtgtacttctgtgcccggtccatcacaacagtcgtgggctgcgctatggactattggggccagggaacaagcgtgaccgtgtctagtacgcgtgcaagaagtgaagatcgcgccaggctcgagggaggcagctggagccaccctcagtttgaaaaagactacaaagacgatgacgataagggatcagattacaaggatgatgatgacaaggggtcagattataaagacgacgatgataaagggagcgactacaaggacgacgatgacaaggcctggtcccatccccagttcgagaaacaccatcaccaccaccatcatcacactagtggctccggcgagggcagaggaagtctactaacctgcggagatgtggaagaaaatcctggcccacatatgaccgagtacaagcccacggtgcgcctcgccacccgcgacgacgtccccagggccgtacgcaccctcgccgccgcgttcgccgactaccccgccacgcgccacaccgtcgatccggaccgccacatcgagcgggtcaccgagctgcaagaactcttcctcacgcgcgtcgggctcgacatcggcaaggtgtgggtcgcggacgacggcgccgcggtggcggtctggaccacgccggagagcgtcgaagcgggggcggtgttcgccgagatcggcccgcgcatggccgagttgagcggttcccggctggccgcgcagcaacagatggaaggcctcctggcgccgcaccggcccaaggagcccgcgtggttcctggccaccgtcggcgtctcgcccgaccaccagggcaagggtctgggcagcgccgtcgtgctccccggagtggaggcggccgagcgcgccggggtgcccgccttcctggagacctccgcgccccgcaacctccccttctacgagcggctcggcttcaccgtcaccgccgacgtcgaggtgcccgaaggaccgcgcacctggtgcatgacccgcaagcccggtgcctga

SEQ ID NO: 5148 - DNA, 1701 bp, synthetic construct
  source 1..1701: mol_type = other DNA
atggccttaccagtgaccgccttgctcctgccgctggccttgctgctccacgccgccaggccggacatccagatgacacagagccctagcagcctgtctgccagcgtgggagacagagtgaccatcacatgcaaggccagcgaccacatcaacaactggctggcctggtatcagcagaagcctggacaggcccctaagctgctgatctacggcgctaccacactggaaacaggcgtgcccagcagattttctggcagcggctctggcaccgactacaccctgacaatatccagcctccagcctgaggacttcgccacctactactgtcagcagagctggaacaccccttggacattcggccagggcaccaagctggaaatcaagagaggcggaggcggaagtggaggcggaggatctggcggcggaggctctcaagttcagcttcaacagcctggcgctgagctggtcaaacctggcgcttctgtgaagatgagctgcaaagccagcggctacgccttcaacagctactggatcaactggatgaagcagaaacccggccagggactcgaatggatcggccaaatctatcccggcgacggcgacaccaactacaacggcaagttcaagggcagagccacactgaccgccgatacctctagcagcacagcctacatgcagctgagcagcctgaccagcgaagatagcgccgtgtacttctgtgcccggtccatcacaacagtcgtgggctgcgctatggactattggggccagggaacaagcgtgaccgtgtctagtacgcgtgcaagaagtgaagatcgcgggaggctcgagggaggcagctggagccaccctcagtttgaaaaagactacaaagacgatgacgataagggatcagattacaaggatgatgatgacaaggggtcagattataaagacgacgatgataaagggagcgactacaaggacgacgatgacaaggcctggtcccatccccagttcgagaaacaccatcaccaccaccatcatcacactagtggctccggcgagggcagaggaagtctactaacctgcggagatgtggaagaaaatcctggcccacatatgaccgagtacaagcccacggtgcgcctcgccacccgcgacgacgtccccagggccgtacgcaccctcgccgccgcgttcgccgactaccccgccacgcgccacaccgtcgatccggaccgccacatcgagcgggtcaccgagctgcaagaactcttcctcacgcgcgtcgggctcgacatcggcaaggtgtgggtcgcggacgacggcgccgcggtggcggtctggaccacgccggagagcgtcgaagcgggggcggtgttcgccgagatcggcccgcgcatggccgagttgagcggttcccggctggccgcgcagcaacagatggaaggcctcctggcgccgcaccggcccaaggagcccgcgtggttcctggccaccgtcggcgtctcgcccgaccaccagggcaagggtctgggcagcgccgtcgtgctccccggagtggaggcggccgagcgcgccggggtgcccgccttcctggagacctccgcgccccgcaacctccccttctacgagcggctcggcttcaccgtcaccgccgacgtcgaggtgcccgaaggaccgcgcacctggtgcatgacccgcaagcccggtgcctga

SEQ ID NO: 5149 - DNA, 1701 bp, synthetic construct
  source 1..1701: mol_type = other DNA
atggccttaccagtgaccgccttgctcctgccgctggccttgctgctccacgccgccaggccggacatccagatgacacagagccctagcagcctgtctgccagcgtgggagacagagtgaccatcacatgcaaggccagcgaccacatcaacaactggctggcctggtatcagcagaagcctggacaggcccctaagctgctgatctacggcgctaccacactggaaacaggcgtgcccagcagattttctggcagcggctctggcaccgactacaccctgacaatatccagcctccagcctgaggacttcgccacctactactgtcagcagagctggaacaccccttggacattcggccagggcaccaagctggaaatcaagagaggcggaggcggaagtggaggcggaggatctggcggcggaggctctcaagttcagcttcaacagcctggcgctgagctggtcaaacctggcgcttctgtgaagatgagctgcaaagccagcggctacgccttcaacagctactggatcaactggatgaagcagaaacccggccagggactcgaatggatcggccaaatctatcccggcgacggcgacaccaactacaacggcaagttcaagggcagagccacactgaccgccgatacctctagcagcacagcctacatgcagctgagcagcctgaccagcgaagatagcgccgtgtacttctgtgcccggtccatcacaacagtcgtgggctgcgctatggactattggggccagggaacaagcgtgaccgtgtctagtacgcgtgcaagaagtgaagatcgcaaaaggctcgagggaggcagctggagccaccctcagtttgaaaaagactacaaagacgatgacgataagggatcagattacaaggatgatgatgacaaggggtcagattataaagacgacgatgataaagggagcgactacaaggacgacgatgacaaggcctggtcccatccccagttcgagaaacaccatcaccaccaccatcatcacactagtggctccggcgagggcagaggaagtctactaacctgcggagatgtggaagaaaatcctggcccacatatgaccgagtacaagcccacggtgcgcctcgccacccgcgacgacgtccccagggccgtacgcaccctcgccgccgcgttcgccgactaccccgccacgcgccacaccgtcgatccggaccgccacatcgagcgggtcaccgagctgcaagaactcttcctcacgcgcgtcgggctcgacatcggcaaggtgtgggtcgcggacgacggcgccgcggtggcggtctggaccacgccggagagcgtcgaagcgggggcggtgttcgccgagatcggcccgcgcatggccgagttgagcggttcccggctggccgcgcagcaacagatggaaggcctcctggcgccgcaccggcccaaggagcccgcgtggttcctggccaccgtcggcgtctcgcccgaccaccagggcaagggtctgggcagcgccgtcgtgctccccggagtggaggcggccgagcgcgccggggtgcccgccttcctggagacctccgcgccccgcaacctccccttctacgagcggctcggcttcaccgtcaccgccgacgtcgaggtgcccgaaggaccgcgcacctggtgcatgacccgcaagcccggtgcctga

SEQ ID NO: 5150 - DNA, 1704 bp, synthetic construct
  source 1..1704: mol_type = other DNA
atggccttaccagtgaccgccttgctcctgccgctggccttgctgctccacgccgccaggccggacatccagatgacacagagccctagcagcctgtctgccagcgtgggagacagagtgaccatcacatgcaaggccagcgaccacatcaacaactggctggcctggtatcagcagaagcctggacaggcccctaagctgctgatctacggcgctaccacactggaaacaggcgtgcccagcagattttctggcagcggctctggcaccgactacaccctgacaatatccagcctccagcctgaggacttcgccacctactactgtcagcagagctggaacaccccttggacattcggccagggcaccaagctggaaatcaagagaggcggaggcggaagtggaggcggaggatctggcggcggaggctctcaagttcagcttcaacagcctggcgctgagctggtcaaacctggcgcttctgtgaagatgagctgcaaagccagcggctacgccttcaacagctactggatcaactggatgaagcagaaacccggccagggactcgaatggatcggccaaatctatcccggcgacggcgacaccaactacaacggcaagttcaagggcagagccacactgaccgccgatacctctagcagcacagcctacatgcagctgagcagcctgaccagcgaagatagcgccgtgtacttctgtgcccggtccatcacaacagtcgtgggctgcgctatggactattggggccagggaacaagcgtgaccgtgtctagtacgcgtgcaagaagtgaagataggtacaggaacctcgagggaggcagctggagccaccctcagtttgaaaaagactacaaagacgatgacgataagggatcagattacaaggatgatgatgacaaggggtcagattataaagacgacgatgataaagggagcgactacaaggacgacgatgacaaggcctggtcccatccccagttcgagaaacaccatcaccaccaccatcatcacactagtggctccggcgagggcagaggaagtctactaacctgcggagatgtggaagaaaatcctggcccacatatgaccgagtacaagcccacggtgcgcctcgccacccgcgacgacgtccccagggccgtacgcaccctcgccgccgcgttcgccgactaccccgccacgcgccacaccgtcgatccggaccgccacatcgagcgggtcaccgagctgcaagaactcttcctcacgcgcgtcgggctcgacatcggcaaggtgtgggtcgcggacgacggcgccgcggtggcggtctggaccacgccggagagcgtcgaagcgggggcggtgttcgccgagatcggcccgcgcatggccgagttgagcggttcccggctggccgcgcagcaacagatggaaggcctcctggcgccgcaccggcccaaggagcccgcgtggttcctggccaccgtcggcgtctcgcccgaccaccagggcaagggtctgggcagcgccgtcgtgctccccggagtggaggcggccgagcgcgccggggtgcccgccttcctggagacctccgcgccccgcaacctccccttctacgagcggctcggcttcaccgtcaccgccgacgtcgaggtgcccgaaggaccgcgcacctggtgcatgacccgcaagcccggtgcctga

SEQ ID NO: 5151 - DNA, 1704 bp, synthetic construct
  source 1..1704: mol_type = other DNA
atggccttaccagtgaccgccttgctcctgccgctggccttgctgctccacgccgccaggccggacatccagatgacacagagccctagcagcctgtctgccagcgtgggagacagagtgaccatcacatgcaaggccagcgaccacatcaacaactggctggcctggtatcagcagaagcctggacaggcccctaagctgctgatctacggcgctaccacactggaaacaggcgtgcccagcagattttctggcagcggctctggcaccgactacaccctgacaatatccagcctccagcctgaggacttcgccacctactactgtcagcagagctggaacaccccttggacattcggccagggcaccaagctggaaatcaagagaggcggaggcggaagtggaggcggaggatctggcggcggaggctctcaagttcagcttcaacagcctggcgctgagctggtcaaacctggcgcttctgtgaagatgagctgcaaagccagcggctacgccttcaacagctactggatcaactggatgaagcagaaacccggccagggactcgaatggatcggccaaatctatcccggcgacggcgacaccaactacaacggcaagttcaagggcagagccacactgaccgccgatacctctagcagcacagcctacatgcagctgagcagcctgaccagcgaagatagcgccgtgtacttctgtgcccggtccatcacaacagtcgtgggctgcgctatggactattggggccagggaacaagcgtgaccgtgtctagtacgcgtgcaagaagtgaagatatgtacaggaacctcgagggaggcagctggagccaccctcagtttgaaaaagactacaaagacgatgacgataagggatcagattacaaggatgatgatgacaaggggtcagattataaagacgacgatgataaagggagcgactacaaggacgacgatgacaaggcctggtcccatccccagttcgagaaacaccatcaccaccaccatcatcacactagtggctccggcgagggcagaggaagtctactaacctgcggagatgtggaagaaaatcctggcccacatatgaccgagtacaagcccacggtgcgcctcgccacccgcgacgacgtccccagggccgtacgcaccctcgccgccgcgttcgccgactaccccgccacgcgccacaccgtcgatccggaccgccacatcgagcgggtcaccgagctgcaagaactcttcctcacgcgcgtcgggctcgacatcggcaaggtgtgggtcgcggacgacggcgccgcggtggcggtctggaccacgccggagagcgtcgaagcgggggcggtgttcgccgagatcggcccgcgcatggccgagttgagcggttcccggctggccgcgcagcaacagatggaaggcctcctggcgccgcaccggcccaaggagcccgcgtggttcctggccaccgtcggcgtctcgcccgaccaccagggcaagggtctgggcagcgccgtcgtgctccccggagtggaggcggccgagcgcgccggggtgcccgccttcctggagacctccgcgccccgcaacctccccttctacgagcggctcggcttcaccgtcaccgccgacgtcgaggtgcccgaaggaccgcgcacctggtgcatgacccgcaagcccggtgcctga

SEQ ID NO: 5152 - DNA, 1704 bp, synthetic construct
  source 1..1704: mol_type = other DNA
atggccttaccagtgaccgccttgctcctgccgctggccttgctgctccacgccgccaggccggacatccagatgacacagagccctagcagcctgtctgccagcgtgggagacagagtgaccatcacatgcaaggccagcgaccacatcaacaactggctggcctggtatcagcagaagcctggacaggcccctaagctgctgatctacggcgctaccacactggaaacaggcgtgcccagcagattttctggcagcggctctggcaccgactacaccctgacaatatccagcctccagcctgaggacttcgccacctactactgtcagcagagctggaacaccccttggacattcggccagggcaccaagctggaaatcaagagaggcggaggcggaagtggaggcggaggatctggcggcggaggctctcaagttcagcttcaacagcctggcgctgagctggtcaaacctggcgcttctgtgaagatgagctgcaaagccagcggctacgccttcaacagctactggatcaactggatgaagcagaaacccggccagggactcgaatggatcggccaaatctatcccggcgacggcgacaccaactacaacggcaagttcaagggcagagccacactgaccgccgatacctctagcagcacagcctacatgcagctgagcagcctgaccagcgaagatagcgccgtgtacttctgtgcccggtccatcacaacagtcgtgggctgcgctatggactattggggccagggaacaagcgtgaccgtgtctagtacgcgtgcaagaagtgaagatcattacaggaacctcgagggaggcagctggagccaccctcagtttgaaaaagactacaaagacgatgacgataagggatcagattacaaggatgatgatgacaaggggtcagattataaagacgacgatgataaagggagcgactacaaggacgacgatgacaaggcctggtcccatccccagttcgagaaacaccatcaccaccaccatcatcacactagtggctccggcgagggcagaggaagtctactaacctgcggagatgtggaagaaaatcctggcccacatatgaccgagtacaagcccacggtgcgcctcgccacccgcgacgacgtccccagggccgtacgcaccctcgccgccgcgttcgccgactaccccgccacgcgccacaccgtcgatccggaccgccacatcgagcgggtcaccgagctgcaagaactcttcctcacgcgcgtcgggctcgacatcggcaaggtgtgggtcgcggacgacggcgccgcggtggcggtctggaccacgccggagagcgtcgaagcgggggcggtgttcgccgagatcggcccgcgcatggccgagttgagcggttcccggctggccgcgcagcaacagatggaaggcctcctggcgccgcaccggcccaaggagcccgcgtggttcctggccaccgtcggcgtctcgcccgaccaccagggcaagggtctgggcagcgccgtcgtgctccccggagtggaggcggccgagcgcgccggggtgcccgccttcctggagacctccgcgccccgcaacctccccttctacgagcggctcggcttcaccgtcaccgccgacgtcgaggtgcccgaaggaccgcgcacctggtgcatgacccgcaagcccggtgcctga

SEQ ID NO: 5153 - DNA, 1704 bp, synthetic construct
  source 1..1704: mol_type = other DNA
atggccttaccagtgaccgccttgctcctgccgctggccttgctgctccacgccgccaggccggacatccagatgacacagagccctagcagcctgtctgccagcgtgggagacagagtgaccatcacatgcaaggccagcgaccacatcaacaactggctggcctggtatcagcagaagcctggacaggcccctaagctgctgatctacggcgctaccacactggaaacaggcgtgcccagcagattttctggcagcggctctggcaccgactacaccctgacaatatccagcctccagcctgaggacttcgccacctactactgtcagcagagctggaacaccccttggacattcggccagggcaccaagctggaaatcaagagaggcggaggcggaagtggaggcggaggatctggcggcggaggctctcaagttcagcttcaacagcctggcgctgagctggtcaaacctggcgcttctgtgaagatgagctgcaaagccagcggctacgccttcaacagctactggatcaactggatgaagcagaaacccggccagggactcgaatggatcggccaaatctatcccggcgacggcgacaccaactacaacggcaagttcaagggcagagccacactgaccgccgatacctctagcagcacagcctacatgcagctgagcagcctgaccagcgaagatagcgccgtgtacttctgtgcccggtccatcacaacagtcgtgggctgcgctatggactattggggccagggaacaagcgtgaccgtgtctagtacgcgtgcaagaagtgaagatccatacaggaacctcgagggaggcagctggagccaccctcagtttgaaaaagactacaaagacgatgacgataagggatcagattacaaggatgatgatgacaaggggtcagattataaagacgacgatgataaagggagcgactacaaggacgacgatgacaaggcctggtcccatccccagttcgagaaacaccatcaccaccaccatcatcacactagtggctccggcgagggcagaggaagtctactaacctgcggagatgtggaagaaaatcctggcccacatatgaccgagtacaagcccacggtgcgcctcgccacccgcgacgacgtccccagggccgtacgcaccctcgccgccgcgttcgccgactaccccgccacgcgccacaccgtcgatccggaccgccacatcgagcgggtcaccgagctgcaagaactcttcctcacgcgcgtcgggctcgacatcggcaaggtgtgggtcgcggacgacggcgccgcggtggcggtctggaccacgccggagagcgtcgaagcgggggcggtgttcgccgagatcggcccgcgcatggccgagttgagcggttcccggctggccgcgcagcaacagatggaaggcctcctggcgccgcaccggcccaaggagcccgcgtggttcctggccaccgtcggcgtctcgcccgaccaccagggcaagggtctgggcagcgccgtcgtgctccccggagtggaggcggccgagcgcgccggggtgcccgccttcctggagacctccgcgccccgcaacctccccttctacgagcggctcggcttcaccgtcaccgccgacgtcgaggtgcccgaaggaccgcgcacctggtgcatgacccgcaagcccggtgcctga

SEQ ID NO: 5154 - DNA, 1704 bp, synthetic construct
  source 1..1704: mol_type = other DNA
atggccttaccagtgaccgccttgctcctgccgctggccttgctgctccacgccgccaggccggacatccagatgacacagagccctagcagcctgtctgccagcgtgggagacagagtgaccatcacatgcaaggccagcgaccacatcaacaactggctggcctggtatcagcagaagcctggacaggcccctaagctgctgatctacggcgctaccacactggaaacaggcgtgcccagcagattttctggcagcggctctggcaccgactacaccctgacaatatccagcctccagcctgaggacttcgccacctactactgtcagcagagctggaacaccccttggacattcggccagggcaccaagctggaaatcaagagaggcggaggcggaagtggaggcggaggatctggcggcggaggctctcaagttcagcttcaacagcctggcgctgagctggtcaaacctggcgcttctgtgaagatgagctgcaaagccagcggctacgccttcaacagctactggatcaactggatgaagcagaaacccggccagggactcgaatggatcggccaaatctatcccggcgacggcgacaccaactacaacggcaagttcaagggcagagccacactgaccgccgatacctctagcagcacagcctacatgcagctgagcagcctgaccagcgaagatagcgccgtgtacttctgtgcccggtccatcacaacagtcgtgggctgcgctatggactattggggccagggaacaagcgtgaccgtgtctagtacgcgtgcaagaagtgaagatctatacaggaacctcgagggaggcagctggagccaccctcagtttgaaaaagactacaaagacgatgacgataagggatcagattacaaggatgatgatgacaaggggtcagattataaagacgacgatgataaagggagcgactacaaggacgacgatgacaaggcctggtcccatccccagttcgagaaacaccatcaccaccaccatcatcacactagtggctccggcgagggcagaggaagtctactaacctgcggagatgtggaagaaaatcctggcccacatatgaccgagtacaagcccacggtgcgcctcgccacccgcgacgacgtccccagggccgtacgcaccctcgccgccgcgttcgccgactaccccgccacgcgccacaccgtcgatccggaccgccacatcgagcgggtcaccgagctgcaagaactcttcctcacgcgcgtcgggctcgacatcggcaaggtgtgggtcgcggacgacggcgccgcggtggcggtctggaccacgccggagagcgtcgaagcgggggcggtgttcgccgagatcggcccgcgcatggccgagttgagcggttcccggctggccgcgcagcaacagatggaaggcctcctggcgccgcaccggcccaaggagcccgcgtggttcctggccaccgtcggcgtctcgcccgaccaccagggcaagggtctgggcagcgccgtcgtgctccccggagtggaggcggccgagcgcgccggggtgcccgccttcctggagacctccgcgccccgcaacctccccttctacgagcggctcggcttcaccgtcaccgccgacgtcgaggtgcccgaaggaccgcgcacctggtgcatgacccgcaagcccggtgcctga

SEQ ID NO: 5155 - DNA, 1704 bp, synthetic construct
  source 1..1704: mol_type = other DNA
atggccttaccagtgaccgccttgctcctgccgctggccttgctgctccacgccgccaggccggacatccagatgacacagagccctagcagcctgtctgccagcgtgggagacagagtgaccatcacatgcaaggccagcgaccacatcaacaactggctggcctggtatcagcagaagcctggacaggcccctaagctgctgatctacggcgctaccacactggaaacaggcgtgcccagcagattttctggcagcggctctggcaccgactacaccctgacaatatccagcctccagcctgaggacttcgccacctactactgtcagcagagctggaacaccccttggacattcggccagggcaccaagctggaaatcaagagaggcggaggcggaagtggaggcggaggatctggcggcggaggctctcaagttcagcttcaacagcctggcgctgagctggtcaaacctggcgcttctgtgaagatgagctgcaaagccagcggctacgccttcaacagctactggatcaactggatgaagcagaaacccggccagggactcgaatggatcggccaaatctatcccggcgacggcgacaccaactacaacggcaagttcaagggcagagccacactgaccgccgatacctctagcagcacagcctacatgcagctgagcagcctgaccagcgaagatagcgccgtgtacttctgtgcccggtccatcacaacagtcgtgggctgcgctatggactattggggccagggaacaagcgtgaccgtgtctagtacgcgtgcaagaagtgaagatacctacaggaacctcgagggaggcagctggagccaccctcagtttgaaaaagactacaaagacgatgacgataagggatcagattacaaggatgatgatgacaaggggtcagattataaagacgacgatgataaagggagcgactacaaggacgacgatgacaaggcctggtcccatccccagttcgagaaacaccatcaccaccaccatcatcacactagtggctccggcgagggcagaggaagtctactaacctgcggagatgtggaagaaaatcctggcccacatatgaccgagtacaagcccacggtgcgcctcgccacccgcgacgacgtccccagggccgtacgcaccctcgccgccgcgttcgccgactaccccgccacgcgccacaccgtcgatccggaccgccacatcgagcgggtcaccgagctgcaagaactcttcctcacgcgcgtcgggctcgacatcggcaaggtgtgggtcgcggacgacggcgccgcggtggcggtctggaccacgccggagagcgtcgaagcgggggcggtgttcgccgagatcggcccgcgcatggccgagttgagcggttcccggctggccgcgcagcaacagatggaaggcctcctggcgccgcaccggcccaaggagcccgcgtggttcctggccaccgtcggcgtctcgcccgaccaccagggcaagggtctgggcagcgccgtcgtgctccccggagtggaggcggccgagcgcgccggggtgcccgccttcctggagacctccgcgccccgcaacctccccttctacgagcggctcggcttcaccgtcaccgccgacgtcgaggtgcccgaaggaccgcgcacctggtgcatgacccgcaagcccggtgcctga

SEQ ID NO: 5156 - DNA, 1704 bp, synthetic construct
  source 1..1704: mol_type = other DNA
atggccttaccagtgaccgccttgctcctgccgctggccttgctgctccacgccgccaggccggacatccagatgacacagagccctagcagcctgtctgccagcgtgggagacagagtgaccatcacatgcaaggccagcgaccacatcaacaactggctggcctggtatcagcagaagcctggacaggcccctaagctgctgatctacggcgctaccacactggaaacaggcgtgcccagcagattttctggcagcggctctggcaccgactacaccctgacaatatccagcctccagcctgaggacttcgccacctactactgtcagcagagctggaacaccccttggacattcggccagggcaccaagctggaaatcaagagaggcggaggcggaagtggaggcggaggatctggcggcggaggctctcaagttcagcttcaacagcctggcgctgagctggtcaaacctggcgcttctgtgaagatgagctgcaaagccagcggctacgccttcaacagctactggatcaactggatgaagcagaaacccggccagggactcgaatggatcggccaaatctatcccggcgacggcgacaccaactacaacggcaagttcaagggcagagccacactgaccgccgatacctctagcagcacagcctacatgcagctgagcagcctgaccagcgaagatagcgccgtgtacttctgtgcccggtccatcacaacagtcgtgggctgcgctatggactattggggccagggaacaagcgtgaccgtgtctagtacgcgtgcaagaagtgaagatgcgtacaggaacctcgagggaggcagctggagccaccctcagtttgaaaaagactacaaagacgatgacgataagggatcagattacaaggatgatgatgacaaggggtcagattataaagacgacgatgataaagggagcgactacaaggacgacgatgacaaggcctggtcccatccccagttcgagaaacaccatcaccaccaccatcatcacactagtggctccggcgagggcagaggaagtctactaacctgcggagatgtggaagaaaatcctggcccacatatgaccgagtacaagcccacggtgcgcctcgccacccgcgacgacgtccccagggccgtacgcaccctcgccgccgcgttcgccgactaccccgccacgcgccacaccgtcgatccggaccgccacatcgagcgggtcaccgagctgcaagaactcttcctcacgcgcgtcgggctcgacatcggcaaggtgtgggtcgcggacgacggcgccgcggtggcggtctggaccacgccggagagcgtcgaagcgggggcggtgttcgccgagatcggcccgcgcatggccgagttgagcggttcccggctggccgcgcagcaacagatggaaggcctcctggcgccgcaccggcccaaggagcccgcgtggttcctggccaccgtcggcgtctcgcccgaccaccagggcaagggtctgggcagcgccgtcgtgctccccggagtggaggcggccgagcgcgccggggtgcccgccttcctggagacctccgcgccccgcaacctccccttctacgagcggctcggcttcaccgtcaccgccgacgtcgaggtgcccgaaggaccgcgcacctggtgcatgacccgcaagcccggtgcctga

SEQ ID NO: 5157 - DNA, 1704 bp, synthetic construct
  source 1..1704: mol_type = other DNA
atggccttaccagtgaccgccttgctcctgccgctggccttgctgctccacgccgccaggccggacatccagatgacacagagccctagcagcctgtctgccagcgtgggagacagagtgaccatcacatgcaaggccagcgaccacatcaacaactggctggcctggtatcagcagaagcctggacaggcccctaagctgctgatctacggcgctaccacactggaaacaggcgtgcccagcagattttctggcagcggctctggcaccgactacaccctgacaatatccagcctccagcctgaggacttcgccacctactactgtcagcagagctggaacaccccttggacattcggccagggcaccaagctggaaatcaagagaggcggaggcggaagtggaggcggaggatctggcggcggaggctctcaagttcagcttcaacagcctggcgctgagctggtcaaacctggcgcttctgtgaagatgagctgcaaagccagcggctacgccttcaacagctactggatcaactggatgaagcagaaacccggccagggactcgaatggatcggccaaatctatcccggcgacggcgacaccaactacaacggcaagttcaagggcagagccacactgaccgccgatacctctagcagcacagcctacatgcagctgagcagcctgaccagcgaagatagcgccgtgtacttctgtgcccggtccatcacaacagtcgtgggctgcgctatggactattggggccagggaacaagcgtgaccgtgtctagtacgcgtgcaagaagtgaagatgtttacaggaacctcgagggaggcagctggagccaccctcagtttgaaaaagactacaaagacgatgacgataagggatcagattacaaggatgatgatgacaaggggtcagattataaagacgacgatgataaagggagcgactacaaggacgacgatgacaaggcctggtcccatccccagttcgagaaacaccatcaccaccaccatcatcacactagtggctccggcgagggcagaggaagtctactaacctgcggagatgtggaagaaaatcctggcccacatatgaccgagtacaagcccacggtgcgcctcgccacccgcgacgacgtccccagggccgtacgcaccctcgccgccgcgttcgccgactaccccgccacgcgccacaccgtcgatccggaccgccacatcgagcgggtcaccgagctgcaagaactcttcctcacgcgcgtcgggctcgacatcggcaaggtgtgggtcgcggacgacggcgccgcggtggcggtctggaccacgccggagagcgtcgaagcgggggcggtgttcgccgagatcggcccgcgcatggccgagttgagcggttcccggctggccgcgcagcaacagatggaaggcctcctggcgccgcaccggcccaaggagcccgcgtggttcctggccaccgtcggcgtctcgcccgaccaccagggcaagggtctgggcagcgccgtcgtgctccccggagtggaggcggccgagcgcgccggggtgcccgccttcctggagacctccgcgccccgcaacctccccttctacgagcggctcggcttcaccgtcaccgccgacgtcgaggtgcccgaaggaccgcgcacctggtgcatgacccgcaagcccggtgcctga

SEQ ID NO: 5158 - DNA, 1704 bp, synthetic construct
  source 1..1704: mol_type = other DNA
atggccttaccagtgaccgccttgctcctgccgctggccttgctgctccacgccgccaggccggacatccagatgacacagagccctagcagcctgtctgccagcgtgggagacagagtgaccatcacatgcaaggccagcgaccacatcaacaactggctggcctggtatcagcagaagcctggacaggcccctaagctgctgatctacggcgctaccacactggaaacaggcgtgcccagcagattttctggcagcggctctggcaccgactacaccctgacaatatccagcctccagcctgaggacttcgccacctactactgtcagcagagctggaacaccccttggacattcggccagggcaccaagctggaaatcaagagaggcggaggcggaagtggaggcggaggatctggcggcggaggctctcaagttcagcttcaacagcctggcgctgagctggtcaaacctggcgcttctgtgaagatgagctgcaaagccagcggctacgccttcaacagctactggatcaactggatgaagcagaaacccggccagggactcgaatggatcggccaaatctatcccggcgacggcgacaccaactacaacggcaagttcaagggcagagccacactgaccgccgatacctctagcagcacagcctacatgcagctgagcagcctgaccagcgaagatagcgccgtgtacttctgtgcccggtccatcacaacagtcgtgggctgcgctatggactattggggccagggaacaagcgtgaccgtgtctagtacgcgtgcaagaagtgaagatagctacaggaacctcgagggaggcagctggagccaccctcagtttgaaaaagactacaaagacgatgacgataagggatcagattacaaggatgatgatgacaaggggtcagattataaagacgacgatgataaagggagcgactacaaggacgacgatgacaaggcctggtcccatccccagttcgagaaacaccatcaccaccaccatcatcacactagtggctccggcgagggcagaggaagtctactaacctgcggagatgtggaagaaaatcctggcccacatatgaccgagtacaagcccacggtgcgcctcgccacccgcgacgacgtccccagggccgtacgcaccctcgccgccgcgttcgccgactaccccgccacgcgccacaccgtcgatccggaccgccacatcgagcgggtcaccgagctgcaagaactcttcctcacgcgcgtcgggctcgacatcggcaaggtgtgggtcgcggacgacggcgccgcggtggcggtctggaccacgccggagagcgtcgaagcgggggcggtgttcgccgagatcggcccgcgcatggccgagttgagcggttcccggctggccgcgcagcaacagatggaaggcctcctggcgccgcaccggcccaaggagcccgcgtggttcctggccaccgtcggcgtctcgcccgaccaccagggcaagggtctgggcagcgccgtcgtgctccccggagtggaggcggccgagcgcgccggggtgcccgccttcctggagacctccgcgccccgcaacctccccttctacgagcggctcggcttcaccgtcaccgccgacgtcgaggtgcccgaaggaccgcgcacctggtgcatgacccgcaagcccggtgcctga

SEQ ID NO: 5159 - DNA, 1704 bp, synthetic construct
  source 1..1704: mol_type = other DNA
atggccttaccagtgaccgccttgctcctgccgctggccttgctgctccacgccgccaggccggacatccagatgacacagagccctagcagcctgtctgccagcgtgggagacagagtgaccatcacatgcaaggccagcgaccacatcaacaactggctggcctggtatcagcagaagcctggacaggcccctaagctgctgatctacggcgctaccacactggaaacaggcgtgcccagcagattttctggcagcggctctggcaccgactacaccctgacaatatccagcctccagcctgaggacttcgccacctactactgtcagcagagctggaacaccccttggacattcggccagggcaccaagctggaaatcaagagaggcggaggcggaagtggaggcggaggatctggcggcggaggctctcaagttcagcttcaacagcctggcgctgagctggtcaaacctggcgcttctgtgaagatgagctgcaaagccagcggctacgccttcaacagctactggatcaactggatgaagcagaaacccggccagggactcgaatggatcggccaaatctatcccggcgacggcgacaccaactacaacggcaagttcaagggcagagccacactgaccgccgatacctctagcagcacagcctacatgcagctgagcagcctgaccagcgaagatagcgccgtgtacttctgtgcccggtccatcacaacagtcgtgggctgcgctatggactattggggccagggaacaagcgtgaccgtgtctagtacgcgtgcaagaagtgaagatggctacaggaacctcgagggaggcagctggagccaccctcagtttgaaaaagactacaaagacgatgacgataagggatcagattacaaggatgatgatgacaaggggtcagattataaagacgacgatgataaagggagcgactacaaggacgacgatgacaaggcctggtcccatccccagttcgagaaacaccatcaccaccaccatcatcacactagtggctccggcgagggcagaggaagtctactaacctgcggagatgtggaagaaaatcctggcccacatatgaccgagtacaagcccacggtgcgcctcgccacccgcgacgacgtccccagggccgtacgcaccctcgccgccgcgttcgccgactaccccgccacgcgccacaccgtcgatccggaccgccacatcgagcgggtcaccgagctgcaagaactcttcctcacgcgcgtcgggctcgacatcggcaaggtgtgggtcgcggacgacggcgccgcggtggcggtctggaccacgccggagagcgtcgaagcgggggcggtgttcgccgagatcggcccgcgcatggccgagttgagcggttcccggctggccgcgcagcaacagatggaaggcctcctggcgccgcaccggcccaaggagcccgcgtggttcctggccaccgtcggcgtctcgcccgaccaccagggcaagggtctgggcagcgccgtcgtgctccccggagtggaggcggccgagcgcgccggggtgcccgccttcctggagacctccgcgccccgcaacctccccttctacgagcggctcggcttcaccgtcaccgccgacgtcgaggtgcccgaaggaccgcgcacctggtgcatgacccgcaagcccggtgcctga

SEQ ID NO: 5160 - DNA, 1704 bp, synthetic construct
  source 1..1704: mol_type = other DNA
atggccttaccagtgaccgccttgctcctgccgctggccttgctgctccacgccgccaggccggacatccagatgacacagagccctagcagcctgtctgccagcgtgggagacagagtgaccatcacatgcaaggccagcgaccacatcaacaactggctggcctggtatcagcagaagcctggacaggcccctaagctgctgatctacggcgctaccacactggaaacaggcgtgcccagcagattttctggcagcggctctggcaccgactacaccctgacaatatccagcctccagcctgaggacttcgccacctactactgtcagcagagctggaacaccccttggacattcggccagggcaccaagctggaaatcaagagaggcggaggcggaagtggaggcggaggatctggcggcggaggctctcaagttcagcttcaacagcctggcgctgagctggtcaaacctggcgcttctgtgaagatgagctgcaaagccagcggctacgccttcaacagctactggatcaactggatgaagcagaaacccggccagggactcgaatggatcggccaaatctatcccggcgacggcgacaccaactacaacggcaagttcaagggcagagccacactgaccgccgatacctctagcagcacagcctacatgcagctgagcagcctgaccagcgaagatagcgccgtgtacttctgtgcccggtccatcacaacagtcgtgggctgcgctatggactattggggccagggaacaagcgtgaccgtgtctagtacgcgtgcaagaagtgaagattgttacaggaacctcgagggaggcagctggagccaccctcagtttgaaaaagactacaaagacgatgacgataagggatcagattacaaggatgatgatgacaaggggtcagattataaagacgacgatgataaagggagcgactacaaggacgacgatgacaaggcctggtcccatccccagttcgagaaacaccatcaccaccaccatcatcacactagtggctccggcgagggcagaggaagtctactaacctgcggagatgtggaagaaaatcctggcccacatatgaccgagtacaagcccacggtgcgcctcgccacccgcgacgacgtccccagggccgtacgcaccctcgccgccgcgttcgccgactaccccgccacgcgccacaccgtcgatccggaccgccacatcgagcgggtcaccgagctgcaagaactcttcctcacgcgcgtcgggctcgacatcggcaaggtgtgggtcgcggacgacggcgccgcggtggcggtctggaccacgccggagagcgtcgaagcgggggcggtgttcgccgagatcggcccgcgcatggccgagttgagcggttcccggctggccgcgcagcaacagatggaaggcctcctggcgccgcaccggcccaaggagcccgcgtggttcctggccaccgtcggcgtctcgcccgaccaccagggcaagggtctgggcagcgccgtcgtgctccccggagtggaggcggccgagcgcgccggggtgcccgccttcctggagacctccgcgccccgcaacctccccttctacgagcggctcggcttcaccgtcaccgccgacgtcgaggtgcccgaaggaccgcgcacctggtgcatgacccgcaagcccggtgcctga

SEQ ID NO: 5161 - DNA, 1704 bp, synthetic construct
  source 1..1704: mol_type = other DNA
atggccttaccagtgaccgccttgctcctgccgctggccttgctgctccacgccgccaggccggacatccagatgacacagagccctagcagcctgtctgccagcgtgggagacagagtgaccatcacatgcaaggccagcgaccacatcaacaactggctggcctggtatcagcagaagcctggacaggcccctaagctgctgatctacggcgctaccacactggaaacaggcgtgcccagcagattttctggcagcggctctggcaccgactacaccctgacaatatccagcctccagcctgaggacttcgccacctactactgtcagcagagctggaacaccccttggacattcggccagggcaccaagctggaaatcaagagaggcggaggcggaagtggaggcggaggatctggcggcggaggctctcaagttcagcttcaacagcctggcgctgagctggtcaaacctggcgcttctgtgaagatgagctgcaaagccagcggctacgccttcaacagctactggatcaactggatgaagcagaaacccggccagggactcgaatggatcggccaaatctatcccggcgacggcgacaccaactacaacggcaagttcaagggcagagccacactgaccgccgatacctctagcagcacagcctacatgcagctgagcagcctgaccagcgaagatagcgccgtgtacttctgtgcccggtccatcacaacagtcgtgggctgcgctatggactattggggccagggaacaagcgtgaccgtgtctagtacgcgtgcaagaagtgaagataaatacaggaacctcgagggaggcagctggagccaccctcagtttgaaaaagactacaaagacgatgacgataagggatcagattacaaggatgatgatgacaaggggtcagattataaagacgacgatgataaagggagcgactacaaggacgacgatgacaaggcctggtcccatccccagttcgagaaacaccatcaccaccaccatcatcacactagtggctccggcgagggcagaggaagtctactaacctgcggagatgtggaagaaaatcctggcccacatatgaccgagtacaagcccacggtgcgcctcgccacccgcgacgacgtccccagggccgtacgcaccctcgccgccgcgttcgccgactaccccgccacgcgccacaccgtcgatccggaccgccacatcgagcgggtcaccgagctgcaagaactcttcctcacgcgcgtcgggctcgacatcggcaaggtgtgggtcgcggacgacggcgccgcggtggcggtctggaccacgccggagagcgtcgaagcgggggcggtgttcgccgagatcggcccgcgcatggccgagttgagcggttcccggctggccgcgcagcaacagatggaaggcctcctggcgccgcaccggcccaaggagcccgcgtggttcctggccaccgtcggcgtctcgcccgaccaccagggcaagggtctgggcagcgccgtcgtgctccccggagtggaggcggccgagcgcgccggggtgcccgccttcctggagacctccgcgccccgcaacctccccttctacgagcggctcggcttcaccgtcaccgccgacgtcgaggtgcccgaaggaccgcgcacctggtgcatgacccgcaagcccggtgcctga

SEQ ID NO: 5162 - DNA, 813 bp, synthetic construct
  source 1..813: mol_type = other DNA
atggccttaccagtgaccgccttgctcctgccgctggccttgctgctccacgccgccaggccggacatccagatgacacagagccctagcagcctgtctgccagcgtgggagacagagtgaccatcacatgcaaggccagcgaccacatcaacaactggctggcctggtatcagcagaagcctggacaggcccctaagctgctgatctacggcgctaccacactggaaacaggcgtgcccagcagattttctggcagcggctctggcaccgactacaccctgacaatatccagcctccagcctgaggacttcgccacctactactgtcagcagagctggaacaccccttggacattcggccagggcaccaagctggaaatcaagagaggcggaggcggaagtggaggcggaggatctggcggcggaggctctcaagttcagcttcaacagcctggcgctgagctggtcaaacctggcgcttctgtgaagatgagctgcaaagccagcggctacgccttcaacagctactggatcaactggatgaagcagaaacccggccagggactcgaatggatcggccaaatctatcccggcgacggcgacaccaactacaacggcaagttcaagggcagagccacactgaccgccgatacctctagcagcacagcctacatgcagctgagcagcctgaccagcgaagatagcgccgtgtacttctgtgcccggtccatcacaacagtcgtgggctgcgctatggactattggggccagggaacaagcgtgaccgtgtctagtacgcgtgcaagagtatga

SEQ ID NO: 5163 - DNA, 1704 bp, synthetic construct
  source 1..1704: mol_type = other DNA
atggccttaccagtgaccgccttgctcctgccgctggccttgctgctccacgccgccaggccggacatccagatgacacagagccctagcagcctgtctgccagcgtgggagacagagtgaccatcacatgcaaggccagcgaccacatcaacaactggctggcctggtatcagcagaagcctggacaggcccctaagctgctgatctacggcgctaccacactggaaacaggcgtgcccagcagattttctggcagcggctctggcaccgactacaccctgacaatatccagcctccagcctgaggacttcgccacctactactgtcagcagagctggaacaccccttggacattcggccagggcaccaagctggaaatcaagagaggcggaggcggaagtggaggcggaggatctggcggcggaggctctcaagttcagcttcaacagcctggcgctgagctggtcaaacctggcgcttctgtgaagatgagctgcaaagccagcggctacgccttcaacagctactggatcaactggatgaagcagaaacccggccagggactcgaatggatcggccaaatctatcccggcgacggcgacaccaactacaacggcaagttcaagggcagagccacactgaccgccgatacctctagcagcacagcctacatgcagctgagcagcctgaccagcgaagatagcgccgtgtacttctgtgcccggtccatcacaacagtcgtgggctgcgctatggactattggggccagggaacaagcgtgaccgtgtctagtacgcgtgcaagaccgatgggacgctacaggaacctcgagggaggcagctggagccaccctcagtttgaaaaagactacaaagacgatgacgataagggatcagattacaaggatgatgatgacaaggggtcagattataaagacgacgatgataaagggagcgactacaaggacgacgatgacaaggcctggtcccatccccagttcgagaaacaccatcaccaccaccatcatcacactagtggctccggcgagggcagaggaagtctactaacctgcggagatgtggaagaaaatcctggcccacatatgaccgagtacaagcccacggtgcgcctcgccacccgcgacgacgtccccagggccgtacgcaccctcgccgccgcgttcgccgactaccccgccacgcgccacaccgtcgatccggaccgccacatcgagcgggtcaccgagctgcaagaactcttcctcacgcgcgtcgggctcgacatcggcaaggtgtgggtcgcggacgacggcgccgcggtggcggtctggaccacgccggagagcgtcgaagcgggggcggtgttcgccgagatcggcccgcgcatggccgagttgagcggttcccggctggccgcgcagcaacagatggaaggcctcctggcgccgcaccggcccaaggagcccgcgtggttcctggccaccgtcggcgtctcgcccgaccaccagggcaagggtctgggcagcgccgtcgtgctccccggagtggaggcggccgagcgcgccggggtgcccgccttcctggagacctccgcgccccgcaacctccccttctacgagcggctcggcttcaccgtcaccgccgacgtcgaggtgcccgaaggaccgcgcacctggtgcatgacccgcaagcccggtgcctga

SEQ ID NO: 5164 - DNA, 1704 bp, synthetic construct
  source 1..1704: mol_type = other DNA
atggccttaccagtgaccgccttgctcctgccgctggccttgctgctccacgccgccaggccggacatccagatgacacagagccctagcagcctgtctgccagcgtgggagacagagtgaccatcacatgcaaggccagcgaccacatcaacaactggctggcctggtatcagcagaagcctggacaggcccctaagctgctgatctacggcgctaccacactggaaacaggcgtgcccagcagattttctggcagcggctctggcaccgactacaccctgacaatatccagcctccagcctgaggacttcgccacctactactgtcagcagagctggaacaccccttggacattcggccagggcaccaagctggaaatcaagagaggcggaggcggaagtggaggcggaggatctggcggcggaggctctcaagttcagcttcaacagcctggcgctgagctggtcaaacctggcgcttctgtgaagatgagctgcaaagccagcggctacgccttcaacagctactggatcaactggatgaagcagaaacccggccagggactcgaatggatcggccaaatctatcccggcgacggcgacaccaactacaacggcaagttcaagggcagagccacactgaccgccgatacctctagcagcacagcctacatgcagctgagcagcctgaccagcgaagatagcgccgtgtacttctgtgcccggtccatcacaacagtcgtgggctgcgctatggactattggggccagggaacaagcgtgaccgtgtctagtacgcgtgcaagacatttggtccgctacaggaacctcgagggaggcagctggagccaccctcagtttgaaaaagactacaaagacgatgacgataagggatcagattacaaggatgatgatgacaaggggtcagattataaagacgacgatgataaagggagcgactacaaggacgacgatgacaaggcctggtcccatccccagttcgagaaacaccatcaccaccaccatcatcacactagtggctccggcgagggcagaggaagtctactaacctgcggagatgtggaagaaaatcctggcccacatatgaccgagtacaagcccacggtgcgcctcgccacccgcgacgacgtccccagggccgtacgcaccctcgccgccgcgttcgccgactaccccgccacgcgccacaccgtcgatccggaccgccacatcgagcgggtcaccgagctgcaagaactcttcctcacgcgcgtcgggctcgacatcggcaaggtgtgggtcgcggacgacggcgccgcggtggcggtctggaccacgccggagagcgtcgaagcgggggcggtgttcgccgagatcggcccgcgcatggccgagttgagcggttcccggctggccgcgcagcaacagatggaaggcctcctggcgccgcaccggcccaaggagcccgcgtggttcctggccaccgtcggcgtctcgcccgaccaccagggcaagggtctgggcagcgccgtcgtgctccccggagtggaggcggccgagcgcgccggggtgcccgccttcctggagacctccgcgccccgcaacctccccttctacgagcggctcggcttcaccgtcaccgccgacgtcgaggtgcccgaaggaccgcgcacctggtgcatgacccgcaagcccggtgcctga

SEQ ID NO: 5165 - DNA, 1704 bp, synthetic construct
  source 1..1704: mol_type = other DNA
atggccttaccagtgaccgccttgctcctgccgctggccttgctgctccacgccgccaggccggacatccagatgacacagagccctagcagcctgtctgccagcgtgggagacagagtgaccatcacatgcaaggccagcgaccacatcaacaactggctggcctggtatcagcagaagcctggacaggcccctaagctgctgatctacggcgctaccacactggaaacaggcgtgcccagcagattttctggcagcggctctggcaccgactacaccctgacaatatccagcctccagcctgaggacttcgccacctactactgtcagcagagctggaacaccccttggacattcggccagggcaccaagctggaaatcaagagaggcggaggcggaagtggaggcggaggatctggcggcggaggctctcaagttcagcttcaacagcctggcgctgagctggtcaaacctggcgcttctgtgaagatgagctgcaaagccagcggctacgccttcaacagctactggatcaactggatgaagcagaaacccggccagggactcgaatggatcggccaaatctatcccggcgacggcgacaccaactacaacggcaagttcaagggcagagccacactgaccgccgatacctctagcagcacagcctacatgcagctgagcagcctgaccagcgaagatagcgccgtgtacttctgtgcccggtccatcacaacagtcgtgggctgcgctatggactattggggccagggaacaagcgtgaccgtgtctagtacgcgtgcaagacaaggggtgcgctacaggaacctcgagggaggcagctggagccaccctcagtttgaaaaagactacaaagacgatgacgataagggatcagattacaaggatgatgatgacaaggggtcagattataaagacgacgatgataaagggagcgactacaaggacgacgatgacaaggcctggtcccatccccagttcgagaaacaccatcaccaccaccatcatcacactagtggctccggcgagggcagaggaagtctactaacctgcggagatgtggaagaaaatcctggcccacatatgaccgagtacaagcccacggtgcgcctcgccacccgcgacgacgtccccagggccgtacgcaccctcgccgccgcgttcgccgactaccccgccacgcgccacaccgtcgatccggaccgccacatcgagcgggtcaccgagctgcaagaactcttcctcacgcgcgtcgggctcgacatcggcaaggtgtgggtcgcggacgacggcgccgcggtggcggtctggaccacgccggagagcgtcgaagcgggggcggtgttcgccgagatcggcccgcgcatggccgagttgagcggttcccggctggccgcgcagcaacagatggaaggcctcctggcgccgcaccggcccaaggagcccgcgtggttcctggccaccgtcggcgtctcgcccgaccaccagggcaagggtctgggcagcgccgtcgtgctccccggagtggaggcggccgagcgcgccggggtgcccgccttcctggagacctccgcgccccgcaacctccccttctacgagcggctcggcttcaccgtcaccgccgacgtcgaggtgcccgaaggaccgcgcacctggtgcatgacccgcaagcccggtgcctga

SEQ ID NO: 5166 - DNA, 1704 bp, synthetic construct
  source 1..1704: mol_type = other DNA
atggccttaccagtgaccgccttgctcctgccgctggccttgctgctccacgccgccaggccggacatccagatgacacagagccctagcagcctgtctgccagcgtgggagacagagtgaccatcacatgcaaggccagcgaccacatcaacaactggctggcctggtatcagcagaagcctggacaggcccctaagctgctgatctacggcgctaccacactggaaacaggcgtgcccagcagattttctggcagcggctctggcaccgactacaccctgacaatatccagcctccagcctgaggacttcgccacctactactgtcagcagagctggaacaccccttggacattcggccagggcaccaagctggaaatcaagagaggcggaggcggaagtggaggcggaggatctggcggcggaggctctcaagttcagcttcaacagcctggcgctgagctggtcaaacctggcgcttctgtgaagatgagctgcaaagccagcggctacgccttcaacagctactggatcaactggatgaagcagaaacccggccagggactcgaatggatcggccaaatctatcccggcgacggcgacaccaactacaacggcaagttcaagggcagagccacactgaccgccgatacctctagcagcacagcctacatgcagctgagcagcctgaccagcgaagatagcgccgtgtacttctgtgcccggtccatcacaacagtcgtgggctgcgctatggactattggggccagggaacaagcgtgaccgtgtctagtacgcgtgcaagagtaaaagcgcgctacaggaacctcgagggaggcagctggagccaccctcagtttgaaaaagactacaaagacgatgacgataagggatcagattacaaggatgatgatgacaaggggtcagattataaagacgacgatgataaagggagcgactacaaggacgacgatgacaaggcctggtcccatccccagttcgagaaacaccatcaccaccaccatcatcacactagtggctccggcgagggcagaggaagtctactaacctgcggagatgtggaagaaaatcctggcccacatatgaccgagtacaagcccacggtgcgcctcgccacccgcgacgacgtccccagggccgtacgcaccctcgccgccgcgttcgccgactaccccgccacgcgccacaccgtcgatccggaccgccacatcgagcgggtcaccgagctgcaagaactcttcctcacgcgcgtcgggctcgacatcggcaaggtgtgggtcgcggacgacggcgccgcggtggcggtctggaccacgccggagagcgtcgaagcgggggcggtgttcgccgagatcggcccgcgcatggccgagttgagcggttcccggctggccgcgcagcaacagatggaaggcctcctggcgccgcaccggcccaaggagcccgcgtggttcctggccaccgtcggcgtctcgcccgaccaccagggcaagggtctgggcagcgccgtcgtgctccccggagtggaggcggccgagcgcgccggggtgcccgccttcctggagacctccgcgccccgcaacctccccttctacgagcggctcggcttcaccgtcaccgccgacgtcgaggtgcccgaaggaccgcgcacctggtgcatgacccgcaagcccggtgcctga

SEQ ID NO: 5167 - DNA, 1704 bp, synthetic construct
  source 1..1704: mol_type = other DNA
atggccttaccagtgaccgccttgctcctgccgctggccttgctgctccacgccgccaggccggacatccagatgacacagagccctagcagcctgtctgccagcgtgggagacagagtgaccatcacatgcaaggccagcgaccacatcaacaactggctggcctggtatcagcagaagcctggacaggcccctaagctgctgatctacggcgctaccacactggaaacaggcgtgcccagcagattttctggcagcggctctggcaccgactacaccctgacaatatccagcctccagcctgaggacttcgccacctactactgtcagcagagctggaacaccccttggacattcggccagggcaccaagctggaaatcaagagaggcggaggcggaagtggaggcggaggatctggcggcggaggctctcaagttcagcttcaacagcctggcgctgagctggtcaaacctggcgcttctgtgaagatgagctgcaaagccagcggctacgccttcaacagctactggatcaactggatgaagcagaaacccggccagggactcgaatggatcggccaaatctatcccggcgacggcgacaccaactacaacggcaagttcaagggcagagccacactgaccgccgatacctctagcagcacagcctacatgcagctgagcagcctgaccagcgaagatagcgccgtgtacttctgtgcccggtccatcacaacagtcgtgggctgcgctatggactattggggccagggaacaagcgtgaccgtgtctagtacgcgtgcaagatggcggattcgctacaggaacctcgagggaggcagctggagccaccctcagtttgaaaaagactacaaagacgatgacgataagggatcagattacaaggatgatgatgacaaggggtcagattataaagacgacgatgataaagggagcgactacaaggacgacgatgacaaggcctggtcccatccccagttcgagaaacaccatcaccaccaccatcatcacactagtggctccggcgagggcagaggaagtctactaacctgcggagatgtggaagaaaatcctggcccacatatgaccgagtacaagcccacggtgcgcctcgccacccgcgacgacgtccccagggccgtacgcaccctcgccgccgcgttcgccgactaccccgccacgcgccacaccgtcgatccggaccgccacatcgagcgggtcaccgagctgcaagaactcttcctcacgcgcgtcgggctcgacatcggcaaggtgtgggtcgcggacgacggcgccgcggtggcggtctggaccacgccggagagcgtcgaagcgggggcggtgttcgccgagatcggcccgcgcatggccgagttgagcggttcccggctggccgcgcagcaacagatggaaggcctcctggcgccgcaccggcccaaggagcccgcgtggttcctggccaccgtcggcgtctcgcccgaccaccagggcaagggtctgggcagcgccgtcgtgctccccggagtggaggcggccgagcgcgccggggtgcccgccttcctggagacctccgcgccccgcaacctccccttctacgagcggctcggcttcaccgtcaccgccgacgtcgaggtgcccgaaggaccgcgcacctggtgcatgacccgcaagcccggtgcctga

SEQ ID NO: 5168 - DNA, 1704 bp, synthetic construct
  source 1..1704: mol_type = other DNA
atggccttaccagtgaccgccttgctcctgccgctggccttgctgctccacgccgccaggccggacatccagatgacacagagccctagcagcctgtctgccagcgtgggagacagagtgaccatcacatgcaaggccagcgaccacatcaacaactggctggcctggtatcagcagaagcctggacaggcccctaagctgctgatctacggcgctaccacactggaaacaggcgtgcccagcagattttctggcagcggctctggcaccgactacaccctgacaatatccagcctccagcctgaggacttcgccacctactactgtcagcagagctggaacaccccttggacattcggccagggcaccaagctggaaatcaagagaggcggaggcggaagtggaggcggaggatctggcggcggaggctctcaagttcagcttcaacagcctggcgctgagctggtcaaacctggcgcttctgtgaagatgagctgcaaagccagcggctacgccttcaacagctactggatcaactggatgaagcagaaacccggccagggactcgaatggatcggccaaatctatcccggcgacggcgacaccaactacaacggcaagttcaagggcagagccacactgaccgccgatacctctagcagcacagcctacatgcagctgagcagcctgaccagcgaagatagcgccgtgtacttctgtgcccggtccatcacaacagtcgtgggctgcgctatggactattggggccagggaacaagcgtgaccgtgtctagtacgcgtgcaagaggagtttatcgctacaggaacctcgagggaggcagctggagccaccctcagtttgaaaaagactacaaagacgatgacgataagggatcagattacaaggatgatgatgacaaggggtcagattataaagacgacgatgataaagggagcgactacaaggacgacgatgacaaggcctggtcccatccccagttcgagaaacaccatcaccaccaccatcatcacactagtggctccggcgagggcagaggaagtctactaacctgcggagatgtggaagaaaatcctggcccacatatgaccgagtacaagcccacggtgcgcctcgccacccgcgacgacgtccccagggccgtacgcaccctcgccgccgcgttcgccgactaccccgccacgcgccacaccgtcgatccggaccgccacatcgagcgggtcaccgagctgcaagaactcttcctcacgcgcgtcgggctcgacatcggcaaggtgtgggtcgcggacgacggcgccgcggtggcggtctggaccacgccggagagcgtcgaagcgggggcggtgttcgccgagatcggcccgcgcatggccgagttgagcggttcccggctggccgcgcagcaacagatggaaggcctcctggcgccgcaccggcccaaggagcccgcgtggttcctggccaccgtcggcgtctcgcccgaccaccagggcaagggtctgggcagcgccgtcgtgctccccggagtggaggcggccgagcgcgccggggtgcccgccttcctggagacctccgcgccccgcaacctccccttctacgagcggctcggcttcaccgtcaccgccgacgtcgaggtgcccgaaggaccgcgcacctggtgcatgacccgcaagcccggtgcctga

SEQ ID NO: 5169 - DNA, 1704 bp, synthetic construct
  source 1..1704: mol_type = other DNA
atggccttaccagtgaccgccttgctcctgccgctggccttgctgctccacgccgccaggccggacatccagatgacacagagccctagcagcctgtctgccagcgtgggagacagagtgaccatcacatgcaaggccagcgaccacatcaacaactggctggcctggtatcagcagaagcctggacaggcccctaagctgctgatctacggcgctaccacactggaaacaggcgtgcccagcagattttctggcagcggctctggcaccgactacaccctgacaatatccagcctccagcctgaggacttcgccacctactactgtcagcagagctggaacaccccttggacattcggccagggcaccaagctggaaatcaagagaggcggaggcggaagtggaggcggaggatctggcggcggaggctctcaagttcagcttcaacagcctggcgctgagctggtcaaacctggcgcttctgtgaagatgagctgcaaagccagcggctacgccttcaacagctactggatcaactggatgaagcagaaacccggccagggactcgaatggatcggccaaatctatcccggcgacggcgacaccaactacaacggcaagttcaagggcagagccacactgaccgccgatacctctagcagcacagcctacatgcagctgagcagcctgaccagcgaagatagcgccgtgtacttctgtgcccggtccatcacaacagtcgtgggctgcgctatggactattggggccagggaacaagcgtgaccgtgtctagtacgcgtgcaagaagttgtgggcgctacaggaacctcgagggaggcagctggagccaccctcagtttgaaaaagactacaaagacgatgacgataagggatcagattacaaggatgatgatgacaaggggtcagattataaagacgacgatgataaagggagcgactacaaggacgacgatgacaaggcctggtcccatccccagttcgagaaacaccatcaccaccaccatcatcacactagtggctccggcgagggcagaggaagtctactaacctgcggagatgtggaagaaaatcctggcccacatatgaccgagtacaagcccacggtgcgcctcgccacccgcgacgacgtccccagggccgtacgcaccctcgccgccgcgttcgccgactaccccgccacgcgccacaccgtcgatccggaccgccacatcgagcgggtcaccgagctgcaagaactcttcctcacgcgcgtcgggctcgacatcggcaaggtgtgggtcgcggacgacggcgccgcggtggcggtctggaccacgccggagagcgtcgaagcgggggcggtgttcgccgagatcggcccgcgcatggccgagttgagcggttcccggctggccgcgcagcaacagatggaaggcctcctggcgccgcaccggcccaaggagcccgcgtggttcctggccaccgtcggcgtctcgcccgaccaccagggcaagggtctgggcagcgccgtcgtgctccccggagtggaggcggccgagcgcgccggggtgcccgccttcctggagacctccgcgccccgcaacctccccttctacgagcggctcggcttcaccgtcaccgccgacgtcgaggtgcccgaaggaccgcgcacctggtgcatgacccgcaagcccggtgcctga

SEQ ID NO: 5170 - DNA, 813 bp, synthetic construct
  source 1..813: mol_type = other DNA
atggccttaccagtgaccgccttgctcctgccgctggccttgctgctccacgccgccaggccggacatccagatgacacagagccctagcagcctgtctgccagcgtgggagacagagtgaccatcacatgcaaggccagcgaccacatcaacaactggctggcctggtatcagcagaagcctggacaggcccctaagctgctgatctacggcgctaccacactggaaacaggcgtgcccagcagattttctggcagcggctctggcaccgactacaccctgacaatatccagcctccagcctgaggacttcgccacctactactgtcagcagagctggaacaccccttggacattcggccagggcaccaagctggaaatcaagagaggcggaggcggaagtggaggcggaggatctggcggcggaggctctcaagttcagcttcaacagcctggcgctgagctggtcaaacctggcgcttctgtgaagatgagctgcaaagccagcggctacgccttcaacagctactggatcaactggatgaagcagaaacccggccagggactcgaatggatcggccaaatctatcccggcgacggcgacaccaactacaacggcaagttcaagggcagagccacactgaccgccgatacctctagcagcacagcctacatgcagctgagcagcctgaccagcgaagatagcgccgtgtacttctgtgcccggtccatcacaacagtcgtgggctgcgctatggactattggggccagggaacaagcgtgaccgtgtctagtacgcgtgcaagaccataa

SEQ ID NO: 5171 - DNA, 1704 bp, synthetic construct
  source 1..1704: mol_type = other DNA
atggccttaccagtgaccgccttgctcctgccgctggccttgctgctccacgccgccaggccggacatccagatgacacagagccctagcagcctgtctgccagcgtgggagacagagtgaccatcacatgcaaggccagcgaccacatcaacaactggctggcctggtatcagcagaagcctggacaggcccctaagctgctgatctacggcgctaccacactggaaacaggcgtgcccagcagattttctggcagcggctctggcaccgactacaccctgacaatatccagcctccagcctgaggacttcgccacctactactgtcagcagagctggaacaccccttggacattcggccagggcaccaagctggaaatcaagagaggcggaggcggaagtggaggcggaggatctggcggcggaggctctcaagttcagcttcaacagcctggcgctgagctggtcaaacctggcgcttctgtgaagatgagctgcaaagccagcggctacgccttcaacagctactggatcaactggatgaagcagaaacccggccagggactcgaatggatcggccaaatctatcccggcgacggcgacaccaactacaacggcaagttcaagggcagagccacactgaccgccgatacctctagcagcacagcctacatgcagctgagcagcctgaccagcgaagatagcgccgtgtacttctgtgcccggtccatcacaacagtcgtgggctgcgctatggactattggggccagggaacaagcgtgaccgtgtctagtacgcgtgcaagatttgtgcgccgctacaggaacctcgagggaggcagctggagccaccctcagtttgaaaaagactacaaagacgatgacgataagggatcagattacaaggatgatgatgacaaggggtcagattataaagacgacgatgataaagggagcgactacaaggacgacgatgacaaggcctggtcccatccccagttcgagaaacaccatcaccaccaccatcatcacactagtggctccggcgagggcagaggaagtctactaacctgcggagatgtggaagaaaatcctggcccacatatgaccgagtacaagcccacggtgcgcctcgccacccgcgacgacgtccccagggccgtacgcaccctcgccgccgcgttcgccgactaccccgccacgcgccacaccgtcgatccggaccgccacatcgagcgggtcaccgagctgcaagaactcttcctcacgcgcgtcgggctcgacatcggcaaggtgtgggtcgcggacgacggcgccgcggtggcggtctggaccacgccggagagcgtcgaagcgggggcggtgttcgccgagatcggcccgcgcatggccgagttgagcggttcccggctggccgcgcagcaacagatggaaggcctcctggcgccgcaccggcccaaggagcccgcgtggttcctggccaccgtcggcgtctcgcccgaccaccagggcaagggtctgggcagcgccgtcgtgctccccggagtggaggcggccgagcgcgccggggtgcccgccttcctggagacctccgcgccccgcaacctccccttctacgagcggctcggcttcaccgtcaccgccgacgtcgaggtgcccgaaggaccgcgcacctggtgcatgacccgcaagcccggtgcctga

SEQ ID NO: 5172 - DNA, 1704 bp, synthetic construct
  source 1..1704: mol_type = other DNA
atggccttaccagtgaccgccttgctcctgccgctggccttgctgctccacgccgccaggccggacatccagatgacacagagccctagcagcctgtctgccagcgtgggagacagagtgaccatcacatgcaaggccagcgaccacatcaacaactggctggcctggtatcagcagaagcctggacaggcccctaagctgctgatctacggcgctaccacactggaaacaggcgtgcccagcagattttctggcagcggctctggcaccgactacaccctgacaatatccagcctccagcctgaggacttcgccacctactactgtcagcagagctggaacaccccttggacattcggccagggcaccaagctggaaatcaagagaggcggaggcggaagtggaggcggaggatctggcggcggaggctctcaagttcagcttcaacagcctggcgctgagctggtcaaacctggcgcttctgtgaagatgagctgcaaagccagcggctacgccttcaacagctactggatcaactggatgaagcagaaacccggccagggactcgaatggatcggccaaatctatcccggcgacggcgacaccaactacaacggcaagttcaagggcagagccacactgaccgccgatacctctagcagcacagcctacatgcagctgagcagcctgaccagcgaagatagcgccgtgtacttctgtgcccggtccatcacaacagtcgtgggctgcgctatggactattggggccagggaacaagcgtgaccgtgtctagtacgcgtgcaagacttattagccgctacaggaacctcgagggaggcagctggagccaccctcagtttgaaaaagactacaaagacgatgacgataagggatcagattacaaggatgatgatgacaaggggtcagattataaagacgacgatgataaagggagcgactacaaggacgacgatgacaaggcctggtcccatccccagttcgagaaacaccatcaccaccaccatcatcacactagtggctccggcgagggcagaggaagtctactaacctgcggagatgtggaagaaaatcctggcccacatatgaccgagtacaagcccacggtgcgcctcgccacccgcgacgacgtccccagggccgtacgcaccctcgccgccgcgttcgccgactaccccgccacgcgccacaccgtcgatccggaccgccacatcgagcgggtcaccgagctgcaagaactcttcctcacgcgcgtcgggctcgacatcggcaaggtgtgggtcgcggacgacggcgccgcggtggcggtctggaccacgccggagagcgtcgaagcgggggcggtgttcgccgagatcggcccgcgcatggccgagttgagcggttcccggctggccgcgcagcaacagatggaaggcctcctggcgccgcaccggcccaaggagcccgcgtggttcctggccaccgtcggcgtctcgcccgaccaccagggcaagggtctgggcagcgccgtcgtgctccccggagtggaggcggccgagcgcgccggggtgcccgccttcctggagacctccgcgccccgcaacctccccttctacgagcggctcggcttcaccgtcaccgccgacgtcgaggtgcccgaaggaccgcgcacctggtgcatgacccgcaagcccggtgcctga

SEQ ID NO: 5173 - DNA, 1704 bp, synthetic construct
  source 1..1704: mol_type = other DNA
atggccttaccagtgaccgccttgctcctgccgctggccttgctgctccacgccgccaggccggacatccagatgacacagagccctagcagcctgtctgccagcgtgggagacagagtgaccatcacatgcaaggccagcgaccacatcaacaactggctggcctggtatcagcagaagcctggacaggcccctaagctgctgatctacggcgctaccacactggaaacaggcgtgcccagcagattttctggcagcggctctggcaccgactacaccctgacaatatccagcctccagcctgaggacttcgccacctactactgtcagcagagctggaacaccccttggacattcggccagggcaccaagctggaaatcaagagaggcggaggcggaagtggaggcggaggatctggcggcggaggctctcaagttcagcttcaacagcctggcgctgagctggtcaaacctggcgcttctgtgaagatgagctgcaaagccagcggctacgccttcaacagctactggatcaactggatgaagcagaaacccggccagggactcgaatggatcggccaaatctatcccggcgacggcgacaccaactacaacggcaagttcaagggcagagccacactgaccgccgatacctctagcagcacagcctacatgcagctgagcagcctgaccagcgaagatagcgccgtgtacttctgtgcccggtccatcacaacagtcgtgggctgcgctatggactattggggccagggaacaagcgtgaccgtgtctagtacgcgtgcaagatctaattctcgctacaggaacctcgagggaggcagctggagccaccctcagtttgaaaaagactacaaagacgatgacgataagggatcagattacaaggatgatgatgacaaggggtcagattataaagacgacgatgataaagggagcgactacaaggacgacgatgacaaggcctggtcccatccccagttcgagaaacaccatcaccaccaccatcatcacactagtggctccggcgagggcagaggaagtctactaacctgcggagatgtggaagaaaatcctggcccacatatgaccgagtacaagcccacggtgcgcctcgccacccgcgacgacgtccccagggccgtacgcaccctcgccgccgcgttcgccgactaccccgccacgcgccacaccgtcgatccggaccgccacatcgagcgggtcaccgagctgcaagaactcttcctcacgcgcgtcgggctcgacatcggcaaggtgtgggtcgcggacgacggcgccgcggtggcggtctggaccacgccggagagcgtcgaagcgggggcggtgttcgccgagatcggcccgcgcatggccgagttgagcggttcccggctggccgcgcagcaacagatggaaggcctcctggcgccgcaccggcccaaggagcccgcgtggttcctggccaccgtcggcgtctcgcccgaccaccagggcaagggtctgggcagcgccgtcgtgctccccggagtggaggcggccgagcgcgccggggtgcccgccttcctggagacctccgcgccccgcaacctccccttctacgagcggctcggcttcaccgtcaccgccgacgtcgaggtgcccgaaggaccgcgcacctggtgcatgacccgcaagcccggtgcctga

SEQ ID NO: 5174 - DNA, 810 bp, synthetic construct
  source 1..810: mol_type = other DNA
atggccttaccagtgaccgccttgctcctgccgctggccttgctgctccacgccgccaggccggacatccagatgacacagagccctagcagcctgtctgccagcgtgggagacagagtgaccatcacatgcaaggccagcgaccacatcaacaactggctggcctggtatcagcagaagcctggacaggcccctaagctgctgatctacggcgctaccacactggaaacaggcgtgcccagcagattttctggcagcggctctggcaccgactacaccctgacaatatccagcctccagcctgaggacttcgccacctactactgtcagcagagctggaacaccccttggacattcggccagggcaccaagctggaaatcaagagaggcggaggcggaagtggaggcggaggatctggcggcggaggctctcaagttcagcttcaacagcctggcgctgagctggtcaaacctggcgcttctgtgaagatgagctgcaaagccagcggctacgccttcaacagctactggatcaactggatgaagcagaaacccggccagggactcgaatggatcggccaaatctatcccggcgacggcgacaccaactacaacggcaagttcaagggcagagccacactgaccgccgatacctctagcagcacagcctacatgcagctgagcagcctgaccagcgaagatagcgccgtgtacttctgtgcccggtccatcacaacagtcgtgggctgcgctatggactattggggccagggaacaagcgtgaccgtgtctagtacgcgtgcaagatag

SEQ ID NO: 5175 - DNA, 1704 bp, synthetic construct
  source 1..1704: mol_type = other DNA
atggccttaccagtgaccgccttgctcctgccgctggccttgctgctccacgccgccaggccggacatccagatgacacagagccctagcagcctgtctgccagcgtgggagacagagtgaccatcacatgcaaggccagcgaccacatcaacaactggctggcctggtatcagcagaagcctggacaggcccctaagctgctgatctacggcgctaccacactggaaacaggcgtgcccagcagattttctggcagcggctctggcaccgactacaccctgacaatatccagcctccagcctgaggacttcgccacctactactgtcagcagagctggaacaccccttggacattcggccagggcaccaagctggaaatcaagagaggcggaggcggaagtggaggcggaggatctggcggcggaggctctcaagttcagcttcaacagcctggcgctgagctggtcaaacctggcgcttctgtgaagatgagctgcaaagccagcggctacgccttcaacagctactggatcaactggatgaagcagaaacccggccagggactcgaatggatcggccaaatctatcccggcgacggcgacaccaactacaacggcaagttcaagggcagagccacactgaccgccgatacctctagcagcacagcctacatgcagctgagcagcctgaccagcgaagatagcgccgtgtacttctgtgcccggtccatcacaacagtcgtgggctgcgctatggactattggggccagggaacaagcgtgaccgtgtctagtacgcgtgcaagaattcttgcgcgctacaggaacctcgagggaggcagctggagccaccctcagtttgaaaaagactacaaagacgatgacgataagggatcagattacaaggatgatgatgacaaggggtcagattataaagacgacgatgataaagggagcgactacaaggacgacgatgacaaggcctggtcccatccccagttcgagaaacaccatcaccaccaccatcatcacactagtggctccggcgagggcagaggaagtctactaacctgcggagatgtggaagaaaatcctggcccacatatgaccgagtacaagcccacggtgcgcctcgccacccgcgacgacgtccccagggccgtacgcaccctcgccgccgcgttcgccgactaccccgccacgcgccacaccgtcgatccggaccgccacatcgagcgggtcaccgagctgcaagaactcttcctcacgcgcgtcgggctcgacatcggcaaggtgtgggtcgcggacgacggcgccgcggtggcggtctggaccacgccggagagcgtcgaagcgggggcggtgttcgccgagatcggcccgcgcatggccgagttgagcggttcccggctggccgcgcagcaacagatggaaggcctcctggcgccgcaccggcccaaggagcccgcgtggttcctggccaccgtcggcgtctcgcccgaccaccagggcaagggtctgggcagcgccgtcgtgctccccggagtggaggcggccgagcgcgccggggtgcccgccttcctggagacctccgcgccccgcaacctccccttctacgagcggctcggcttcaccgtcaccgccgacgtcgaggtgcccgaaggaccgcgcacctggtgcatgacccgcaagcccggtgcctga

SEQ ID NO: 5176 - DNA, 1704 bp, synthetic construct
  source 1..1704: mol_type = other DNA
atggccttaccagtgaccgccttgctcctgccgctggccttgctgctccacgccgccaggccggacatccagatgacacagagccctagcagcctgtctgccagcgtgggagacagagtgaccatcacatgcaaggccagcgaccacatcaacaactggctggcctggtatcagcagaagcctggacaggcccctaagctgctgatctacggcgctaccacactggaaacaggcgtgcccagcagattttctggcagcggctctggcaccgactacaccctgacaatatccagcctccagcctgaggacttcgccacctactactgtcagcagagctggaacaccccttggacattcggccagggcaccaagctggaaatcaagagaggcggaggcggaagtggaggcggaggatctggcggcggaggctctcaagttcagcttcaacagcctggcgctgagctggtcaaacctggcgcttctgtgaagatgagctgcaaagccagcggctacgccttcaacagctactggatcaactggatgaagcagaaacccggccagggactcgaatggatcggccaaatctatcccggcgacggcgacaccaactacaacggcaagttcaagggcagagccacactgaccgccgatacctctagcagcacagcctacatgcagctgagcagcctgaccagcgaagatagcgccgtgtacttctgtgcccggtccatcacaacagtcgtgggctgcgctatggactattggggccagggaacaagcgtgaccgtgtctagtacgcgtgcaagacggtcatcccgctacaggaacctcgagggaggcagctggagccaccctcagtttgaaaaagactacaaagacgatgacgataagggatcagattacaaggatgatgatgacaaggggtcagattataaagacgacgatgataaagggagcgactacaaggacgacgatgacaaggcctggtcccatccccagttcgagaaacaccatcaccaccaccatcatcacactagtggctccggcgagggcagaggaagtctactaacctgcggagatgtggaagaaaatcctggcccacatatgaccgagtacaagcccacggtgcgcctcgccacccgcgacgacgtccccagggccgtacgcaccctcgccgccgcgttcgccgactaccccgccacgcgccacaccgtcgatccggaccgccacatcgagcgggtcaccgagctgcaagaactcttcctcacgcgcgtcgggctcgacatcggcaaggtgtgggtcgcggacgacggcgccgcggtggcggtctggaccacgccggagagcgtcgaagcgggggcggtgttcgccgagatcggcccgcgcatggccgagttgagcggttcccggctggccgcgcagcaacagatggaaggcctcctggcgccgcaccggcccaaggagcccgcgtggttcctggccaccgtcggcgtctcgcccgaccaccagggcaagggtctgggcagcgccgtcgtgctccccggagtggaggcggccgagcgcgccggggtgcccgccttcctggagacctccgcgccccgcaacctccccttctacgagcggctcggcttcaccgtcaccgccgacgtcgaggtgcccgaaggaccgcgcacctggtgcatgacccgcaagcccggtgcctga

SEQ ID NO: 5177 - DNA, 1704 bp, synthetic construct
  source 1..1704: mol_type = other DNA
atggccttaccagtgaccgccttgctcctgccgctggccttgctgctccacgccgccaggccggacatccagatgacacagagccctagcagcctgtctgccagcgtgggagacagagtgaccatcacatgcaaggccagcgaccacatcaacaactggctggcctggtatcagcagaagcctggacaggcccctaagctgctgatctacggcgctaccacactggaaacaggcgtgcccagcagattttctggcagcggctctggcaccgactacaccctgacaatatccagcctccagcctgaggacttcgccacctactactgtcagcagagctggaacaccccttggacattcggccagggcaccaagctggaaatcaagagaggcggaggcggaagtggaggcggaggatctggcggcggaggctctcaagttcagcttcaacagcctggcgctgagctggtcaaacctggcgcttctgtgaagatgagctgcaaagccagcggctacgccttcaacagctactggatcaactggatgaagcagaaacccggccagggactcgaatggatcggccaaatctatcccggcgacggcgacaccaactacaacggcaagttcaagggcagagccacactgaccgccgatacctctagcagcacagcctacatgcagctgagcagcctgaccagcgaagatagcgccgtgtacttctgtgcccggtccatcacaacagtcgtgggctgcgctatggactattggggccagggaacaagcgtgaccgtgtctagtacgcgtgcaagattcctaaaacgctacaggaacctcgagggaggcagctggagccaccctcagtttgaaaaagactacaaagacgatgacgataagggatcagattacaaggatgatgatgacaaggggtcagattataaagacgacgatgataaagggagcgactacaaggacgacgatgacaaggcctggtcccatccccagttcgagaaacaccatcaccaccaccatcatcacactagtggctccggcgagggcagaggaagtctactaacctgcggagatgtggaagaaaatcctggcccacatatgaccgagtacaagcccacggtgcgcctcgccacccgcgacgacgtccccagggccgtacgcaccctcgccgccgcgttcgccgactaccccgccacgcgccacaccgtcgatccggaccgccacatcgagcgggtcaccgagctgcaagaactcttcctcacgcgcgtcgggctcgacatcggcaaggtgtgggtcgcggacgacggcgccgcggtggcggtctggaccacgccggagagcgtcgaagcgggggcggtgttcgccgagatcggcccgcgcatggccgagttgagcggttcccggctggccgcgcagcaacagatggaaggcctcctggcgccgcaccggcccaaggagcccgcgtggttcctggccaccgtcggcgtctcgcccgaccaccagggcaagggtctgggcagcgccgtcgtgctccccggagtggaggcggccgagcgcgccggggtgcccgccttcctggagacctccgcgccccgcaacctccccttctacgagcggctcggcttcaccgtcaccgccgacgtcgaggtgcccgaaggaccgcgcacctggtgcatgacccgcaagcccggtgcctga

SEQ ID NO: 5178 - DNA, 1704 bp, synthetic construct; identical to SEQ ID NO: 5150
  source 1..1704: mol_type = other DNA

SEQ ID NO: 5179 - DNA, 2139 bp, synthetic construct
  source 1..2139: mol_type = other DNA
atggccctgcctgtgacagctctgctgctgcctctggcactgctgctgcacgccgccagacctgcaagaagtgaagatcgctacaggaaccctaaggggtcaggaggaagcgaacttcctacacagggcaccttcagcaacgtgtccaccaatgtgtccccagccaagcctaccaccaccgcctgcgcacgcagcgaggacaggtataggaaccccaaaggaagtggcggatctcctgctcctagacctcctacaccagctcctacaatcgccagccagcctctgtctctcagacccgaagcctgtagacctgctgctggcggagctgtgcataccagaggactggatttcgcctgcgacatctacatctgggctcctctggctggcacatgtggcgttctgctgctgagcctggtcatcaccctgtactgcaaccaccggaacaggcggagagtgtgcaagtgccctagacctgtggttggaggctctggaggatcctctcaccactggggctacggcaagcacaatggacctgagcactggcacaaggacttccctatcgccaagggcgagagacagagccctgtggacattgacacccacaccgccaaatacgaccccagcctgaagcctctgagcgtgtcatacgatcaggccaccagcctgagaatcctgaacaacggccacgccttcaacgtggaatttgacgacagccaggacaaggccgtgctgaaaggtggacctctggacggcacctaccggctgatccagttccactttcactggggcagcctggatggacagggaagcgaacacaccgtggacaagaagaagtacgccgccgaactgcacctggtgcactggaacaccaaatacggcgacttcggcaaagccgtgcagcagccagatggactggctgtgctgggcatcttcctgaaagtgggctctgccaagcctggcccccagaaagtggtggacgtgctggacagcatcaagaccaagggcaagagcgccgacttcaccaacttcgaccctagaggactgctgcccgagagcctggactactggacataccctggcagcctgaccacacctcctctgctggaatgtgtgacctggatcgtcctgaaagagcccatcagcgtcagcagcgaacaggtgctgaagttcagaaagctgaatttcaacggcgagggcgagcccgaggaactgatggtggataattggaggcccgctcagcccctgaagaacagacagatcaaggccagcttcaagagagcaaagcgaagtggtagcggagcaaccaacttttctctgctcaagcaagccggtgacgtggaagagaaccctggtcctgaattcatgaagcccaccgagaacaacgaagacttcaacatcgtggccgtggccagcaacttcgcgaccacggatctcgatgctgaccgcgggaagttgcccggcaagaagctgccgctggaggtgctcaaagagatggaagccaatgcccggaaagctggctgcaccaggggctgtctgatctgcctgtcccacatcaagtgcacgcccaagatgaagaagttcatcccaggacgctgccacacctacgaaggcgacaaagagtccgcacagggcggcataggcgaggcgatcgtcgacattcctgagattcctgggttcaaggacttggagcccatggagcagttcatcgcacaggtcgatctgtgtgtggactgcacaactggctgcctcaaagggcttgccaacgtgcagtgttctgacctgctcaagaagtggctgccgcaacgctgtgcgacctttgccagcaagatccagggccaggtggacaagatcaagggggccggtggtgacctcgagcagaaactgatctcggaagaggatctggcgaagcccaccacgacgccagcgccgcgaccaccaacaccggcgcccaccatcgcgtcgcagcccctgtccctgcgcccagaggcgtgccggccagcggcggggggcgcagtgcacacgagggggctggacttcgcctgtgacatctacatctgggcgcccttggccgggacttgtggggtccttctcctgtcactggttatcaccctttactgcaaacggggcagaaagaaatag

SEQ ID NO: 5180 - DNA, 2385 bp, synthetic construct
  source 1..2385: mol_type = other DNA
atggccctgcctgtgacagctctgctgctgcctctggcactgctgctgcacgccgccagacctgcaagaagtgaagatcgctacaggaaccctaaggggtcaggaggaagcgcccctaccagcagcagcaccaagaaaacccagctgcaactggaacacctcctgctggacctccagatgatcctgaacggcatcaacaactacaagaaccccaagctgacccggatgctgaccttcaagttctacatgcccaagaaggccaccgagctgaagcacctccagtgcctggaagaggaactgaagcccctggaagaagtgctgaatctggcccagagcaagaacttccacctgaggccaagggacctgatctccaacatcaacgtgatcgtgctggaactgaaaggcagcgagacaaccttcatgtgcgagtacgccgacgagacagctaccatcgtggaatttctgaatcggtggatcaccttctgccagagcatcatcagcaccctgacagccaagcctacaacaacccctgctcctagacctcctacaccagctcctacaatcgccagccagcctctgtctctcagacccgaagcctgtagaccagctgctggcggagctgtgcataccagaggactggatttcgcctgcgacatctacatctgggctcctctggctggcacatgtggcgttctgctgctgtccctggtcatcaccctgtactgtggaggctctggaggatcctctcaccactggggctacggcaagcacaatggacctgagcactggcacaaggacttccctatcgccaagggcgagagacagagccctgtggacattgacacccacaccgccaaatacgaccccagcctgaagcctctgagcgtgtcatacgatcaggccaccagcctgagaatcctgaacaacggccacgccttcaacgtggaatttgacgacagccaggacaaggccgtgctgaaaggtggacctctggacggcacctaccggctgatccagttccactttcactggggcagcctggatggacagggaagcgaacacaccgtggacaagaagaagtacgccgccgaactgcacctggtgcactggaacaccaaatacggcgacttcggcaaagccgtgcagcagccagatggactggctgtgctgggcatcttcctgaaagtgggctctgccaagcctggcccccagaaagtggtggacgtgctggacagcatcaagaccaagggcaagagcgccgacttcaccaacttcgaccctagaggactgctgcccgagagcctggactactggacataccctggcagcctgaccacacctcctctgctggaatgtgtgacctggatcgtcctgaaagagcccatcagcgtcagcagcgaacaggtgctgaagttcagaaagctgaatttcaacggcgagggcgagcccgaggaactgatggtggataattggaggcccgctcagcccctgaagaacagacagatcaaggccagcttcaagagagcaaagcgaagtggtagcggagcaaccaacttttctctgctcaagcaagccggtgacgtggaagagaaccctggtcctgaattcatgaagcccaccgagaacaacgaagacttcaacatcgtggccgtggccagcaacttcgcgaccacggatctcgatgctgaccgcgggaagttgcccggcaagaagctgccgctggaggtgctcaaagagatggaagccaatgcccggaaagctggctgcaccaggggctgtctgatctgcctgtcccacatcaagtgcacgcccaagatgaagaagttcatcccaggacgctgccacacctacgaaggcgacaaagagtccgcacagggcggcataggcgaggcgatcgtcgacattcctgagattcctgggttcaaggacttggagcccatggagcagttcatcgcacaggtcgatctgtgtgtggactgcacaactggctgcctcaaagggcttgccaacgtgcagtgttctgacctgctcaagaagtggctgccgcaacgctgtgcgacctttgccagcaagatccagggccaggtggacaagatcaagggggccggtggtgacctcgagcagaaactgatctcggaagaggatctggcgaagcccaccacgacgccagcgccgcgaccaccaacaccggcgcccaccatcgcgtcgcagcccctgtccctgcgcccagaggcgtgccggccagcggcggggggcgcagtgcacacgagggggctggacttcgcctgtgacatctacatctgggcgcccttggccgggacttgtggggtccttctcctgtcactggttatcaccctttactgcaaacggggcagaaagaaatag

SEQ ID NO: 5181 - DNA, 2508 bp, synthetic construct
  source 1..2508: mol_type = other DNA
atggccctgcctgtgacagctctgctgctgcctctggcactgctgctgcacgccgccagacctgcaagaagtgaagatcgctacaggaaccctaaggggtcaggaggaagcgaacttcctacacagggcaccttcagcaacgtgtccaccaatgtgtccccagccaagcctaccaccaccgcctgcgcacgcagcgaggacaggtataggaaccccaaaggaagtggcggatctgcccctaccagcagcagcaccaagaaaacccagctgcaactggaacacctcctgctggacctccagatgatcctgaacggcatcaacaactacaagaaccccaagctgacccggatgctgaccttcaagttctacatgcccaagaaggccaccgagctgaagcacctccagtgcctggaagaggaactgaagcccctggaagaagtgctgaatctggcccagagcaagaacttccacctgaggccaagggacctgatctccaacatcaacgtgatcgtgctggaactgaaaggcagcgagacaaccttcatgtgcgagtacgccgacgagacagctaccatcgtggaatttctgaatcggtggatcaccttctgccagagcatcatcagcaccctgacagccaagcctacaacaacccctgctcctagacctcctacaccagctcctacaatcgccagccagcctctgtctctcagacccgaagcctgtagaccagctgctggcggagctgtgcataccagaggactggatttcgcctgcgacatctacatctgggctcctctggctggcacatgtggcgttctgctgctgtccctggtcatcaccctgtactgtggaggctctggaagatcctctcaccactggggctacggcaagcacaatggacctgagcactggcacaaggacttccctatcgccaagggcgagagacagagccctgtggacattgacacccacaccgccaaatacgaccccagcctgaagcctctgagcgtgtcatacgatcaggccaccagcctgagaatcctgaacaacggccacgccttcaacgtggaatttgacgacagccaggacaaggccgtgctgaaaggtggacctctggacggcacctaccggctgatccagttccactttcactggggcagcctggatggacagggaagcgaacacaccgtggacaagaagaagtacgccgccgaactgcacctggtgcactggaacaccaaatacggcgacttcggcaaagccgtgcagcagccagatggactggctgtgctgggcatcttcctgaaagtgggctctgccaagcctggcccccagaaagtggtggacgtgctggacagcatcaagaccaagggcaagagcgccgacttcaccaacttcgaccctagaggactgctgcccgagagcctggactactggacataccctggcagcctgaccacacctcctctgctggaatgtgtgacctggatcgtcctgaaagagcccatcagcgtcagcagcgaacaggtgctgaagttcagaaagctgaatttcaacggcgagggcgagcccgaggaactgatggtggataattggaggcccgctcagcccctgaagaacagacagatcaaggccagcttcaagagagcaaagcgaagtggtagcggagcaaccaacttttctctgctcaagcaagccggtgacgtggaagagaaccctggtcctgaattcatgaagcccaccgagaacaacgaagacttcaacatcgtggccgtggccagcaacttcgcgaccacggatctcgatgctgaccgcgggaagttgcccggcaagaagctgccgctggaggtgctcaaagagatggaagccaatgcccggaaagctggctgcaccaggggctgtctgatctgcctgtcccacatcaagtgcacgcccaagatgaagaagttcatcccaggacgctgccacacctacgaaggcgacaaagagtccgcacagggcggcataggcgaggcgatcgtcgacattcctgagattcctgggttcaaggacttggagcccatggagcagttcatcgcacaggtcgatctgtgtgtggactgcacaactggctgcctcaaagggcttgccaacgtgcagtgttctgacctgctcaagaagtggctgccgcaacgctgtgcgacctttgccagcaagatccagggccaggtggacaagatcaagggggccggtggtgacctcgagcagaaactgatctcggaagaggatctggcgaagcccaccacgacgccagcgccgcgaccaccaacaccggcgcccaccatcgcgtcgcagcccctgtccctgcgcccagaggcgtgccggccagcggcggggggcgcagtgcacacgagggggctggacttcgcctgtgacatctacatctgggcgcccttggccgggacttgtggggtccttctcctgtcactggttatcaccctttactgcaaacggggcagaaagaaatag

SEQ ID NO: 5182 - DNA, 2139 bp, synthetic construct
  source 1..2139: mol_type = other DNA
atggccctgcctgtgacagctctgctgctgcctctggcactgctgctgcacgccgccagacctgcaagaagtgaagatcgctacaggaaccctaaggggtcaggaggaagcgaacttcctacacagggcaccttcagcaacgtgtccaccaatgtgtccccagccaagcctaccaccaccgcctgcgcacgcagcgaggacaggtataggaaccccaaaggaagtggcggatctcctgctcctagacctcctacaccagctcctacaatcgccagccagcctctgtctctcagacccgaagcctgtagacctgctgctggcggagctgtgcataccagaggactggatttcgcctgcgacatctacatctgggctcctctggctggcacatgtggcgttctgctgctgagcctggtcatcaccctgtactgcaaccaccggaacaggcggagagtgtgcaagtgccctagacctgtggttggaggctctggaggatcctctcaccactggggctacggcaagcacaatggacctgagcactggcacaaggacttccctatcgccaagggcgagagacagagccctgtggacattgacacccacaccgccaaatacgaccccagcctgaagcctctgagcgtgtcatacgatcaggccaccagcctgagaatcctgaacaacggccacgccttcaacgtggaatttgacgacagccaggacaaggccgtgctgaaaggtggacctctggacggcacctaccggctgatccagttccactttcactggggcagcctggatggacagggaagcgaacacaccgtggacaagaagaagtacgccgccgaactgcacctggtgcactggaacaccaaatacggcgacttcggcaaagccgtgcagcagccagatggactggctgtgctgggcatcttcctgaaagtgggctctgccaagcctggccaccagaaagtggtggacgtgctggacagcatcaagaccaagggcaagagcgccgacttcaccaacttcgaccctagaggactgctgcccgagagcctggactactggacataccctggcagcctgaccacacctcctctgctggaatgtgtgacctggatcgtcctgaaagagcccatcagcgtcagcagcgaacaggtgctgaagttcagaaagctgaatttcaacggcgagggcgagcccgaggaactgatggtggataattggaggcccgctcagcccctgaagaacagacagatcaaggccagcttcaagagagcaaagcgaagtggtagcggagcaaccaacttttctctgctcaagcaagccggtgacgtggaagagaaccctggtcctgaattcatgaagcccaccgagaacaacgaagacttcaacatcgtggccgtggccagcaacttcgcgaccacggatctcgatgctgaccgcgggaagttgcccggcaagaagctgccgctggaggtgctcaaagagatggaagccaatgcccggaaagctggctgcaccaggggctgtctgatctgcctgtcccacatcaagtgcacgcccaagatgaagaagttcatcccaggacgctgccacacctacgaaggcgacaaagagtccgcacagggcggcataggcgaggcgatcgtcgacattcctgagattcctgggttcaaggacttggagcccatggagcagttcatcgcacaggtcgatctgtgtgtggactgcacaactggctgcctcaaagggcttgccaacgtgcagtgttctgacctgctcaagaagtggctgccgcaacgctgtgcgacctttgccagcaagatccagggccaggtggacaagatcaagggggccggtggtgacctcgagcagaaactgatctcggaagaggatctggcgaagcccaccacgacgccagcgccgcgaccaccaacaccggcgcccaccatcgcgtcgcagcccctgtccctgcgcccagaggcgtgccggccagcggcggggggcgcagtgcacacgagggggctggacttcgcctgtgacatctacatctgggcgcccttggccgggacttgtggggtccttctcctgtcactggttatcaccctttactgcaaacggggcagaaagaaatag

SEQ ID NO: 5183 - DNA, 2346 bp, synthetic construct
  source 1..2346: mol_type = other DNA
atggctagactggccctgtctcctgtgcctagccattggatggttgccctgctgctgctcctgtctgctgaacctgttcctgccgccagaagcgaggacagatacagaaaccccaagggcagcgcctgctccagaatctggcaaagccccagattcattgcccggaagaggggcttcaccgtgaagatgcactgctacatgaacagcgccagcggcaacgtttcctggctgtggaagcaagagatggacgagaaccctcagcagctgaagctggaaaagggccgcatggaagagagccagaacgagtctctggccacactgaccatccagggcatcagattcgaggacaacggcatctacttttgccagcagaagtgcaacaacaccagcgaggtgtaccaaggctgtggcaccgagctgagagtgatgggctttagcacactggcccagctgaaacagcggaacaccctgaaggacggcatcattatgatccagacactgctcatcatcctgtttattatcgtgcccatcttcctgctgctcgacaaggacgatagcaaggccggcatggaagaggaccacacctacgaaggactggacatcgaccagaccgccacatacgaggacatcgtgaccctgagaaccggcgaagtgaagtggagcgtgggagagcaccctggacaagaaggaggctctggaaaatcctctcaccactggggctacggcaagcacaatggacctgagcactggcacaaggacttccctatcgccaagggcgagagacagagccctgtggacattgacacccacaccgccaaatacgaccccagcctgaagcctctgagcgtgtcatacgatcaggccaccagcctgagaatcctgaacaacggccacgccttcaacgtggaatttgacgacagccaggacaaggccgtgctgaaaggtggacctctggacggcacctaccggctgatccagttccactttcactggggcagcctggatggacagggaagcgaacacaccgtggacaagaagaagtacgccgccgaactgcacctggtgcactggaacaccaaatacggcgacttcggcaaagccgtgcagcagccagatggactggctgtgctgggcatcttcctgaaagtgggctctgccaagcctggcccccagaaagtggtggacgtgctggacagcatcaagaccaagggcaagagcgccgacttcaccaacttcgaccctagaggactgctgcccgagagcctggactactggacataccctggcagcctgaccacacctcctctgctggaatgtgtgacctggatcgtcctgaaagagcccatcagcgtcagcagcgaacaggtgctgaagttcagaaagctgaatttcaacggcgagggcgagcccgaggaactgatggtggataattggaggcccgctcagcccctgaagaacagacagatcaaggccagcttcaagagagcaaagcgaagtggtagcggagcaaccaacttttctctgctcaagcaagccggtgacgtggaagagaaccctggtcctgaattcatgaagcccaccgagaacaacgaagacttcaacatcgtggccgtggccagcaacttcgcgaccacggatctcgatgctgaccgcgggaagttgcccggcaagaagctgccgctggaggtgctcaaagagatggaagccaatgcccggaaagctggctgcaccaggggctgtctgatctgcctgtcccacatcaagtgcacgcccaagatgaagaagttcatcccaggacgctgccacacctacgaaggcgacaaagagtccgcacagggcggcataggcgaggcgatcgtcgacattcctgagattcctgggttcaaggacttggagcccatggagcagttcatcgcacaggtcgatctgtgtgtggactgcacaactggctgcctcaaagggcttgccaacgtgcagtgttctgacctgctcaagaagtggctgccgcaacgctgtgcgacctttgccagcaagatccagggccaggtggacaagatcaagggggccggtggtgacctcgagcagaaactgatctcggaagaggatctggcgaagcccaccacgacgccagcgccgcgaccaccaacaccggcgcccaccatcgcgtcgcagcccctgtccctgcgcccagaggcgtgccggccagcggcggggggcgcagtgcacacgagggggctggacttcgcctgtgacatctacatctgggcgcccttggccgggacttgtggggtccttctcctgtcactggttatcaccctttactgcaaacggggcagaaagaaatag

SEQ ID NO: 5184 - DNA, 2346 bp, synthetic construct
  source 1..2346: mol_type = other DNA
atggctagactggccctgtctcctgtgcctagccattggatggttgccctgctgctgctcctgtctgctgaacctgttcctgccgccagaagcgaggacagatacagaaaccccaagggcagcgcctgctccagaatctggcaaagccccagattcattgcccggaagaggggcttcaccgtgaagatgcactgctacatgaacagcgccagcggcaacgtttcctggctgtggaagcaagagatggacgagaaccctcagcagctgaagctggaaaagggccgcatggaagagagccagaacgagtctctggccacactgaccatccagggcatcagattcgaggacaacggcatctacttttgccagcagaagtgcaacaacaccagcgaggtgtaccaaggctgtggcaccgagctgagagtgatgggctttagcacactggcccagctgaaacagcggaacaccctgaaggacggcatcattatgatccagacactgctcatcatcctgtttattatcgtgcccatcttcctgctgctcgacaaggacgatagcaaggccggcatggaagaggaccacacctacgaaggactggacatcgaccagaccgccacatacgaggacatcgtgaccctgagaaccggcgaagtgaagtggagcgtgggagagcaccctggacaagaaggaggctctggaagatcctctcaccactggggctacggcaagcacaatggacctgagcactggcacaaggacttccctatcgccaagggcgagagacagagccctgtggacattgacacccacaccgccaaatacgaccccagcctgaagcctctgagcgtgtcatacgatcaggccaccagcctgagaatcctgaacaacggccacgccttcaacgtggaatttgacgacagccaggacaaggccgtgctgaaaggtggacctctggacggcacctaccggctgatccagttccactttcactggggcagcctggatggacagggaagcgaacacaccgtggacaagaagaagtacgccgccgaactgcacctggtgcactggaacaccaaatacggcgacttcggcaaagccgtgcagcagccagatggactggctgtgctgggcatcttcctgaaagtgggctctgccaagcctggccaccagaaagtggtggacgtgctggacagcatcaagaccaagggcaagagcgccgacttcaccaacttcgaccctagaggactgctgcccgagagcctggactactggacataccctggcagcctgaccacacctcctctgctggaatgtgtgacctggatcgtcctgaaagagcccatcagcgtcagcagcgaacaggtgctgaagttcagaaagctgaatttcaacggcgagggcgagcccgaggaactgatggtggataattggaggcccgctcagcccctgaagaacagacagatcaaggccagcttcaagagagcaaagcgaagtggtagcggagcaaccaacttttctctgctcaagcaagccggtgacgtggaagagaaccctggtcctgaattcatgaagcccaccgagaacaacgaagacttcaacatcgtggccgtggccagcaacttcgcgaccacggatctcgatgctgaccgcgggaagttgcccggcaagaagctgccgctggaggtgctcaaagagatggaagccaatgcccggaaagctggctgcaccaggggctgtctgatctgcctgtcccacatcaagtgcacgcccaagatgaagaagttcatcccaggacgctgccacacctacgaaggcgacaaagagtccgcacagggcggcataggcgaggcgatcgtcgacattcctgagattcctgggttcaaggacttggagcccatggagcagttcatcgcacaggtcgatctgtgtgtggactgcacaactggctgcctcaaagggcttgccaacgtgcagtgttctgacctgctcaagaagtggctgccgcaacgctgtgcgacctttgccagcaagatccagggccaggtggacaagatcaagggggccggtggtgacctcgagcagaaactgatctcggaagaggatctggcgaagcccaccacgacgccagcgccgcgaccaccaacaccggcgcccaccatcgcgtcgcagcccctgtccctgcgcccagaggcgtgccggccagcggcggggggcgcagtgcacacgagggggctggacttcgcctgtgacatctacatctgggcgcccttggccgggacttgtggggtccttctcctgtcactggttatcaccctttactgcaaacggggcagaaagaaatag

SEQ ID NO: 5185 - DNA, 2385 bp, synthetic construct
  source 1..2385: mol_type = other DNA
atggccctgcctgtgacagctctgctgctgcctctggcactgctgctgcacgccgccagacctgcaagaagtgaagatcgctacaggaaccctaaggggtcaggaggaagcgcccctaccagcagcagcaccaagaaaacccagctgcaactggaacacctcctgctggacctccagatgatcctgaacggcatcaacaactacaagaaccccaagctgacccggatgctgaccttcaagttctacatgcccaagaaggccaccgagctgaagcacctccagtgcctggaagaggaactgaagcccctggaagaagtgctgaatctggcccagagcaagaacttccacctgaggccaagggacctgatctccaacatcaacgtgatcgtgctggaactgaaaggcagcgagacaaccttcatgtgcgagtacgccgacgagacagctaccatcgtggaatttctgaatcggtggatcaccttctgccagagcatcatcagcaccctgacagccaagcctacaacaacccctgctcctagacctcctacaccagctcctacaatcgccagccagcctctgtctctcagacccgaagcctgtagaccagctgctggcggagctgtgcataccagaggactggatttcgcctgcgacatctacatctgggctcctctggctggcacatgtggcgttctgctgctgtccctggtcatcaccctgtactgtggaggctctggaagatcctctcaccactggggctacggcaagcacaatggacctgagcactggcacaaggacttccctatcgccaagggcgagagacagagccctgtggacattgacacccacaccgccaaatacgaccccagcctgaagcctctgagcgtgtcatacgatcaggccaccagcctgagacacctgaacaacggccacgccttcaacgtggaatttgacgacagccaggacaaggccgtgctgaaaggtggacctctggacggcacctaccggctgatccagttccactttcactggggcagcctggataagcagggaagcgaacacaccgtggacaagaagaagtacgccgccgaactgcacctggtgcactggaacaccaaatacggcgacttcggcaaagccgtgcagcagccagatggactggctgtgctgggcatcttcctgaaagtgggctctgccaagcctggcctccagaaagtggtggacgtgctggacagcatcaagaccaagggcaagagcgccgacttcaccaacttcgaccctagaggactgctgcccgagagcctggactactggacataccctggcagcctgaccacacctcctctgctggaatgtgtgacctggatcgtcctgaaagagcccatcagcgtcagcagcgaacaggtgctgaagttcagaaagctgaatttcaacggcgagggcgagcccgaggaactgatggtggataattggaggcccgctcagcccctgaagaacagacagatcaaggccagcttcaagagagcaaagcgaagtggtagcggagcaaccaacttttctctgctcaagcaagccggtgacgtggaagagaaccctggtcctgaattcatgaagcccaccgagaacaacgaagacttcaacatcgtggccgtggccagcaacttcgcgaccacggatctcgatgctgaccgcgggaagttgcccggcaagaagctgccgctggaggtgctcaaagagatggaagccaatgcccggaaagctggctgcaccaggggctgtctgatctgcctgtcccacatcaagtgcacgcccaagatgaagaagttcatcccaggacgctgccacacctacgaaggcgacaaagagtccgcacagggcggcataggcgaggcgatcgtcgacattcctgagattcctgggttcaaggacttggagcccatggagcagttcatcgcacaggtcgatctgtgtgtggactgcacaactggctgcctcaaagggcttgccaacgtgcagtgttctgacctgctcaagaagtggctgccgcaacgctgtgcgacctttgccagcaagatccagggccaggtggacaagatcaagggggccggtggtgacctcgagcagaaactgatctcggaagaggatctggcgaagcccaccacgacgccagcgccgcgaccaccaacaccggcgcccaccatcgcgtcgcagcccctgtccctgcgcccagaggcgtgccggccagcggcggggggcgcagtgcacacgagggggctggacttcgcctgtgacatctacatctgggcgcccttggccgggacttgtggggtccttctcctgtcactggttatcaccctttactgcaaacggggcagaaagaaatag

SEQ ID NO: 5186 - DNA, 2508 bp, synthetic construct
  source 1..2508: mol_type = other DNA
atggccctgcctgtgacagctctgctgctgcctctggcactgctgctgcacgccgccagacctgcaagaagtgaagatcgctacaggaaccctaaggggtcaggaggaagcgaacttcctacacagggcaccttcagcaacgtgtccaccaatgtgtccccagccaagcctaccaccaccgcctgcgcacgcagcgaggacaggtataggaaccccaaaggaagtggcggatctgcccctaccagcagcagcaccaagaaaacccagctgcaactggaacacctcctgctggacctccagatgatcctgaacggcatcaacaactacaagaaccccaagctgacccggatgctgaccttcaagttctacatgcccaagaaggccaccgagctgaagcacctccagtgcctggaagaggaactgaagcccctggaagaagtgctgaatctggcccagagcaagaacttccacctgaggccaagggacctgatctccaacatcaacgtgatcgtgctggaactgaaaggcagcgagacaaccttcatgtgcgagtacgccgacgagacagctaccatcgtggaatttctgaatcggtggatcaccttctgccagagcatcatcagcaccctgacagccaagcctacaacaacccctgctcctagacctcctacaccagctcctacaatcgccagccagcctctgtctctcagacccgaagcctgtagaccagctgctggcggagctgtgcataccagaggactggatttcgcctgcgacatctacatctgggctcctctggctggcacatgtggcgttctgctgctgtccctggtcatcaccctgtactgtggaggctctggaagatcctctcaccactggggctacggcaagcacaatggacctgagcactggcacaaggacttccctatcgccaagggcgagagacagagccctgtggacattgacacccacaccgccaaatacgaccccagcctgaagcctctgagcgtgtcatacgatcaggccaccagcctgagacacctgaacaacggccacgccttcaacgtggaatttgacgacagccaggacaaggccgtgctgaaaggtggacctctggacggcacctaccggctgatccagttccactttcactggggcagcctggataagcagggaagcgaacacaccgtggacaagaagaagtacgccgccgaactgcacctggtgcactggaacaccaaatacggcgacttcggcaaagccgtgcagcagccagatggactggctgtgctgggcatcttcctgaaagtgggctctgccaagcctggcctccagaaagtggtggacgtgctggacagcatcaagaccaagggcaagagcgccgacttcaccaacttcgaccctagaggactgctgcccgagagcctggactactggacataccctggcagcctgaccacacctcctctgctggaatgtgtgacctggatcgtcctgaaagagcccatcagcgtcagcagcgaacaggtgctgaagttcagaaagctgaatttcaacggcgagggcgagcccgaggaactgatggtggataattggaggcccgctcagcccctgaagaacagacagatcaaggccagcttcaagagagcaaagcgaagtggtagcggagcaaccaacttttctctgctcaagcaagccggtgacgtggaagagaaccctggtcctgaattcatgaagcccaccgagaacaacgaagacttcaacatcgtggccgtggccagcaacttcgcgaccacggatctcgatgctgaccgcgggaagttgcccggcaagaagctgccgctggaggtgctcaaagagatggaagccaatgcccggaaagctggctgcaccaggggctgtctgatctgcctgtcccacatcaagtgcacgcccaagatgaagaagttcatcccaggacgctgccacacctacgaaggcgacaaagagtccgcacagggcggcataggcgaggcgatcgtcgacattcctgagattcctgggttcaaggacttggagcccatggagcagttcatcgcacaggtcgatctgtgtgtggactgcacaactggctgcctcaaagggcttgccaacgtgcagtgttctgacctgctcaagaagtggctgccgcaacgctgtgcgacctttgccagcaagatccagggccaggtggacaagatcaagggggccggtggtgacctcgagcagaaactgatctcggaagaggatctggcgaagcccaccacgacgccagcgccgcgaccaccaacaccggcgcccaccatcgcgtcgcagcccctgtccctgcgcccagaggcgtgccggccagcggcggggggcgcagtgcacacgagggggctggacttcgcctgtgacatctacatctgggcgcccttggccgggacttgtggggtccttctcctgtcactggttatcaccctttactgcaaacggggcagaaagaaatag

SEQ ID NO: 5187 - DNA, 1704 bp, synthetic construct; identical to SEQ ID NO: 5164
  source 1..1704: mol_type = other DNA

SEQ ID NO: 5188 - DNA, 1701 bp, synthetic construct
  source 1..1701: mol_type = other DNA
atggccttaccagtgaccgccttgctcctgccgctggccttgctgctccacgccgccaggccggacatccagatgacacagagccctagcagcctgtctgccagcgtgggagacagagtgaccatcacatgcaaggccagcgaccacatcaacaactggctggcctggtatcagcagaagcctggacaggcccctaagctgctgatctacggcgctaccacactggaaacaggcgtgcccagcagattttctggcagcggctctggcaccgactacaccctgacaatatccagcctccagcctgaggacttcgccacctactactgtcagcagagctggaacaccccttggacattcggccagggcaccaagctggaaatcaagagaggcggaggcggaagtggaggcggaggatctggcggcggaggctctcaagttcagcttcaacagcctggcgctgagctggtcaaacctggcgcttctgtgaagatgagctgcaaagccagcggctacgccttcaacagctactggatcaactggatgaagcagaaacccggccagggactcgaatggatcggccaaatctatcccggcgacggcgacaccaactacaacggcaagttcaagggcagagccacactgaccgccgatacctctagcagcacagcctacatgcagctgagcagcctgaccagcgaagatagcgccgtgtacttctgtgcccggtccatcacaacagtcgtgggctgcgctatggactattggggccagggaacaagcgtgaccgtgtctagtacgcgtgcaaagagtgaagatcgctacaagctcgagggaggcagctggagccaccctcagtttgaaaaagactacaaagacgatgacgataagggatcagattacaaggatgatgatgacaaggggtcagattataaagacgacgatgataaagggagcgactacaaggacgacgatgacaaggcctggtcccatccccagttcgagaaacaccatcaccaccaccatcatcacactagtggctccggcgagggcagaggaagtctactaacctgcggagatgtggaagaaaatcctggcccacatatgaccgagtacaagcccacggtgcgcctcgccacccgcgacgacgtccccagggccgtacgcaccctcgccgccgcgttcgccgactaccccgccacgcgccacaccgtcgatccggaccgccacatcgagcgggtcaccgagctgcaagaactcttcctcacgcgcgtcgggctcgacatcggcaaggtgtgggtcgcggacgacggcgccgcggtggcggtctggaccacgccggagagcgtcgaagcgggggcggtgttcgccgagatcggcccgcgcatggccgagttgagcggttcccggctggccgcgcagcaacagatggaaggcctcctggcgccgcaccggcccaaggagcccgcgtggttcctggccaccgtcggcgtctcgcccgaccaccagggcaagggtctgggcagcgccgtcgtgctccccggagtggaggcggccgagcgcgccggggtgcccgccttcctggagacctccgcgccccgcaacctccccttctacgagcggctcggcttcaccgtcaccgccgacgtcgaggtgcccgaaggaccgcgcacctggtgcatgacccgcaagcccggtgcctga

SEQ ID NO: 5189 - DNA, 1704 bp, synthetic construct
  source 1..1704: mol_type = other DNA
atggccttaccagtgaccgccttgctcctgccgctggccttgctgctccacgccgccaggccggacatccagatgacacagagccctagcagcctgtctgccagcgtgggagacagagtgaccatcacatgcaaggccagcgaccacatcaacaactggctggcctggtatcagcagaagcctggacaggcccctaagctgctgatctacggcgctaccacactggaaacaggcgtgcccagcagattttctggcagcggctctggcaccgactacaccctgacaatatccagcctccagcctgaggacttcgccacctactactgtcagcagagctggaacaccccttggacattcggccagggcaccaagctggaaatcaagagaggcggaggcggaagtggaggcggaggatctggcggcggaggctctcaagttcagcttcaacagcctggcgctgagctggtcaaacctggcgcttctgtgaagatgagctgcaaagccagcggctacgccttcaacagctactggatcaactggatgaagcagaaacccggccagggactcgaatggatcggccaaatctatcccggcgacggcgacaccaactacaacggcaagttcaagggcagagccacactgaccgccgatacctctagcagcacagcctacatgcagctgagcagcctgaccagcgaagatagcgccgtgtacttctgtgcccggtccatcacaacagtcgtgggctgcgctatggactattggggccagggaacaagcgtgaccgtgtctagtacgcgtgcagtgagtgaagatcgctacaggaacctcgagggaggcagctggagccaccctcagtttgaaaaagactacaaagacgatgacgataagggatcagattacaaggatgatgatgacaaggggtcagattataaagacgacgatgataaagggagcgactacaaggacgacgatgacaaggcctggtcccatccccagttcgagaaacaccatcaccaccaccatcatcacactagtggctccggcgagggcagaggaagtctactaacctgcggagatgtggaagaaaatcctggcccacatatgaccgagtacaagcccacggtgcgcctcgccacccgcgacgacgtccccagggccgtacgcaccctcgccgccgcgttcgccgactaccccgccacgcgccacaccgtcgatccggaccgccacatcgagcgggtcaccgagctgcaagaactcttcctcacgcgcgtcgggctcgacatcggcaaggtgtgggtcgcggacgacggcgccgcggtggcggtctggaccacgccggagagcgtcgaagcgggggcggtgttcgccgagatcggcccgcgcatggccgagttgagcggttcccggctggccgcgcagcaacagatggaaggcctcctggcgccgcaccggcccaaggagcccgcgtggttcctggccaccgtcggcgtctcgcccgaccaccagggcaagggtctgggcagcgccgtcgtgctccccggagtggaggcggccgagcgcgccggggtgcccgccttcctggagacctccgcgccccgcaacctccccttctacgagcggctcggcttcaccgtcaccgccgacgtcgaggtgcccgaaggaccgcgcacctggtgcatgacccgcaagcccggtgcctga

SEQ ID NO: 5190 - DNA, 1701 bp, synthetic construct
  source 1..1701: mol_type = other DNA
atggccttaccagtgaccgccttgctcctgccgctggccttgctgctccacgccgccaggccggacatccagatgacacagagccctagcagcctgtctgccagcgtgggagacagagtgaccatcacatgcaaggccagcgaccacatcaacaactggctggcctggtatcagcagaagcctggacaggcccctaagctgctgatctacggcgctaccacactggaaacaggcgtgcccagcagattttctggcagcggctctggcaccgactacaccctgacaatatccagcctccagcctgaggacttcgccacctactactgtcagcagagctggaacaccccttggacattcggccagggcaccaagctggaaatcaagagaggcggaggcggaagtggaggcggaggatctggcggcggaggctctcaagttcagcttcaacagcctggcgctgagctggtcaaacctggcgcttctgtgaagatgagctgcaaagccagcggctacgccttcaacagctactggatcaactggatgaagcagaaacccggccagggactcgaatggatcggccaaatctatcccggcgacggcgacaccaactacaacggcaagttcaagggcagagccacactgaccgccgatacctctagcagcacagcctacatgcagctgagcagcctgaccagcgaagatagcgccgtgtacttctgtgcccggtccatcacaacagtcgtgggctgcgctatggactattggggccagggaacaagcgtgaccgtgtctagtacgcgtagaagttcggatcgctacaggaacctcgagggaggcagctggagccaccctcagtttgaaaaagactacaaagacgatgacgataagggatcagattacaaggatgatgatgacaaggggtcagattataaagacgacgatgataaagggagcgactacaaggacgacgatgacaaggcctggtcccatccccagttcgagaaacaccatcaccaccaccatcatcacactagtggctccggcgagggcagaggaagtctactaacctgcggagatgtggaagaaaatcctggcccacatatgaccgagtacaagcccacggtgcgcctcgccacccgcgacgacgtccccagggccgtacgcaccctcgccgccgcgttcgccgactaccccgccacgcgccacaccgtcgatccggaccgccacatcgagcgggtcaccgagctgcaagaactcttcctcacgcgcgtcgggctcgacatcggcaaggtgtgggtcgcggacgacggcgccgcggtggcggtctggaccacgccggagagcgtcgaagcgggggcggtgttcgccgagatcggcccgcgcatggccgagttgagcggttcccggctggccgcgcagcaacagatggaaggcctcctggcgccgcaccggcccaaggagcccgcgtggttcctggccaccgtcggcgtctcgcccgaccaccagggcaagggtctgggcagcgccgtcgtgctccccggagtggaggcggccgagcgcgccggggtgcccgccttcctggagacctccgcgccccgcaacctccccttctacgagcggctcggcttcaccgtcaccgccgacgtcgaggtgcccgaaggaccgcgcacctggtgcatgacccgcaagcccggtgcctga

SEQ ID NO: 5191 - DNA, 1701 bp, synthetic construct
  source 1..1701: mol_type = other DNA
atggccttaccagtgaccgccttgctcctgccgctggccttgctgctccacgccgccaggccggacatccagatgacacagagccctagcagcctgtctgccagcgtgggagacagagtgaccatcacatgcaaggccagcgaccacatcaacaactggctggcctggtatcagcagaagcctggacaggcccctaagctgctgatctacggcgctaccacactggaaacaggcgtgcccagcagattttctggcagcggctctggcaccgactacaccctgacaatatccagcctccagcctgaggacttcgccacctactactgtcagcagagctggaacaccccttggacattcggccagggcaccaagctggaaatcaagagaggcggaggcggaagtggaggcggaggatctggcggcggaggctctcaagttcagcttcaacagcctggcgctgagctggtcaaacctggcgcttctgtgaagatgagctgcaaagccagcggctacgccttcaacagctactggatcaactggatgaagcagaaacccggccagggactcgaatggatcggccaaatctatcccggcgacggcgacaccaactacaacggcaagttcaagggcagagccacactgaccgccgatacctctagcagcacagcctacatgcagctgagcagcctgaccagcgaagatagcgccgtgtacttctgtgcccggtccatcacaacagtcgtgggctgcgctatggactattggggccagggaacaagcgtgaccgtgtctagtacgcgtagaagtatagatcgctacaggaacctcgagggaggcagctggagccaccctcagtttgaaaaagactacaaagacgatgacgataagggatcagattacaaggatgatgatgacaaggggtcagattataaagacgacgatgataaagggagcgactacaaggacgacgatgacaaggcctggtcccatccccagttcgagaaacaccatcaccaccaccatcatcacactagtggctccggcgagggcagaggaagtctactaacctgcggagatgtggaagaaaatcctggcccacatatgaccgagtacaagcccacggtgcgcctcgccacccgcgacgacgtccccagggccgtacgcaccctcgccgccgcgttcgccgactaccccgccacgcgccacaccgtcgatccggaccgccacatcgagcgggtcaccgagctgcaagaactcttcctcacgcgcgtcgggctcgacatcggcaaggtgtgggtcgcggacgacggcgccgcggtggcggtctggaccacgccggagagcgtcgaagcgggggcggtgttcgccgagatcggcccgcgcatggccgagttgagcggttcccggctggccgcgcagcaacagatggaaggcctcctggcgccgcaccggcccaaggagcccgcgtggttcctggccaccgtcggcgtctcgcccgaccaccagggcaagggtctgggcagcgccgtcgtgctccccggagtggaggcggccgagcgcgccggggtgcccgccttcctggagacctccgcgccccgcaacctccccttctacgagcggctcggcttcaccgtcaccgccgacgtcgaggtgcccgaaggaccgcgcacctggtgcatgacccgcaagcccggtgcctga

SEQ ID NO: 5192 - DNA, 1701 bp, synthetic construct
  source 1..1701: mol_type = other DNA
atggccttaccagtgaccgccttgctcctgccgctggccttgctgctccacgccgccaggccggacatccagatgacacagagccctagcagcctgtctgccagcgtgggagacagagtgaccatcacatgcaaggccagcgaccacatcaacaactggctggcctggtatcagcagaagcctggacaggcccctaagctgctgatctacggcgctaccacactggaaacaggcgtgcccagcagattttctggcagcggctctggcaccgactacaccctgacaatatccagcctccagcctgaggacttcgccacctactactgtcagcagagctggaacaccccttggacattcggccagggcaccaagctggaaatcaagagaggcggaggcggaagtggaggcggaggatctggcggcggaggctctcaagttcagcttcaacagcctggcgctgagctggtcaaacctggcgcttctgtgaagatgagctgcaaagccagcggctacgccttcaacagctactggatcaactggatgaagcagaaacccggccagggactcgaatggatcggccaaatctatcccggcgacggcgacaccaactacaacggcaagttcaagggcagagccacactgaccgccgatacctctagcagcacagcctacatgcagctgagcagcctgaccagcgaagatagcgccgtgtacttctgtgcccggtccatcacaacagtcgtgggctgcgctatggactattggggccagggaacaagcgtgaccgtgtctagtacgcgtagaagtgaatcgcgctacaggaacctcgagggaggcagctggagccaccctcagtttgaaaaagactacaaagacgatgacgataagggatcagattacaaggatgatgatgacaaggggtcagattataaagacgacgatgataaagggagcgactacaaggacgacgatgacaaggcctggtcccatccccagttcgagaaacaccatcaccaccaccatcatcacactagtggctccggcgagggcagaggaagtctactaacctgcggagatgtggaagaaaatcctggcccacatatgaccgagtacaagcccacggtgcgcctcgccacccgcgacgacgtccccagggccgtacgcaccctcgccgccgcgttcgccgactaccccgccacgcgccacaccgtcgatccggaccgccacatcgagcgggtcaccgagctgcaagaactcttcctcacgcgcgtcgggctcgacatcggcaaggtgtgggtcgcggacgacggcgccgcggtggcggtctggaccacgccggagagcgtcgaagcgggggcggtgttcgccgagatcggcccgcgcatggccgagttgagcggttcccggctggccgcgcagcaacagatggaaggcctcctggcgccgcaccggcccaaggagcccgcgtggttcctggccaccgtcggcgtctcgcccgaccaccagggcaagggtctgggcagcgccgtcgtgctccccggagtggaggcggccgagcgcgccggggtgcccgccttcctggagacctccgcgccccgcaacctccccttctacgagcggctcggcttcaccgtcaccgccgacgtcgaggtgcccgaaggaccgcgcacctggtgcatgacccgcaagcccggtgcctga

SEQ ID NO: 5193 - DNA, 1701 bp, synthetic construct
  source 1..1701: mol_type = other DNA
atggccttaccagtgaccgccttgctcctgccgctggccttgctgctccacgccgccaggccggacatccagatgacacagagccctagcagcctgtctgccagcgtgggagacagagtgaccatcacatgcaaggccagcgaccacatcaacaactggctggcctggtatcagcagaagcctggacaggcccctaagctgctgatctacggcgctaccacactggaaacaggcgtgcccagcagattttctggcagcggctctggcaccgactacaccctgacaatatccagcctccagcctgaggacttcgccacctactactgtcagcagagctggaacaccccttggacattcggccagggcaccaagctggaaatcaagagaggcggaggcggaagtggaggcggaggatctggcggcggaggctctcaagttcagcttcaacagcctggcgctgagctggtcaaacctggcgcttctgtgaagatgagctgcaaagccagcggctacgccttcaacagctactggatcaactggatgaagcagaaacccggccagggactcgaatggatcggccaaatctatcccggcgacggcgacaccaactacaacggcaagttcaagggcagagccacactgaccgccgatacctctagcagcacagcctacatgcagctgagcagcctgaccagcgaagatagcgccgtgtacttctgtgcccggtccatcacaacagtcgtgggctgcgctatggactattggggccagggaacaagcgtgaccgtgtctagtacgcgtagaagtgaagaccgctacaggaacctcgagggaggcagctggagccaccctcagtttgaaaaagactacaaagacgatgacgataagggatcagattacaaggatgatgatgacaaggggtcagattataaagacgacgatgataaagggagcgactacaaggacgacgatgacaaggcctggtcccatccccagttcgagaaacaccatcaccaccaccatcatcacactagtggctccggcgagggcagaggaagtctactaacctgcggagatgtggaagaaaatcctggcccacatatgaccgagtacaagcccacggtgcgcctcgccacccgcgacgacgtccccagggccgtacgcaccctcgccgccgcgttcgccgactaccccgccacgcgccacaccgtcgatccggaccgccacatcgagcgggtcaccgagctgcaagaactcttcctcacgcgcgtcgggctcgacatcggcaaggtgtgggtcgcggacgacggcgccgcggtggcggtctggaccacgccggagagcgtcgaagcgggggcggtgttcgccgagatcggcccgcgcatggccgagttgagcggttcccggctggccgcgcagcaacagatggaaggcctcctggcgccgcaccggcccaaggagcccgcgtggttcctggccaccgtcggcgtctcgcccgaccaccagggcaagggtctgggcagcgccgtcgtgctccccggagtggaggcggccgagcgcgccggggtgcccgccttcctggagacctccgcgccccgcaacctccccttctacgagcggctcggcttcaccgtcaccgccgacgtcgaggtgcccgaaggaccgcgcacctggtgcatgacccgcaagcccggtgcctga

SEQ ID NO: 5194 - DNA, 1695 bp, synthetic construct
  source 1..1695: mol_type = other DNA
atggccttaccagtgaccgccttgctcctgccgctggccttgctgctccacgccgccaggccggacatccagatgacacagagccctagcagcctgtctgccagcgtgggagacagagtgaccatcacatgcaaggccagcgaccacatcaacaactggctggcctggtatcagcagaagcctggacaggcccctaagctgctgatctacggcgctaccacactggaaacaggcgtgcccagcagattttctggcagcggctctggcaccgactacaccctgacaatatccagcctccagcctgaggacttcgccacctactactgtcagcagagctggaacaccccttggacattcggccagggcaccaagctggaaatcaagagaggcggaggcggaagtggaggcggaggatctggcggcggaggctctcaagttcagcttcaacagcctggcgctgagctggtcaaacctggcgcttctgtgaagatgagctgcaaagccagcggctacgccttcaacagctactggatcaactggatgaagcagaaacccggccagggactcgaatggatcggccaaatctatcccggcgacggcgacaccaactacaacggcaagttcaagggcagagccacactgaccgccgatacctctagcagcacagcctacatgcagctgagcagcctgaccagcgaagatagcgccgtgtacttctgtgcccggtccatcacaacagtcgtgggctgcgctatggactattggggccagggaacaagcgtgaccgtgtctagtacgcgtagtgaagatcgctacaggctcgagggaggcagctggagccaccctcagtttgaaaaagactacaaagacgatgacgataagggatcagattacaaggatgatgatgacaaggggtcagattataaagacgacgatgataaagggagcgactacaaggacgacgatgacaaggcctggtcccatccccagttcgagaaacaccatcaccaccaccatcatcacactagtggctccggcgagggcagaggaagtctactaacctgcggagatgtggaagaaaatcctggcccacatatgaccgagtacaagcccacggtgcgcctcgccacccgcgacgacgtccccagggccgtacgcaccctcgccgccgcgttcgccgactaccccgccacgcgccacaccgtcgatccggaccgccacatcgagcgggtcaccgagctgcaagaactcttcctcacgcgcgtcgggctcgacatcggcaaggtgtgggtcgcggacgacggcgccgcggtggcggtctggaccacgccggagagcgtcgaagcgggggcggtgttcgccgagatcggcccgcgcatggccgagttgagcggttcccggctggccgcgcagcaacagatggaaggcctcctggcgccgcaccggcccaaggagcccgcgtggttcctggccaccgtcggcgtctcgcccgaccaccagggcaagggtctgggcagcgccgtcgtgctccccggagtggaggcggccgagcgcgccggggtgcccgccttcctggagacctccgcgccccgcaacctccccttctacgagcggctcggcttcaccgtcaccgccgacgtcgaggtgcccgaaggaccgcgcacctggtgcatgacccgcaagcccggtgcctga

SEQ ID NO: 5195 - DNA, 1698 bp, synthetic construct
  source 1..1698: mol_type = other DNA
atggccttaccagtgaccgccttgctcctgccgctggccttgctgctccacgccgccaggccggacatccagatgacacagagccctagcagcctgtctgccagcgtgggagacagagtgaccatcacatgcaaggccagcgaccacatcaacaactggctggcctggtatcagcagaagcctggacaggcccctaagctgctgatctacggcgctaccacactggaaacaggcgtgcccagcagattttctggcagcggctctggcaccgactacaccctgacaatatccagcctccagcctgaggacttcgccacctactactgtcagcagagctggaacaccccttggacattcggccagggcaccaagctggaaatcaagagaggcggaggcggaagtggaggcggaggatctggcggcggaggctctcaagttcagcttcaacagcctggcgctgagctggtcaaacctggcgcttctgtgaagatgagctgcaaagccagcggctacgccttcaacagctactggatcaactggatgaagcagaaacccggccagggactcgaatggatcggccaaatctatcccggcgacggcgacaccaactacaacggcaagttcaagggcagagccacactgaccgccgatacctctagcagcacagcctacatgcagctgagcagcctgaccagcgaagatagcgccgtgtacttctgtgcccggtccatcacaacagtcgtgggctgcgctatggactattggggccagggaacaagcgtgaccgtgtctagtacgcgtagaatcgaagatcgctacaggctcgagggaggcagctggagccaccctcagtttgaaaaagactacaaagacgatgacgataagggatcagattacaaggatgatgatgacaaggggtcagattataaagacgacgatgataaagggagcgactacaaggacgacgatgacaaggcctggtcccatccccagttcgagaaacaccatcaccaccaccatcatcacactagtggctccggcgagggcagaggaagtctactaacctgcggagatgtggaagaaaatcctggcccacatatgaccgagtacaagcccacggtgcgcctcgccacccgcgacgacgtccccagggccgtacgcaccctcgccgccgcgttcgccgactaccccgccacgcgccacaccgtcgatccggaccgccacatcgagcgggtcaccgagctgcaagaactcttcctcacgcgcgtcgggctcgacatcggcaaggtgtgggtcgcggacgacggcgccgcggtggcggtctggaccacgccggagagcgtcgaagcgggggcggtgttcgccgagatcggcccgcgcatggccgagttgagcggttcccggctggccgcgcagcaacagatggaaggcctcctggcgccgcaccggcccaaggagcccgcgtggttcctggccaccgtcggcgtctcgcccgaccaccagggcaagggtctgggcagcgccgtcgtgctccccggagtggaggcggccgagcgcgccggggtgcccgccttcctggagacctccgcgccccgcaacctccccttctacgagcggctcggcttcaccgtcaccgccgacgtcgaggtgcccgaaggaccgcgcacctggtgcatgacccgcaagcccggtgcctga

SEQ ID NO: 5196 - DNA, 1698 bp, synthetic construct
  source 1..1698: mol_type = other DNA
atggccttaccagtgaccgccttgctcctgccgctggccttgctgctccacgccgccaggccggacatccagatgacacagagccctagcagcctgtctgccagcgtgggagacagagtgaccatcacatgcaaggccagcgaccacatcaacaactggctggcctggtatcagcagaagcctggacaggcccctaagctgctgatctacggcgctaccacactggaaacaggcgtgcccagcagattttctggcagcggctctggcaccgactacaccctgacaatatccagcctccagcctgaggacttcgccacctactactgtcagcagagctggaacaccccttggacattcggccagggcaccaagctggaaatcaagagaggcggaggcggaagtggaggcggaggatctggcggcggaggctctcaagttcagcttcaacagcctggcgctgagctggtcaaacctggcgcttctgtgaagatgagctgcaaagccagcggctacgccttcaacagctactggatcaactggatgaagcagaaacccggccagggactcgaatggatcggccaaatctatcccggcgacggcgacaccaactacaacggcaagttcaagggcagagccacactgaccgccgatacctctagcagcacagcctacatgcagctgagcagcctgaccagcgaagatagcgccgtgtacttctgtgcccggtccatcacaacagtcgtgggctgcgctatggactattggggccagggaacaagcgtgaccgtgtctagtacgcgtagaggagaagatcgctacaggctcgagggaggcagctggagccaccctcagtttgaaaaagactacaaagacgatgacgataagggatcagattacaaggatgatgatgacaaggggtcagattataaagacgacgatgataaagggagcgactacaaggacgacgatgacaaggcctggtcccatccccagttcgagaaacaccatcaccaccaccatcatcacactagtggctccggcgagggcagaggaagtctactaacctgcggagatgtggaagaaaatcctggcccacatatgaccgagtacaagcccacggtgcgcctcgccacccgcgacgacgtccccagggccgtacgcaccctcgccgccgcgttcgccgactaccccgccacgcgccacaccgtcgatccggaccgccacatcgagcgggtcaccgagctgcaagaactcttcctcacgcgcgtcgggctcgacatcggcaaggtgtgggtcgcggacgacggcgccgcggtggcggtctggaccacgccggagagcgtcgaagcgggggcggtgttcgccgagatcggcccgcgcatggccgagttgagcggttcccggctggccgcgcagcaacagatggaaggcctcctggcgccgcaccggcccaaggagcccgcgtggttcctggccaccgtcggcgtctcgcccgaccaccagggcaagggtctgggcagcgccgtcgtgctccccggagtggaggcggccgagcgcgccggggtgcccgccttcctggagacctccgcgccccgcaacctccccttctacgagcggctcggcttcaccgtcaccgccgacgtcgaggtgcccgaaggaccgcgcacctggtgcatgacccgcaagcccggtgcctga

SEQ ID NO: 5197 - DNA, 1698 bp, synthetic construct
  source 1..1698: mol_type = other DNA
atggccttaccagtgaccgccttgctcctgccgctggccttgctgctccacgccgccaggccggacatccagatgacacagagccctagcagcctgtctgccagcgtgggagacagagtgaccatcacatgcaaggccagcgaccacatcaacaactggctggcctggtatcagcagaagcctggacaggcccctaagctgctgatctacggcgctaccacactggaaacaggcgtgcccagcagattttctggcagcggctctggcaccgactacaccctgacaatatccagcctccagcctgaggacttcgccacctactactgtcagcagagctggaacaccccttggacattcggccagggcaccaagctggaaatcaagagaggcggaggcggaagtggaggcggaggatctggcggcggaggctctcaagttcagcttcaacagcctggcgctgagctggtcaaacctggcgcttctgtgaagatgagctgcaaagccagcggctacgccttcaacagctactggatcaactggatgaagcagaaacccggccagggactcgaatggatcggccaaatctatcccggcgacggcgacaccaactacaacggcaagttcaagggcagagccacactgaccgccgatacctctagcagcacagcctacatgcagctgagcagcctgaccagcgaagatagcgccgtgtacttctgtgcccggtccatcacaacagtcgtgggctgcgctatggactattggggccagggaacaagcgtgaccgtgtctagtacgcgtagaagtggggatcgctacaggctcgagggaggcagctggagccaccctcagtttgaaaaagactacaaagacgatgacgataagggatcagattacaaggatgatgatgacaaggggtcagattataaagacgacgatgataaagggagcgactacaaggacgacgatgacaaggcctggtcccatccccagttcgagaaacaccatcaccaccaccatcatcacactagtggctccggcgagggcagaggaagtctactaacctgcggagatgtggaagaaaatcctggcccacatatgaccgagtacaagcccacggtgcgcctcgccacccgcgacgacgtccccagggccgtacgcaccctcgccgccgcgttcgccgactaccccgccacgcgccacaccgtcgatccggaccgccacatcgagcgggtcaccgagctgcaagaactcttcctcacgcgcgtcgggctcgacatcggcaaggtgtgggtcgcggacgacggcgccgcggtggcggtctggaccacgccggagagcgtcgaagcgggggcggtgttcgccgagatcggcccgcgcatggccgagttgagcggttcccggctggccgcgcagcaacagatggaaggcctcctggcgccgcaccggcccaaggagcccgcgtggttcctggccaccgtcggcgtctcgcccgaccaccagggcaagggtctgggcagcgccgtcgtgctccccggagtggaggcggccgagcgcgccggggtgcccgccttcctggagacctccgcgccccgcaacctccccttctacgagcggctcggcttcaccgtcaccgccgacgtcgaggtgcccgaaggaccgcgcacctggtgcatgacccgcaagcccggtgcctga

SEQ ID NO: 5198 - DNA, 1698 bp, synthetic construct
  source 1..1698: mol_type = other DNA
atggccttaccagtgaccgccttgctcctgccgctggccttgctgctccacgccgccaggccggacatccagatgacacagagccctagcagcctgtctgccagcgtgggagacagagtgaccatcacatgcaaggccagcgaccacatcaacaactggctggcctggtatcagcagaagcctggacaggcccctaagctgctgatctacggcgctaccacactggaaacaggcgtgcccagcagattttctggcagcggctctggcaccgactacaccctgacaatatccagcctccagcctgaggacttcgccacctactactgtcagcagagctggaacaccccttggacattcggccagggcaccaagctggaaatcaagagaggcggaggcggaagtggaggcggaggatctggcggcggaggctctcaagttcagcttcaacagcctggcgctgagctggtcaaacctggcgcttctgtgaagatgagctgcaaagccagcggctacgccttcaacagctactggatcaactggatgaagcagaaacccggccagggactcgaatggatcggccaaatctatcccggcgacggcgacaccaactacaacggcaagttcaagggcagagccacactgaccgccgatacctctagcagcacagcctacatgcagctgagcagcctgaccagcgaagatagcgccgtgtacttctgtgcccggtccatcacaacagtcgtgggctgcgctatggactattggggccagggaacaagcgtgaccgtgtctagtacgcgtagaagttgcgatcgctacaggctcgagggaggcagctggagccaccctcagtttgaaaaagactacaaagacgatgacgataagggatcagattacaaggatgatgatgacaaggggtcagattataaagacgacgatgataaagggagcgactacaaggacgacgatgacaaggcctggtcccatccccagttcgagaaacaccatcaccaccaccatcatcacactagtggctccggcgagggcagaggaagtctactaacctgcggagatgtggaagaaaatcctggcccacatatgaccgagtacaagcccacggtgcgcctcgccacccgcgacgacgtccccagggccgtacgcaccctcgccgccgcgttcgccgactaccccgccacgcgccacaccgtcgatccggaccgccacatcgagcgggtcaccgagctgcaagaactcttcctcacgcgcgtcgggctcgacatcggcaaggtgtgggtcgcggacgacggcgccgcggtggcggtctggaccacgccggagagcgtcgaagcgggggcggtgttcgccgagatcggcccgcgcatggccgagttgagcggttcccggctggccgcgcagcaacagatggaaggcctcctggcgccgcaccggcccaaggagcccgcgtggttcctggccaccgtcggcgtctcgcccgaccaccagggcaagggtctgggcagcgccgtcgtgctccccggagtggaggcggccgagcgcgccggggtgcccgccttcctggagacctccgcgccccgcaacctccccttctacgagcggctcggcttcaccgtcaccgccgacgtcgaggtgcccgaaggaccgcgcacctggtgcatgacccgcaagcccggtgcctga

SEQ ID NO: 5199 - DNA, 1698 bp, synthetic construct
  source 1..1698: mol_type = other DNA
atggccttaccagtgaccgccttgctcctgccgctggccttgctgctccacgccgccaggccggacatccagatgacacagagccctagcagcctgtctgccagcgtgggagacagagtgaccatcacatgcaaggccagcgaccacatcaacaactggctggcctggtatcagcagaagcctggacaggcccctaagctgctgatctacggcgctaccacactggaaacaggcgtgcccagcagattttctggcagcggctctggcaccgactacaccctgacaatatccagcctccagcctgaggacttcgccacctactactgtcagcagagctggaacaccccttggacattcggccagggcaccaagctggaaatcaagagaggcggaggcggaagtggaggcggaggatctggcggcggaggctctcaagttcagcttcaacagcctggcgctgagctggtcaaacctggcgcttctgtgaagatgagctgcaaagccagcggctacgccttcaacagctactggatcaactggatgaagcagaaacccggccagggactcgaatggatcggccaaatctatcccggcgacggcgacaccaactacaacggcaagttcaagggcagagccacactgaccgccgatacctctagcagcacagcctacatgcagctgagcagcctgaccagcgaagatagcgccgtgtacttctgtgcccggtccatcacaacagtcgtgggctgcgctatggactattggggccagggaacaagcgtgaccgtgtctagtacgcgtagaagtgaagaccgctacaggctcgagggaggcagctggagccaccctcagtttgaaaaagactacaaagacgatgacgataagggatcagattacaaggatgatgatgacaaggggtcagattataaagacgacgatgataaagggagcgactacaaggacgacgatgacaaggcctggtcccatccccagttcgagaaacaccatcaccaccaccatcatcacactagtggctccggcgagggcagaggaagtctactaacctgcggagatgtggaagaaaatcctggcccacatatgaccgagtacaagcccacggtgcgcctcgccacccgcgacgacgtccccagggccgtacgcaccctcgccgccgcgttcgccgactaccccgccacgcgccacaccgtcgatccggaccgccacatcgagcgggtcaccgagctgcaagaactcttcctcacgcgcgtcgggctcgacatcggcaaggtgtgggtcgcggacgacggcgccgcggtggcggtctggaccacgccggagagcgtcgaagcgggggcggtgttcgccgagatcggcccgcgcatggccgagttgagcggttcccggctggccgcgcagcaacagatggaaggcctcctggcgccgcaccggcccaaggagcccgcgtggttcctggccaccgtcggcgtctcgcccgaccaccagggcaagggtctgggcagcgccgtcgtgctccccggagtggaggcggccgagcgcgccggggtgcccgccttcctggagacctccgcgccccgcaacctccccttctacgagcggctcggcttcaccgtcaccgccgacgtcgaggtgcccgaaggaccgcgcacctggtgcatgacccgcaagcccggtgcctga

SEQ ID NO: 5200 - DNA, 1701 bp, synthetic construct
  source 1..1701: mol_type = other DNA
atggccttaccagtgaccgccttgctcctgccgctggccttgctgctccacgccgccaggccggacatccagatgacacagagccctagcagcctgtctgccagcgtgggagacagagtgaccatcacatgcaaggccagcgaccacatcaacaactggctggcctggtatcagcagaagcctggacaggcccctaagctgctgatctacggcgctaccacactggaaacaggcgtgcccagcagattttctggcagcggctctggcaccgactacaccctgacaatatccagcctccagcctgaggacttcgccacctactactgtcagcagagctggaacaccccttggacattcggccagggcaccaagctggaaatcaagagaggcggaggcggaagtggaggcggaggatctggcggcggaggctctcaagttcagcttcaacagcctggcgctgagctggtcaaacctggcgcttctgtgaagatgagctgcaaagccagcggctacgccttcaacagctactggatcaactggatgaagcagaaacccggccagggactcgaatggatcggccaaatctatcccggcgacggcgacaccaactacaacggcaagttcaagggcagagccacactgaccgccgatacctctagcagcacagcctacatgcagctgagcagcctgaccagcgaagatagcgccgtgtacttctgtgcccggtccatcacaacagtcgtgggctgcgctatggactattggggccagggaacaagcgtgaccgtgtctagtacgcgtagatgggaagatcgctacaggaacctcgagggaggcagctggagccaccctcagtttgaaaaagactacaaagacgatgacgataagggatcagattacaaggatgatgatgacaaggggtcagattataaagacgacgatgataaagggagcgactacaaggacgacgatgacaaggcctggtcccatccccagttcgagaaacaccatcaccaccaccatcatcacactagtggctccggcgagggcagaggaagtctactaacctgcggagatgtggaagaaaatcctggcccacatatgaccgagtacaagcccacggtgcgcctcgccacccgcgacgacgtccccagggccgtacgcaccctcgccgccgcgttcgccgactaccccgccacgcgccacaccgtcgatccggaccgccacatcgagcgggtcaccgagctgcaagaactcttcctcacgcgcgtcgggctcgacatcggcaaggtgtgggtcgcggacgacggcgccgcggtggcggtctggaccacgccggagagcgtcgaagcgggggcggtgttcgccgagatcggcccgcgcatggccgagttgagcggttcccggctggccgcgcagcaacagatggaaggcctcctggcgccgcaccggcccaaggagcccgcgtggttcctggccaccgtcggcgtctcgcccgaccaccagggcaagggtctgggcagcgccgtcgtgctccccggagtggaggcggccgagcgcgccggggtgcccgccttcctggagacctccgcgccccgcaacctccccttctacgagcggctcggcttcaccgtcaccgccgacgtcgaggtgcccgaaggaccgcgcacctggtgcatgacccgcaagcccggtgcctga

SEQ ID NO: 5201 - DNA, 1701 bp, synthetic construct; identical to SEQ ID NO: 5188
  source 1..1701: mol_type = other DNA

SEQ ID NO: 5202 - DNA, 1701 bp, synthetic construct; identical to SEQ ID NO: 5188
  source 1..1701: mol_type = other DNA

SEQ ID NO: 5203 - DNA, 1704 bp, synthetic construct
  source 1..1704: mol_type = other DNA
atggccttaccagtgaccgccttgctcctgccgctggccttgctgctccacgccgccaggccggacatccagatgacacagagccctagcagcctgtctgccagcgtgggagacagagtgaccatcacatgcaaggccagcgaccacatcaacaactggctggcctggtatcagcagaagcctggacaggcccctaagctgctgatctacggcgctaccacactggaaacaggcgtgcccagcagattttctggcagcggctctggcaccgactacaccctgacaatatccagcctccagcctgaggacttcgccacctactactgtcagcagagctggaacaccccttggacattcggccagggcaccaagctggaaatcaagagaggcggaggcggaagtggaggcggaggatctggcggcggaggctctcaagttcagcttcaacagcctggcgctgagctggtcaaacctggcgcttctgtgaagatgagctgcaaagccagcggctacgccttcaacagctactggatcaactggatgaagcagaaacccggccagggactcgaatggatcggccaaatctatcccggcgacggcgacaccaactacaacggcaagttcaagggcagagccacactgaccgccgatacctctagcagcacagcctacatgcagctgagcagcctgaccagcgaagatagcgccgtgtacttctgtgcccggtccatcacaacagtcgtgggctgcgctatggactattggggccagggaacaagcgtgaccgtgtctagtacgcgtgcaaccagtgaagatcgctacaggaacctcgagggaggcagctggagccaccctcagtttgaaaaagactacaaagacgatgacgataagggatcagattacaaggatgatgatgacaaggggtcagattataaagacgacgatgataaagggagcgactacaaggacgacgatgacaaggcctggtcccatccccagttcgagaaacaccatcaccaccaccatcatcacactagtggctccggcgagggcagaggaagtctactaacctgcggagatgtggaagaaaatcctggcccacatatgaccgagtacaagcccacggtgcgcctcgccacccgcgacgacgtccccagggccgtacgcaccctcgccgccgcgttcgccgactaccccgccacgcgccacaccgtcgatccggaccgccacatcgagcgggtcaccgagctgcaagaactcttcctcacgcgcgtcgggctcgacatcggcaaggtgtgggtcgcggacgacggcgccgcggtggcggtctggaccacgccggagagcgtcgaagcgggggcggtgttcgccgagatcggcccgcgcatggccgagttgagcggttcccggctggccgcgcagcaacagatggaaggcctcctggcgccgcaccggcccaaggagcccgcgtggttcctggccaccgtcggcgtctcgcccgaccaccagggcaagggtctgggcagcgccgtcgtgctccccggagtggaggcggccgagcgcgccggggtgcccgccttcctggagacctccgcgccccgcaacctccccttctacgagcggctcggcttcaccgtcaccgccgacgtcgaggtgcccgaaggaccgcgcacctggtgcatgacccgcaagcccggtgcctga

SEQ ID NO: 5204 - DNA, 1704 bp, synthetic construct
  source 1..1704: mol_type = other DNA
atggccttaccagtgaccgccttgctcctgccgctggccttgctgctccacgccgccaggccggacatccagatgacacagagccctagcagcctgtctgccagcgtgggagacagagtgaccatcacatgcaaggccagcgaccacatcaacaactggctggcctggtatcagcagaagcctggacaggcccctaagctgctgatctacggcgctaccacactggaaacaggcgtgcccagcagattttctggcagcggctctggcaccgactacaccctgacaatatccagcctccagcctgaggacttcgccacctactactgtcagcagagctggaacaccccttggacattcggccagggcaccaagctggaaatcaagagaggcggaggcggaagtggaggcggaggatctggcggcggaggctctcaagttcagcttcaacagcctggcgctgagctggtcaaacctggcgcttctgtgaagatgagctgcaaagccagcggctacgccttcaacagctactggatcaactggatgaagcagaaacccggccagggactcgaatggatcggccaaatctatcccggcgacggcgacaccaactacaacggcaagttcaagggcagagccacactgaccgccgatacctctagcagcacagcctacatgcagctgagcagcctgaccagcgaagatagcgccgtgtacttctgtgcccggtccatcacaacagtcgtgggctgcgctatggactattggggccagggaacaagcgtgaccgtgtctagtacgcgtgcagggagtgaagatcgctacaggaacctcgagggaggcagctggagccaccctcagtttgaaaaagactacaaagacgatgacgataagggatcagattacaaggatgatgatgacaaggggtcagattataaagacgacgatgataaagggagcgactacaaggacgacgatgacaaggcctggtcccatccccagttcgagaaacaccatcaccaccaccatcatcacactagtggctccggcgagggcagaggaagtctactaacctgcggagatgtggaagaaaatcctggcccacatatgaccgagtacaagcccacggtgcgcctcgccacccgcgacgacgtccccagggccgtacgcaccctcgccgccgcgttcgccgactaccccgccacgcgccacaccgtcgatccggaccgccacatcgagcgggtcaccgagctgcaagaactcttcctcacgcgcgtcgggctcgacatcggcaaggtgtgggtcgcggacgacggcgccgcggtggcggtctggaccacgccggagagcgtcgaagcgggggcggtgttcgccgagatcggcccgcgcatggccgagttgagcggttcccggctggccgcgcagcaacagatggaaggcctcctggcgccgcaccggcccaaggagcccgcgtggttcctggccaccgtcggcgtctcgcccgaccaccagggcaagggtctgggcagcgccgtcgtgctccccggagtggaggcggccgagcgcgccggggtgcccgccttcctggagacctccgcgccccgcaacctccccttctacgagcggctcggcttcaccgtcaccgccgacgtcgaggtgcccgaaggaccgcgcacctggtgcatgacccgcaagcccggtgcctga

SEQ ID NO: 5205 - DNA, 1704 bp, synthetic construct
  source 1..1704: mol_type = other DNA
atggccttaccagtgaccgccttgctcctgccgctggccttgctgctccacgccgccaggccggacatccagatgacacagagccctagcagcctgtctgccagcgtgggagacagagtgaccatcacatgcaaggccagcgaccacatcaacaactggctggcctggtatcagcagaagcctggacaggcccctaagctgctgatctacggcgctaccacactggaaacaggcgtgcccagcagattttctggcagcggctctggcaccgactacaccctgacaatatccagcctccagcctgaggacttcgccacctactactgtcagcagagctggaacaccccttggacattcggccagggcaccaagctggaaatcaagagaggcggaggcggaagtggaggcggaggatctggcggcggaggctctcaagttcagcttcaacagcctggcgctgagctggtcaaacctggcgcttctgtgaagatgagctgcaaagccagcggctacgccttcaacagctactggatcaactggatgaagcagaaacccggccagggactcgaatggatcggccaaatctatcccggcgacggcgacaccaactacaacggcaagttcaagggcagagccacactgaccgccgatacctctagcagcacagcctacatgcagctgagcagcctgaccagcgaagatagcgccgtgtacttctgtgcccggtccatcacaacagtcgtgggctgcgctatggactattggggccagggaacaagcgtgaccgtgtctagtacgcgtgcatctagtgaagatcgctacaggaacctcgagggaggcagctggagccaccctcagtttgaaaaagactacaaagacgatgacgataagggatcagattacaaggatgatgatgacaaggggtcagattataaagacgacgatgataaagggagcgactacaaggacgacgatgacaaggcctggtcccatccccagttcgagaaacaccatcaccaccaccatcatcacactagtggctccggcgagggcagaggaagtctactaacctgcggagatgtggaagaaaatcctggcccacatatgaccgagtacaagcccacggtgcgcctcgccacccgcgacgacgtccccagggccgtacgcaccctcgccgccgcgttcgccgactaccccgccacgcgccacaccgtcgatccggaccgccacatcgagcgggtcaccgagctgcaagaactcttcctcacgcgcgtcgggctcgacatcggcaaggtgtgggtcgcggacgacggcgccgcggtggcggtctggaccacgccggagagcgtcgaagcgggggcggtgttcgccgagatcggcccgcgcatggccgagttgagcggttcccggctggccgcgcagcaacagatggaaggcctcctggcgccgcaccggcccaaggagcccgcgtggttcctggccaccgtcggcgtctcgcccgaccaccagggcaagggtctgggcagcgccgtcgtgctccccggagtggaggcggccgagcgcgccggggtgcccgccttcctggagacctccgcgccccgcaacctccccttctacgagcggctcggcttcaccgtcaccgccgacgtcgaggtgcccgaaggaccgcgcacctggtgcatgacccgcaagcccggtgcctga

SEQ ID NO: 5206 - DNA, 1704 bp, synthetic construct
  source 1..1704: mol_type = other DNA
atggccttaccagtgaccgccttgctcctgccgctggccttgctgctccacgccgccaggccggacatccagatgacacagagccctagcagcctgtctgccagcgtgggagacagagtgaccatcacatgcaaggccagcgaccacatcaacaactggctggcctggtatcagcagaagcctggacaggcccctaagctgctgatctacggcgctaccacactggaaacaggcgtgcccagcagattttctggcagcggctctggcaccgactacaccctgacaatatccagcctccagcctgaggacttcgccacctactactgtcagcagagctggaacaccccttggacattcggccagggcaccaagctggaaatcaagagaggcggaggcggaagtggaggcggaggatctggcggcggaggctctcaagttcagcttcaacagcctggcgctgagctggtcaaacctggcgcttctgtgaagatgagctgcaaagccagcggctacgccttcaacagctactggatcaactggatgaagcagaaacccggccagggactcgaatggatcggccaaatctatcccggcgacggcgacaccaactacaacggcaagttcaagggcagagccacactgaccgccgatacctctagcagcacagcctacatgcagctgagcagcctgaccagcgaagatagcgccgtgtacttctgtgcccggtccatcacaacagtcgtgggctgcgctatggactattggggccagggaacaagcgtgaccgtgtctagtacgcgtgcatgtagtgaagatcgctacaggaacctcgagggaggcagctggagccaccctcagtttgaaaaagactacaaagacgatgacgataagggatcagattacaaggatgatgatgacaaggggtcagattataaagacgacgatgataaagggagcgactacaaggacgacgatgacaaggcctggtcccatccccagttcgagaaacaccatcaccaccaccatcatcacactagtggctccggcgagggcagaggaagtctactaacctgcggagatgtggaagaaaatcctggcccacatatgaccgagtacaagcccacggtgcgcctcgccacccgcgacgacgtccccagggccgtacgcaccctcgccgccgcgttcgccgactaccccgccacgcgccacaccgtcgatccggaccgccacatcgagcgggtcaccgagctgcaagaactcttcctcacgcgcgtcgggctcgacatcggcaaggtgtgggtcgcggacgacggcgccgcggtggcggtctggaccacgccggagagcgtcgaagcgggggcggtgttcgccgagatcggcccgcgcatggccgagttgagcggttcccggctggccgcgcagcaacagatggaaggcctcctggcgccgcaccggcccaaggagcccgcgtggttcctggccaccgtcggcgtctcgcccgaccaccagggcaagggtctgggcagcgccgtcgtgctccccggagtggaggcggccgagcgcgccggggtgcccgccttcctggagacctccgcgccccgcaacctccccttctacgagcggctcggcttcaccgtcaccgccgacgtcgaggtgcccgaaggaccgcgcacctggtgcatgacccgcaagcccggtgcctga

SEQ ID NO: 5207 - DNA, 1704 bp, synthetic construct; identical to SEQ ID NO: 5203
  source 1..1704: mol_type = other DNA

SEQ ID NO: 5208 - DNA, 1704 bp, synthetic construct
  source 1..1704: mol_type = other DNA
atggccttaccagtgaccgccttgctcctgccgctggccttgctgctccacgccgccaggccggacatccagatgacacagagccctagcagcctgtctgccagcgtgggagacagagtgaccatcacatgcaaggccagcgaccacatcaacaactggctggcctggtatcagcagaagcctggacaggcccctaagctgctgatctacggcgctaccacactggaaacaggcgtgcccagcagattttctggcagcggctctggcaccgactacaccctgacaatatccagcctccagcctgaggacttcgccacctactactgtcagcagagctggaacaccccttggacattcggccagggcaccaagctggaaatcaagagaggcggaggcggaagtggaggcggaggatctggcggcggaggctctcaagttcagcttcaacagcctggcgctgagctggtcaaacctggcgcttctgtgaagatgagctgcaaagccagcggctacgccttcaacagctactggatcaactggatgaagcagaaacccggccagggactcgaatggatcggccaaatctatcccggcgacggcgacaccaactacaacggcaagttcaagggcagagccacactgaccgccgatacctctagcagcacagcctacatgcagctgagcagcctgaccagcgaagatagcgccgtgtacttctgtgcccggtccatcacaacagtcgtgggctgcgctatggactattggggccagggaacaagcgtgaccgtgtctagtacgcgtgcatatagtgaagatcgctacaggaacctcgagggaggcagctggagccaccctcagtttgaaaaagactacaaagacgatgacgataagggatcagattacaaggatgatgatgacaaggggtcagattataaagacgacgatgataaagggagcgactacaaggacgacgatgacaaggcctggtcccatccccagttcgagaaacaccatcaccaccaccatcatcacactagtggctccggcgagggcagaggaagtctactaacctgcggagatgtggaagaaaatcctggcccacatatgaccgagtacaagcccacggtgcgcctcgccacccgcgacgacgtccccagggccgtacgcaccctcgccgccgcgttcgccgactaccccgccacgcgccacaccgtcgatccggaccgccacatcgagcgggtcaccgagctgcaagaactcttcctcacgcgcgtcgggctcgacatcggcaaggtgtgggtcgcggacgacggcgccgcggtggcggtctggaccacgccggagagcgtcgaagcgggggcggtgttcgccgagatcggcccgcgcatggccgagttgagcggttcccggctggccgcgcagcaacagatggaaggcctcctggcgccgcaccggcccaaggagcccgcgtggttcctggccaccgtcggcgtctcgcccgaccaccagggcaagggtctgggcagcgccgtcgtgctccccggagtggaggcggccgagcgcgccggggtgcccgccttcctggagacctccgcgccccgcaacctccccttctacgagcggctcggcttcaccgtcaccgccgacgtcgaggtgcccgaaggaccgcgcacctggtgcatgacccgcaagcccggtgcctga

SEQ ID NO: 5209 - DNA, 1704 bp, synthetic construct
  source 1..1704: mol_type = other DNA
atggccttaccagtgaccgccttgctcctgccgctggccttgctgctccacgccgccaggccggacatccagatgacacagagccctagcagcctgtctgccagcgtgggagacagagtgaccatcacatgcaaggccagcgaccacatcaacaactggctggcctggtatcagcagaagcctggacaggcccctaagctgctgatctacggcgctaccacactggaaacaggcgtgcccagcagattttctggcagcggctctggcaccgactacaccctgacaatatccagcctccagcctgaggacttcgccacctactactgtcagcagagctggaacaccccttggacattcggccagggcaccaagctggaaatcaagagaggcggaggcggaagtggaggcggaggatctggcggcggaggctctcaagttcagcttcaacagcctggcgctgagctggtcaaacctggcgcttctgtgaagatgagctgcaaagccagcggctacgccttcaacagctactggatcaactggatgaagcagaaacccggccagggactcgaatggatcggccaaatctatcccggcgacggcgacaccaactacaacggcaagttcaagggcagagccacactgaccgccgatacctctagcagcacagcctacatgcagctgagcagcctgaccagcgaagatagcgccgtgtacttctgtgcccggtccatcacaacagtcgtgggctgcgctatggactattggggccagggaacaagcgtgaccgtgtctagtacgcgtgcacacagtgaagatcgctacaggaacctcgagggaggcagctggagccaccctcagtttgaaaaagactacaaagacgatgacgataagggatcagattacaaggatgatgatgacaaggggtcagattataaagacgacgatgataaagggagcgactacaaggacgacgatgacaaggcctggtcccatccccagttcgagaaacaccatcaccaccaccatcatcacactagtggctccggcgagggcagaggaagtctactaacctgcggagatgtggaagaaaatcctggcccacatatgaccgagtacaagcccacggtgcgcctcgccacccgcgacgacgtccccagggccgtacgcaccctcgccgccgcgttcgccgactaccccgccacgcgccacaccgtcgatccggaccgccacatcgagcgggtcaccgagctgcaagaactcttcctcacgcgcgtcgggctcgacatcggcaaggtgtgggtcgcggacgacggcgccgcggtggcggtctggaccacgccggagagcgtcgaagcgggggcggtgttcgccgagatcggcccgcgcatggccgagttgagcggttcccggctggccgcgcagcaacagatggaaggcctcctggcgccgcaccggcccaaggagcccgcgtggttcctggccaccgtcggcgtctcgcccgaccaccagggcaagggtctgggcagcgccgtcgtgctccccggagtggaggcggccgagcgcgccggggtgcccgccttcctggagacctccgcgccccgcaacctccccttctacgagcggctcggcttcaccgtcaccgccgacgtcgaggtgcccgaaggaccgcgcacctggtgcatgacccgcaagcccggtgcctga

SEQ ID NO: 5210 - DNA, 1704 bp, synthetic construct
  source 1..1704: mol_type = other DNA
atggccttaccagtgaccgccttgctcctgccgctggccttgctgctccacgccgccaggccggacatccagatgacacagagccctagcagcctgtctgccagcgtgggagacagagtgaccatcacatgcaaggccagcgaccacatcaacaactggctggcctggtatcagcagaagcctggacaggcccctaagctgctgatctacggcgctaccacactggaaacaggcgtgcccagcagattttctggcagcggctctggcaccgactacaccctgacaatatccagcctccagcctgaggacttcgccacctactactgtcagcagagctggaacaccccttggacattcggccagggcaccaagctggaaatcaagagaggcggaggcggaagtggaggcggaggatctggcggcggaggctctcaagttcagcttcaacagcctggcgctgagctggtcaaacctggcgcttctgtgaagatgagctgcaaagccagcggctacgccttcaacagctactggatcaactggatgaagcagaaacccggccagggactcgaatggatcggccaaatctatcccggcgacggcgacaccaactacaacggcaagttcaagggcagagccacactgaccgccgatacctctagcagcacagcctacatgcagctgagcagcctgaccagcgaagatagcgccgtgtacttctgtgcccggtccatcacaacagtcgtgggctgcgctatggactattggggccagggaacaagcgtgaccgtgtctagtacgcgtgcattcagtgaagatcgctacaggaacctcgagggaggcagctggagccaccctcagtttgaaaaagactacaaagacgatgacgataagggatcagattacaaggatgatgatgacaaggggtcagattataaagacgacgatgataaagggagcgactacaaggacgacgatgacaaggcctggtcccatccccagttcgagaaacaccatcaccaccaccatcatcacactagtggctccggcgagggcagaggaagtctactaacctgcggagatgtggaagaaaatcctggcccacatatgaccgagtacaagcccacggtgcgcctcgccacccgcgacgacgtccccagggccgtacgcaccctcgccgccgcgttcgccgactaccccgccacgcgccacaccgtcgatccggaccgccacatcgagcgggtcaccgagctgcaagaactcttcctcacgcgcgtcgggctcgacatcggcaaggtgtgggtcgcggacgacggcgccgcggtggcggtctggaccacgccggagagcgtcgaagcgggggcggtgttcgccgagatcggcccgcgcatggccgagttgagcggttcccggctggccgcgcagcaacagatggaaggcctcctggcgccgcaccggcccaaggagcccgcgtggttcctggccaccgtcggcgtctcgcccgaccaccagggcaagggtctgggcagcgccgtcgtgctccccggagtggaggcggccgagcgcgccggggtgcccgccttcctggagacctccgcgccccgcaacctccccttctacgagcggctcggcttcaccgtcaccgccgacgtcgaggtgcccgaaggaccgcgcacctggtgcatgacccgcaagcccggtgcctga

SEQ ID NO: 5211 - DNA, 1704 bp, synthetic construct; identical to SEQ ID NO: 5133
  source 1..1704: mol_type = other DNA

SEQ ID NO: 5212 - DNA, 1698 bp, synthetic construct
  source 1..1698: mol_type = other DNA
atggccttaccagtgaccgccttgctcctgccgctggccttgctgctccacgccgccaggccggacatccagatgacacagagccctagcagcctgtctgccagcgtgggagacagagtgaccatcacatgcaaggccagcgaccacatcaacaactggctggcctggtatcagcagaagcctggacaggcccctaagctgctgatctacggcgctaccacactggaaacaggcgtgcccagcagattttctggcagcggctctggcaccgactacaccctgacaatatccagcctccagcctgaggacttcgccacctactactgtcagcagagctggaacaccccttggacattcggccagggcaccaagctggaaatcaagagaggcggaggcggaagtggaggcggaggatctggcggcggaggctctcaagttcagcttcaacagcctggcgctgagctggtcaaacctggcgcttctgtgaagatgagctgcaaagccagcggctacgccttcaacagctactggatcaactggatgaagcagaaacccggccagggactcgaatggatcggccaaatctatcccggcgacggcgacaccaactacaacggcaagttcaagggcagagccacactgaccgccgatacctctagcagcacagcctacatgcagctgagcagcctgaccagcgaagatagcgccgtgtacttctgtgcccggtccatcacaacagtcgtgggctgcgctatggactattggggccagggaacaagcgtgaccgtgtctagtacgcgtagtgaagatcgctacaggaacctcgagggaggcagctggagccaccctcagtttgaaaaagactacaaagacgatgacgataagggatcagattacaaggatgatgatgacaaggggtcagattataaagacgacgatgataaagggagcgactacaaggacgacgatgacaaggcctggtcccatccccagttcgagaaacaccatcaccaccaccatcatcacactagtggctccggcgagggcagaggaagtctactaacctgcggagatgtggaagaaaatcctggcccacatatgaccgagtacaagcccacggtgcgcctcgccacccgcgacgacgtccccagggccgtacgcaccctcgccgccgcgttcgccgactaccccgccacgcgccacaccgtcgatccggaccgccacatcgagcgggtcaccgagctgcaagaactcttcctcacgcgcgtcgggctcgacatcggcaaggtgtgggtcgcggacgacggcgccgcggtggcggtctggaccacgccggagagcgtcgaagcgggggcggtgttcgccgagatcggcccgcgcatggccgagttgagcggttcccggctggccgcgcagcaacagatggaaggcctcctggcgccgcaccggcccaaggagcccgcgtggttcctggccaccgtcggcgtctcgcccgaccaccagggcaagggtctgggcagcgccgtcgtgctccccggagtggaggcggccgagcgcgccggggtgcccgccttcctggagacctccgcgccccgcaacctccccttctacgagcggctcggcttcaccgtcaccgccgacgtcgaggtgcccgaaggaccgcgcacctggtgcatgacccgcaagcccggtgcctga

SEQ ID NO: 5213 - DNA, 1701 bp, synthetic construct
  source 1..1701: mol_type = other DNA
atggccttaccagtgaccgccttgctcctgccgctggccttgctgctccacgccgccaggccggacatccagatgacacagagccctagcagcctgtctgccagcgtgggagacagagtgaccatcacatgcaaggccagcgaccacatcaacaactggctggcctggtatcagcagaagcctggacaggcccctaagctgctgatctacggcgctaccacactggaaacaggcgtgcccagcagattttctggcagcggctctggcaccgactacaccctgacaatatccagcctccagcctgaggacttcgccacctactactgtcagcagagctggaacaccccttggacattcggccagggcaccaagctggaaatcaagagaggcggaggcggaagtggaggcggaggatctggcggcggaggctctcaagttcagcttcaacagcctggcgctgagctggtcaaacctggcgcttctgtgaagatgagctgcaaagccagcggctacgccttcaacagctactggatcaactggatgaagcagaaacccggccagggactcgaatggatcggccaaatctatcccggcgacggcgacaccaactacaacggcaagttcaagggcagagccacactgaccgccgatacctctagcagcacagcctacatgcagctgagcagcctgaccagcgaagatagcgccgtgtacttctgtgcccggtccatcacaacagtcgtgggctgcgctatggactattggggccagggaacaagcgtgaccgtgtctagtacgcgtagaagtcgagatcgctacaggaacctcgagggaggcagctggagccaccctcagtttgaaaaagactacaaagacgatgacgataagggatcagattacaaggatgatgatgacaaggggtcagattataaagacgacgatgataaagggagcgactacaaggacgacgatgacaaggcctggtcccatccccagttcgagaaacaccatcaccaccaccatcatcacactagtggctccggcgagggcagaggaagtctactaacctgcggagatgtggaagaaaatcctggcccacatatgaccgagtacaagcccacggtgcgcctcgccacccgcgacgacgtccccagggccgtacgcaccctcgccgccgcgttcgccgactaccccgccacgcgccacaccgtcgatccggaccgccacatcgagcgggtcaccgagctgcaagaactcttcctcacgcgcgtcgggctcgacatcggcaaggtgtgggtcgcggacgacggcgccgcggtggcggtctggaccacgccggagagcgtcgaagcgggggcggtgttcgccgagatcggcccgcgcatggccgagttgagcggttcccggctggccgcgcagcaacagatggaaggcctcctggcgccgcaccggcccaaggagcccgcgtggttcctggccaccgtcggcgtctcgcccgaccaccagggcaagggtctgggcagcgccgtcgtgctccccggagtggaggcggccgagcgcgccggggtgcccgccttcctggagacctccgcgccccgcaacctccccttctacgagcggctcggcttcaccgtcaccgccgacgtcgaggtgcccgaaggaccgcgcacctggtgcatgacccgcaagcccggtgcctga

SEQ ID NO: 5214 - DNA, 1701 bp, synthetic construct
  source 1..1701: mol_type = other DNA
atggccttaccagtgaccgccttgctcctgccgctggccttgctgctccacgccgccaggccggacatccagatgacacagagccctagcagcctgtctgccagcgtgggagacagagtgaccatcacatgcaaggccagcgaccacatcaacaactggctggcctggtatcagcagaagcctggacaggcccctaagctgctgatctacggcgctaccacactggaaacaggcgtgcccagcagattttctggcagcggctctggcaccgactacaccctgacaatatccagcctccagcctgaggacttcgccacctactactgtcagcagagctggaacaccccttggacattcggccagggcaccaagctggaaatcaagagaggcggaggcggaagtggaggcggaggatctggcggcggaggctctcaagttcagcttcaacagcctggcgctgagctggtcaaacctggcgcttctgtgaagatgagctgcaaagccagcggctacgccttcaacagctactggatcaactggatgaagcagaaacccggccagggactcgaatggatcggccaaatctatcccggcgacggcgacaccaactacaacggcaagttcaagggcagagccacactgaccgccgatacctctagcagcacagcctacatgcagctgagcagcctgaccagcgaagatagcgccgtgtacttctgtgcccggtccatcacaacagtcgtgggctgcgctatggactattggggccagggaacaagcgtgaccgtgtctagtacgcgtagaagtaaagatcgctacaggaacctcgagggaggcagctggagccaccctcagtttgaaaaagactacaaagacgatgacgataagggatcagattacaaggatgatgatgacaaggggtcagattataaagacgacgatgataaagggagcgactacaaggacgacgatgacaaggcctggtcccatccccagttcgagaaacaccatcaccaccaccatcatcacactagtggctccggcgagggcagaggaagtctactaacctgcggagatgtggaagaaaatcctggcccacatatgaccgagtacaagcccacggtgcgcctcgccacccgcgacgacgtccccagggccgtacgcaccctcgccgccgcgttcgccgactaccccgccacgcgccacaccgtcgatccggaccgccacatcgagcgggtcaccgagctgcaagaactcttcctcacgcgcgtcgggctcgacatcggcaaggtgtgggtcgcggacgacggcgccgcggtggcggtctggaccacgccggagagcgtcgaagcgggggcggtgttcgccgagatcggcccgcgcatggccgagttgagcggttcccggctggccgcgcagcaacagatggaaggcctcctggcgccgcaccggcccaaggagcccgcgtggttcctggccaccgtcggcgtctcgcccgaccaccagggcaagggtctgggcagcgccgtcgtgctccccggagtggaggcggccgagcgcgccggggtgcccgccttcctggagacctccgcgccccgcaacctccccttctacgagcggctcggcttcaccgtcaccgccgacgtcgaggtgcccgaaggaccgcgcacctggtgcatgacccgcaagcccggtgcctga

SEQ ID NO: 5215 - DNA, 1701 bp, synthetic construct
  source 1..1701: mol_type = other DNA
atggccttaccagtgaccgccttgctcctgccgctggccttgctgctccacgccgccaggccggacatccagatgacacagagccctagcagcctgtctgccagcgtgggagacagagtgaccatcacatgcaaggccagcgaccacatcaacaactggctggcctggtatcagcagaagcctggacaggcccctaagctgctgatctacggcgctaccacactggaaacaggcgtgcccagcagattttctggcagcggctctggcaccgactacaccctgacaatatccagcctccagcctgaggacttcgccacctactactgtcagcagagctggaacaccccttggacattcggccagggcaccaagctggaaatcaagagaggcggaggcggaagtggaggcggaggatctggcggcggaggctctcaagttcagcttcaacagcctggcgctgagctggtcaaacctggcgcttctgtgaagatgagctgcaaagccagcggctacgccttcaacagctactggatcaactggatgaagcagaaacccggccagggactcgaatggatcggccaaatctatcccggcgacggcgacaccaactacaacggcaagttcaagggcagagccacactgaccgccgatacctctagcagcacagcctacatgcagctgagcagcctgaccagcgaagatagcgccgtgtacttctgtgcccggtccatcacaacagtcgtgggctgcgctatggactattggggccagggaacaagcgtgaccgtgtctagtacgcgtagaagtcgggatcgctacaggaacctcgagggaggcagctggagccaccctcagtttgaaaaagactacaaagacgatgacgataagggatcagattacaaggatgatgatgacaaggggtcagattataaagacgacgatgataaagggagcgactacaaggacgacgatgacaaggcctggtcccatccccagttcgagaaacaccatcaccaccaccatcatcacactagtggctccggcgagggcagaggaagtctactaacctgcggagatgtggaagaaaatcctggcccacatatgaccgagtacaagcccacggtgcgcctcgccacccgcgacgacgtccccagggccgtacgcaccctcgccgccgcgttcgccgactaccccgccacgcgccacaccgtcgatccggaccgccacatcgagcgggtcaccgagctgcaagaactcttcctcacgcgcgtcgggctcgacatcggcaaggtgtgggtcgcggacgacggcgccgcggtggcggtctggaccacgccggagagcgtcgaagcgggggcggtgttcgccgagatcggcccgcgcatggccgagttgagcggttcccggctggccgcgcagcaacagatggaaggcctcctggcgccgcaccggcccaaggagcccgcgtggttcctggccaccgtcggcgtctcgcccgaccaccagggcaagggtctgggcagcgccgtcgtgctccccggagtggaggcggccgagcgcgccggggtgcccgccttcctggagacctccgcgccccgcaacctccccttctacgagcggctcggcttcaccgtcaccgccgacgtcgaggtgcccgaaggaccgcgcacctggtgcatgacccgcaagcccggtgcctga

SEQ ID NO: 5216 - DNA, 1701 bp, synthetic construct
  source 1..1701: mol_type = other DNA
atggccttaccagtgaccgccttgctcctgccgctggccttgctgctccacgccgccaggccggacatccagatgacacagagccctagcagcctgtctgccagcgtgggagacagagtgaccatcacatgcaaggccagcgaccacatcaacaactggctggcctggtatcagcagaagcctggacaggcccctaagctgctgatctacggcgctaccacactggaaacaggcgtgcccagcagattttctggcagcggctctggcaccgactacaccctgacaatatccagcctccagcctgaggacttcgccacctactactgtcagcagagctggaacaccccttggacattcggccagggcaccaagctggaaatcaagagaggcggaggcggaagtggaggcggaggatctggcggcggaggctctcaagttcagcttcaacagcctggcgctgagctggtcaaacctggcgcttctgtgaagatgagctgcaaagccagcggctacgccttcaacagctactggatcaactggatgaagcagaaacccggccagggactcgaatggatcggccaaatctatcccggcgacggcgacaccaactacaacggcaagttcaagggcagagccacactgaccgccgatacctctagcagcacagcctacatgcagctgagcagcctgaccagcgaagatagcgccgtgtacttctgtgcccggtccatcacaacagtcgtgggctgcgctatggactattggggccagggaacaagcgtgaccgtgtctagtacgcgtagaagtttggatcgctacaggaacctcgagggaggcagctggagccaccctcagtttgaaaaagactacaaagacgatgacgataagggatcagattacaaggatgatgatgacaaggggtcagattataaagacgacgatgataaagggagcgactacaaggacgacgatgacaaggcctggtcccatccccagttcgagaaacaccatcaccaccaccatcatcacactagtggctccggcgagggcagaggaagtctactaacctgcggagatgtggaagaaaatcctggcccacatatgaccgagtacaagcccacggtgcgcctcgccacccgcgacgacgtccccagggccgtacgcaccctcgccgccgcgttcgccgactaccccgccacgcgccacaccgtcgatccggaccgccacatcgagcgggtcaccgagctgcaagaactcttcctcacgcgcgtcgggctcgacatcggcaaggtgtgggtcgcggacgacggcgccgcggtggcggtctggaccacgccggagagcgtcgaagcgggggcggtgttcgccgagatcggcccgcgcatggccgagttgagcggttcccggctggccgcgcagcaacagatggaaggcctcctggcgccgcaccggcccaaggagcccgcgtggttcctggccaccgtcggcgtctcgcccgaccaccagggcaagggtctgggcagcgccgtcgtgctccccggagtggaggcggccgagcgcgccggggtgcccgccttcctggagacctccgcgccccgcaacctccccttctacgagcggctcggcttcaccgtcaccgccgacgtcgaggtgcccgaaggaccgcgcacctggtgcatgacccgcaagcccggtgcctga

SEQ ID NO: 5217 - DNA, 1701 bp, synthetic construct
  source 1..1701: mol_type = other DNA
atggccttaccagtgaccgccttgctcctgccgctggccttgctgctccacgccgccaggccggacatccagatgacacagagccctagcagcctgtctgccagcgtgggagacagagtgaccatcacatgcaaggccagcgaccacatcaacaactggctggcctggtatcagcagaagcctggacaggcccctaagctgctgatctacggcgctaccacactggaaacaggcgtgcccagcagattttctggcagcggctctggcaccgactacaccctgacaatatccagcctccagcctgaggacttcgccacctactactgtcagcagagctggaacaccccttggacattcggccagggcaccaagctggaaatcaagagaggcggaggcggaagtggaggcggaggatctggcggcggaggctctcaagttcagcttcaacagcctggcgctgagctggtcaaacctggcgcttctgtgaagatgagctgcaaagccagcggctacgccttcaacagctactggatcaactggatgaagcagaaacccggccagggactcgaatggatcggccaaatctatcccggcgacggcgacaccaactacaacggcaagttcaagggcagagccacactgaccgccgatacctctagcagcacagcctacatgcagctgagcagcctgaccagcgaagatagcgccgtgtacttctgtgcccggtccatcacaacagtcgtgggctgcgctatggactattggggccagggaacaagcgtgaccgtgtctagtacgcgtagaagtgccgatcgctacaggaacctcgagggaggcagctggagccaccctcagtttgaaaaagactacaaagacgatgacgataagggatcagattacaaggatgatgatgacaaggggtcagattataaagacgacgatgataaagggagcgactacaaggacgacgatgacaaggcctggtcccatccccagttcgagaaacaccatcaccaccaccatcatcacactagtggctccggcgagggcagaggaagtctactaacctgcggagatgtggaagaaaatcctggcccacatatgaccgagtacaagcccacggtgcgcctcgccacccgcgacgacgtccccagggccgtacgcaccctcgccgccgcgttcgccgactaccccgccacgcgccacaccgtcgatccggaccgccacatcgagcgggtcaccgagctgcaagaactcttcctcacgcgcgtcgggctcgacatcggcaaggtgtgggtcgcggacgacggcgccgcggtggcggtctggaccacgccggagagcgtcgaagcgggggcggtgttcgccgagatcggcccgcgcatggccgagttgagcggttcccggctggccgcgcagcaacagatggaaggcctcctggcgccgcaccggcccaaggagcccgcgtggttcctggccaccgtcggcgtctcgcccgaccaccagggcaagggtctgggcagcgccgtcgtgctccccggagtggaggcggccgagcgcgccggggtgcccgccttcctggagacctccgcgccccgcaacctccccttctacgagcggctcggcttcaccgtcaccgccgacgtcgaggtgcccgaaggaccgcgcacctggtgcatgacccgcaagcccggtgcctga

SEQ ID NO: 5218 - DNA, 1701 bp, synthetic construct
  source 1..1701: mol_type = other DNA
atggccttaccagtgaccgccttgctcctgccgctggccttgctgctccacgccgccaggccggacatccagatgacacagagccctagcagcctgtctgccagcgtgggagacagagtgaccatcacatgcaaggccagcgaccacatcaacaactggctggcctggtatcagcagaagcctggacaggcccctaagctgctgatctacggcgctaccacactggaaacaggcgtgcccagcagattttctggcagcggctctggcaccgactacaccctgacaatatccagcctccagcctgaggacttcgccacctactactgtcagcagagctggaacaccccttggacattcggccagggcaccaagctggaaatcaagagaggcggaggcggaagtggaggcggaggatctggcggcggaggctctcaagttcagcttcaacagcctggcgctgagctggtcaaacctggcgcttctgtgaagatgagctgcaaagccagcggctacgccttcaacagctactggatcaactggatgaagcagaaacccggccagggactcgaatggatcggccaaatctatcccggcgacggcgacaccaactacaacggcaagttcaagggcagagccacactgaccgccgatacctctagcagcacagcctacatgcagctgagcagcctgaccagcgaagatagcgccgtgtacttctgtgcccggtccatcacaacagtcgtgggctgcgctatggactattggggccagggaacaagcgtgaccgtgtctagtacgcgtagaagtttagatcgctacaggaacctcgagggaggcagctggagccaccctcagtttgaaaaagactacaaagacgatgacgataagggatcagattacaaggatgatgatgacaaggggtcagattataaagacgacgatgataaagggagcgactacaaggacgacgatgacaaggcctggtcccatccccagttcgagaaacaccatcaccaccaccatcatcacactagtggctccggcgagggcagaggaagtctactaacctgcggagatgtggaagaaaatcctggcccacatatgaccgagtacaagcccacggtgcgcctcgccacccgcgacgacgtccccagggccgtacgcaccctcgccgccgcgttcgccgactaccccgccacgcgccacaccgtcgatccggaccgccacatcgagcgggtcaccgagctgcaagaactcttcctcacgcgcgtcgggctcgacatcggcaaggtgtgggtcgcggacgacggcgccgcggtggcggtctggaccacgccggagagcgtcgaagcgggggcggtgttcgccgagatcggcccgcgcatggccgagttgagcggttcccggctggccgcgcagcaacagatggaaggcctcctggcgccgcaccggcccaaggagcccgcgtggttcctggccaccgtcggcgtctcgcccgaccaccagggcaagggtctgggcagcgccgtcgtgctccccggagtggaggcggccgagcgcgccggggtgcccgccttcctggagacctccgcgccccgcaacctccccttctacgagcggctcggcttcaccgtcaccgccgacgtcgaggtgcccgaaggaccgcgcacctggtgcatgacccgcaagcccggtgcctga

SEQ ID NO: 5219 - DNA, 1701 bp, synthetic construct
  source 1..1701: mol_type = other DNA
atggccttaccagtgaccgccttgctcctgccgctggccttgctgctccacgccgccaggccggacatccagatgacacagagccctagcagcctgtctgccagcgtgggagacagagtgaccatcacatgcaaggccagcgaccacatcaacaactggctggcctggtatcagcagaagcctggacaggcccctaagctgctgatctacggcgctaccacactggaaacaggcgtgcccagcagattttctggcagcggctctggcaccgactacaccctgacaatatccagcctccagcctgaggacttcgccacctactactgtcagcagagctggaacaccccttggacattcggccagggcaccaagctggaaatcaagagaggcggaggcggaagtggaggcggaggatctggcggcggaggctctcaagttcagcttcaacagcctggcgctgagctggtcaaacctggcgcttctgtgaagatgagctgcaaagccagcggctacgccttcaacagctactggatcaactggatgaagcagaaacccggccagggactcgaatggatcggccaaatctatcccggcgacggcgacaccaactacaacggcaagttcaagggcagagccacactgaccgccgatacctctagcagcacagcctacatgcagctgagcagcctgaccagcgaagatagcgccgtgtacttctgtgcccggtccatcacaacagtcgtgggctgcgctatggactattggggccagggaacaagcgtgaccgtgtctagtacgcgtagaagttgggatcgctacaggaacctcgagggaggcagctggagccaccctcagtttgaaaaagactacaaagacgatgacgataagggatcagattacaaggatgatgatgacaaggggtcagattataaagacgacgatgataaagggagcgactacaaggacgacgatgacaaggcctggtcccatccccagttcgagaaacaccatcaccaccaccatcatcacactagtggctccggcgagggcagaggaagtctactaacctgcggagatgtggaagaaaatcctggcccacatatgaccgagtacaagcccacggtgcgcctcgccacccgcgacgacgtccccagggccgtacgcaccctcgccgccgcgttcgccgactaccccgccacgcgccacaccgtcgatccggaccgccacatcgagcgggtcaccgagctgcaagaactcttcctcacgcgcgtcgggctcgacatcggcaaggtgtgggtcgcggacgacggcgccgcggtggcggtctggaccacgccggagagcgtcgaagcgggggcggtgttcgccgagatcggcccgcgcatggccgagttgagcggttcccggctggccgcgcagcaacagatggaaggcctcctggcgccgcaccggcccaaggagcccgcgtggttcctggccaccgtcggcgtctcgcccgaccaccagggcaagggtctgggcagcgccgtcgtgctccccggagtggaggcggccgagcgcgccggggtgcccgccttcctggagacctccgcgccccgcaacctccccttctacgagcggctcggcttcaccgtcaccgccgacgtcgaggtgcccgaaggaccgcgcacctggtgcatgacccgcaagcccggtgcctga

SEQ ID NO: 5220 - DNA, 1701 bp, synthetic construct
  source 1..1701: mol_type = other DNA
atggccttaccagtgaccgccttgctcctgccgctggccttgctgctccacgccgccaggccggacatccagatgacacagagccctagcagcctgtctgccagcgtgggagacagagtgaccatcacatgcaaggccagcgaccacatcaacaactggctggcctggtatcagcagaagcctggacaggcccctaagctgctgatctacggcgctaccacactggaaacaggcgtgcccagcagattttctggcagcggctctggcaccgactacaccctgacaatatccagcctccagcctgaggacttcgccacctactactgtcagcagagctggaacaccccttggacattcggccagggcaccaagctggaaatcaagagaggcggaggcggaagtggaggcggaggatctggcggcggaggctctcaagttcagcttcaacagcctggcgctgagctggtcaaacctggcgcttctgtgaagatgagctgcaaagccagcggctacgccttcaacagctactggatcaactggatgaagcagaaacccggccagggactcgaatggatcggccaaatctatcccggcgacggcgacaccaactacaacggcaagttcaagggcagagccacactgaccgccgatacctctagcagcacagcctacatgcagctgagcagcctgaccagcgaagatagcgccgtgtacttctgtgcccggtccatcacaacagtcgtgggctgcgctatggactattggggccagggaacaagcgtgaccgtgtctagtacgcgtagaagtgaaagacgctacaggaacctcgagggaggcagctggagccaccctcagtttgaaaaagactacaaagacgatgacgataagggatcagattacaaggatgatgatgacaaggggtcagattataaagacgacgatgataaagggagcgactacaaggacgacgatgacaaggcctggtcccatccccagttcgagaaacaccatcaccaccaccatcatcacactagtggctccggcgagggcagaggaagtctactaacctgcggagatgtggaagaaaatcctggcccacatatgaccgagtacaagcccacggtgcgcctcgccacccgcgacgacgtccccagggccgtacgcaccctcgccgccgcgttcgccgactaccccgccacgcgccacaccgtcgatccggaccgccacatcgagcgggtcaccgagctgcaagaactcttcctcacgcgcgtcgggctcgacatcggcaaggtgtgggtcgcggacgacggcgccgcggtggcggtctggaccacgccggagagcgtcgaagcgggggcggtgttcgccgagatcggcccgcgcatggccgagttgagcggttcccggctggccgcgcagcaacagatggaaggcctcctggcgccgcaccggcccaaggagcccgcgtggttcctggccaccgtcggcgtctcgcccgaccaccagggcaagggtctgggcagcgccgtcgtgctccccggagtggaggcggccgagcgcgccggggtgcccgccttcctggagacctccgcgccccgcaacctccccttctacgagcggctcggcttcaccgtcaccgccgacgtcgaggtgcccgaaggaccgcgcacctggtgcatgacccgcaagcccggtgcctga

SEQ ID NO: 5221 - DNA, 1701 bp, synthetic construct
  source 1..1701: mol_type = other DNA
atggccttaccagtgaccgccttgctcctgccgctggccttgctgctccacgccgccaggccggacatccagatgacacagagccctagcagcctgtctgccagcgtgggagacagagtgaccatcacatgcaaggccagcgaccacatcaacaactggctggcctggtatcagcagaagcctggacaggcccctaagctgctgatctacggcgctaccacactggaaacaggcgtgcccagcagattttctggcagcggctctggcaccgactacaccctgacaatatccagcctccagcctgaggacttcgccacctactactgtcagcagagctggaacaccccttggacattcggccagggcaccaagctggaaatcaagagaggcggaggcggaagtggaggcggaggatctggcggcggaggctctcaagttcagcttcaacagcctggcgctgagctggtcaaacctggcgcttctgtgaagatgagctgcaaagccagcggctacgccttcaacagctactggatcaactggatgaagcagaaacccggccagggactcgaatggatcggccaaatctatcccggcgacggcgacaccaactacaacggcaagttcaagggcagagccacactgaccgccgatacctctagcagcacagcctacatgcagctgagcagcctgaccagcgaagatagcgccgtgtacttctgtgcccggtccatcacaacagtcgtgggctgcgctatggactattggggccagggaacaagcgtgaccgtgtctagtacgcgtagaagtgaagtgcgctacaggaacctcgagggaggcagctggagccaccctcagtttgaaaaagactacaaagacgatgacgataagggatcagattacaaggatgatgatgacaaggggtcagattataaagacgacgatgataaagggagcgactacaaggacgacgatgacaaggcctggtcccatccccagttcgagaaacaccatcaccaccaccatcatcacactagtggctccggcgagggcagaggaagtctactaacctgcggagatgtggaagaaaatcctggcccacatatgaccgagtacaagcccacggtgcgcctcgccacccgcgacgacgtccccagggccgtacgcaccctcgccgccgcgttcgccgactaccccgccacgcgccacaccgtcgatccggaccgccacatcgagcgggtcaccgagctgcaagaactcttcctcacgcgcgtcgggctcgacatcggcaaggtgtgggtcgcggacgacggcgccgcggtggcggtctggaccacgccggagagcgtcgaagcgggggcggtgttcgccgagatcggcccgcgcatggccgagttgagcggttcccggctggccgcgcagcaacagatggaaggcctcctggcgccgcaccggcccaaggagcccgcgtggttcctggccaccgtcggcgtctcgcccgaccaccagggcaagggtctgggcagcgccgtcgtgctccccggagtggaggcggccgagcgcgccggggtgcccgccttcctggagacctccgcgccccgcaacctccccttctacgagcggctcggcttcaccgtcaccgccgacgtcgaggtgcccgaaggaccgcgcacctggtgcatgacccgcaagcccggtgcctga

SEQ ID NO: 5222 - DNA, 1701 bp, synthetic construct
  source 1..1701: mol_type = other DNA
atggccttaccagtgaccgccttgctcctgccgctggccttgctgctccacgccgccaggccggacatccagatgacacagagccctagcagcctgtctgccagcgtgggagacagagtgaccatcacatgcaaggccagcgaccacatcaacaactggctggcctggtatcagcagaagcctggacaggcccctaagctgctgatctacggcgctaccacactggaaacaggcgtgcccagcagattttctggcagcggctctggcaccgactacaccctgacaatatccagcctccagcctgaggacttcgccacctactactgtcagcagagctggaacaccccttggacattcggccagggcaccaagctggaaatcaagagaggcggaggcggaagtggaggcggaggatctggcggcggaggctctcaagttcagcttcaacagcctggcgctgagctggtcaaacctggcgcttctgtgaagatgagctgcaaagccagcggctacgccttcaacagctactggatcaactggatgaagcagaaacccggccagggactcgaatggatcggccaaatctatcccggcgacggcgacaccaactacaacggcaagttcaagggcagagccacactgaccgccgatacctctagcagcacagcctacatgcagctgagcagcctgaccagcgaagatagcgccgtgtacttctgtgcccggtccatcacaacagtcgtgggctgcgctatggactattggggccagggaacaagcgtgaccgtgtctagtacgcgtagaagtgaagtccgctacaggaacctcgagggaggcagctggagccaccctcagtttgaaaaagactacaaagacgatgacgataagggatcagattacaaggatgatgatgacaaggggtcagattataaagacgacgatgataaagggagcgactacaaggacgacgatgacaaggcctggtcccatccccagttcgagaaacaccatcaccaccaccatcatcacactagtggctccggcgagggcagaggaagtctactaacctgcggagatgtggaagaaaatcctggcccacatatgaccgagtacaagcccacggtgcgcctcgccacccgcgacgacgtccccagggccgtacgcaccctcgccgccgcgttcgccgactaccccgccacgcgccacaccgtcgatccggaccgccacatcgagcgggtcaccgagctgcaagaactcttcctcacgcgcgtcgggctcgacatcggcaaggtgtgggtcgcggacgacggcgccgcggtggcggtctggaccacgccggagagcgtcgaagcgggggcggtgttcgccgagatcggcccgcgcatggccgagttgagcggttcccggctggccgcgcagcaacagatggaaggcctcctggcgccgcaccggcccaaggagcccgcgtggttcctggccaccgtcggcgtctcgcccgaccaccagggcaagggtctgggcagcgccgtcgtgctccccggagtggaggcggccgagcgcgccggggtgcccgccttcctggagacctccgcgccccgcaacctccccttctacgagcggctcggcttcaccgtcaccgccgacgtcgaggtgcccgaaggaccgcgcacctggtgcatgacccgcaagcccggtgcctga

SEQ ID NO: 5223 - DNA, 1701 bp, synthetic construct
  source 1..1701: mol_type = other DNA
atggccttaccagtgaccgccttgctcctgccgctggccttgctgctccacgccgccaggccggacatccagatgacacagagccctagcagcctgtctgccagcgtgggagacagagtgaccatcacatgcaaggccagcgaccacatcaacaactggctggcctggtatcagcagaagcctggacaggcccctaagctgctgatctacggcgctaccacactggaaacaggcgtgcccagcagattttctggcagcggctctggcaccgactacaccctgacaatatccagcctccagcctgaggacttcgccacctactactgtcagcagagctggaacaccccttggacattcggccagggcaccaagctggaaatcaagagaggcggaggcggaagtggaggcggaggatctggcggcggaggctctcaagttcagcttcaacagcctggcgctgagctggtcaaacctggcgcttctgtgaagatgagctgcaaagccagcggctacgccttcaacagctactggatcaactggatgaagcagaaacccggccagggactcgaatggatcggccaaatctatcccggcgacggcgacaccaactacaacggcaagttcaagggcagagccacactgaccgccgatacctctagcagcacagcctacatgcagctgagcagcctgaccagcgaagatagcgccgtgtacttctgtgcccggtccatcacaacagtcgtgggctgcgctatggactattggggccagggaacaagcgtgaccgtgtctagtacgcgtagaagtgaaaatcgctacaggaacctcgagggaggcagctggagccaccctcagtttgaaaaagactacaaagacgatgacgataagggatcagattacaaggatgatgatgacaaggggtcagattataaagacgacgatgataaagggagcgactacaaggacgacgatgacaaggcctggtcccatccccagttcgagaaacaccatcaccaccaccatcatcacactagtggctccggcgagggcagaggaagtctactaacctgcggagatgtggaagaaaatcctggcccacatatgaccgagtacaagcccacggtgcgcctcgccacccgcgacgacgtccccagggccgtacgcaccctcgccgccgcgttcgccgactaccccgccacgcgccacaccgtcgatccggaccgccacatcgagcgggtcaccgagctgcaagaactcttcctcacgcgcgtcgggctcgacatcggcaaggtgtgggtcgcggacgacggcgccgcggtggcggtctggaccacgccggagagcgtcgaagcgggggcggtgttcgccgagatcggcccgcgcatggccgagttgagcggttcccggctggccgcgcagcaacagatggaaggcctcctggcgccgcaccggcccaaggagcccgcgtggttcctggccaccgtcggcgtctcgcccgaccaccagggcaagggtctgggcagcgccgtcgtgctccccggagtggaggcggccgagcgcgccggggtgcccgccttcctggagacctccgcgccccgcaacctccccttctacgagcggctcggcttcaccgtcaccgccgacgtcgaggtgcccgaaggaccgcgcacctggtgcatgacccgcaagcccggtgcctga

SEQ ID NO: 5224 - DNA, 1701 bp, synthetic construct
  source 1..1701: mol_type = other DNA
atggccttaccagtgaccgccttgctcctgccgctggccttgctgctccacgccgccaggccggacatccagatgacacagagccctagcagcctgtctgccagcgtgggagacagagtgaccatcacatgcaaggccagcgaccacatcaacaactggctggcctggtatcagcagaagcctggacaggcccctaagctgctgatctacggcgctaccacactggaaacaggcgtgcccagcagattttctggcagcggctctggcaccgactacaccctgacaatatccagcctccagcctgaggacttcgccacctactactgtcagcagagctggaacaccccttggacattcggccagggcaccaagctggaaatcaagagaggcggaggcggaagtggaggcggaggatctggcggcggaggctctcaagttcagcttcaacagcctggcgctgagctggtcaaacctggcgcttctgtgaagatgagctgcaaagccagcggctacgccttcaacagctactggatcaactggatgaagcagaaacccggccagggactcgaatggatcggccaaatctatcccggcgacggcgacaccaactacaacggcaagttcaagggcagagccacactgaccgccgatacctctagcagcacagcctacatgcagctgagcagcctgaccagcgaagatagcgccgtgtacttctgtgcccggtccatcacaacagtcgtgggctgcgctatggactattggggccagggaacaagcgtgaccgtgtctagtacgcgtagaagtgaaggtcgctacaggaacctcgagggaggcagctggagccaccctcagtttgaaaaagactacaaagacgatgacgataagggatcagattacaaggatgatgatgacaaggggtcagattataaagacgacgatgataaagggagcgactacaaggacgacgatgacaaggcctggtcccatccccagttcgagaaacaccatcaccaccaccatcatcacactagtggctccggcgagggcagaggaagtctactaacctgcggagatgtggaagaaaatcctggcccacatatgaccgagtacaagcccacggtgcgcctcgccacccgcgacgacgtccccagggccgtacgcaccctcgccgccgcgttcgccgactaccccgccacgcgccacaccgtcgatccggaccgccacatcgagcgggtcaccgagctgcaagaactcttcctcacgcgcgtcgggctcgacatcggcaaggtgtgggtcgcggacgacggcgccgcggtggcggtctggaccacgccggagagcgtcgaagcgggggcggtgttcgccgagatcggcccgcgcatggccgagttgagcggttcccggctggccgcgcagcaacagatggaaggcctcctggcgccgcaccggcccaaggagcccgcgtggttcctggccaccgtcggcgtctcgcccgaccaccagggcaagggtctgggcagcgccgtcgtgctccccggagtggaggcggccgagcgcgccggggtgcccgccttcctggagacctccgcgccccgcaacctccccttctacgagcggctcggcttcaccgtcaccgccgacgtcgaggtgcccgaaggaccgcgcacctggtgcatgacccgcaagcccggtgcctga

SEQ ID NO: 5225 - DNA, 1701 bp, synthetic construct
  source 1..1701: mol_type = other DNA
atggccttaccagtgaccgccttgctcctgccgctggccttgctgctccacgccgccaggccggacatccagatgacacagagccctagcagcctgtctgccagcgtgggagacagagtgaccatcacatgcaaggccagcgaccacatcaacaactggctggcctggtatcagcagaagcctggacaggcccctaagctgctgatctacggcgctaccacactggaaacaggcgtgcccagcagattttctggcagcggctctggcaccgactacaccctgacaatatccagcctccagcctgaggacttcgccacctactactgtcagcagagctggaacaccccttggacattcggccagggcaccaagctggaaatcaagagaggcggaggcggaagtggaggcggaggatctggcggcggaggctctcaagttcagcttcaacagcctggcgctgagctggtcaaacctggcgcttctgtgaagatgagctgcaaagccagcggctacgccttcaacagctactggatcaactggatgaagcagaaacccggccagggactcgaatggatcggccaaatctatcccggcgacggcgacaccaactacaacggcaagttcaagggcagagccacactgaccgccgatacctctagcagcacagcctacatgcagctgagcagcctgaccagcgaagatagcgccgtgtacttctgtgcccggtccatcacaacagtcgtgggctgcgctatggactattggggccagggaacaagcgtgaccgtgtctagtacgcgtagaagtgaatgccgctacaggaacctcgagggaggcagctggagccaccctcagtttgaaaaagactacaaagacgatgacgataagggatcagattacaaggatgatgatgacaaggggtcagattataaagacgacgatgataaagggagcgactacaaggacgacgatgacaaggcctggtcccatccccagttcgagaaacaccatcaccaccaccatcatcacactagtggctccggcgagggcagaggaagtctactaacctgcggagatgtggaagaaaatcctggcccacatatgaccgagtacaagcccacggtgcgcctcgccacccgcgacgacgtccccagggccgtacgcaccctcgccgccgcgttcgccgactaccccgccacgcgccacaccgtcgatccggaccgccacatcgagcgggtcaccgagctgcaagaactcttcctcacgcgcgtcgggctcgacatcggcaaggtgtgggtcgcggacgacggcgccgcggtggcggtctggaccacgccggagagcgtcgaagcgggggcggtgttcgccgagatcggcccgcgcatggccgagttgagcggttcccggctggccgcgcagcaacagatggaaggcctcctggcgccgcaccggcccaaggagcccgcgtggttcctggccaccgtcggcgtctcgcccgaccaccagggcaagggtctgggcagcgccgtcgtgctccccggagtggaggcggccgagcgcgccggggtgcccgccttcctggagacctccgcgccccgcaacctccccttctacgagcggctcggcttcaccgtcaccgccgacgtcgaggtgcccgaaggaccgcgcacctggtgcatgacccgcaagcccggtgcctga

SEQ ID NO: 5226 - DNA, 1698 bp, synthetic construct
  source 1..1698: mol_type = other DNA
atggccttaccagtgaccgccttgctcctgccgctggccttgctgctccacgccgccaggccggacatccagatgacacagagccctagcagcctgtctgccagcgtgggagacagagtgaccatcacatgcaaggccagcgaccacatcaacaactggctggcctggtatcagcagaagcctggacaggcccctaagctgctgatctacggcgctaccacactggaaacaggcgtgcccagcagattttctggcagcggctctggcaccgactacaccctgacaatatccagcctccagcctgaggacttcgccacctactactgtcagcagagctggaacaccccttggacattcggccagggcaccaagctggaaatcaagagaggcggaggcggaagtggaggcggaggatctggcggcggaggctctcaagttcagcttcaacagcctggcgctgagctggtcaaacctggcgcttctgtgaagatgagctgcaaagccagcggctacgccttcaacagctactggatcaactggatgaagcagaaacccggccagggactcgaatggatcggccaaatctatcccggcgacggcgacaccaactacaacggcaagttcaagggcagagccacactgaccgccgatacctctagcagcacagcctacatgcagctgagcagcctgaccagcgaagatagcgccgtgtacttctgtgcccggtccatcacaacagtcgtgggctgcgctatggactattggggccagggaacaagcgtgaccgtgtctagtacgcgtagagaggaagatcgctacaggctcgagggaggcagctggagccaccctcagtttgaaaaagactacaaagacgatgacgataagggatcagattacaaggatgatgatgacaaggggtcagattataaagacgacgatgataaagggagcgactacaaggacgacgatgacaaggcctggtcccatccccagttcgagaaacaccatcaccaccaccatcatcacactagtggctccggcgagggcagaggaagtctactaacctgcggagatgtggaagaaaatcctggcccacatatgaccgagtacaagcccacggtgcgcctcgccacccgcgacgacgtccccagggccgtacgcaccctcgccgccgcgttcgccgactaccccgccacgcgccacaccgtcgatccggaccgccacatcgagcgggtcaccgagctgcaagaactcttcctcacgcgcgtcgggctcgacatcggcaaggtgtgggtcgcggacgacggcgccgcggtggcggtctggaccacgccggagagcgtcgaagcgggggcggtgttcgccgagatcggcccgcgcatggccgagttgagcggttcccggctggccgcgcagcaacagatggaaggcctcctggcgccgcaccggcccaaggagcccgcgtggttcctggccaccgtcggcgtctcgcccgaccaccagggcaagggtctgggcagcgccgtcgtgctccccggagtggaggcggccgagcgcgccggggtgcccgccttcctggagacctccgcgccccgcaacctccccttctacgagcggctcggcttcaccgtcaccgccgacgtcgaggtgcccgaaggaccgcgcacctggtgcatgacccgcaagcccggtgcctga

SEQ ID NO: 5227 - DNA, 1698 bp, synthetic construct
  source 1..1698: mol_type = other DNA
atggccttaccagtgaccgccttgctcctgccgctggccttgctgctccacgccgccaggccggacatccagatgacacagagccctagcagcctgtctgccagcgtgggagacagagtgaccatcacatgcaaggccagcgaccacatcaacaactggctggcctggtatcagcagaagcctggacaggcccctaagctgctgatctacggcgctaccacactggaaacaggcgtgcccagcagattttctggcagcggctctggcaccgactacaccctgacaatatccagcctccagcctgaggacttcgccacctactactgtcagcagagctggaacaccccttggacattcggccagggcaccaagctggaaatcaagagaggcggaggcggaagtggaggcggaggatctggcggcggaggctctcaagttcagcttcaacagcctggcgctgagctggtcaaacctggcgcttctgtgaagatgagctgcaaagccagcggctacgccttcaacagctactggatcaactggatgaagcagaaacccggccagggactcgaatggatcggccaaatctatcccggcgacggcgacaccaactacaacggcaagttcaagggcagagccacactgaccgccgatacctctagcagcacagcctacatgcagctgagcagcctgaccagcgaagatagcgccgtgtacttctgtgcccggtccatcacaacagtcgtgggctgcgctatggactattggggccagggaacaagcgtgaccgtgtctagtacgcgtagagtagaagatcgctacaggctcgagggaggcagctggagccaccctcagtttgaaaaagactacaaagacgatgacgataagggatcagattacaaggatgatgatgacaaggggtcagattataaagacgacgatgataaagggagcgactacaaggacgacgatgacaaggcctggtcccatccccagttcgagaaacaccatcaccaccaccatcatcacactagtggctccggcgagggcagaggaagtctactaacctgcggagatgtggaagaaaatcctggcccacatatgaccgagtacaagcccacggtgcgcctcgccacccgcgacgacgtccccagggccgtacgcaccctcgccgccgcgttcgccgactaccccgccacgcgccacaccgtcgatccggaccgccacatcgagcgggtcaccgagctgcaagaactcttcctcacgcgcgtcgggctcgacatcggcaaggtgtgggtcgcggacgacggcgccgcggtggcggtctggaccacgccggagagcgtcgaagcgggggcggtgttcgccgagatcggcccgcgcatggccgagttgagcggttcccggctggccgcgcagcaacagatggaaggcctcctggcgccgcaccggcccaaggagcccgcgtggttcctggccaccgtcggcgtctcgcccgaccaccagggcaagggtctgggcagcgccgtcgtgctccccggagtggaggcggccgagcgcgccggggtgcccgccttcctggagacctccgcgccccgcaacctccccttctacgagcggctcggcttcaccgtcaccgccgacgtcgaggtgcccgaaggaccgcgcacctggtgcatgacccgcaagcccggtgcctga

SEQ ID NO: 5228 - DNA, 1698 bp, synthetic construct
  source 1..1698: mol_type = other DNA
atggccttaccagtgaccgccttgctcctgccgctggccttgctgctccacgccgccaggccggacatccagatgacacagagccctagcagcctgtctgccagcgtgggagacagagtgaccatcacatgcaaggccagcgaccacatcaacaactggctggcctggtatcagcagaagcctggacaggcccctaagctgctgatctacggcgctaccacactggaaacaggcgtgcccagcagattttctggcagcggctctggcaccgactacaccctgacaatatccagcctccagcctgaggacttcgccacctactactgtcagcagagctggaacaccccttggacattcggccagggcaccaagctggaaatcaagagaggcggaggcggaagtggaggcggaggatctggcggcggaggctctcaagttcagcttcaacagcctggcgctgagctggtcaaacctggcgcttctgtgaagatgagctgcaaagccagcggctacgccttcaacagctactggatcaactggatgaagcagaaacccggccagggactcgaatggatcggccaaatctatcccggcgacggcgacaccaactacaacggcaagttcaagggcagagccacactgaccgccgatacctctagcagcacagcctacatgcagctgagcagcctgaccagcgaagatagcgccgtgtacttctgtgcccggtccatcacaacagtcgtgggctgcgctatggactattggggccagggaacaagcgtgaccgtgtctagtacgcgtagaacagaagatcgctacaggctcgagggaggcagctggagccaccctcagtttgaaaaagactacaaagacgatgacgataagggatcagattacaaggatgatgatgacaaggggtcagattataaagacgacgatgataaagggagcgactacaaggacgacgatgacaaggcctggtcccatccccagttcgagaaacaccatcaccaccaccatcatcacactagtggctccggcgagggcagaggaagtctactaacctgcggagatgtggaagaaaatcctggcccacatatgaccgagtacaagcccacggtgcgcctcgccacccgcgacgacgtccccagggccgtacgcaccctcgccgccgcgttcgccgactaccccgccacgcgccacaccgtcgatccggaccgccacatcgagcgggtcaccgagctgcaagaactcttcctcacgcgcgtcgggctcgacatcggcaaggtgtgggtcgcggacgacggcgccgcggtggcggtctggaccacgccggagagcgtcgaagcgggggcggtgttcgccgagatcggcccgcgcatggccgagttgagcggttcccggctggccgcgcagcaacagatggaaggcctcctggcgccgcaccggcccaaggagcccgcgtggttcctggccaccgtcggcgtctcgcccgaccaccagggcaagggtctgggcagcgccgtcgtgctccccggagtggaggcggccgagcgcgccggggtgcccgccttcctggagacctccgcgccccgcaacctccccttctacgagcggctcggcttcaccgtcaccgccgacgtcgaggtgcccgaaggaccgcgcacctggtgcatgacccgcaagcccggtgcctga

SEQ ID NO: 5229 - DNA, 1698 bp, synthetic construct
  source 1..1698: mol_type = other DNA
atggccttaccagtgaccgccttgctcctgccgctggccttgctgctccacgccgccaggccggacatccagatgacacagagccctagcagcctgtctgccagcgtgggagacagagtgaccatcacatgcaaggccagcgaccacatcaacaactggctggcctggtatcagcagaagcctggacaggcccctaagctgctgatctacggcgctaccacactggaaacaggcgtgcccagcagattttctggcagcggctctggcaccgactacaccctgacaatatccagcctccagcctgaggacttcgccacctactactgtcagcagagctggaacaccccttggacattcggccagggcaccaagctggaaatcaagagaggcggaggcggaagtggaggcggaggatctggcggcggaggctctcaagttcagcttcaacagcctggcgctgagctggtcaaacctggcgcttctgtgaagatgagctgcaaagccagcggctacgccttcaacagctactggatcaactggatgaagcagaaacccggccagggactcgaatggatcggccaaatctatcccggcgacggcgacaccaactacaacggcaagttcaagggcagagccacactgaccgccgatacctctagcagcacagcctacatgcagctgagcagcctgaccagcgaagatagcgccgtgtacttctgtgcccggtccatcacaacagtcgtgggctgcgctatggactattggggccagggaacaagcgtgaccgtgtctagtacgcgtagacctgaagatcgctacaggctcgagggaggcagctggagccaccctcagtttgaaaaagactacaaagacgatgacgataagggatcagattacaaggatgatgatgacaaggggtcagattataaagacgacgatgataaagggagcgactacaaggacgacgatgacaaggcctggtcccatccccagttcgagaaacaccatcaccaccaccatcatcacactagtggctccggcgagggcagaggaagtctactaacctgcggagatgtggaagaaaatcctggcccacatatgaccgagtacaagcccacggtgcgcctcgccacccgcgacgacgtccccagggccgtacgcaccctcgccgccgcgttcgccgactaccccgccacgcgccacaccgtcgatccggaccgccacatcgagcgggtcaccgagctgcaagaactcttcctcacgcgcgtcgggctcgacatcggcaaggtgtgggtcgcggacgacggcgccgcggtggcggtctggaccacgccggagagcgtcgaagcgggggcggtgttcgccgagatcggcccgcgcatggccgagttgagcggttcccggctggccgcgcagcaacagatggaaggcctcctggcgccgcaccggcccaaggagcccgcgtggttcctggccaccgtcggcgtctcgcccgaccaccagggcaagggtctgggcagcgccgtcgtgctccccggagtggaggcggccgagcgcgccggggtgcccgccttcctggagacctccgcgccccgcaacctccccttctacgagcggctcggcttcaccgtcaccgccgacgtcgaggtgcccgaaggaccgcgcacctggtgcatgacccgcaagcccggtgcctga

SEQ ID NO: 5230 - DNA, 1698 bp, synthetic construct
  source 1..1698: mol_type = other DNA
atggccttaccagtgaccgccttgctcctgccgctggccttgctgctccacgccgccaggccggacatccagatgacacagagccctagcagcctgtctgccagcgtgggagacagagtgaccatcacatgcaaggccagcgaccacatcaacaactggctggcctggtatcagcagaagcctggacaggcccctaagctgctgatctacggcgctaccacactggaaacaggcgtgcccagcagattttctggcagcggctctggcaccgactacaccctgacaatatccagcctccagcctgaggacttcgccacctactactgtcagcagagctggaacaccccttggacattcggccagggcaccaagctggaaatcaagagaggcggaggcggaagtggaggcggaggatctggcggcggaggctctcaagttcagcttcaacagcctggcgctgagctggtcaaacctggcgcttctgtgaagatgagctgcaaagccagcggctacgccttcaacagctactggatcaactggatgaagcagaaacccggccagggactcgaatggatcggccaaatctatcccggcgacggcgacaccaactacaacggcaagttcaagggcagagccacactgaccgccgatacctctagcagcacagcctacatgcagctgagcagcctgaccagcgaagatagcgccgtgtacttctgtgcccggtccatcacaacagtcgtgggctgcgctatggactattggggccagggaacaagcgtgaccgtgtctagtacgcgtagaggggaagatcgctacaggctcgagggaggcagctggagccaccctcagtttgaaaaagactacaaagacgatgacgataagggatcagattacaaggatgatgatgacaaggggtcagattataaagacgacgatgataaagggagcgactacaaggacgacgatgacaaggcctggtcccatccccagttcgagaaacaccatcaccaccaccatcatcacactagtggctccggcgagggcagaggaagtctactaacctgcggagatgtggaagaaaatcctggcccacatatgaccgagtacaagcccacggtgcgcctcgccacccgcgacgacgtccccagggccgtacgcaccctcgccgccgcgttcgccgactaccccgccacgcgccacaccgtcgatccggaccgccacatcgagcgggtcaccgagctgcaagaactcttcctcacgcgcgtcgggctcgacatcggcaaggtgtgggtcgcggacgacggcgccgcggtggcggtctggaccacgccggagagcgtcgaagcgggggcggtgttcgccgagatcggcccgcgcatggccgagttgagcggttcccggctggccgcgcagcaacagatggaaggcctcctggcgccgcaccggcccaaggagcccgcgtggttcctggccaccgtcggcgtctcgcccgaccaccagggcaagggtctgggcagcgccgtcgtgctccccggagtggaggcggccgagcgcgccggggtgcccgccttcctggagacctccgcgccccgcaacctccccttctacgagcggctcggcttcaccgtcaccgccgacgtcgaggtgcccgaaggaccgcgcacctggtgcatgacccgcaagcccggtgcctga

SEQ ID NO: 5231 - DNA, 807 bp, synthetic construct
  source 1..807: mol_type = other DNA
atggccttaccagtgaccgccttgctcctgccgctggccttgctgctccacgccgccaggccggacatccagatgacacagagccctagcagcctgtctgccagcgtgggagacagagtgaccatcacatgcaaggccagcgaccacatcaacaactggctggcctggtatcagcagaagcctggacaggcccctaagctgctgatctacggcgctaccacactggaaacaggcgtgcccagcagattttctggcagcggctctggcaccgactacaccctgacaatatccagcctccagcctgaggacttcgccacctactactgtcagcagagctggaacaccccttggacattcggccagggcaccaagctggaaatcaagagaggcggaggcggaagtggaggcggaggatctggcggcggaggctctcaagttcagcttcaacagcctggcgctgagctggtcaaacctggcgcttctgtgaagatgagctgcaaagccagcggctacgccttcaacagctactggatcaactggatgaagcagaaacccggccagggactcgaatggatcggccaaatctatcccggcgacggcgacaccaactacaacggcaagttcaagggcagagccacactgaccgccgatacctctagcagcacagcctacatgcagctgagcagcctgaccagcgaagatagcgccgtgtacttctgtgcccggtccatcacaacagtcgtgggctgcgctatggactattggggccagggaacaagcgtgaccgtgtctagtacgcgtagataa

SEQ ID NO: 5232 - DNA, 1698 bp, synthetic construct
  source 1..1698: mol_type = other DNA
atggccttaccagtgaccgccttgctcctgccgctggccttgctgctccacgccgccaggccggacatccagatgacacagagccctagcagcctgtctgccagcgtgggagacagagtgaccatcacatgcaaggccagcgaccacatcaacaactggctggcctggtatcagcagaagcctggacaggcccctaagctgctgatctacggcgctaccacactggaaacaggcgtgcccagcagattttctggcagcggctctggcaccgactacaccctgacaatatccagcctccagcctgaggacttcgccacctactactgtcagcagagctggaacaccccttggacattcggccagggcaccaagctggaaatcaagagaggcggaggcggaagtggaggcggaggatctggcggcggaggctctcaagttcagcttcaacagcctggcgctgagctggtcaaacctggcgcttctgtgaagatgagctgcaaagccagcggctacgccttcaacagctactggatcaactggatgaagcagaaacccggccagggactcgaatggatcggccaaatctatcccggcgacggcgacaccaactacaacggcaagttcaagggcagagccacactgaccgccgatacctctagcagcacagcctacatgcagctgagcagcctgaccagcgaagatagcgccgtgtacttctgtgcccggtccatcacaacagtcgtgggctgcgctatggactattggggccagggaacaagcgtgaccgtgtctagtacgcgtagaagtgccgatcgctacaggctcgagggaggcagctggagccaccctcagtttgaaaaagactacaaagacgatgacgataagggatcagattacaaggatgatgatgacaaggggtcagattataaagacgacgatgataaagggagcgactacaaggacgacgatgacaaggcctggtcccatccccagttcgagaaacaccatcaccaccaccatcatcacactagtggctccggcgagggcagaggaagtctactaacctgcggagatgtggaagaaaatcctggcccacatatgaccgagtacaagcccacggtgcgcctcgccacccgcgacgacgtccccagggccgtacgcaccctcgccgccgcgttcgccgactaccccgccacgcgccacaccgtcgatccggaccgccacatcgagcgggtcaccgagctgcaagaactcttcctcacgcgcgtcgggctcgacatcggcaaggtgtgggtcgcggacgacggcgccgcggtggcggtctggaccacgccggagagcgtcgaagcgggggcggtgttcgccgagatcggcccgcgcatggccgagttgagcggttcccggctggccgcgcagcaacagatggaaggcctcctggcgccgcaccggcccaaggagcccgcgtggttcctggccaccgtcggcgtctcgcccgaccaccagggcaagggtctgggcagcgccgtcgtgctccccggagtggaggcggccgagcgcgccggggtgcccgccttcctggagacctccgcgccccgcaacctccccttctacgagcggctcggcttcaccgtcaccgccgacgtcgaggtgcccgaaggaccgcgcacctggtgcatgacccgcaagcccggtgcctga

SEQ ID NO: 5233 - DNA, 1698 bp, synthetic construct
  source 1..1698: mol_type = other DNA
atggccttaccagtgaccgccttgctcctgccgctggccttgctgctccacgccgccaggccggacatccagatgacacagagccctagcagcctgtctgccagcgtgggagacagagtgaccatcacatgcaaggccagcgaccacatcaacaactggctggcctggtatcagcagaagcctggacaggcccctaagctgctgatctacggcgctaccacactggaaacaggcgtgcccagcagattttctggcagcggctctggcaccgactacaccctgacaatatccagcctccagcctgaggacttcgccacctactactgtcagcagagctggaacaccccttggacattcggccagggcaccaagctggaaatcaagagaggcggaggcggaagtggaggcggaggatctggcggcggaggctctcaagttcagcttcaacagcctggcgctgagctggtcaaacctggcgcttctgtgaagatgagctgcaaagccagcggctacgccttcaacagctactggatcaactggatgaagcagaaacccggccagggactcgaatggatcggccaaatctatcccggcgacggcgacaccaactacaacggcaagttcaagggcagagccacactgaccgccgatacctctagcagcacagcctacatgcagctgagcagcctgaccagcgaagatagcgccgtgtacttctgtgcccggtccatcacaacagtcgtgggctgcgctatggactattggggccagggaacaagcgtgaccgtgtctagtacgcgtagaagttttgatcgctacaggctcgagggaggcagctggagccaccctcagtttgaaaaagactacaaagacgatgacgataagggatcagattacaaggatgatgatgacaaggggtcagattataaagacgacgatgataaagggagcgactacaaggacgacgatgacaaggcctggtcccatccccagttcgagaaacaccatcaccaccaccatcatcacactagtggctccggcgagggcagaggaagtctactaacctgcggagatgtggaagaaaatcctggcccacatatgaccgagtacaagcccacggtgcgcctcgccacccgcgacgacgtccccagggccgtacgcaccctcgccgccgcgttcgccgactaccccgccacgcgccacaccgtcgatccggaccgccacatcgagcgggtcaccgagctgcaagaactcttcctcacgcgcgtcgggctcgacatcggcaaggtgtgggtcgcggacgacggcgccgcggtggcggtctggaccacgccggagagcgtcgaagcgggggcggtgttcgccgagatcggcccgcgcatggccgagttgagcggttcccggctggccgcgcagcaacagatggaaggcctcctggcgccgcaccggcccaaggagcccgcgtggttcctggccaccgtcggcgtctcgcccgaccaccagggcaagggtctgggcagcgccgtcgtgctccccggagtggaggcggccgagcgcgccggggtgcccgccttcctggagacctccgcgccccgcaacctccccttctacgagcggctcggcttcaccgtcaccgccgacgtcgaggtgcccgaaggaccgcgcacctggtgcatgacccgcaagcccggtgcctga

SEQ ID NO: 5234 - DNA, 1698 bp, synthetic construct
  source 1..1698: mol_type = other DNA
atggccttaccagtgaccgccttgctcctgccgctggccttgctgctccacgccgccaggccggacatccagatgacacagagccctagcagcctgtctgccagcgtgggagacagagtgaccatcacatgcaaggccagcgaccacatcaacaactggctggcctggtatcagcagaagcctggacaggcccctaagctgctgatctacggcgctaccacactggaaacaggcgtgcccagcagattttctggcagcggctctggcaccgactacaccctgacaatatccagcctccagcctgaggacttcgccacctactactgtcagcagagctggaacaccccttggacattcggccagggcaccaagctggaaatcaagagaggcggaggcggaagtggaggcggaggatctggcggcggaggctctcaagttcagcttcaacagcctggcgctgagctggtcaaacctggcgcttctgtgaagatgagctgcaaagccagcggctacgccttcaacagctactggatcaactggatgaagcagaaacccggccagggactcgaatggatcggccaaatctatcccggcgacggcgacaccaactacaacggcaagttcaagggcagagccacactgaccgccgatacctctagcagcacagcctacatgcagctgagcagcctgaccagcgaagatagcgccgtgtacttctgtgcccggtccatcacaacagtcgtgggctgcgctatggactattggggccagggaacaagcgtgaccgtgtctagtacgcgtagaagtttagatcgctacaggctcgagggaggcagctggagccaccctcagtttgaaaaagactacaaagacgatgacgataagggatcagattacaaggatgatgatgacaaggggtcagattataaagacgacgatgataaagggagcgactacaaggacgacgatgacaaggcctggtcccatccccagttcgagaaacaccatcaccaccaccatcatcacactagtggctccggcgagggcagaggaagtctactaacctgcggagatgtggaagaaaatcctggcccacatatgaccgagtacaagcccacggtgcgcctcgccacccgcgacgacgtccccagggccgtacgcaccctcgccgccgcgttcgccgactaccccgccacgcgccacaccgtcgatccggaccgccacatcgagcgggtcaccgagctgcaagaactcttcctcacgcgcgtcgggctcgacatcggcaaggtgtgggtcgcggacgacggcgccgcggtggcggtctggaccacgccggagagcgtcgaagcgggggcggtgttcgccgagatcggcccgcgcatggccgagttgagcggttcccggctggccgcgcagcaacagatggaaggcctcctggcgccgcaccggcccaaggagcccgcgtggttcctggccaccgtcggcgtctcgcccgaccaccagggcaagggtctgggcagcgccgtcgtgctccccggagtggaggcggccgagcgcgccggggtgcccgccttcctggagacctccgcgccccgcaacctccccttctacgagcggctcggcttcaccgtcaccgccgacgtcgaggtgcccgaaggaccgcgcacctggtgcatgacccgcaagcccggtgcctga

SEQ ID NO: 5235 - DNA, 1929 bp, synthetic construct
  source 1..1929: mol_type = other DNA
atggccttaccagtgaccgccttgctcctgccgctggccttgctgctccacgccgccaggccggacatccagatgacacagagccctagcagcctgtctgccagcgtgggagacagagtgaccatcacatgcaaggccagcgaccacatcaacaactggctggcctggtatcagcagaagcctggacaggcccctaagctgctgatctacggcgctaccacactggaaacaggcgtgcccagcagattttctggcagcggctctggcaccgactacaccctgacaatatccagcctccagcctgaggacttcgccacctactactgtcagcagagctggaacaccccttggacattcggccagggcaccaagctggaaatcaagagaggcggaggcggaagtggaggcggaggatctggcggcggaggctctcaagttcagcttcaacagcctggcgctgagctggtcaaacctggcgcttctgtgaagatgagctgcaaagccagcggctacgccttcaacagctactggatcaactggatgaagcagaaacccggccagggactcgaatggatcggccaaatctatcccggcgacggcgacaccaactacaacggcaagttcaagggcagagccacactgaccgccgatacctctagcagcacagcctacatgcagctgagcagcctgaccagcgaagatagcgccgtgtacttctgtgcccggtccatcacaacagtcgtgggctgcgctatggactattggggccagggaacaagcgtgaccgtgtctagtacgcgtagaagtgtggatcgctacaggctcgagggaggcagctggagccaccctcagtttgaaaaagactacaaagacgatgacgataagggatcagattacaaggatgatgatgacaaggggtcagattataaagacgacgatgataaagggagcgactacaaggacgacgatgacaaggcctggtcccatccccagttcgagaaacaccatcaccaccaccatcatcacacgcgtagaagtaaggatcgctacaggctcgagggaggcagctggagccaccctcagtttgaaaaagactacaaagacgatgacgataagggatcagattacaaggatgatgatgacaaggggtcagattataaagacgacgatgataaagggagcgactacaaggacgacgatgacaaggcctggtcccatccccagttcgagaaacaccatcaccaccaccatcatcacactagtggctccggcgagggcagaggaagtctactaacctgcggagatgtggaagaaaatcctggcccacatatgaccgagtacaagcccacggtgcgcctcgccacccgcgacgacgtccccagggccgtacgcaccctcgccgccgcgttcgccgactaccccgccacgcgccacaccgtcgatccggaccgccacatcgagcgggtcaccgagctgcaagaactcttcctcacgcgcgtcgggctcgacatcggcaaggtgtgggtcgcggacgacggcgccgcggtggcggtctggaccacgccggagagcgtcgaagcgggggcggtgttcgccgagatcggcccgcgcatggccgagttgagcggttcccggctggccgcgcagcaacagatggaaggcctcctggcgccgcaccggcccaaggagcccgcgtggttcctggccaccgtcggcgtctcgcccgaccaccagggcaagggtctgggcagcgccgtcgtgctccccggagtggaggcggccgagcgcgccggggtgcccgccttcctggagacctccgcgccccgcaacctccccttctacgagcggctcggcttcaccgtcaccgccgacgtcgaggtgcccgaaggaccgcgcacctggtgcatgacccgcaagcccggtgcctga

SEQ ID NO: 5236 - DNA, 1698 bp, synthetic construct
  source 1..1698: mol_type = other DNA
atggccttaccagtgaccgccttgctcctgccgctggccttgctgctccacgccgccaggccggacatccagatgacacagagccctagcagcctgtctgccagcgtgggagacagagtgaccatcacatgcaaggccagcgaccacatcaacaactggctggcctggtatcagcagaagcctggacaggcccctaagctgctgatctacggcgctaccacactggaaacaggcgtgcccagcagattttctggcagcggctctggcaccgactacaccctgacaatatccagcctccagcctgaggacttcgccacctactactgtcagcagagctggaacaccccttggacattcggccagggcaccaagctggaaatcaagagaggcggaggcggaagtggaggcggaggatctggcggcggaggctctcaagttcagcttcaacagcctggcgctgagctggtcaaacctggcgcttctgtgaagatgagctgcaaagccagcggctacgccttcaacagctactggatcaactggatgaagcagaaacccggccagggactcgaatggatcggccaaatctatcccggcgacggcgacaccaactacaacggcaagttcaagggcagagccacactgaccgccgatacctctagcagcacagcctacatgcagctgagcagcctgaccagcgaagatagcgccgtgtacttctgtgcccggtccatcacaacagtcgtgggctgcgctatggactattggggccagggaacaagcgtgaccgtgtctagtacgcgtagaagtccagatcgctacaggctcgagggaggcagctggagccaccctcagtttgaaaaagactacaaagacgatgacgataagggatcagattacaaggatgatgatgacaaggggtcagattataaagacgacgatgataaagggagcgactacaaggacgacgatgacaaggcctggtcccatccccagttcgagaaacaccatcaccaccaccatcatcacactagtggctccggcgagggcagaggaagtctactaacctgcggagatgtggaagaaaatcctggcccacatatgaccgagtacaagcccacggtgcgcctcgccacccgcgacgacgtccccagggccgtacgcaccctcgccgccgcgttcgccgactaccccgccacgcgccacaccgtcgatccggaccgccacatcgagcgggtcaccgagctgcaagaactcttcctcacgcgcgtcgggctcgacatcggcaaggtgtgggtcgcggacgacggcgccgcggtggcggtctggaccacgccggagagcgtcgaagcgggggcggtgttcgccgagatcggcccgcgcatggccgagttgagcggttcccggctggccgcgcagcaacagatggaaggcctcctggcgccgcaccggcccaaggagcccgcgtggttcctggccaccgtcggcgtctcgcccgaccaccagggcaagggtctgggcagcgccgtcgtgctccccggagtggaggcggccgagcgcgccggggtgcccgccttcctggagacctccgcgccccgcaacctccccttctacgagcggctcggcttcaccgtcaccgccgacgtcgaggtgcccgaaggaccgcgcacctggtgcatgacccgcaagcccggtgcctga

SEQ ID NO: 5237 - DNA, 1698 bp, synthetic construct
  source 1..1698: mol_type = other DNA
atggccttaccagtgaccgccttgctcctgccgctggccttgctgctccacgccgccaggccggacatccagatgacacagagccctagcagcctgtctgccagcgtgggagacagagtgaccatcacatgcaaggccagcgaccacatcaacaactggctggcctggtatcagcagaagcctggacaggcccctaagctgctgatctacggcgctaccacactggaaacaggcgtgcccagcagattttctggcagcggctctggcaccgactacaccctgacaatatccagcctccagcctgaggacttcgccacctactactgtcagcagagctggaacaccccttggacattcggccagggcaccaagctggaaatcaagagaggcggaggcggaagtggaggcggaggatctggcggcggaggctctcaagttcagcttcaacagcctggcgctgagctggtcaaacctggcgcttctgtgaagatgagctgcaaagccagcggctacgccttcaacagctactggatcaactggatgaagcagaaacccggccagggactcgaatggatcggccaaatctatcccggcgacggcgacaccaactacaacggcaagttcaagggcagagccacactgaccgccgatacctctagcagcacagcctacatgcagctgagcagcctgaccagcgaagatagcgccgtgtacttctgtgcccggtccatcacaacagtcgtgggctgcgctatggactattggggccagggaacaagcgtgaccgtgtctagtacgcgtagaagtgaaaaacgctacaggctcgagggaggcagctggagccaccctcagtttgaaaaagactacaaagacgatgacgataagggatcagattacaaggatgatgatgacaaggggtcagattataaagacgacgatgataaagggagcgactacaaggacgacgatgacaaggcctggtcccatccccagttcgagaaacaccatcaccaccaccatcatcacactagtggctccggcgagggcagaggaagtctactaacctgcggagatgtggaagaaaatcctggcccacatatgaccgagtacaagcccacggtgcgcctcgccacccgcgacgacgtccccagggccgtacgcaccctcgccgccgcgttcgccgactaccccgccacgcgccacaccgtcgatccggaccgccacatcgagcgggtcaccgagctgcaagaactcttcctcacgcgcgtcgggctcgacatcggcaaggtgtgggtcgcggacgacggcgccgcggtggcggtctggaccacgccggagagcgtcgaagcgggggcggtgttcgccgagatcggcccgcgcatggccgagttgagcggttcccggctggccgcgcagcaacagatggaaggcctcctggcgccgcaccggcccaaggagcccgcgtggttcctggccaccgtcggcgtctcgcccgaccaccagggcaagggtctgggcagcgccgtcgtgctccccggagtggaggcggccgagcgcgccggggtgcccgccttcctggagacctccgcgccccgcaacctccccttctacgagcggctcggcttcaccgtcaccgccgacgtcgaggtgcccgaaggaccgcgcacctggtgcatgacccgcaagcccggtgcctga

SEQ ID NO: 5238 - DNA, 1698 bp, synthetic construct
  source 1..1698: mol_type = other DNA
atggccttaccagtgaccgccttgctcctgccgctggccttgctgctccacgccgccaggccggacatccagatgacacagagccctagcagcctgtctgccagcgtgggagacagagtgaccatcacatgcaaggccagcgaccacatcaacaactggctggcctggtatcagcagaagcctggacaggcccctaagctgctgatctacggcgctaccacactggaaacaggcgtgcccagcagattttctggcagcggctctggcaccgactacaccctgacaatatccagcctccagcctgaggacttcgccacctactactgtcagcagagctggaacaccccttggacattcggccagggcaccaagctggaaatcaagagaggcggaggcggaagtggaggcggaggatctggcggcggaggctctcaagttcagcttcaacagcctggcgctgagctggtcaaacctggcgcttctgtgaagatgagctgcaaagccagcggctacgccttcaacagctactggatcaactggatgaagcagaaacccggccagggactcgaatggatcggccaaatctatcccggcgacggcgacaccaactacaacggcaagttcaagggcagagccacactgaccgccgatacctctagcagcacagcctacatgcagctgagcagcctgaccagcgaagatagcgccgtgtacttctgtgcccggtccatcacaacagtcgtgggctgcgctatggactattggggccagggaacaagcgtgaccgtgtctagtacgcgtagaagtgaaggacgctacaggctcgagggaggcagctggagccaccctcagtttgaaaaagactacaaagacgatgacgataagggatcagattacaaggatgatgatgacaaggggtcagattataaagacgacgatgataaagggagcgactacaaggacgacgatgacaaggcctggtcccatccccagttcgagaaacaccatcaccaccaccatcatcacactagtggctccggcgagggcagaggaagtctactaacctgcggagatgtggaagaaaatcctggcccacatatgaccgagtacaagcccacggtgcgcctcgccacccgcgacgacgtccccagggccgtacgcaccctcgccgccgcgttcgccgactaccccgccacgcgccacaccgtcgatccggaccgccacatcgagcgggtcaccgagctgcaagaactcttcctcacgcgcgtcgggctcgacatcggcaaggtgtgggtcgcggacgacggcgccgcggtggcggtctggaccacgccggagagcgtcgaagcgggggcggtgttcgccgagatcggcccgcgcatggccgagttgagcggttcccggctggccgcgcagcaacagatggaaggcctcctggcgccgcaccggcccaaggagcccgcgtggttcctggccaccgtcggcgtctcgcccgaccaccagggcaagggtctgggcagcgccgtcgtgctccccggagtggaggcggccgagcgcgccggggtgcccgccttcctggagacctccgcgccccgcaacctccccttctacgagcggctcggcttcaccgtcaccgccgacgtcgaggtgcccgaaggaccgcgcacctggtgcatgacccgcaagcccggtgcctga

SEQ ID NO: 5239 - DNA, 1698 bp, synthetic construct
  source 1..1698: mol_type = other DNA
atggccttaccagtgaccgccttgctcctgccgctggccttgctgctccacgccgccaggccggacatccagatgacacagagccctagcagcctgtctgccagcgtgggagacagagtgaccatcacatgcaaggccagcgaccacatcaacaactggctggcctggtatcagcagaagcctggacaggcccctaagctgctgatctacggcgctaccacactggaaacaggcgtgcccagcagattttctggcagcggctctggcaccgactacaccctgacaatatccagcctccagcctgaggacttcgccacctactactgtcagcagagctggaacaccccttggacattcggccagggcaccaagctggaaatcaagagaggcggaggcggaagtggaggcggaggatctggcggcggaggctctcaagttcagcttcaacagcctggcgctgagctggtcaaacctggcgcttctgtgaagatgagctgcaaagccagcggctacgccttcaacagctactggatcaactggatgaagcagaaacccggccagggactcgaatggatcggccaaatctatcccggcgacggcgacaccaactacaacggcaagttcaagggcagagccacactgaccgccgatacctctagcagcacagcctacatgcagctgagcagcctgaccagcgaagatagcgccgtgtacttctgtgcccggtccatcacaacagtcgtgggctgcgctatggactattggggccagggaacaagcgtgaccgtgtctagtacgcgtagaagtgaactgcgctacaggctcgagggaggcagctggagccaccctcagtttgaaaaagactacaaagacgatgacgataagggatcagattacaaggatgatgatgacaaggggtcagattataaagacgacgatgataaagggagcgactacaaggacgacgatgacaaggcctggtcccatccccagttcgagaaacaccatcaccaccaccatcatcacactagtggctccggcgagggcagaggaagtctactaacctgcggagatgtggaagaaaatcctggcccacatatgaccgagtacaagcccacggtgcgcctcgccacccgcgacgacgtccccagggccgtacgcaccctcgccgccgcgttcgccgactaccccgccacgcgccacaccgtcgatccggaccgccacatcgagcgggtcaccgagctgcaagaactcttcctcacgcgcgtcgggctcgacatcggcaaggtgtgggtcgcggacgacggcgccgcggtggcggtctggaccacgccggagagcgtcgaagcgggggcggtgttcgccgagatcggcccgcgcatggccgagttgagcggttcccggctggccgcgcagcaacagatggaaggcctcctggcgccgcaccggcccaaggagcccgcgtggttcctggccaccgtcggcgtctcgcccgaccaccagggcaagggtctgggcagcgccgtcgtgctccccggagtggaggcggccgagcgcgccggggtgcccgccttcctggagacctccgcgccccgcaacctccccttctacgagcggctcggcttcaccgtcaccgccgacgtcgaggtgcccgaaggaccgcgcacctggtgcatgacccgcaagcccggtgcctga

SEQ ID NO: 5240 - DNA, 1701 bp, synthetic construct
  source 1..1701: mol_type = other DNA
atggccttaccagtgaccgccttgctcctgccgctggccttgctgctccacgccgccaggccggacatccagatgacacagagccctagcagcctgtctgccagcgtgggagacagagtgaccatcacatgcaaggccagcgaccacatcaacaactggctggcctggtatcagcagaagcctggacaggcccctaagctgctgatctacggcgctaccacactggaaacaggcgtgcccagcagattttctggcagcggctctggcaccgactacaccctgacaatatccagcctccagcctgaggacttcgccacctactactgtcagcagagctggaacaccccttggacattcggccagggcaccaagctggaaatcaagagaggcggaggcggaagtggaggcggaggatctggcggcggaggctctcaagttcagcttcaacagcctggcgctgagctggtcaaacctggcgcttctgtgaagatgagctgcaaagccagcggctacgccttcaacagctactggatcaactggatgaagcagaaacccggccagggactcgaatggatcggccaaatctatcccggcgacggcgacaccaactacaacggcaagttcaagggcagagccacactgaccgccgatacctctagcagcacagcctacatgcagctgagcagcctgaccagcgaagatagcgccgtgtacttctgtgcccggtccatcacaacagtcgtgggctgcgctatggactattggggccagggaacaagcgtgaccgtgtctagtacgcgtagaagtgaacatcgctacaggaacctcgagggaggcagctggagccaccctcagtttgaaaaagactacaaagacgatgacgataagggatcagattacaaggatgatgatgacaaggggtcagattataaagacgacgatgataaagggagcgactacaaggacgacgatgacaaggcctggtcccatccccagttcgagaaacaccatcaccaccaccatcatcacactagtggctccggcgagggcagaggaagtctactaacctgcggagatgtggaagaaaatcctggcccacatatgaccgagtacaagcccacggtgcgcctcgccacccgcgacgacgtccccagggccgtacgcaccctcgccgccgcgttcgccgactaccccgccacgcgccacaccgtcgatccggaccgccacatcgagcgggtcaccgagctgcaagaactcttcctcacgcgcgtcgggctcgacatcggcaaggtgtgggtcgcggacgacggcgccgcggtggcggtctggaccacgccggagagcgtcgaagcgggggcggtgttcgccgagatcggcccgcgcatggccgagttgagcggttcccggctggccgcgcagcaacagatggaaggcctcctggcgccgcaccggcccaaggagcccgcgtggttcctggccaccgtcggcgtctcgcccgaccaccagggcaagggtctgggcagcgccgtcgtgctccccggagtggaggcggccgagcgcgccggggtgcccgccttcctggagacctccgcgccccgcaacctccccttctacgagcggctcggcttcaccgtcaccgccgacgtcgaggtgcccgaaggaccgcgcacctggtgcatgacccgcaagcccggtgcctga

SEQ ID NO: 5241 - DNA, 813 bp, synthetic construct
  source 1..813: mol_type = other DNA
atggccttaccagtgaccgccttgctcctgccgctggccttgctgctccacgccgccaggccggacatccagatgacacagagccctagcagcctgtctgccagcgtgggagacagagtgaccatcacatgcaaggccagcgaccacatcaacaactggctggcctggtatcagcagaagcctggacaggcccctaagctgctgatctacggcgctaccacactggaaacaggcgtgcccagcagattttctggcagcggctctggcaccgactacaccctgacaatatccagcctccagcctgaggacttcgccacctactactgtcagcagagctggaacaccccttggacattcggccagggcaccaagctggaaatcaagagaggcggaggcggaagtggaggcggaggatctggcggcggaggctctcaagttcagcttcaacagcctggcgctgagctggtcaaacctggcgcttctgtgaagatgagctgcaaagccagcggctacgccttcaacagctactggatcaactggatgaagcagaaacccggccagggactcgaatggatcggccaaatctatcccggcgacggcgacaccaactacaacggcaagttcaagggcagagccacactgaccgccgatacctctagcagcacagcctacatgcagctgagcagcctgaccagcgaagatagcgccgtgtacttctgtgcccggtccatcacaacagtcgtgggctgcgctatggactattggggccagggaacaagcgtgaccgtgtctagtacgcgtagaagtgaatga

SEQ ID NO: 5242 - DNA, 1698 bp, synthetic construct
  source 1..1698: mol_type = other DNA
atggccttaccagtgaccgccttgctcctgccgctggccttgctgctccacgccgccaggccggacatccagatgacacagagccctagcagcctgtctgccagcgtgggagacagagtgaccatcacatgcaaggccagcgaccacatcaacaactggctggcctggtatcagcagaagcctggacaggcccctaagctgctgatctacggcgctaccacactggaaacaggcgtgcccagcagattttctggcagcggctctggcaccgactacaccctgacaatatccagcctccagcctgaggacttcgccacctactactgtcagcagagctggaacaccccttggacattcggccagggcaccaagctggaaatcaagagaggcggaggcggaagtggaggcggaggatctggcggcggaggctctcaagttcagcttcaacagcctggcgctgagctggtcaaacctggcgcttctgtgaagatgagctgcaaagccagcggctacgccttcaacagctactggatcaactggatgaagcagaaacccggccagggactcgaatggatcggccaaatctatcccggcgacggcgacaccaactacaacggcaagttcaagggcagagccacactgaccgccgatacctctagcagcacagcctacatgcagctgagcagcctgaccagcgaagatagcgccgtgtacttctgtgcccggtccatcacaacagtcgtgggctgcgctatggactattggggccagggaacaagcgtgaccgtgtctagtacgcgtagaagtgaagcgcgctacaggctcgagggaggcagctggagccaccctcagtttgaaaaagactacaaagacgatgacgataagggatcagattacaaggatgatgatgacaaggggtcagattataaagacgacgatgataaagggagcgactacaaggacgacgatgacaaggcctggtcccatccccagttcgagaaacaccatcaccaccaccatcatcacactagtggctccggcgagggcagaggaagtctactaacctgcggagatgtggaagaaaatcctggcccacatatgaccgagtacaagcccacggtgcgcctcgccacccgcgacgacgtccccagggccgtacgcaccctcgccgccgcgttcgccgactaccccgccacgcgccacaccgtcgatccggaccgccacatcgagcgggtcaccgagctgcaagaactcttcctcacgcgcgtcgggctcgacatcggcaaggtgtgggtcgcggacgacggcgccgcggtggcggtctggaccacgccggagagcgtcgaagcgggggcggtgttcgccgagatcggcccgcgcatggccgagttgagcggttcccggctggccgcgcagcaacagatggaaggcctcctggcgccgcaccggcccaaggagcccgcgtggttcctggccaccgtcggcgtctcgcccgaccaccagggcaagggtctgggcagcgccgtcgtgctccccggagtggaggcggccgagcgcgccggggtgcccgccttcctggagacctccgcgccccgcaacctccccttctacgagcggctcggcttcaccgtcaccgccgacgtcgaggtgcccgaaggaccgcgcacctggtgcatgacccgcaagcccggtgcctga

SEQ ID NO: 5243 - DNA, 1698 bp, synthetic construct
  source 1..1698: mol_type = other DNA
atggccttaccagtgaccgccttgctcctgccgctggccttgctgctccacgccgccaggccggacatccagatgacacagagccctagcagcctgtctgccagcgtgggagacagagtgaccatcacatgcaaggccagcgaccacatcaacaactggctggcctggtatcagcagaagcctggacaggcccctaagctgctgatctacggcgctaccacactggaaacaggcgtgcccagcagattttctggcagcggctctggcaccgactacaccctgacaatatccagcctccagcctgaggacttcgccacctactactgtcagcagagctggaacaccccttggacattcggccagggcaccaagctggaaatcaagagaggcggaggcggaagtggaggcggaggatctggcggcggaggctctcaagttcagcttcaacagcctggcgctgagctggtcaaacctggcgcttctgtgaagatgagctgcaaagccagcggctacgccttcaacagctactggatcaactggatgaagcagaaacccggccagggactcgaatggatcggccaaatctatcccggcgacggcgacaccaactacaacggcaagttcaagggcagagccacactgaccgccgatacctctagcagcacagcctacatgcagctgagcagcctgaccagcgaagatagcgccgtgtacttctgtgcccggtccatcacaacagtcgtgggctgcgctatggactattggggccagggaacaagcgtgaccgtgtctagtacgcgtagaagtgaatggcgctacaggctcgagggaggcagctggagccaccctcagtttgaaaaagactacaaagacgatgacgataagggatcagattacaaggatgatgatgacaaggggtcagattataaagacgacgatgataaagggagcgactacaaggacgacgatgacaaggcctggtcccatccccagttcgagaaacaccatcaccaccaccatcatcacactagtggctccggcgagggcagaggaagtctactaacctgcggagatgtggaagaaaatcctggcccacatatgaccgagtacaagcccacggtgcgcctcgccacccgcgacgacgtccccagggccgtacgcaccctcgccgccgcgttcgccgactaccccgccacgcgccacaccgtcgatccggaccgccacatcgagcgggtcaccgagctgcaagaactcttcctcacgcgcgtcgggctcgacatcggcaaggtgtgggtcgcggacgacggcgccgcggtggcggtctggaccacgccggagagcgtcgaagcgggggcggtgttcgccgagatcggcccgcgcatggccgagttgagcggttcccggctggccgcgcagcaacagatggaaggcctcctggcgccgcaccggcccaaggagcccgcgtggttcctggccaccgtcggcgtctcgcccgaccaccagggcaagggtctgggcagcgccgtcgtgctccccggagtggaggcggccgagcgcgccggggtgcccgccttcctggagacctccgcgccccgcaacctccccttctacgagcggctcggcttcaccgtcaccgccgacgtcgaggtgcccgaaggaccgcgcacctggtgcatgacccgcaagcccggtgcctga

SEQ ID NO: 5244 - DNA, 1698 bp, synthetic construct
  source 1..1698: mol_type = other DNA
atggccttaccagtgaccgccttgctcctgccgctggccttgctgctccacgccgccaggccggacatccagatgacacagagccctagcagcctgtctgccagcgtgggagacagagtgaccatcacatgcaaggccagcgaccacatcaacaactggctggcctggtatcagcagaagcctggacaggcccctaagctgctgatctacggcgctaccacactggaaacaggcgtgcccagcagattttctggcagcggctctggcaccgactacaccctgacaatatccagcctccagcctgaggacttcgccacctactactgtcagcagagctggaacaccccttggacattcggccagggcaccaagctggaaatcaagagaggcggaggcggaagtggaggcggaggatctggcggcggaggctctcaagttcagcttcaacagcctggcgctgagctggtcaaacctggcgcttctgtgaagatgagctgcaaagccagcggctacgccttcaacagctactggatcaactggatgaagcagaaacccggccagggactcgaatggatcggccaaatctatcccggcgacggcgacaccaactacaacggcaagttcaagggcagagccacactgaccgccgatacctctagcagcacagcctacatgcagctgagcagcctgaccagcgaagatagcgccgtgtacttctgtgcccggtccatcacaacagtcgtgggctgcgctatggactattggggccagggaacaagcgtgaccgtgtctagtacgcgtagaagtgaacgacgctacaggctcgagggaggcagctggagccaccctcagtttgaaaaagactacaaagacgatgacgataagggatcagattacaaggatgatgatgacaaggggtcagattataaagacgacgatgataaagggagcgactacaaggacgacgatgacaaggcctggtcccatccccagttcgagaaacaccatcaccaccaccatcatcacactagtggctccggcgagggcagaggaagtctactaacctgcggagatgtggaagaaaatcctggcccacatatgaccgagtacaagcccacggtgcgcctcgccacccgcgacgacgtccccagggccgtacgcaccctcgccgccgcgttcgccgactaccccgccacgcgccacaccgtcgatccggaccgccacatcgagcgggtcaccgagctgcaagaactcttcctcacgcgcgtcgggctcgacatcggcaaggtgtgggtcgcggacgacggcgccgcggtggcggtctggaccacgccggagagcgtcgaagcgggggcggtgttcgccgagatcggcccgcgcatggccgagttgagcggttcccggctggccgcgcagcaacagatggaaggcctcctggcgccgcaccggcccaaggagcccgcgtggttcctggccaccgtcggcgtctcgcccgaccaccagggcaagggtctgggcagcgccgtcgtgctccccggagtggaggcggccgagcgcgccggggtgcccgccttcctggagacctccgcgccccgcaacctccccttctacgagcggctcggcttcaccgtcaccgccgacgtcgaggtgcccgaaggaccgcgcacctggtgcatgacccgcaagcccggtgcctga

SEQ ID NO: 5245 - DNA, 1701 bp, synthetic construct
  source 1..1701: mol_type = other DNA
atggccttaccagtgaccgccttgctcctgccgctggccttgctgctccacgccgccaggccggacatccagatgacacagagccctagcagcctgtctgccagcgtgggagacagagtgaccatcacatgcaaggccagcgaccacatcaacaactggctggcctggtatcagcagaagcctggacaggcccctaagctgctgatctacggcgctaccacactggaaacaggcgtgcccagcagattttctggcagcggctctggcaccgactacaccctgacaatatccagcctccagcctgaggacttcgccacctactactgtcagcagagctggaacaccccttggacattcggccagggcaccaagctggaaatcaagagaggcggaggcggaagtggaggcggaggatctggcggcggaggctctcaagttcagcttcaacagcctggcgctgagctggtcaaacctggcgcttctgtgaagatgagctgcaaagccagcggctacgccttcaacagctactggatcaactggatgaagcagaaacccggccagggactcgaatggatcggccaaatctatcccggcgacggcgacaccaactacaacggcaagttcaagggcagagccacactgaccgccgatacctctagcagcacagcctacatgcagctgagcagcctgaccagcgaagatagcgccgtgtacttctgtgcccggtccatcacaacagtcgtgggctgcgctatggactattggggccagggaacaagcgtgaccgtgtctagtacgcgtagaagtgaactccgctacaggaacctcgagggaggcagctggagccaccctcagtttgaaaaagactacaaagacgatgacgataagggatcagattacaaggatgatgatgacaaggggtcagattataaagacgacgatgataaagggagcgactacaaggacgacgatgacaaggcctggtcccatccccagttcgagaaacaccatcaccaccaccatcatcacactagtggctccggcgagggcagaggaagtctactaacctgcggagatgtggaagaaaatcctggcccacatatgaccgagtacaagcccacggtgcgcctcgccacccgcgacgacgtccccagggccgtacgcaccctcgccgccgcgttcgccgactaccccgccacgcgccacaccgtcgatccggaccgccacatcgagcgggtcaccgagctgcaagaactcttcctcacgcgcgtcgggctcgacatcggcaaggtgtgggtcgcggacgacggcgccgcggtggcggtctggaccacgccggagagcgtcgaagcgggggcggtgttcgccgagatcggcccgcgcatggccgagttgagcggttcccggctggccgcgcagcaacagatggaaggcctcctggcgccgcaccggcccaaggagcccgcgtggttcctggccaccgtcggcgtctcgcccgaccaccagggcaagggtctgggcagcgccgtcgtgctccccggagtggaggcggccgagcgcgccggggtgcccgccttcctggagacctccgcgccccgcaacctccccttctacgagcggctcggcttcaccgtcaccgccgacgtcgaggtgcccgaaggaccgcgcacctggtgcatgacccgcaagcccggtgcctga

SEQ ID NO: 5246 - DNA, 1701 bp, synthetic construct
  source 1..1701: mol_type = other DNA
atggccttaccagtgaccgccttgctcctgccgctggccttgctgctccacgccgccaggccggacatccagatgacacagagccctagcagcctgtctgccagcgtgggagacagagtgaccatcacatgcaaggccagcgaccacatcaacaactggctggcctggtatcagcagaagcctggacaggcccctaagctgctgatctacggcgctaccacactggaaacaggcgtgcccagcagattttctggcagcggctctggcaccgactacaccctgacaatatccagcctccagcctgaggacttcgccacctactactgtcagcagagctggaacaccccttggacattcggccagggcaccaagctggaaatcaagagaggcggaggcggaagtggaggcggaggatctggcggcggaggctctcaagttcagcttcaacagcctggcgctgagctggtcaaacctggcgcttctgtgaagatgagctgcaaagccagcggctacgccttcaacagctactggatcaactggatgaagcagaaacccggccagggactcgaatggatcggccaaatctatcccggcgacggcgacaccaactacaacggcaagttcaagggcagagccacactgaccgccgatacctctagcagcacagcctacatgcagctgagcagcctgaccagcgaagatagcgccgtgtacttctgtgcccggtccatcacaacagtcgtgggctgcgctatggactattggggccagggaacaagcgtgaccgtgtctagtacgcgtagattggaagatcgctacaggaacctcgagggaggcagctggagccaccctcagtttgaaaaagactacaaagacgatgacgataagggatcagattacaaggatgatgatgacaaggggtcagattataaagacgacgatgataaagggagcgactacaaggacgacgatgacaaggcctggtcccatccccagttcgagaaacaccatcaccaccaccatcatcacactagtggctccggcgagggcagaggaagtctactaacctgcggagatgtggaagaaaatcctggcccacatatgaccgagtacaagcccacggtgcgcctcgccacccgcgacgacgtccccagggccgtacgcaccctcgccgccgcgttcgccgactaccccgccacgcgccacaccgtcgatccggaccgccacatcgagcgggtcaccgagctgcaagaactcttcctcacgcgcgtcgggctcgacatcggcaaggtgtgggtcgcggacgacggcgccgcggtggcggtctggaccacgccggagagcgtcgaagcgggggcggtgttcgccgagatcggcccgcgcatggccgagttgagcggttcccggctggccgcgcagcaacagatggaaggcctcctggcgccgcaccggcccaaggagcccgcgtggttcctggccaccgtcggcgtctcgcccgaccaccagggcaagggtctgggcagcgccgtcgtgctccccggagtggaggcggccgagcgcgccggggtgcccgccttcctggagacctccgcgccccgcaacctccccttctacgagcggctcggcttcaccgtcaccgccgacgtcgaggtgcccgaaggaccgcgcacctggtgcatgacccgcaagcccggtgcctga

SEQ ID NO: 5247 - DNA, 1701 bp, synthetic construct
  source 1..1701: mol_type = other DNA
atggccttaccagtgaccgccttgctcctgccgctggccttgctgctccacgccgccaggccggacatccagatgacacagagccctagcagcctgtctgccagcgtgggagacagagtgaccatcacatgcaaggccagcgaccacatcaacaactggctggcctggtatcagcagaagcctggacaggcccctaagctgctgatctacggcgctaccacactggaaacaggcgtgcccagcagattttctggcagcggctctggcaccgactacaccctgacaatatccagcctccagcctgaggacttcgccacctactactgtcagcagagctggaacaccccttggacattcggccagggcaccaagctggaaatcaagagaggcggaggcggaagtggaggcggaggatctggcggcggaggctctcaagttcagcttcaacagcctggcgctgagctggtcaaacctggcgcttctgtgaagatgagctgcaaagccagcggctacgccttcaacagctactggatcaactggatgaagcagaaacccggccagggactcgaatggatcggccaaatctatcccggcgacggcgacaccaactacaacggcaagttcaagggcagagccacactgaccgccgatacctctagcagcacagcctacatgcagctgagcagcctgaccagcgaagatagcgccgtgtacttctgtgcccggtccatcacaacagtcgtgggctgcgctatggactattggggccagggaacaagcgtgaccgtgtctagtacgcgtagaggagaagatcgctacaggaacctcgagggaggcagctggagccaccctcagtttgaaaaagactacaaagacgatgacgataagggatcagattacaaggatgatgatgacaaggggtcagattataaagacgacgatgataaagggagcgactacaaggacgacgatgacaaggcctggtcccatccccagttcgagaaacaccatcaccaccaccatcatcacactagtggctccggcgagggcagaggaagtctactaacctgcggagatgtggaagaaaatcctggcccacatatgaccgagtacaagcccacggtgcgcctcgccacccgcgacgacgtccccagggccgtacgcaccctcgccgccgcgttcgccgactaccccgccacgcgccacaccgtcgatccggaccgccacatcgagcgggtcaccgagctgcaagaactcttcctcacgcgcgtcgggctcgacatcggcaaggtgtgggtcgcggacgacggcgccgcggtggcggtctggaccacgccggagagcgtcgaagcgggggcggtgttcgccgagatcggcccgcgcatggccgagttgagcggttcccggctggccgcgcagcaacagatggaaggcctcctggcgccgcaccggcccaaggagcccgcgtggttcctggccaccgtcggcgtctcgcccgaccaccagggcaagggtctgggcagcgccgtcgtgctccccggagtggaggcggccgagcgcgccggggtgcccgccttcctggagacctccgcgccccgcaacctccccttctacgagcggctcggcttcaccgtcaccgccgacgtcgaggtgcccgaaggaccgcgcacctggtgcatgacccgcaagcccggtgcctga

SEQ ID NO: 5248 - DNA, 1701 bp, synthetic construct
  source 1..1701: mol_type = other DNA
atggccttaccagtgaccgccttgctcctgccgctggccttgctgctccacgccgccaggccggacatccagatgacacagagccctagcagcctgtctgccagcgtgggagacagagtgaccatcacatgcaaggccagcgaccacatcaacaactggctggcctggtatcagcagaagcctggacaggcccctaagctgctgatctacggcgctaccacactggaaacaggcgtgcccagcagattttctggcagcggctctggcaccgactacaccctgacaatatccagcctccagcctgaggacttcgccacctactactgtcagcagagctggaacaccccttggacattcggccagggcaccaagctggaaatcaagagaggcggaggcggaagtggaggcggaggatctggcggcggaggctctcaagttcagcttcaacagcctggcgctgagctggtcaaacctggcgcttctgtgaagatgagctgcaaagccagcggctacgccttcaacagctactggatcaactggatgaagcagaaacccggccagggactcgaatggatcggccaaatctatcccggcgacggcgacaccaactacaacggcaagttcaagggcagagccacactgaccgccgatacctctagcagcacagcctacatgcagctgagcagcctgaccagcgaagatagcgccgtgtacttctgtgcccggtccatcacaacagtcgtgggctgcgctatggactattggggccagggaacaagcgtgaccgtgtctagtacgcgtagaagagaagatcgctacaggaacctcgagggaggcagctggagccaccctcagtttgaaaaagactacaaagacgatgacgataagggatcagattacaaggatgatgatgacaaggggtcagattataaagacgacgatgataaagggagcgactacaaggacgacgatgacaaggcctggtcccatccccagttcgagaaacaccatcaccaccaccatcatcacactagtggctccggcgagggcagaggaagtctactaacctgcggagatgtggaagaaaatcctggcccacatatgaccgagtacaagcccacggtgcgcctcgccacccgcgacgacgtccccagggccgtacgcaccctcgccgccgcgttcgccgactaccccgccacgcgccacaccgtcgatccggaccgccacatcgagcgggtcaccgagctgcaagaactcttcctcacgcgcgtcgggctcgacatcggcaaggtgtgggtcgcggacgacggcgccgcggtggcggtctggaccacgccggagagcgtcgaagcgggggcggtgttcgccgagatcggcccgcgcatggccgagttgagcggttcccggctggccgcgcagcaacagatggaaggcctcctggcgccgcaccggcccaaggagcccgcgtggttcctggccaccgtcggcgtctcgcccgaccaccagggcaagggtctgggcagcgccgtcgtgctccccggagtggaggcggccgagcgcgccggggtgcccgccttcctggagacctccgcgccccgcaacctccccttctacgagcggctcggcttcaccgtcaccgccgacgtcgaggtgcccgaaggaccgcgcacctggtgcatgacccgcaagcccggtgcctga

SEQ ID NO: 5249 - DNA, 1701 bp, synthetic construct
  source 1..1701: mol_type = other DNA
atggccttaccagtgaccgccttgctcctgccgctggccttgctgctccacgccgccaggccggacatccagatgacacagagccctagcagcctgtctgccagcgtgggagacagagtgaccatcacatgcaaggccagcgaccacatcaacaactggctggcctggtatcagcagaagcctggacaggcccctaagctgctgatctacggcgctaccacactggaaacaggcgtgcccagcagattttctggcagcggctctggcaccgactacaccctgacaatatccagcctccagcctgaggacttcgccacctactactgtcagcagagctggaacaccccttggacattcggccagggcaccaagctggaaatcaagagaggcggaggcggaagtggaggcggaggatctggcggcggaggctctcaagttcagcttcaacagcctggcgctgagctggtcaaacctggcgcttctgtgaagatgagctgcaaagccagcggctacgccttcaacagctactggatcaactggatgaagcagaaacccggccagggactcgaatggatcggccaaatctatcccggcgacggcgacaccaactacaacggcaagttcaagggcagagccacactgaccgccgatacctctagcagcacagcctacatgcagctgagcagcctgaccagcgaagatagcgccgtgtacttctgtgcccggtccatcacaacagtcgtgggctgcgctatggactattggggccagggaacaagcgtgaccgtgtctagtacgcgtagacaggaagatcgctacaggaacctcgagggaggcagctggagccaccctcagtttgaaaaagactacaaagacgatgacgataagggatcagattacaaggatgatgatgacaaggggtcagattataaagacgacgatgataaagggagcgactacaaggacgacgatgacaaggcctggtcccatccccagttcgagaaacaccatcaccaccaccatcatcacactagtggctccggcgagggcagaggaagtctactaacctgcggagatgtggaagaaaatcctggcccacatatgaccgagtacaagcccacggtgcgcctcgccacccgcgacgacgtccccagggccgtacgcaccctcgccgccgcgttcgccgactaccccgccacgcgccacaccgtcgatccggaccgccacatcgagcgggtcaccgagctgcaagaactcttcctcacgcgcgtcgggctcgacatcggcaaggtgtgggtcgcggacgacggcgccgcggtggcggtctggaccacgccggagagcgtcgaagcgggggcggtgttcgccgagatcggcccgcgcatggccgagttgagcggttcccggctggccgcgcagcaacagatggaaggcctcctggcgccgcaccggcccaaggagcccgcgtggttcctggccaccgtcggcgtctcgcccgaccaccagggcaagggtctgggcagcgccgtcgtgctccccggagtggaggcggccgagcgcgccggggtgcccgccttcctggagacctccgcgccccgcaacctccccttctacgagcggctcggcttcaccgtcaccgccgacgtcgaggtgcccgaaggaccgcgcacctggtgcatgacccgcaagcccggtgcctga

SEQ ID NO: 5250 - DNA, 1701 bp, synthetic construct
  source 1..1701: mol_type = other DNA
atggccttaccagtgaccgccttgctcctgccgctggccttgctgctccacgccgccaggccggacatccagatgacacagagccctagcagcctgtctgccagcgtgggagacagagtgaccatcacatgcaaggccagcgaccacatcaacaactggctggcctggtatcagcagaagcctggacaggcccctaagctgctgatctacggcgctaccacactggaaacaggcgtgcccagcagattttctggcagcggctctggcaccgactacaccctgacaatatccagcctccagcctgaggacttcgccacctactactgtcagcagagctggaacaccccttggacattcggccagggcaccaagctggaaatcaagagaggcggaggcggaagtggaggcggaggatctggcggcggaggctctcaagttcagcttcaacagcctggcgctgagctggtcaaacctggcgcttctgtgaagatgagctgcaaagccagcggctacgccttcaacagctactggatcaactggatgaagcagaaacccggccagggactcgaatggatcggccaaatctatcccggcgacggcgacaccaactacaacggcaagttcaagggcagagccacactgaccgccgatacctctagcagcacagcctacatgcagctgagcagcctgaccagcgaagatagcgccgtgtacttctgtgcccggtccatcacaacagtcgtgggctgcgctatggactattggggccagggaacaagcgtgaccgtgtctagtacgcgtagatcagaagatcgctacaggaacctcgagggaggcagctggagccaccctcagtttgaaaaagactacaaagacgatgacgataagggatcagattacaaggatgatgatgacaaggggtcagattataaagacgacgatgataaagggagcgactacaaggacgacgatgacaaggcctggtcccatccccagttcgagaaacaccatcaccaccaccatcatcacactagtggctccggcgagggcagaggaagtctactaacctgcggagatgtggaagaaaatcctggcccacatatgaccgagtacaagcccacggtgcgcctcgccacccgcgacgacgtccccagggccgtacgcaccctcgccgccgcgttcgccgactaccccgccacgcgccacaccgtcgatccggaccgccacatcgagcgggtcaccgagctgcaagaactcttcctcacgcgcgtcgggctcgacatcggcaaggtgtgggtcgcggacgacggcgccgcggtggcggtctggaccacgccggagagcgtcgaagcgggggcggtgttcgccgagatcggcccgcgcatggccgagttgagcggttcccggctggccgcgcagcaacagatggaaggcctcctggcgccgcaccggcccaaggagcccgcgtggttcctggccaccgtcggcgtctcgcccgaccaccagggcaagggtctgggcagcgccgtcgtgctccccggagtggaggcggccgagcgcgccggggtgcccgccttcctggagacctccgcgccccgcaacctccccttctacgagcggctcggcttcaccgtcaccgccgacgtcgaggtgcccgaaggaccgcgcacctggtgcatgacccgcaagcccggtgcctga

SEQ ID NO: 5251 - DNA, 1701 bp, synthetic construct; identical to SEQ ID NO: 5248
  source 1..1701: mol_type = other DNA

SEQ ID NO: 5252 - DNA, 1704 bp, synthetic construct
  source 1..1704: mol_type = other DNA
atggccttaccagtgaccgccttgctcctgccgctggccttgctgctccacgccgccaggccggacatccagatgacacagagccctagcagcctgtctgccagcgtgggagacagagtgaccatcacatgcaaggccagcgaccacatcaacaactggctggcctggtatcagcagaagcctggacaggcccctaagctgctgatctacggcgctaccacactggaaacaggcgtgcccagcagattttctggcagcggctctggcaccgactacaccctgacaatatccagcctccagcctgaggacttcgccacctactactgtcagcagagctggaacaccccttggacattcggccagggcaccaagctggaaatcaagagaggcggaggcggaagtggaggcggaggatctggcggcggaggctctcaagttcagcttcaacagcctggcgctgagctggtcaaacctggcgcttctgtgaagatgagctgcaaagccagcggctacgccttcaacagctactggatcaactggatgaagcagaaacccggccagggactcgaatggatcggccaaatctatcccggcgacggcgacaccaactacaacggcaagttcaagggcagagccacactgaccgccgatacctctagcagcacagcctacatgcagctgagcagcctgaccagcgaagatagcgccgtgtacttctgtgcccggtccatcacaacagtcgtgggctgcgctatggactattggggccagggaacaagcgtgaccgtgtctagtacgcgtgcaccaagtgaagatcgctacaggaacctcgagggaggcagctggagccaccctcagtttgaaaaagactacaaagacgatgacgataagggatcagattacaaggatgatgatgacaaggggtcagattataaagacgacgatgataaagggagcgactacaaggacgacgatgacaaggcctggtcccatccccagttcgagaaacaccatcaccaccaccatcatcacactagtggctccggcgagggcagaggaagtctactaacctgcggagatgtggaagaaaatcctggcccacatatgaccgagtacaagcccacggtgcgcctcgccacccgcgacgacgtccccagggccgtacgcaccctcgccgccgcgttcgccgactaccccgccacgcgccacaccgtcgatccggaccgccacatcgagcgggtcaccgagctgcaagaactcttcctcacgcgcgtcgggctcgacatcggcaaggtgtgggtcgcggacgacggcgccgcggtggcggtctggaccacgccggagagcgtcgaagcgggggcggtgttcgccgagatcggcccgcgcatggccgagttgagcggttcccggctggccgcgcagcaacagatggaaggcctcctggcgccgcaccggcccaaggagcccgcgtggttcctggccaccgtcggcgtctcgcccgaccaccagggcaagggtctgggcagcgccgtcgtgctccccggagtggaggcggccgagcgcgccggggtgcccgccttcctggagacctccgcgccccgcaacctccccttctacgagcggctcggcttcaccgtcaccgccgacgtcgaggtgcccgaaggaccgcgcacctggtgcatgacccgcaagcccggtgcctga

SEQ ID NO: 5253 - DNA, 1704 bp, synthetic construct
  source 1..1704: mol_type = other DNA
atggccttaccagtgaccgccttgctcctgccgctggccttgctgctccacgccgccaggccggacatccagatgacacagagccctagcagcctgtctgccagcgtgggagacagagtgaccatcacatgcaaggccagcgaccacatcaacaactggctggcctggtatcagcagaagcctggacaggcccctaagctgctgatctacggcgctaccacactggaaacaggcgtgcccagcagattttctggcagcggctctggcaccgactacaccctgacaatatccagcctccagcctgaggacttcgccacctactactgtcagcagagctggaacaccccttggacattcggccagggcaccaagctggaaatcaagagaggcggaggcggaagtggaggcggaggatctggcggcggaggctctcaagttcagcttcaacagcctggcgctgagctggtcaaacctggcgcttctgtgaagatgagctgcaaagccagcggctacgccttcaacagctactggatcaactggatgaagcagaaacccggccagggactcgaatggatcggccaaatctatcccggcgacggcgacaccaactacaacggcaagttcaagggcagagccacactgaccgccgatacctctagcagcacagcctacatgcagctgagcagcctgaccagcgaagatagcgccgtgtacttctgtgcccggtccatcacaacagtcgtgggctgcgctatggactattggggccagggaacaagcgtgaccgtgtctagtacgcgtgcagacagtgaagatcgctacaggaacctcgagggaggcagctggagccaccctcagtttgaaaaagactacaaagacgatgacgataagggatcagattacaaggatgatgatgacaaggggtcagattataaagacgacgatgataaagggagcgactacaaggacgacgatgacaaggcctggtcccatccccagttcgagaaacaccatcaccaccaccatcatcacactagtggctccggcgagggcagaggaagtctactaacctgcggagatgtggaagaaaatcctggcccacatatgaccgagtacaagcccacggtgcgcctcgccacccgcgacgacgtccccagggccgtacgcaccctcgccgccgcgttcgccgactaccccgccacgcgccacaccgtcgatccggaccgccacatcgagcgggtcaccgagctgcaagaactcttcctcacgcgcgtcgggctcgacatcggcaaggtgtgggtcgcggacgacggcgccgcggtggcggtctggaccacgccggagagcgtcgaagcgggggcggtgttcgccgagatcggcccgcgcatggccgagttgagcggttcccggctggccgcgcagcaacagatggaaggcctcctggcgccgcaccggcccaaggagcccgcgtggttcctggccaccgtcggcgtctcgcccgaccaccagggcaagggtctgggcagcgccgtcgtgctccccggagtggaggcggccgagcgcgccggggtgcccgccttcctggagacctccgcgccccgcaacctccccttctacgagcggctcggcttcaccgtcaccgccgacgtcgaggtgcccgaaggaccgcgcacctggtgcatgacccgcaagcccggtgcctga

SEQ ID NO: 5254 - DNA, 1704 bp, synthetic construct; identical to SEQ ID NO: 5252
  source 1..1704: mol_type = other DNA

SEQ ID NO: 5255 - DNA, 1704 bp, synthetic construct
  source 1..1704: mol_type = other DNA
atggccttaccagtgaccgccttgctcctgccgctggccttgctgctccacgccgccaggccggacatccagatgacacagagccctagcagcctgtctgccagcgtgggagacagagtgaccatcacatgcaaggccagcgaccacatcaacaactggctggcctggtatcagcagaagcctggacaggcccctaagctgctgatctacggcgctaccacactggaaacaggcgtgcccagcagattttctggcagcggctctggcaccgactacaccctgacaatatccagcctccagcctgaggacttcgccacctactactgtcagcagagctggaacaccccttggacattcggccagggcaccaagctggaaatcaagagaggcggaggcggaagtggaggcggaggatctggcggcggaggctctcaagttcagcttcaacagcctggcgctgagctggtcaaacctggcgcttctgtgaagatgagctgcaaagccagcggctacgccttcaacagctactggatcaactggatgaagcagaaacccggccagggactcgaatggatcggccaaatctatcccggcgacggcgacaccaactacaacggcaagttcaagggcagagccacactgaccgccgatacctctagcagcacagcctacatgcagctgagcagcctgaccagcgaagatagcgccgtgtacttctgtgcccggtccatcacaacagtcgtgggctgcgctatggactattggggccagggaacaagcgtgaccgtgtctagtacgcgtgcaatcagtgaagatcgctacaggaacctcgagggaggcagctggagccaccctcagtttgaaaaagactacaaagacgatgacgataagggatcagattacaaggatgatgatgacaaggggtcagattataaagacgacgatgataaagggagcgactacaaggacgacgatgacaaggcctggtcccatccccagttcgagaaacaccatcaccaccaccatcatcacactagtggctccggcgagggcagaggaagtctactaacctgcggagatgtggaagaaaatcctggcccacatatgaccgagtacaagcccacggtgcgcctcgccacccgcgacgacgtccccagggccgtacgcaccctcgccgccgcgttcgccgactaccccgccacgcgccacaccgtcgatccggaccgccacatcgagcgggtcaccgagctgcaagaactcttcctcacgcgcgtcgggctcgacatcggcaaggtgtgggtcgcggacgacggcgccgcggtggcggtctggaccacgccggagagcgtcgaagcgggggcggtgttcgccgagatcggcccgcgcatggccgagttgagcggttcccggctggccgcgcagcaacagatggaaggcctcctggcgccgcaccggcccaaggagcccgcgtggttcctggccaccgtcggcgtctcgcccgaccaccagggcaagggtctgggcagcgccgtcgtgctccccggagtggaggcggccgagcgcgccggggtgcccgccttcctggagacctccgcgccccgcaacctccccttctacgagcggctcggcttcaccgtcaccgccgacgtcgaggtgcccgaaggaccgcgcacctggtgcatgacccgcaagcccggtgcctga

SEQ ID NO: 5256 - DNA, 1704 bp, synthetic construct
  source 1..1704: mol_type = other DNA
atggccttaccagtgaccgccttgctcctgccgctggccttgctgctccacgccgccaggccggacatccagatgacacagagccctagcagcctgtctgccagcgtgggagacagagtgaccatcacatgcaaggccagcgaccacatcaacaactggctggcctggtatcagcagaagcctggacaggcccctaagctgctgatctacggcgctaccacactggaaacaggcgtgcccagcagattttctggcagcggctctggcaccgactacaccctgacaatatccagcctccagcctgaggacttcgccacctactactgtcagcagagctggaacaccccttggacattcggccagggcaccaagctggaaatcaagagaggcggaggcggaagtggaggcggaggatctggcggcggaggctctcaagttcagcttcaacagcctggcgctgagctggtcaaacctggcgcttctgtgaagatgagctgcaaagccagcggctacgccttcaacagctactggatcaactggatgaagcagaaacccggccagggactcgaatggatcggccaaatctatcccggcgacggcgacaccaactacaacggcaagttcaagggcagagccacactgaccgccgatacctctagcagcacagcctacatgcagctgagcagcctgaccagcgaagatagcgccgtgtacttctgtgcccggtccatcacaacagtcgtgggctgcgctatggactattggggccagggaacaagcgtgaccgtgtctagtacgcgtgcaggcagtgaagatcgctacaggaacctcgagggaggcagctggagccaccctcagtttgaaaaagactacaaagacgatgacgataagggatcagattacaaggatgatgatgacaaggggtcagattataaagacgacgatgataaagggagcgactacaaggacgacgatgacaaggcctggtcccatccccagttcgagaaacaccatcaccaccaccatcatcacactagtggctccggcgagggcagaggaagtctactaacctgcggagatgtggaagaaaatcctggcccacatatgaccgagtacaagcccacggtgcgcctcgccacccgcgacgacgtccccagggccgtacgcaccctcgccgccgcgttcgccgactaccccgccacgcgccacaccgtcgatccggaccgccacatcgagcgggtcaccgagctgcaagaactcttcctcacgcgcgtcgggctcgacatcggcaaggtgtgggtcgcggacgacggcgccgcggtggcggtctggaccacgccggagagcgtcgaagcgggggcggtgttcgccgagatcggcccgcgcatggccgagttgagcggttcccggctggccgcgcagcaacagatggaaggcctcctggcgccgcaccggcccaaggagcccgcgtggttcctggccaccgtcggcgtctcgcccgaccaccagggcaagggtctgggcagcgccgtcgtgctccccggagtggaggcggccgagcgcgccggggtgcccgccttcctggagacctccgcgccccgcaacctccccttctacgagcggctcggcttcaccgtcaccgccgacgtcgaggtgcccgaaggaccgcgcacctggtgcatgacccgcaagcccggtgcctga

SEQ ID NO: 5257 - DNA, 1704 bp, synthetic construct
  source 1..1704: mol_type = other DNA
atggccttaccagtgaccgccttgctcctgccgctggccttgctgctccacgccgccaggccggacatccagatgacacagagccctagcagcctgtctgccagcgtgggagacagagtgaccatcacatgcaaggccagcgaccacatcaacaactggctggcctggtatcagcagaagcctggacaggcccctaagctgctgatctacggcgctaccacactggaaacaggcgtgcccagcagattttctggcagcggctctggcaccgactacaccctgacaatatccagcctccagcctgaggacttcgccacctactactgtcagcagagctggaacaccccttggacattcggccagggcaccaagctggaaatcaagagaggcggaggcggaagtggaggcggaggatctggcggcggaggctctcaagttcagcttcaacagcctggcgctgagctggtcaaacctggcgcttctgtgaagatgagctgcaaagccagcggctacgccttcaacagctactggatcaactggatgaagcagaaacccggccagggactcgaatggatcggccaaatctatcccggcgacggcgacaccaactacaacggcaagttcaagggcagagccacactgaccgccgatacctctagcagcacagcctacatgcagctgagcagcctgaccagcgaagatagcgccgtgtacttctgtgcccggtccatcacaacagtcgtgggctgcgctatggactattggggccagggaacaagcgtgaccgtgtctagtacgcgtgcactaagtgaagatcgctacaggaacctcgagggaggcagctggagccaccctcagtttgaaaaagactacaaagacgatgacgataagggatcagattacaaggatgatgatgacaaggggtcagattataaagacgacgatgataaagggagcgactacaaggacgacgatgacaaggcctggtcccatccccagttcgagaaacaccatcaccaccaccatcatcacactagtggctccggcgagggcagaggaagtctactaacctgcggagatgtggaagaaaatcctggcccacatatgaccgagtacaagcccacggtgcgcctcgccacccgcgacgacgtccccagggccgtacgcaccctcgccgccgcgttcgccgactaccccgccacgcgccacaccgtcgatccggaccgccacatcgagcgggtcaccgagctgcaagaactcttcctcacgcgcgtcgggctcgacatcggcaaggtgtgggtcgcggacgacggcgccgcggtggcggtctggaccacgccggagagcgtcgaagcgggggcggtgttcgccgagatcggcccgcgcatggccgagttgagcggttcccggctggccgcgcagcaacagatggaaggcctcctggcgccgcaccggcccaaggagcccgcgtggttcctggccaccgtcggcgtctcgcccgaccaccagggcaagggtctgggcagcgccgtcgtgctccccggagtggaggcggccgagcgcgccggggtgcccgccttcctggagacctccgcgccccgcaacctccccttctacgagcggctcggcttcaccgtcaccgccgacgtcgaggtgcccgaaggaccgcgcacctggtgcatgacccgcaagcccggtgcctga

SEQ ID NO: 5258 - DNA, 1704 bp, synthetic construct
  source 1..1704: mol_type = other DNA
atggccttaccagtgaccgccttgctcctgccgctggccttgctgctccacgccgccaggccggacatccagatgacacagagccctagcagcctgtctgccagcgtgggagacagagtgaccatcacatgcaaggccagcgaccacatcaacaactggctggcctggtatcagcagaagcctggacaggcccctaagctgctgatctacggcgctaccacactggaaacaggcgtgcccagcagattttctggcagcggctctggcaccgactacaccctgacaatatccagcctccagcctgaggacttcgccacctactactgtcagcagagctggaacaccccttggacattcggccagggcaccaagctggaaatcaagagaggcggaggcggaagtggaggcggaggatctggcggcggaggctctcaagttcagcttcaacagcctggcgctgagctggtcaaacctggcgcttctgtgaagatgagctgcaaagccagcggctacgccttcaacagctactggatcaactggatgaagcagaaacccggccagggactcgaatggatcggccaaatctatcccggcgacggcgacaccaactacaacggcaagttcaagggcagagccacactgaccgccgatacctctagcagcacagcctacatgcagctgagcagcctgaccagcgaagatagcgccgtgtacttctgtgcccggtccatcacaacagtcgtgggctgcgctatggactattggggccagggaacaagcgtgaccgtgtctagtacgcgtgcatccagtgaagatcgctacaggaacctcgagggaggcagctggagccaccctcagtttgaaaaagactacaaagacgatgacgataagggatcagattacaaggatgatgatgacaaggggtcagattataaagacgacgatgataaagggagcgactacaaggacgacgatgacaaggcctggtcccatccccagttcgagaaacaccatcaccaccaccatcatcacactagtggctccggcgagggcagaggaagtctactaacctgcggagatgtggaagaaaatcctggcccacatatgaccgagtacaagcccacggtgcgcctcgccacccgcgacgacgtccccagggccgtacgcaccctcgccgccgcgttcgccgactaccccgccacgcgccacaccgtcgatccggaccgccacatcgagcgggtcaccgagctgcaagaactcttcctcacgcgcgtcgggctcgacatcggcaaggtgtgggtcgcggacgacggcgccgcggtggcggtctggaccacgccggagagcgtcgaagcgggggcggtgttcgccgagatcggcccgcgcatggccgagttgagcggttcccggctggccgcgcagcaacagatggaaggcctcctggcgccgcaccggcccaaggagcccgcgtggttcctggccaccgtcggcgtctcgcccgaccaccagggcaagggtctgggcagcgccgtcgtgctccccggagtggaggcggccgagcgcgccggggtgcccgccttcctggagacctccgcgccccgcaacctccccttctacgagcggctcggcttcaccgtcaccgccgacgtcgaggtgcccgaaggaccgcgcacctggtgcatgacccgcaagcccggtgcctga

SEQ ID NO: 5259 - DNA, 1701 bp, synthetic construct
  source 1..1701: mol_type = other DNA
atggccttaccagtgaccgccttgctcctgccgctggccttgctgctccacgccgccaggccggacatccagatgacacagagccctagcagcctgtctgccagcgtgggagacagagtgaccatcacatgcaaggccagcgaccacatcaacaactggctggcctggtatcagcagaagcctggacaggcccctaagctgctgatctacggcgctaccacactggaaacaggcgtgcccagcagattttctggcagcggctctggcaccgactacaccctgacaatatccagcctccagcctgaggacttcgccacctactactgtcagcagagctggaacaccccttggacattcggccagggcaccaagctggaaatcaagagaggcggaggcggaagtggaggcggaggatctggcggcggaggctctcaagttcagcttcaacagcctggcgctgagctggtcaaacctggcgcttctgtgaagatgagctgcaaagccagcggctacgccttcaacagctactggatcaactggatgaagcagaaacccggccagggactcgaatggatcggccaaatctatcccggcgacggcgacaccaactacaacggcaagttcaagggcagagccacactgaccgccgatacctctagcagcacagcctacatgcagctgagcagcctgaccagcgaagatagcgccgtgtacttctgtgcccggtccatcacaacagtcgtgggctgcgctatggactattggggccagggaacaagcgtgaccgtgtctagtacgcgtagaagttatgatcgctacaggaacctcgagggaggcagctggagccaccctcagtttgaaaaagactacaaagacgatgacgataagggatcagattacaaggatgatgatgacaaggggtcagattataaagacgacgatgataaagggagcgactacaaggacgacgatgacaaggcctggtcccatccccagttcgagaaacaccatcaccaccaccatcatcacactagtggctccggcgagggcagaggaagtctactaacctgcggagatgtggaagaaaatcctggcccacatatgaccgagtacaagcccacggtgcgcctcgccacccgcgacgacgtccccagggccgtacgcaccctcgccgccgcgttcgccgactaccccgccacgcgccacaccgtcgatccggaccgccacatcgagcgggtcaccgagctgcaagaactcttcctcacgcgcgtcgggctcgacatcggcaaggtgtgggtcgcggacgacggcgccgcggtggcggtctggaccacgccggagagcgtcgaagcgggggcggtgttcgccgagatcggcccgcgcatggccgagttgagcggttcccggctggccgcgcagcaacagatggaaggcctcctggcgccgcaccggcccaaggagcccgcgtggttcctggccaccgtcggcgtctcgcccgaccaccagggcaagggtctgggcagcgccgtcgtgctccccggagtggaggcggccgagcgcgccggggtgcccgccttcctggagacctccgcgccccgcaacctccccttctacgagcggctcggcttcaccgtcaccgccgacgtcgaggtgcccgaaggaccgcgcacctggtgcatgacccgcaagcccggtgcctga

SEQ ID NO: 5260 - DNA, 1701 bp, synthetic construct; identical to SEQ ID NO: 5214
  source 1..1701: mol_type = other DNA

SEQ ID NO: 5261 - DNA, 1701 bp, synthetic construct
  source 1..1701: mol_type = other DNA
atggccttaccagtgaccgccttgctcctgccgctggccttgctgctccacgccgccaggccggacatccagatgacacagagccctagcagcctgtctgccagcgtgggagacagagtgaccatcacatgcaaggccagcgaccacatcaacaactggctggcctggtatcagcagaagcctggacaggcccctaagctgctgatctacggcgctaccacactggaaacaggcgtgcccagcagattttctggcagcggctctggcaccgactacaccctgacaatatccagcctccagcctgaggacttcgccacctactactgtcagcagagctggaacaccccttggacattcggccagggcaccaagctggaaatcaagagaggcggaggcggaagtggaggcggaggatctggcggcggaggctctcaagttcagcttcaacagcctggcgctgagctggtcaaacctggcgcttctgtgaagatgagctgcaaagccagcggctacgccttcaacagctactggatcaactggatgaagcagaaacccggccagggactcgaatggatcggccaaatctatcccggcgacggcgacaccaactacaacggcaagttcaagggcagagccacactgaccgccgatacctctagcagcacagcctacatgcagctgagcagcctgaccagcgaagatagcgccgtgtacttctgtgcccggtccatcacaacagtcgtgggctgcgctatggactattggggccagggaacaagcgtgaccgtgtctagtacgcgtagaagtgatgatcgctacaggaacctcgagggaggcagctggagccaccctcagtttgaaaaagactacaaagacgatgacgataagggatcagattacaaggatgatgatgacaaggggtcagattataaagacgacgatgataaagggagcgactacaaggacgacgatgacaaggcctggtcccatccccagttcgagaaacaccatcaccaccaccatcatcacactagtggctccggcgagggcagaggaagtctactaacctgcggagatgtggaagaaaatcctggcccacatatgaccgagtacaagcccacggtgcgcctcgccacccgcgacgacgtccccagggccgtacgcaccctcgccgccgcgttcgccgactaccccgccacgcgccacaccgtcgatccggaccgccacatcgagcgggtcaccgagctgcaagaactcttcctcacgcgcgtcgggctcgacatcggcaaggtgtgggtcgcggacgacggcgccgcggtggcggtctggaccacgccggagagcgtcgaagcgggggcggtgttcgccgagatcggcccgcgcatggccgagttgagcggttcccggctggccgcgcagcaacagatggaaggcctcctggcgccgcaccggcccaaggagcccgcgtggttcctggccaccgtcggcgtctcgcccgaccaccagggcaagggtctgggcagcgccgtcgtgctccccggagtggaggcggccgagcgcgccggggtgcccgccttcctggagacctccgcgccccgcaacctccccttctacgagcggctcggcttcaccgtcaccgccgacgtcgaggtgcccgaaggaccgcgcacctggtgcatgacccgcaagcccggtgcctga

SEQ ID NO: 5262 - DNA, 1701 bp, synthetic construct
  source 1..1701: mol_type = other DNA
atggccttaccagtgaccgccttgctcctgccgctggccttgctgctccacgccgccaggccggacatccagatgacacagagccctagcagcctgtctgccagcgtgggagacagagtgaccatcacatgcaaggccagcgaccacatcaacaactggctggcctggtatcagcagaagcctggacaggcccctaagctgctgatctacggcgctaccacactggaaacaggcgtgcccagcagattttctggcagcggctctggcaccgactacaccctgacaatatccagcctccagcctgaggacttcgccacctactactgtcagcagagctggaacaccccttggacattcggccagggcaccaagctggaaatcaagagaggcggaggcggaagtggaggcggaggatctggcggcggaggctctcaagttcagcttcaacagcctggcgctgagctggtcaaacctggcgcttctgtgaagatgagctgcaaagccagcggctacgccttcaacagctactggatcaactggatgaagcagaaacccggccagggactcgaatggatcggccaaatctatcccggcgacggcgacaccaactacaacggcaagttcaagggcagagccacactgaccgccgatacctctagcagcacagcctacatgcagctgagcagcctgaccagcgaagatagcgccgtgtacttctgtgcccggtccatcacaacagtcgtgggctgcgctatggactattggggccagggaacaagcgtgaccgtgtctagtacgcgtagaagtgaggatcgctacaggaacctcgagggaggcagctggagccaccctcagtttgaaaaagactacaaagacgatgacgataagggatcagattacaaggatgatgatgacaaggggtcagattataaagacgacgatgataaagggagcgactacaaggacgacgatgacaaggcctggtcccatccccagttcgagaaacaccatcaccaccaccatcatcacactagtggctccggcgagggcagaggaagtctactaacctgcggagatgtggaagaaaatcctggcccacatatgaccgagtacaagcccacggtgcgcctcgccacccgcgacgacgtccccagggccgtacgcaccctcgccgccgcgttcgccgactaccccgccacgcgccacaccgtcgatccggaccgccacatcgagcgggtcaccgagctgcaagaactcttcctcacgcgcgtcgggctcgacatcggcaaggtgtgggtcgcggacgacggcgccgcggtggcggtctggaccacgccggagagcgtcgaagcgggggcggtgttcgccgagatcggcccgcgcatggccgagttgagcggttcccggctggccgcgcagcaacagatggaaggcctcctggcgccgcaccggcccaaggagcccgcgtggttcctggccaccgtcggcgtctcgcccgaccaccagggcaagggtctgggcagcgccgtcgtgctccccggagtggaggcggccgagcgcgccggggtgcccgccttcctggagacctccgcgccccgcaacctccccttctacgagcggctcggcttcaccgtcaccgccgacgtcgaggtgcccgaaggaccgcgcacctggtgcatgacccgcaagcccggtgcctga

SEQ ID NO: 5263 - DNA, 1701 bp, synthetic construct
  source 1..1701: mol_type = other DNA
atggccttaccagtgaccgccttgctcctgccgctggccttgctgctccacgccgccaggccggacatccagatgacacagagccctagcagcctgtctgccagcgtgggagacagagtgaccatcacatgcaaggccagcgaccacatcaacaactggctggcctggtatcagcagaagcctggacaggcccctaagctgctgatctacggcgctaccacactggaaacaggcgtgcccagcagattttctggcagcggctctggcaccgactacaccctgacaatatccagcctccagcctgaggacttcgccacctactactgtcagcagagctggaacaccccttggacattcggccagggcaccaagctggaaatcaagagaggcggaggcggaagtggaggcggaggatctggcggcggaggctctcaagttcagcttcaacagcctggcgctgagctggtcaaacctggcgcttctgtgaagatgagctgcaaagccagcggctacgccttcaacagctactggatcaactggatgaagcagaaacccggccagggactcgaatggatcggccaaatctatcccggcgacggcgacaccaactacaacggcaagttcaagggcagagccacactgaccgccgatacctctagcagcacagcctacatgcagctgagcagcctgaccagcgaagatagcgccgtgtacttctgtgcccggtccatcacaacagtcgtgggctgcgctatggactattggggccagggaacaagcgtgaccgtgtctagtacgcgtagaagtggagatcgctacaggaacctcgagggaggcagctggagccaccctcagtttgaaaaagactacaaagacgatgacgataagggatcagattacaaggatgatgatgacaaggggtcagattataaagacgacgatgataaagggagcgactacaaggacgacgatgacaaggcctggtcccatccccagttcgagaaacaccatcaccaccaccatcatcacactagtggctccggcgagggcagaggaagtctactaacctgcggagatgtggaagaaaatcctggcccacatatgaccgagtacaagcccacggtgcgcctcgccacccgcgacgacgtccccagggccgtacgcaccctcgccgccgcgttcgccgactaccccgccacgcgccacaccgtcgatccggaccgccacatcgagcgggtcaccgagctgcaagaactcttcctcacgcgcgtcgggctcgacatcggcaaggtgtgggtcgcggacgacggcgccgcggtggcggtctggaccacgccggagagcgtcgaagcgggggcggtgttcgccgagatcggcccgcgcatggccgagttgagcggttcccggctggccgcgcagcaacagatggaaggcctcctggcgccgcaccggcccaaggagcccgcgtggttcctggccaccgtcggcgtctcgcccgaccaccagggcaagggtctgggcagcgccgtcgtgctccccggagtggaggcggccgagcgcgccggggtgcccgccttcctggagacctccgcgccccgcaacctccccttctacgagcggctcggcttcaccgtcaccgccgacgtcgaggtgcccgaaggaccgcgcacctggtgcatgacccgcaagcccggtgcctga

SEQ ID NO: 5264 - DNA, 813 bp, synthetic construct; identical to SEQ ID NO: 5241
  source 1..813: mol_type = other DNA

SEQ ID NO: 5265 - DNA, 1701 bp, synthetic construct; identical to SEQ ID NO: 5224
  source 1..1701: mol_type = other DNA

SEQ ID NO: 5266 - DNA, 1701 bp, synthetic construct
  source 1..1701: mol_type = other DNA
atggccttaccagtgaccgccttgctcctgccgctggccttgctgctccacgccgccaggccggacatccagatgacacagagccctagcagcctgtctgccagcgtgggagacagagtgaccatcacatgcaaggccagcgaccacatcaacaactggctggcctggtatcagcagaagcctggacaggcccctaagctgctgatctacggcgctaccacactggaaacaggcgtgcccagcagattttctggcagcggctctggcaccgactacaccctgacaatatccagcctccagcctgaggacttcgccacctactactgtcagcagagctggaacaccccttggacattcggccagggcaccaagctggaaatcaagagaggcggaggcggaagtggaggcggaggatctggcggcggaggctctcaagttcagcttcaacagcctggcgctgagctggtcaaacctggcgcttctgtgaagatgagctgcaaagccagcggctacgccttcaacagctactggatcaactggatgaagcagaaacccggccagggactcgaatggatcggccaaatctatcccggcgacggcgacaccaactacaacggcaagttcaagggcagagccacactgaccgccgatacctctagcagcacagcctacatgcagctgagcagcctgaccagcgaagatagcgccgtgtacttctgtgcccggtccatcacaacagtcgtgggctgcgctatggactattggggccagggaacaagcgtgaccgtgtctagtacgcgtagaagtgaaacacgctacaggaacctcgagggaggcagctggagccaccctcagtttgaaaaagactacaaagacgatgacgataagggatcagattacaaggatgatgatgacaaggggtcagattataaagacgacgatgataaagggagcgactacaaggacgacgatgacaaggcctggtcccatccccagttcgagaaacaccatcaccaccaccatcatcacactagtggctccggcgagggcagaggaagtctactaacctgcggagatgtggaagaaaatcctggcccacatatgaccgagtacaagcccacggtgcgcctcgccacccgcgacgacgtccccagggccgtacgcaccctcgccgccgcgttcgccgactaccccgccacgcgccacaccgtcgatccggaccgccacatcgagcgggtcaccgagctgcaagaactcttcctcacgcgcgtcgggctcgacatcggcaaggtgtgggtcgcggacgacggcgccgcggtggcggtctggaccacgccggagagcgtcgaagcgggggcggtgttcgccgagatcggcccgcgcatggccgagttgagcggttcccggctggccgcgcagcaacagatggaaggcctcctggcgccgcaccggcccaaggagcccgcgtggttcctggccaccgtcggcgtctcgcccgaccaccagggcaagggtctgggcagcgccgtcgtgctccccggagtggaggcggccgagcgcgccggggtgcccgccttcctggagacctccgcgccccgcaacctccccttctacgagcggctcggcttcaccgtcaccgccgacgtcgaggtgcccgaaggaccgcgcacctggtgcatgacccgcaagcccggtgcctga

SEQ ID NO: 5267 - DNA, 1701 bp, synthetic construct
  source 1..1701: mol_type = other DNA
atggccttaccagtgaccgccttgctcctgccgctggccttgctgctccacgccgccaggccggacatccagatgacacagagccctagcagcctgtctgccagcgtgggagacagagtgaccatcacatgcaaggccagcgaccacatcaacaactggctggcctggtatcagcagaagcctggacaggcccctaagctgctgatctacggcgctaccacactggaaacaggcgtgcccagcagattttctggcagcggctctggcaccgactacaccctgacaatatccagcctccagcctgaggacttcgccacctactactgtcagcagagctggaacaccccttggacattcggccagggcaccaagctggaaatcaagagaggcggaggcggaagtggaggcggaggatctggcggcggaggctctcaagttcagcttcaacagcctggcgctgagctggtcaaacctggcgcttctgtgaagatgagctgcaaagccagcggctacgccttcaacagctactggatcaactggatgaagcagaaacccggccagggactcgaatggatcggccaaatctatcccggcgacggcgacaccaactacaacggcaagttcaagggcagagccacactgaccgccgatacctctagcagcacagcctacatgcagctgagcagcctgaccagcgaagatagcgccgtgtacttctgtgcccggtccatcacaacagtcgtgggctgcgctatggactattggggccagggaacaagcgtgaccgtgtctagtacgcgtagaagtgaaagccgctacaggaacctcgagggaggcagctggagccaccctcagtttgaaaaagactacaaagacgatgacgataagggatcagattacaaggatgatgatgacaaggggtcagattataaagacgacgatgataaagggagcgactacaaggacgacgatgacaaggcctggtcccatccccagttcgagaaacaccatcaccaccaccatcatcacactagtggctccggcgagggcagaggaagtctactaacctgcggagatgtggaagaaaatcctggcccacatatgaccgagtacaagcccacggtgcgcctcgccacccgcgacgacgtccccagggccgtacgcaccctcgccgccgcgttcgccgactaccccgccacgcgccacaccgtcgatccggaccgccacatcgagcgggtcaccgagctgcaagaactcttcctcacgcgcgtcgggctcgacatcggcaaggtgtgggtcgcggacgacggcgccgcggtggcggtctggaccacgccggagagcgtcgaagcgggggcggtgttcgccgagatcggcccgcgcatggccgagttgagcggttcccggctggccgcgcagcaacagatggaaggcctcctggcgccgcaccggcccaaggagcccgcgtggttcctggccaccgtcggcgtctcgcccgaccaccagggcaagggtctgggcagcgccgtcgtgctccccggagtggaggcggccgagcgcgccggggtgcccgccttcctggagacctccgcgccccgcaacctccccttctacgagcggctcggcttcaccgtcaccgccgacgtcgaggtgcccgaaggaccgcgcacctggtgcatgacccgcaagcccggtgcctga

SEQ ID NO: 5268 - DNA, 1701 bp, synthetic construct
  source 1..1701: mol_type = other DNA
atggccttaccagtgaccgccttgctcctgccgctggccttgctgctccacgccgccaggccggacatccagatgacacagagccctagcagcctgtctgccagcgtgggagacagagtgaccatcacatgcaaggccagcgaccacatcaacaactggctggcctggtatcagcagaagcctggacaggcccctaagctgctgatctacggcgctaccacactggaaacaggcgtgcccagcagattttctggcagcggctctggcaccgactacaccctgacaatatccagcctccagcctgaggacttcgccacctactactgtcagcagagctggaacaccccttggacattcggccagggcaccaagctggaaatcaagagaggcggaggcggaagtggaggcggaggatctggcggcggaggctctcaagttcagcttcaacagcctggcgctgagctggtcaaacctggcgcttctgtgaagatgagctgcaaagccagcggctacgccttcaacagctactggatcaactggatgaagcagaaacccggccagggactcgaatggatcggccaaatctatcccggcgacggcgacaccaactacaacggcaagttcaagggcagagccacactgaccgccgatacctctagcagcacagcctacatgcagctgagcagcctgaccagcgaagatagcgccgtgtacttctgtgcccggtccatcacaacagtcgtgggctgcgctatggactattggggccagggaacaagcgtgaccgtgtctagtacgcgtagaagtgaaccccgctacaggaacctcgagggaggcagctggagccaccctcagtttgaaaaagactacaaagacgatgacgataagggatcagattacaaggatgatgatgacaaggggtcagattataaagacgacgatgataaagggagcgactacaaggacgacgatgacaaggcctggtcccatccccagttcgagaaacaccatcaccaccaccatcatcacactagtggctccggcgagggcagaggaagtctactaacctgcggagatgtggaagaaaatcctggcccacatatgaccgagtacaagcccacggtgcgcctcgccacccgcgacgacgtccccagggccgtacgcaccctcgccgccgcgttcgccgactaccccgccacgcgccacaccgtcgatccggaccgccacatcgagcgggtcaccgagctgcaagaactcttcctcacgcgcgtcgggctcgacatcggcaaggtgtgggtcgcggacgacggcgccgcggtggcggtctggaccacgccggagagcgtcgaagcgggggcggtgttcgccgagatcggcccgcgcatggccgagttgagcggttcccggctggccgcgcagcaacagatggaaggcctcctggcgccgcaccggcccaaggagcccgcgtggttcctggccaccgtcggcgtctcgcccgaccaccagggcaagggtctgggcagcgccgtcgtgctccccggagtggaggcggccgagcgcgccggggtgcccgccttcctggagacctccgcgccccgcaacctccccttctacgagcggctcggcttcaccgtcaccgccgacgtcgaggtgcccgaaggaccgcgcacctggtgcatgacccgcaagcccggtgcctga

SEQ ID NO: 5269 - DNA, 1701 bp, synthetic construct; identical to SEQ ID NO: 5192
  source 1..1701: mol_type = other DNA

SEQ ID NO: 5270 - DNA, 1698 bp, synthetic construct
  source 1..1698: mol_type = other DNA
atggccttaccagtgaccgccttgctcctgccgctggccttgctgctccacgccgccaggccggacatccagatgacacagagccctagcagcctgtctgccagcgtgggagacagagtgaccatcacatgcaaggccagcgaccacatcaacaactggctggcctggtatcagcagaagcctggacaggcccctaagctgctgatctacggcgctaccacactggaaacaggcgtgcccagcagattttctggcagcggctctggcaccgactacaccctgacaatatccagcctccagcctgaggacttcgccacctactactgtcagcagagctggaacaccccttggacattcggccagggcaccaagctggaaatcaagagaggcggaggcggaagtggaggcggaggatctggcggcggaggctctcaagttcagcttcaacagcctggcgctgagctggtcaaacctggcgcttctgtgaagatgagctgcaaagccagcggctacgccttcaacagctactggatcaactggatgaagcagaaacccggccagggactcgaatggatcggccaaatctatcccggcgacggcgacaccaactacaacggcaagttcaagggcagagccacactgaccgccgatacctctagcagcacagcctacatgcagctgagcagcctgaccagcgaagatagcgccgtgtacttctgtgcccggtccatcacaacagtcgtgggctgcgctatggactattggggccagggaacaagcgtgaccgtgtctagtacgcgtagaagcgaagatcgctacaggctcgagggaggcagctggagccaccctcagtttgaaaaagactacaaagacgatgacgataagggatcagattacaaggatgatgatgacaaggggtcagattataaagacgacgatgataaagggagcgactacaaggacgacgatgacaaggcctggtcccatccccagttcgagaaacaccatcaccaccaccatcatcacactagtggctccggcgagggcagaggaagtctactaacctgcggagatgtggaagaaaatcctggcccacatatgaccgagtacaagcccacggtgcgcctcgccacccgcgacgacgtccccagggccgtacgcaccctcgccgccgcgttcgccgactaccccgccacgcgccacaccgtcgatccggaccgccacatcgagcgggtcaccgagctgcaagaactcttcctcacgcgcgtcgggctcgacatcggcaaggtgtgggtcgcggacgacggcgccgcggtggcggtctggaccacgccggagagcgtcgaagcgggggcggtgttcgccgagatcggcccgcgcatggccgagttgagcggttcccggctggccgcgcagcaacagatggaaggcctcctggcgccgcaccggcccaaggagcccgcgtggttcctggccaccgtcggcgtctcgcccgaccaccagggcaagggtctgggcagcgccgtcgtgctccccggagtggaggcggccgagcgcgccggggtgcccgccttcctggagacctccgcgccccgcaacctccccttctacgagcggctcggcttcaccgtcaccgccgacgtcgaggtgcccgaaggaccgcgcacctggtgcatgacccgcaagcccggtgcctga

SEQ ID NO: 5271 - DNA, 1698 bp, synthetic construct; identical to SEQ ID NO: 5230
  source 1..1698: mol_type = other DNA

SEQ ID NO: 5272 - DNA, 1698 bp, synthetic construct
  source 1..1698: mol_type = other DNA
atggccttaccagtgaccgccttgctcctgccgctggccttgctgctccacgccgccaggccggacatccagatgacacagagccctagcagcctgtctgccagcgtgggagacagagtgaccatcacatgcaaggccagcgaccacatcaacaactggctggcctggtatcagcagaagcctggacaggcccctaagctgctgatctacggcgctaccacactggaaacaggcgtgcccagcagattttctggcagcggctctggcaccgactacaccctgacaatatccagcctccagcctgaggacttcgccacctactactgtcagcagagctggaacaccccttggacattcggccagggcaccaagctggaaatcaagagaggcggaggcggaagtggaggcggaggatctggcggcggaggctctcaagttcagcttcaacagcctggcgctgagctggtcaaacctggcgcttctgtgaagatgagctgcaaagccagcggctacgccttcaacagctactggatcaactggatgaagcagaaacccggccagggactcgaatggatcggccaaatctatcccggcgacggcgacaccaactacaacggcaagttcaagggcagagccacactgaccgccgatacctctagcagcacagcctacatgcagctgagcagcctgaccagcgaagatagcgccgtgtacttctgtgcccggtccatcacaacagtcgtgggctgcgctatggactattggggccagggaacaagcgtgaccgtgtctagtacgcgtagacgggaagatcgctacaggctcgagggaggcagctggagccaccctcagtttgaaaaagactacaaagacgatgacgataagggatcagattacaaggatgatgatgacaaggggtcagattataaagacgacgatgataaagggagcgactacaaggacgacgatgacaaggcctggtcccatccccagttcgagaaacaccatcaccaccaccatcatcacactagtggctccggcgagggcagaggaagtctactaacctgcggagatgtggaagaaaatcctggcccacatatgaccgagtacaagcccacggtgcgcctcgccacccgcgacgacgtccccagggccgtacgcaccctcgccgccgcgttcgccgactaccccgccacgcgccacaccgtcgatccggaccgccacatcgagcgggtcaccgagctgcaagaactcttcctcacgcgcgtcgggctcgacatcggcaaggtgtgggtcgcggacgacggcgccgcggtggcggtctggaccacgccggagagcgtcgaagcgggggcggtgttcgccgagatcggcccgcgcatggccgagttgagcggttcccggctggccgcgcagcaacagatggaaggcctcctggcgccgcaccggcccaaggagcccgcgtggttcctggccaccgtcggcgtctcgcccgaccaccagggcaagggtctgggcagcgccgtcgtgctccccggagtggaggcggccgagcgcgccggggtgcccgccttcctggagacctccgcgccccgcaacctccccttctacgagcggctcggcttcaccgtcaccgccgacgtcgaggtgcccgaaggaccgcgcacctggtgcatgacccgcaagcccggtgcctga

SEQ ID NO: 5273 - DNA, 1698 bp, synthetic construct
  source 1..1698: mol_type = other DNA
atggccttaccagtgaccgccttgctcctgccgctggccttgctgctccacgccgccaggccggacatccagatgacacagagccctagcagcctgtctgccagcgtgggagacagagtgaccatcacatgcaaggccagcgaccacatcaacaactggctggcctggtatcagcagaagcctggacaggcccctaagctgctgatctacggcgctaccacactggaaacaggcgtgcccagcagattttctggcagcggctctggcaccgactacaccctgacaatatccagcctccagcctgaggacttcgccacctactactgtcagcagagctggaacaccccttggacattcggccagggcaccaagctggaaatcaagagaggcggaggcggaagtggaggcggaggatctggcggcggaggctctcaagttcagcttcaacagcctggcgctgagctggtcaaacctggcgcttctgtgaagatgagctgcaaagccagcggctacgccttcaacagctactggatcaactggatgaagcagaaacccggccagggactcgaatggatcggccaaatctatcccggcgacggcgacaccaactacaacggcaagttcaagggcagagccacactgaccgccgatacctctagcagcacagcctacatgcagctgagcagcctgaccagcgaagatagcgccgtgtacttctgtgcccggtccatcacaacagtcgtgggctgcgctatggactattggggccagggaacaagcgtgaccgtgtctagtacgcgtagatcggaagatcgctacaggctcgagggaggcagctggagccaccctcagtttgaaaaagactacaaagacgatgacgataagggatcagattacaaggatgatgatgacaaggggtcagattataaagacgacgatgataaagggagcgactacaaggacgacgatgacaaggcctggtcccatccccagttcgagaaacaccatcaccaccaccatcatcacactagtggctccggcgagggcagaggaagtctactaacctgcggagatgtggaagaaaatcctggcccacatatgaccgagtacaagcccacggtgcgcctcgccacccgcgacgacgtccccagggccgtacgcaccctcgccgccgcgttcgccgactaccccgccacgcgccacaccgtcgatccggaccgccacatcgagcgggtcaccgagctgcaagaactcttcctcacgcgcgtcgggctcgacatcggcaaggtgtgggtcgcggacgacggcgccgcggtggcggtctggaccacgccggagagcgtcgaagcgggggcggtgttcgccgagatcggcccgcgcatggccgagttgagcggttcccggctggccgcgcagcaacagatggaaggcctcctggcgccgcaccggcccaaggagcccgcgtggttcctggccaccgtcggcgtctcgcccgaccaccagggcaagggtctgggcagcgccgtcgtgctccccggagtggaggcggccgagcgcgccggggtgcccgccttcctggagacctccgcgccccgcaacctccccttctacgagcggctcggcttcaccgtcaccgccgacgtcgaggtgcccgaaggaccgcgcacctggtgcatgacccgcaagcccggtgcctga

SEQ ID NO: 5274 - DNA, 1698 bp, synthetic construct; identical to SEQ ID NO: 5229
  source 1..1698: mol_type = other DNA

SEQ ID NO: 5275 - DNA, 1698 bp, synthetic construct
  source 1..1698: mol_type = other DNA
atggccttaccagtgaccgccttgctcctgccgctggccttgctgctccacgccgccaggccggacatccagatgacacagagccctagcagcctgtctgccagcgtgggagacagagtgaccatcacatgcaaggccagcgaccacatcaacaactggctggcctggtatcagcagaagcctggacaggcccctaagctgctgatctacggcgctaccacactggaaacaggcgtgcccagcagattttctggcagcggctctggcaccgactacaccctgacaatatccagcctccagcctgaggacttcgccacctactactgtcagcagagctggaacaccccttggacattcggccagggcaccaagctggaaatcaagagaggcggaggcggaagtggaggcggaggatctggcggcggaggctctcaagttcagcttcaacagcctggcgctgagctggtcaaacctggcgcttctgtgaagatgagctgcaaagccagcggctacgccttcaacagctactggatcaactggatgaagcagaaacccggccagggactcgaatggatcggccaaatctatcccggcgacggcgacaccaactacaacggcaagttcaagggcagagccacactgaccgccgatacctctagcagcacagcctacatgcagctgagcagcctgaccagcgaagatagcgccgtgtacttctgtgcccggtccatcacaacagtcgtgggctgcgctatggactattggggccagggaacaagcgtgaccgtgtctagtacgcgtagacttgaagatcgctacaggctcgagggaggcagctggagccaccctcagtttgaaaaagactacaaagacgatgacgataagggatcagattacaaggatgatgatgacaaggggtcagattataaagacgacgatgataaagggagcgactacaaggacgacgatgacaaggcctggtcccatccccagttcgagaaacaccatcaccaccaccatcatcacactagtggctccggcgagggcagaggaagtctactaacctgcggagatgtggaagaaaatcctggcccacatatgaccgagtacaagcccacggtgcgcctcgccacccgcgacgacgtccccagggccgtacgcaccctcgccgccgcgttcgccgactaccccgccacgcgccacaccgtcgatccggaccgccacatcgagcgggtcaccgagctgcaagaactcttcctcacgcgcgtcgggctcgacatcggcaaggtgtgggtcgcggacgacggcgccgcggtggcggtctggaccacgccggagagcgtcgaagcgggggcggtgttcgccgagatcggcccgcgcatggccgagttgagcggttcccggctggccgcgcagcaacagatggaaggcctcctggcgccgcaccggcccaaggagcccgcgtggttcctggccaccgtcggcgtctcgcccgaccaccagggcaagggtctgggcagcgccgtcgtgctccccggagtggaggcggccgagcgcgccggggtgcccgccttcctggagacctccgcgccccgcaacctccccttctacgagcggctcggcttcaccgtcaccgccgacgtcgaggtgcccgaaggaccgcgcacctggtgcatgacccgcaagcccggtgcctga

SEQ ID NO: 5276 - DNA, 1698 bp, synthetic construct
  source 1..1698: mol_type = other DNA
atggccttaccagtgaccgccttgctcctgccgctggccttgctgctccacgccgccaggccggacatccagatgacacagagccctagcagcctgtctgccagcgtgggagacagagtgaccatcacatgcaaggccagcgaccacatcaacaactggctggcctggtatcagcagaagcctggacaggcccctaagctgctgatctacggcgctaccacactggaaacaggcgtgcccagcagattttctggcagcggctctggcaccgactacaccctgacaatatccagcctccagcctgaggacttcgccacctactactgtcagcagagctggaacaccccttggacattcggccagggcaccaagctggaaatcaagagaggcggaggcggaagtggaggcggaggatctggcggcggaggctctcaagttcagcttcaacagcctggcgctgagctggtcaaacctggcgcttctgtgaagatgagctgcaaagccagcggctacgccttcaacagctactggatcaactggatgaagcagaaacccggccagggactcgaatggatcggccaaatctatcccggcgacggcgacaccaactacaacggcaagttcaagggcagagccacactgaccgccgatacctctagcagcacagcctacatgcagctgagcagcctgaccagcgaagatagcgccgtgtacttctgtgcccggtccatcacaacagtcgtgggctgcgctatggactattggggccagggaacaagcgtgaccgtgtctagtacgcgtagaagtcgagatcgctacaggctcgagggaggcagctggagccaccctcagtttgaaaaagactacaaagacgatgacgataagggatcagattacaaggatgatgatgacaaggggtcagattataaagacgacgatgataaagggagcgactacaaggacgacgatgacaaggcctggtcccatccccagttcgagaaacaccatcaccaccaccatcatcacactagtggctccggcgagggcagaggaagtctactaacctgcggagatgtggaagaaaatcctggcccacatatgaccgagtacaagcccacggtgcgcctcgccacccgcgacgacgtccccagggccgtacgcaccctcgccgccgcgttcgccgactaccccgccacgcgccacaccgtcgatccggaccgccacatcgagcgggtcaccgagctgcaagaactcttcctcacgcgcgtcgggctcgacatcggcaaggtgtgggtcgcggacgacggcgccgcggtggcggtctggaccacgccggagagcgtcgaagcgggggcggtgttcgccgagatcggcccgcgcatggccgagttgagcggttcccggctggccgcgcagcaacagatggaaggcctcctggcgccgcaccggcccaaggagcccgcgtggttcctggccaccgtcggcgtctcgcccgaccaccagggcaagggtctgggcagcgccgtcgtgctccccggagtggaggcggccgagcgcgccggggtgcccgccttcctggagacctccgcgccccgcaacctccccttctacgagcggctcggcttcaccgtcaccgccgacgtcgaggtgcccgaaggaccgcgcacctggtgcatgacccgcaagcccggtgcctga

SEQ ID NO: 5277 - DNA, 1698 bp, synthetic construct
  source 1..1698: mol_type = other DNA
atggccttaccagtgaccgccttgctcctgccgctggccttgctgctccacgccgccaggccggacatccagatgacacagagccctagcagcctgtctgccagcgtgggagacagagtgaccatcacatgcaaggccagcgaccacatcaacaactggctggcctggtatcagcagaagcctggacaggcccctaagctgctgatctacggcgctaccacactggaaacaggcgtgcccagcagattttctggcagcggctctggcaccgactacaccctgacaatatccagcctccagcctgaggacttcgccacctactactgtcagcagagctggaacaccccttggacattcggccagggcaccaagctggaaatcaagagaggcggaggcggaagtggaggcggaggatctggcggcggaggctctcaagttcagcttcaacagcctggcgctgagctggtcaaacctggcgcttctgtgaagatgagctgcaaagccagcggctacgccttcaacagctactggatcaactggatgaagcagaaacccggccagggactcgaatggatcggccaaatctatcccggcgacggcgacaccaactacaacggcaagttcaagggcagagccacactgaccgccgatacctctagcagcacagcctacatgcagctgagcagcctgaccagcgaagatagcgccgtgtacttctgtgcccggtccatcacaacagtcgtgggctgcgctatggactattggggccagggaacaagcgtgaccgtgtctagtacgcgtagaagtagtgatcgctacaggctcgagggaggcagctggagccaccctcagtttgaaaaagactacaaagacgatgacgataagggatcagattacaaggatgatgatgacaaggggtcagattataaagacgacgatgataaagggagcgactacaaggacgacgatgacaaggcctggtcccatccccagttcgagaaacaccatcaccaccaccatcatcacactagtggctccggcgagggcagaggaagtctactaacctgcggagatgtggaagaaaatcctggcccacatatgaccgagtacaagcccacggtgcgcctcgccacccgcgacgacgtccccagggccgtacgcaccctcgccgccgcgttcgccgactaccccgccacgcgccacaccgtcgatccggaccgccacatcgagcgggtcaccgagctgcaagaactcttcctcacgcgcgtcgggctcgacatcggcaaggtgtgggtcgcggacgacggcgccgcggtggcggtctggaccacgccggagagcgtcgaagcgggggcggtgttcgccgagatcggcccgcgcatggccgagttgagcggttcccggctggccgcgcagcaacagatggaaggcctcctggcgccgcaccggcccaaggagcccgcgtggttcctggccaccgtcggcgtctcgcccgaccaccagggcaagggtctgggcagcgccgtcgtgctccccggagtggaggcggccgagcgcgccggggtgcccgccttcctggagacctccgcgccccgcaacctccccttctacgagcggctcggcttcaccgtcaccgccgacgtcgaggtgcccgaaggaccgcgcacctggtgcatgacccgcaagcccggtgcctga

SEQ ID NO: 5278 - DNA, 1698 bp, synthetic construct
  source 1..1698: mol_type = other DNA
atggccttaccagtgaccgccttgctcctgccgctggccttgctgctccacgccgccaggccggacatccagatgacacagagccctagcagcctgtctgccagcgtgggagacagagtgaccatcacatgcaaggccagcgaccacatcaacaactggctggcctggtatcagcagaagcctggacaggcccctaagctgctgatctacggcgctaccacactggaaacaggcgtgcccagcagattttctggcagcggctctggcaccgactacaccctgacaatatccagcctccagcctgaggacttcgccacctactactgtcagcagagctggaacaccccttggacattcggccagggcaccaagctggaaatcaagagaggcggaggcggaagtggaggcggaggatctggcggcggaggctctcaagttcagcttcaacagcctggcgctgagctggtcaaacctggcgcttctgtgaagatgagctgcaaagccagcggctacgccttcaacagctactggatcaactggatgaagcagaaacccggccagggactcgaatggatcggccaaatctatcccggcgacggcgacaccaactacaacggcaagttcaagggcagagccacactgaccgccgatacctctagcagcacagcctacatgcagctgagcagcctgaccagcgaagatagcgccgtgtacttctgtgcccggtccatcacaacagtcgtgggctgcgctatggactattggggccagggaacaagcgtgaccgtgtctagtacgcgtagaagtgtcgatcgctacaggctcgagggaggcagctggagccaccctcagtttgaaaaagactacaaagacgatgacgataagggatcagattacaaggatgatgatgacaaggggtcagattataaagacgacgatgataaagggagcgactacaaggacgacgatgacaaggcctggtcccatccccagttcgagaaacaccatcaccaccaccatcatcacactagtggctccggcgagggcagaggaagtctactaacctgcggagatgtggaagaaaatcctggcccacatatgaccgagtacaagcccacggtgcgcctcgccacccgcgacgacgtccccagggccgtacgcaccctcgccgccgcgttcgccgactaccccgccacgcgccacaccgtcgatccggaccgccacatcgagcgggtcaccgagctgcaagaactcttcctcacgcgcgtcgggctcgacatcggcaaggtgtgggtcgcggacgacggcgccgcggtggcggtctggaccacgccggagagcgtcgaagcgggggcggtgttcgccgagatcggcccgcgcatggccgagttgagcggttcccggctggccgcgcagcaacagatggaaggcctcctggcgccgcaccggcccaaggagcccgcgtggttcctggccaccgtcggcgtctcgcccgaccaccagggcaagggtctgggcagcgccgtcgtgctccccggagtggaggcggccgagcgcgccggggtgcccgccttcctggagacctccgcgccccgcaacctccccttctacgagcggctcggcttcaccgtcaccgccgacgtcgaggtgcccgaaggaccgcgcacctggtgcatgacccgcaagcccggtgcctga

SEQ ID NO: 5279 - DNA, 1698 bp, synthetic construct
  source 1..1698: mol_type = other DNA
atggccttaccagtgaccgccttgctcctgccgctggccttgctgctccacgccgccaggccggacatccagatgacacagagccctagcagcctgtctgccagcgtgggagacagagtgaccatcacatgcaaggccagcgaccacatcaacaactggctggcctggtatcagcagaagcctggacaggcccctaagctgctgatctacggcgctaccacactggaaacaggcgtgcccagcagattttctggcagcggctctggcaccgactacaccctgacaatatccagcctccagcctgaggacttcgccacctactactgtcagcagagctggaacaccccttggacattcggccagggcaccaagctggaaatcaagagaggcggaggcggaagtggaggcggaggatctggcggcggaggctctcaagttcagcttcaacagcctggcgctgagctggtcaaacctggcgcttctgtgaagatgagctgcaaagccagcggctacgccttcaacagctactggatcaactggatgaagcagaaacccggccagggactcgaatggatcggccaaatctatcccggcgacggcgacaccaactacaacggcaagttcaagggcagagccacactgaccgccgatacctctagcagcacagcctacatgcagctgagcagcctgaccagcgaagatagcgccgtgtacttctgtgcccggtccatcacaacagtcgtgggctgcgctatggactattggggccagggaacaagcgtgaccgtgtctagtacgcgtagaagttgggatcgctacaggctcgagggaggcagctggagccaccctcagtttgaaaaagactacaaagacgatgacgataagggatcagattacaaggatgatgatgacaaggggtcagattataaagacgacgatgataaagggagcgactacaaggacgacgatgacaaggcctggtcccatccccagttcgagaaacaccatcaccaccaccatcatcacactagtggctccggcgagggcagaggaagtctactaacctgcggagatgtggaagaaaatcctggcccacatatgaccgagtacaagcccacggtgcgcctcgccacccgcgacgacgtccccagggccgtacgcaccctcgccgccgcgttcgccgactaccccgccacgcgccacaccgtcgatccggaccgccacatcgagcgggtcaccgagctgcaagaactcttcctcacgcgcgtcgggctcgacatcggcaaggtgtgggtcgcggacgacggcgccgcggtggcggtctggaccacgccggagagcgtcgaagcgggggcggtgttcgccgagatcggcccgcgcatggccgagttgagcggttcccggctggccgcgcagcaacagatggaaggcctcctggcgccgcaccggcccaaggagcccgcgtggttcctggccaccgtcggcgtctcgcccgaccaccagggcaagggtctgggcagcgccgtcgtgctccccggagtggaggcggccgagcgcgccggggtgcccgccttcctggagacctccgcgccccgcaacctccccttctacgagcggctcggcttcaccgtcaccgccgacgtcgaggtgcccgaaggaccgcgcacctggtgcatgacccgcaagcccggtgcctga

SEQ ID NO: 5280 - DNA, 1698 bp, synthetic construct
  source 1..1698: mol_type = other DNA
atggccttaccagtgaccgccttgctcctgccgctggccttgctgctccacgccgccaggccggacatccagatgacacagagccctagcagcctgtctgccagcgtgggagacagagtgaccatcacatgcaaggccagcgaccacatcaacaactggctggcctggtatcagcagaagcctggacaggcccctaagctgctgatctacggcgctaccacactggaaacaggcgtgcccagcagattttctggcagcggctctggcaccgactacaccctgacaatatccagcctccagcctgaggacttcgccacctactactgtcagcagagctggaacaccccttggacattcggccagggcaccaagctggaaatcaagagaggcggaggcggaagtggaggcggaggatctggcggcggaggctctcaagttcagcttcaacagcctggcgctgagctggtcaaacctggcgcttctgtgaagatgagctgcaaagccagcggctacgccttcaacagctactggatcaactggatgaagcagaaacccggccagggactcgaatggatcggccaaatctatcccggcgacggcgacaccaactacaacggcaagttcaagggcagagccacactgaccgccgatacctctagcagcacagcctacatgcagctgagcagcctgaccagcgaagatagcgccgtgtacttctgtgcccggtccatcacaacagtcgtgggctgcgctatggactattggggccagggaacaagcgtgaccgtgtctagtacgcgtagaagtggagatcgctacaggctcgagggaggcagctggagccaccctcagtttgaaaaagactacaaagacgatgacgataagggatcagattacaaggatgatgatgacaaggggtcagattataaagacgacgatgataaagggagcgactacaaggacgacgatgacaaggcctggtcccatccccagttcgagaaacaccatcaccaccaccatcatcacactagtggctccggcgagggcagaggaagtctactaacctgcggagatgtggaagaaaatcctggcccacatatgaccgagtacaagcccacggtgcgcctcgccacccgcgacgacgtccccagggccgtacgcaccctcgccgccgcgttcgccgactaccccgccacgcgccacaccgtcgatccggaccgccacatcgagcgggtcaccgagctgcaagaactcttcctcacgcgcgtcgggctcgacatcggcaaggtgtgggtcgcggacgacggcgccgcggtggcggtctggaccacgccggagagcgtcgaagcgggggcggtgttcgccgagatcggcccgcgcatggccgagttgagcggttcccggctggccgcgcagcaacagatggaaggcctcctggcgccgcaccggcccaaggagcccgcgtggttcctggccaccgtcggcgtctcgcccgaccaccagggcaagggtctgggcagcgccgtcgtgctccccggagtggaggcggccgagcgcgccggggtgcccgccttcctggagacctccgcgccccgcaacctccccttctacgagcggctcggcttcaccgtcaccgccgacgtcgaggtgcccgaaggaccgcgcacctggtgcatgacccgcaagcccggtgcctga

SEQ ID NO: 5281 - DNA, 1698 bp, synthetic construct
  source 1..1698: mol_type = other DNA
atggccttaccagtgaccgccttgctcctgccgctggccttgctgctccacgccgccaggccggacatccagatgacacagagccctagcagcctgtctgccagcgtgggagacagagtgaccatcacatgcaaggccagcgaccacatcaacaactggctggcctggtatcagcagaagcctggacaggcccctaagctgctgatctacggcgctaccacactggaaacaggcgtgcccagcagattttctggcagcggctctggcaccgactacaccctgacaatatccagcctccagcctgaggacttcgccacctactactgtcagcagagctggaacaccccttggacattcggccagggcaccaagctggaaatcaagagaggcggaggcggaagtggaggcggaggatctggcggcggaggctctcaagttcagcttcaacagcctggcgctgagctggtcaaacctggcgcttctgtgaagatgagctgcaaagccagcggctacgccttcaacagctactggatcaactggatgaagcagaaacccggccagggactcgaatggatcggccaaatctatcccggcgacggcgacaccaactacaacggcaagttcaagggcagagccacactgaccgccgatacctctagcagcacagcctacatgcagctgagcagcctgaccagcgaagatagcgccgtgtacttctgtgcccggtccatcacaacagtcgtgggctgcgctatggactattggggccagggaacaagcgtgaccgtgtctagtacgcgtagaagtctggatcgctacaggctcgagggaggcagctggagccaccctcagtttgaaaaagactacaaagacgatgacgataagggatcagattacaaggatgatgatgacaaggggtcagattataaagacgacgatgataaagggagcgactacaaggacgacgatgacaaggcctggtcccatccccagttcgagaaacaccatcaccaccaccatcatcacactagtggctccggcgagggcagaggaagtctactaacctgcggagatgtggaagaaaatcctggcccacatatgaccgagtacaagcccacggtgcgcctcgccacccgcgacgacgtccccagggccgtacgcaccctcgccgccgcgttcgccgactaccccgccacgcgccacaccgtcgatccggaccgccacatcgagcgggtcaccgagctgcaagaactcttcctcacgcgcgtcgggctcgacatcggcaaggtgtgggtcgcggacgacggcgccgcggtggcggtctggaccacgccggagagcgtcgaagcgggggcggtgttcgccgagatcggcccgcgcatggccgagttgagcggttcccggctggccgcgcagcaacagatggaaggcctcctggcgccgcaccggcccaaggagcccgcgtggttcctggccaccgtcggcgtctcgcccgaccaccagggcaagggtctgggcagcgccgtcgtgctccccggagtggaggcggccgagcgcgccggggtgcccgccttcctggagacctccgcgccccgcaacctccccttctacgagcggctcggcttcaccgtcaccgccgacgtcgaggtgcccgaaggaccgcgcacctggtgcatgacccgcaagcccggtgcctga

SEQ ID NO: 5282 - DNA, 1698 bp, synthetic construct
  source 1..1698: mol_type = other DNA
atggccttaccagtgaccgccttgctcctgccgctggccttgctgctccacgccgccaggccggacatccagatgacacagagccctagcagcctgtctgccagcgtgggagacagagtgaccatcacatgcaaggccagcgaccacatcaacaactggctggcctggtatcagcagaagcctggacaggcccctaagctgctgatctacggcgctaccacactggaaacaggcgtgcccagcagattttctggcagcggctctggcaccgactacaccctgacaatatccagcctccagcctgaggacttcgccacctactactgtcagcagagctggaacaccccttggacattcggccagggcaccaagctggaaatcaagagaggcggaggcggaagtggaggcggaggatctggcggcggaggctctcaagttcagcttcaacagcctggcgctgagctggtcaaacctggcgcttctgtgaagatgagctgcaaagccagcggctacgccttcaacagctactggatcaactggatgaagcagaaacccggccagggactcgaatggatcggccaaatctatcccggcgacggcgacaccaactacaacggcaagttcaagggcagagccacactgaccgccgatacctctagcagcacagcctacatgcagctgagcagcctgaccagcgaagatagcgccgtgtacttctgtgcccggtccatcacaacagtcgtgggctgcgctatggactattggggccagggaacaagcgtgaccgtgtctagtacgcgtagaagtggcgatcgctacaggctcgagggaggcagctggagccaccctcagtttgaaaaagactacaaagacgatgacgataagggatcagattacaaggatgatgatgacaaggggtcagattataaagacgacgatgataaagggagcgactacaaggacgacgatgacaaggcctggtcccatccccagttcgagaaacaccatcaccaccaccatcatcacactagtggctccggcgagggcagaggaagtctactaacctgcggagatgtggaagaaaatcctggcccacatatgaccgagtacaagcccacggtgcgcctcgccacccgcgacgacgtccccagggccgtacgcaccctcgccgccgcgttcgccgactaccccgccacgcgccacaccgtcgatccggaccgccacatcgagcgggtcaccgagctgcaagaactcttcctcacgcgcgtcgggctcgacatcggcaaggtgtgggtcgcggacgacggcgccgcggtggcggtctggaccacgccggagagcgtcgaagcgggggcggtgttcgccgagatcggcccgcgcatggccgagttgagcggttcccggctggccgcgcagcaacagatggaaggcctcctggcgccgcaccggcccaaggagcccgcgtggttcctggccaccgtcggcgtctcgcccgaccaccagggcaagggtctgggcagcgccgtcgtgctccccggagtggaggcggccgagcgcgccggggtgcccgccttcctggagacctccgcgccccgcaacctccccttctacgagcggctcggcttcaccgtcaccgccgacgtcgaggtgcccgaaggaccgcgcacctggtgcatgacccgcaagcccggtgcctga

SEQ ID NO: 5283 - DNA, 1698 bp, synthetic construct
  source 1..1698: mol_type = other DNA
atggccttaccagtgaccgccttgctcctgccgctggccttgctgctccacgccgccaggccggacatccagatgacacagagccctagcagcctgtctgccagcgtgggagacagagtgaccatcacatgcaaggccagcgaccacatcaacaactggctggcctggtatcagcagaagcctggacaggcccctaagctgctgatctacggcgctaccacactggaaacaggcgtgcccagcagattttctggcagcggctctggcaccgactacaccctgacaatatccagcctccagcctgaggacttcgccacctactactgtcagcagagctggaacaccccttggacattcggccagggcaccaagctggaaatcaagagaggcggaggcggaagtggaggcggaggatctggcggcggaggctctcaagttcagcttcaacagcctggcgctgagctggtcaaacctggcgcttctgtgaagatgagctgcaaagccagcggctacgccttcaacagctactggatcaactggatgaagcagaaacccggccagggactcgaatggatcggccaaatctatcccggcgacggcgacaccaactacaacggcaagttcaagggcagagccacactgaccgccgatacctctagcagcacagcctacatgcagctgagcagcctgaccagcgaagatagcgccgtgtacttctgtgcccggtccatcacaacagtcgtgggctgcgctatggactattggggccagggaacaagcgtgaccgtgtctagtacgcgtagaagtgaataccgctacaggctcgagggaggcagctggagccaccctcagtttgaaaaagactacaaagacgatgacgataagggatcagattacaaggatgatgatgacaaggggtcagattataaagacgacgatgataaagggagcgactacaaggacgacgatgacaaggcctggtcccatccccagttcgagaaacaccatcaccaccaccatcatcacactagtggctccggcgagggcagaggaagtctactaacctgcggagatgtggaagaaaatcctggcccacatatgaccgagtacaagcccacggtgcgcctcgccacccgcgacgacgtccccagggccgtacgcaccctcgccgccgcgttcgccgactaccccgccacgcgccacaccgtcgatccggaccgccacatcgagcgggtcaccgagctgcaagaactcttcctcacgcgcgtcgggctcgacatcggcaaggtgtgggtcgcggacgacggcgccgcggtggcggtctggaccacgccggagagcgtcgaagcgggggcggtgttcgccgagatcggcccgcgcatggccgagttgagcggttcccggctggccgcgcagcaacagatggaaggcctcctggcgccgcaccggcccaaggagcccgcgtggttcctggccaccgtcggcgtctcgcccgaccaccagggcaagggtctgggcagcgccgtcgtgctccccggagtggaggcggccgagcgcgccggggtgcccgccttcctggagacctccgcgccccgcaacctccccttctacgagcggctcggcttcaccgtcaccgccgacgtcgaggtgcccgaaggaccgcgcacctggtgcatgacccgcaagcccggtgcctga

SEQ ID NO: 5284 - DNA, 1698 bp, synthetic construct
  source 1..1698: mol_type = other DNA
atggccttaccagtgaccgccttgctcctgccgctggccttgctgctccacgccgccaggccggacatccagatgacacagagccctagcagcctgtctgccagcgtgggagacagagtgaccatcacatgcaaggccagcgaccacatcaacaactggctggcctggtatcagcagaagcctggacaggcccctaagctgctgatctacggcgctaccacactggaaacaggcgtgcccagcagattttctggcagcggctctggcaccgactacaccctgacaatatccagcctccagcctgaggacttcgccacctactactgtcagcagagctggaacaccccttggacattcggccagggcaccaagctggaaatcaagagaggcggaggcggaagtggaggcggaggatctggcggcggaggctctcaagttcagcttcaacagcctggcgctgagctggtcaaacctggcgcttctgtgaagatgagctgcaaagccagcggctacgccttcaacagctactggatcaactggatgaagcagaaacccggccagggactcgaatggatcggccaaatctatcccggcgacggcgacaccaactacaacggcaagttcaagggcagagccacactgaccgccgatacctctagcagcacagcctacatgcagctgagcagcctgaccagcgaagatagcgccgtgtacttctgtgcccggtccatcacaacagtcgtgggctgcgctatggactattggggccagggaacaagcgtgaccgtgtctagtacgcgtagaagtgaactacgctacaggctcgagggaggcagctggagccaccctcagtttgaaaaagactacaaagacgatgacgataagggatcagattacaaggatgatgatgacaaggggtcagattataaagacgacgatgataaagggagcgactacaaggacgacgatgacaaggcctggtcccatccccagttcgagaaacaccatcaccaccaccatcatcacactagtggctccggcgagggcagaggaagtctactaacctgcggagatgtggaagaaaatcctggcccacatatgaccgagtacaagcccacggtgcgcctcgccacccgcgacgacgtccccagggccgtacgcaccctcgccgccgcgttcgccgactaccccgccacgcgccacaccgtcgatccggaccgccacatcgagcgggtcaccgagctgcaagaactcttcctcacgcgcgtcgggctcgacatcggcaaggtgtgggtcgcggacgacggcgccgcggtggcggtctggaccacgccggagagcgtcgaagcgggggcggtgttcgccgagatcggcccgcgcatggccgagttgagcggttcccggctggccgcgcagcaacagatggaaggcctcctggcgccgcaccggcccaaggagcccgcgtggttcctggccaccgtcggcgtctcgcccgaccaccagggcaagggtctgggcagcgccgtcgtgctccccggagtggaggcggccgagcgcgccggggtgcccgccttcctggagacctccgcgccccgcaacctccccttctacgagcggctcggcttcaccgtcaccgccgacgtcgaggtgcccgaaggaccgcgcacctggtgcatgacccgcaagcccggtgcctga

SEQ ID NO: 5285 - DNA, 1698 bp, synthetic construct
  source 1..1698: mol_type = other DNA
atggccttaccagtgaccgccttgctcctgccgctggccttgctgctccacgccgccaggccggacatccagatgacacagagccctagcagcctgtctgccagcgtgggagacagagtgaccatcacatgcaaggccagcgaccacatcaacaactggctggcctggtatcagcagaagcctggacaggcccctaagctgctgatctacggcgctaccacactggaaacaggcgtgcccagcagattttctggcagcggctctggcaccgactacaccctgacaatatccagcctccagcctgaggacttcgccacctactactgtcagcagagctggaacaccccttggacattcggccagggcaccaagctggaaatcaagagaggcggaggcggaagtggaggcggaggatctggcggcggaggctctcaagttcagcttcaacagcctggcgctgagctggtcaaacctggcgcttctgtgaagatgagctgcaaagccagcggctacgccttcaacagctactggatcaactggatgaagcagaaacccggccagggactcgaatggatcggccaaatctatcccggcgacggcgacaccaactacaacggcaagttcaagggcagagccacactgaccgccgatacctctagcagcacagcctacatgcagctgagcagcctgaccagcgaagatagcgccgtgtacttctgtgcccggtccatcacaacagtcgtgggctgcgctatggactattggggccagggaacaagcgtgaccgtgtctagtacgcgtagaagtgaaaggcgctacaggctcgagggaggcagctggagccaccctcagtttgaaaaagactacaaagacgatgacgataagggatcagattacaaggatgatgatgacaaggggtcagattataaagacgacgatgataaagggagcgactacaaggacgacgatgacaaggcctggtcccatccccagttcgagaaacaccatcaccaccaccatcatcacactagtggctccggcgagggcagaggaagtctactaacctgcggagatgtggaagaaaatcctggcccacatatgaccgagtacaagcccacggtgcgcctcgccacccgcgacgacgtccccagggccgtacgcaccctcgccgccgcgttcgccgactaccccgccacgcgccacaccgtcgatccggaccgccacatcgagcgggtcaccgagctgcaagaactcttcctcacgcgcgtcgggctcgacatcggcaaggtgtgggtcgcggacgacggcgccgcggtggcggtctggaccacgccggagagcgtcgaagcgggggcggtgttcgccgagatcggcccgcgcatggccgagttgagcggttcccggctggccgcgcagcaacagatggaaggcctcctggcgccgcaccggcccaaggagcccgcgtggttcctggccaccgtcggcgtctcgcccgaccaccagggcaagggtctgggcagcgccgtcgtgctccccggagtggaggcggccgagcgcgccggggtgcccgccttcctggagacctccgcgccccgcaacctccccttctacgagcggctcggcttcaccgtcaccgccgacgtcgaggtgcccgaaggaccgcgcacctggtgcatgacccgcaagcccggtgcctga

SEQ ID NO: 5286 - DNA, 1698 bp, synthetic construct; identical to SEQ ID NO: 5285
  source 1..1698: mol_type = other DNA

SEQ ID NO: 5287 - DNA, 1698 bp, synthetic construct
  source 1..1698: mol_type = other DNA
atggccttaccagtgaccgccttgctcctgccgctggccttgctgctccacgccgccaggccggacatccagatgacacagagccctagcagcctgtctgccagcgtgggagacagagtgaccatcacatgcaaggccagcgaccacatcaacaactggctggcctggtatcagcagaagcctggacaggcccctaagctgctgatctacggcgctaccacactggaaacaggcgtgcccagcagattttctggcagcggctctggcaccgactacaccctgacaatatccagcctccagcctgaggacttcgccacctactactgtcagcagagctggaacaccccttggacattcggccagggcaccaagctggaaatcaagagaggcggaggcggaagtggaggcggaggatctggcggcggaggctctcaagttcagcttcaacagcctggcgctgagctggtcaaacctggcgcttctgtgaagatgagctgcaaagccagcggctacgccttcaacagctactggatcaactggatgaagcagaaacccggccagggactcgaatggatcggccaaatctatcccggcgacggcgacaccaactacaacggcaagttcaagggcagagccacactgaccgccgatacctctagcagcacagcctacatgcagctgagcagcctgaccagcgaagatagcgccgtgtacttctgtgcccggtccatcacaacagtcgtgggctgcgctatggactattggggccagggaacaagcgtgaccgtgtctagtacgcgtagaagtgaaacacgctacaggctcgagggaggcagctggagccaccctcagtttgaaaaagactacaaagacgatgacgataagggatcagattacaaggatgatgatgacaaggggtcagattataaagacgacgatgataaagggagcgactacaaggacgacgatgacaaggcctggtcccatccccagttcgagaaacaccatcaccaccaccatcatcacactagtggctccggcgagggcagaggaagtctactaacctgcggagatgtggaagaaaatcctggcccacatatgaccgagtacaagcccacggtgcgcctcgccacccgcgacgacgtccccagggccgtacgcaccctcgccgccgcgttcgccgactaccccgccacgcgccacaccgtcgatccggaccgccacatcgagcgggtcaccgagctgcaagaactcttcctcacgcgcgtcgggctcgacatcggcaaggtgtgggtcgcggacgacggcgccgcggtggcggtctggaccacgccggagagcgtcgaagcgggggcggtgttcgccgagatcggcccgcgcatggccgagttgagcggttcccggctggccgcgcagcaacagatggaaggcctcctggcgccgcaccggcccaaggagcccgcgtggttcctggccaccgtcggcgtctcgcccgaccaccagggcaagggtctgggcagcgccgtcgtgctccccggagtggaggcggccgagcgcgccggggtgcccgccttcctggagacctccgcgccccgcaacctccccttctacgagcggctcggcttcaccgtcaccgccgacgtcgaggtgcccgaaggaccgcgcacctggtgcatgacccgcaagcccggtgcctga

SEQ ID NO: 5288 - DNA, 1698 bp, synthetic construct
  source 1..1698: mol_type = other DNA
atggccttaccagtgaccgccttgctcctgccgctggccttgctgctccacgccgccaggccggacatccagatgacacagagccctagcagcctgtctgccagcgtgggagacagagtgaccatcacatgcaaggccagcgaccacatcaacaactggctggcctggtatcagcagaagcctggacaggcccctaagctgctgatctacggcgctaccacactggaaacaggcgtgcccagcagattttctggcagcggctctggcaccgactacaccctgacaatatccagcctccagcctgaggacttcgccacctactactgtcagcagagctggaacaccccttggacattcggccagggcaccaagctggaaatcaagagaggcggaggcggaagtggaggcggaggatctggcggcggaggctctcaagttcagcttcaacagcctggcgctgagctggtcaaacctggcgcttctgtgaagatgagctgcaaagccagcggctacgccttcaacagctactggatcaactggatgaagcagaaacccggccagggactcgaatggatcggccaaatctatcccggcgacggcgacaccaactacaacggcaagttcaagggcagagccacactgaccgccgatacctctagcagcacagcctacatgcagctgagcagcctgaccagcgaagatagcgccgtgtacttctgtgcccggtccatcacaacagtcgtgggctgcgctatggactattggggccagggaacaagcgtgaccgtgtctagtacgcgtagaagtgaaacccgctacaggctcgagggaggcagctggagccaccctcagtttgaaaaagactacaaagacgatgacgataagggatcagattacaaggatgatgatgacaaggggtcagattataaagacgacgatgataaagggagcgactacaaggacgacgatgacaaggcctggtcccatccccagttcgagaaacaccatcaccaccaccatcatcacactagtggctccggcgagggcagaggaagtctactaacctgcggagatgtggaagaaaatcctggcccacatatgaccgagtacaagcccacggtgcgcctcgccacccgcgacgacgtccccagggccgtacgcaccctcgccgccgcgttcgccgactaccccgccacgcgccacaccgtcgatccggaccgccacatcgagcgggtcaccgagctgcaagaactcttcctcacgcgcgtcgggctcgacatcggcaaggtgtgggtcgcggacgacggcgccgcggtggcggtctggaccacgccggagagcgtcgaagcgggggcggtgttcgccgagatcggcccgcgcatggccgagttgagcggttcccggctggccgcgcagcaacagatggaaggcctcctggcgccgcaccggcccaaggagcccgcgtggttcctggccaccgtcggcgtctcgcccgaccaccagggcaagggtctgggcagcgccgtcgtgctccccggagtggaggcggccgagcgcgccggggtgcccgccttcctggagacctccgcgccccgcaacctccccttctacgagcggctcggcttcaccgtcaccgccgacgtcgaggtgcccgaaggaccgcgcacctggtgcatgacccgcaagcccggtgcctga

SEQ ID NO: 5289 - DNA, 1701 bp, synthetic construct
  source 1..1701: mol_type = other DNA
atggccttaccagtgaccgccttgctcctgccgctggccttgctgctccacgccgccaggccggacatccagatgacacagagccctagcagcctgtctgccagcgtgggagacagagtgaccatcacatgcaaggccagcgaccacatcaacaactggctggcctggtatcagcagaagcctggacaggcccctaagctgctgatctacggcgctaccacactggaaacaggcgtgcccagcagattttctggcagcggctctggcaccgactacaccctgacaatatccagcctccagcctgaggacttcgccacctactactgtcagcagagctggaacaccccttggacattcggccagggcaccaagctggaaatcaagagaggcggaggcggaagtggaggcggaggatctggcggcggaggctctcaagttcagcttcaacagcctggcgctgagctggtcaaacctggcgcttctgtgaagatgagctgcaaagccagcggctacgccttcaacagctactggatcaactggatgaagcagaaacccggccagggactcgaatggatcggccaaatctatcccggcgacggcgacaccaactacaacggcaagttcaagggcagagccacactgaccgccgatacctctagcagcacagcctacatgcagctgagcagcctgaccagcgaagatagcgccgtgtacttctgtgcccggtccatcacaacagtcgtgggctgcgctatggactattggggccagggaacaagcgtgaccgtgtctagtacgcgtagaatggaagatcgctacaggaacctcgagggaggcagctggagccaccctcagtttgaaaaagactacaaagacgatgacgataagggatcagattacaaggatgatgatgacaaggggtcagattataaagacgacgatgataaagggagcgactacaaggacgacgatgacaaggcctggtcccatccccagttcgagaaacaccatcaccaccaccatcatcacactagtggctccggcgagggcagaggaagtctactaacctgcggagatgtggaagaaaatcctggcccacatatgaccgagtacaagcccacggtgcgcctcgccacccgcgacgacgtccccagggccgtacgcaccctcgccgccgcgttcgccgactaccccgccacgcgccacaccgtcgatccggaccgccacatcgagcgggtcaccgagctgcaagaactcttcctcacgcgcgtcgggctcgacatcggcaaggtgtgggtcgcggacgacggcgccgcggtggcggtctggaccacgccggagagcgtcgaagcgggggcggtgttcgccgagatcggcccgcgcatggccgagttgagcggttcccggctggccgcgcagcaacagatggaaggcctcctggcgccgcaccggcccaaggagcccgcgtggttcctggccaccgtcggcgtctcgcccgaccaccagggcaagggtctgggcagcgccgtcgtgctccccggagtggaggcggccgagcgcgccggggtgcccgccttcctggagacctccgcgccccgcaacctccccttctacgagcggctcggcttcaccgtcaccgccgacgtcgaggtgcccgaaggaccgcgcacctggtgcatgacccgcaagcccggtgcctga

SEQ ID NO: 5290 - DNA, 1701 bp, synthetic construct
  source 1..1701: mol_type = other DNA
atggccttaccagtgaccgccttgctcctgccgctggccttgctgctccacgccgccaggccggacatccagatgacacagagccctagcagcctgtctgccagcgtgggagacagagtgaccatcacatgcaaggccagcgaccacatcaacaactggctggcctggtatcagcagaagcctggacaggcccctaagctgctgatctacggcgctaccacactggaaacaggcgtgcccagcagattttctggcagcggctctggcaccgactacaccctgacaatatccagcctccagcctgaggacttcgccacctactactgtcagcagagctggaacaccccttggacattcggccagggcaccaagctggaaatcaagagaggcggaggcggaagtggaggcggaggatctggcggcggaggctctcaagttcagcttcaacagcctggcgctgagctggtcaaacctggcgcttctgtgaagatgagctgcaaagccagcggctacgccttcaacagctactggatcaactggatgaagcagaaacccggccagggactcgaatggatcggccaaatctatcccggcgacggcgacaccaactacaacggcaagttcaagggcagagccacactgaccgccgatacctctagcagcacagcctacatgcagctgagcagcctgaccagcgaagatagcgccgtgtacttctgtgcccggtccatcacaacagtcgtgggctgcgctatggactattggggccagggaacaagcgtgaccgtgtctagtacgcgtagaaaggaagatcgctacaggaacctcgagggaggcagctggagccaccctcagtttgaaaaagactacaaagacgatgacgataagggatcagattacaaggatgatgatgacaaggggtcagattataaagacgacgatgataaagggagcgactacaaggacgacgatgacaaggcctggtcccatccccagttcgagaaacaccatcaccaccaccatcatcacactagtggctccggcgagggcagaggaagtctactaacctgcggagatgtggaagaaaatcctggcccacatatgaccgagtacaagcccacggtgcgcctcgccacccgcgacgacgtccccagggccgtacgcaccctcgccgccgcgttcgccgactaccccgccacgcgccacaccgtcgatccggaccgccacatcgagcgggtcaccgagctgcaagaactcttcctcacgcgcgtcgggctcgacatcggcaaggtgtgggtcgcggacgacggcgccgcggtggcggtctggaccacgccggagagcgtcgaagcgggggcggtgttcgccgagatcggcccgcgcatggccgagttgagcggttcccggctggccgcgcagcaacagatggaaggcctcctggcgccgcaccggcccaaggagcccgcgtggttcctggccaccgtcggcgtctcgcccgaccaccagggcaagggtctgggcagcgccgtcgtgctccccggagtggaggcggccgagcgcgccggggtgcccgccttcctggagacctccgcgccccgcaacctccccttctacgagcggctcggcttcaccgtcaccgccgacgtcgaggtgcccgaaggaccgcgcacctggtgcatgacccgcaagcccggtgcctga

SEQ ID NO: 5291 - DNA, 1701 bp, synthetic construct
  source 1..1701: mol_type = other DNA
atggccttaccagtgaccgccttgctcctgccgctggccttgctgctccacgccgccaggccggacatccagatgacacagagccctagcagcctgtctgccagcgtgggagacagagtgaccatcacatgcaaggccagcgaccacatcaacaactggctggcctggtatcagcagaagcctggacaggcccctaagctgctgatctacggcgctaccacactggaaacaggcgtgcccagcagattttctggcagcggctctggcaccgactacaccctgacaatatccagcctccagcctgaggacttcgccacctactactgtcagcagagctggaacaccccttggacattcggccagggcaccaagctggaaatcaagagaggcggaggcggaagtggaggcggaggatctggcggcggaggctctcaagttcagcttcaacagcctggcgctgagctggtcaaacctggcgcttctgtgaagatgagctgcaaagccagcggctacgccttcaacagctactggatcaactggatgaagcagaaacccggccagggactcgaatggatcggccaaatctatcccggcgacggcgacaccaactacaacggcaagttcaagggcagagccacactgaccgccgatacctctagcagcacagcctacatgcagctgagcagcctgaccagcgaagatagcgccgtgtacttctgtgcccggtccatcacaacagtcgtgggctgcgctatggactattggggccagggaacaagcgtgaccgtgtctagtacgcgtagacgggaagatcgctacaggaacctcgagggaggcagctggagccaccctcagtttgaaaaagactacaaagacgatgacgataagggatcagattacaaggatgatgatgacaaggggtcagattataaagacgacgatgataaagggagcgactacaaggacgacgatgacaaggcctggtcccatccccagttcgagaaacaccatcaccaccaccatcatcacactagtggctccggcgagggcagaggaagtctactaacctgcggagatgtggaagaaaatcctggcccacatatgaccgagtacaagcccacggtgcgcctcgccacccgcgacgacgtccccagggccgtacgcaccctcgccgccgcgttcgccgactaccccgccacgcgccacaccgtcgatccggaccgccacatcgagcgggtcaccgagctgcaagaactcttcctcacgcgcgtcgggctcgacatcggcaaggtgtgggtcgcggacgacggcgccgcggtggcggtctggaccacgccggagagcgtcgaagcgggggcggtgttcgccgagatcggcccgcgcatggccgagttgagcggttcccggctggccgcgcagcaacagatggaaggcctcctggcgccgcaccggcccaaggagcccgcgtggttcctggccaccgtcggcgtctcgcccgaccaccagggcaagggtctgggcagcgccgtcgtgctccccggagtggaggcggccgagcgcgccggggtgcccgccttcctggagacctccgcgccccgcaacctccccttctacgagcggctcggcttcaccgtcaccgccgacgtcgaggtgcccgaaggaccgcgcacctggtgcatgacccgcaagcccggtgcctga

SEQ ID NO: 5292 - DNA, 1701 bp, synthetic construct
  source 1..1701: mol_type = other DNA
atggccttaccagtgaccgccttgctcctgccgctggccttgctgctccacgccgccaggccggacatccagatgacacagagccctagcagcctgtctgccagcgtgggagacagagtgaccatcacatgcaaggccagcgaccacatcaacaactggctggcctggtatcagcagaagcctggacaggcccctaagctgctgatctacggcgctaccacactggaaacaggcgtgcccagcagattttctggcagcggctctggcaccgactacaccctgacaatatccagcctccagcctgaggacttcgccacctactactgtcagcagagctggaacaccccttggacattcggccagggcaccaagctggaaatcaagagaggcggaggcggaagtggaggcggaggatctggcggcggaggctctcaagttcagcttcaacagcctggcgctgagctggtcaaacctggcgcttctgtgaagatgagctgcaaagccagcggctacgccttcaacagctactggatcaactggatgaagcagaaacccggccagggactcgaatggatcggccaaatctatcccggcgacggcgacaccaactacaacggcaagttcaagggcagagccacactgaccgccgatacctctagcagcacagcctacatgcagctgagcagcctgaccagcgaagatagcgccgtgtacttctgtgcccggtccatcacaacagtcgtgggctgcgctatggactattggggccagggaacaagcgtgaccgtgtctagtacgcgtagagttgaagatcgctacaggaacctcgagggaggcagctggagccaccctcagtttgaaaaagactacaaagacgatgacgataagggatcagattacaaggatgatgatgacaaggggtcagattataaagacgacgatgataaagggagcgactacaaggacgacgatgacaaggcctggtcccatccccagttcgagaaacaccatcaccaccaccatcatcacactagtggctccggcgagggcagaggaagtctactaacctgcggagatgtggaagaaaatcctggcccacatatgaccgagtacaagcccacggtgcgcctcgccacccgcgacgacgtccccagggccgtacgcaccctcgccgccgcgttcgccgactaccccgccacgcgccacaccgtcgatccggaccgccacatcgagcgggtcaccgagctgcaagaactcttcctcacgcgcgtcgggctcgacatcggcaaggtgtgggtcgcggacgacggcgccgcggtggcggtctggaccacgccggagagcgtcgaagcgggggcggtgttcgccgagatcggcccgcgcatggccgagttgagcggttcccggctggccgcgcagcaacagatggaaggcctcctggcgccgcaccggcccaaggagcccgcgtggttcctggccaccgtcggcgtctcgcccgaccaccagggcaagggtctgggcagcgccgtcgtgctccccggagtggaggcggccgagcgcgccggggtgcccgccttcctggagacctccgcgccccgcaacctccccttctacgagcggctcggcttcaccgtcaccgccgacgtcgaggtgcccgaaggaccgcgcacctggtgcatgacccgcaagcccggtgcctga

SEQ ID NO: 5293 - DNA, 1704 bp, synthetic construct
  source 1..1704: mol_type = other DNA
atggccttaccagtgaccgccttgctcctgccgctggccttgctgctccacgccgccaggccggacatccagatgacacagagccctagcagcctgtctgccagcgtgggagacagagtgaccatcacatgcaaggccagcgaccacatcaacaactggctggcctggtatcagcagaagcctggacaggcccctaagctgctgatctacggcgctaccacactggaaacaggcgtgcccagcagattttctggcagcggctctggcaccgactacaccctgacaatatccagcctccagcctgaggacttcgccacctactactgtcagcagagctggaacaccccttggacattcggccagggcaccaagctggaaatcaagagaggcggaggcggaagtggaggcggaggatctggcggcggaggctctcaagttcagcttcaacagcctggcgctgagctggtcaaacctggcgcttctgtgaagatgagctgcaaagccagcggctacgccttcaacagctactggatcaactggatgaagcagaaacccggccagggactcgaatggatcggccaaatctatcccggcgacggcgacaccaactacaacggcaagttcaagggcagagccacactgaccgccgatacctctagcagcacagcctacatgcagctgagcagcctgaccagcgaagatagcgccgtgtacttctgtgcccggtccatcacaacagtcgtgggctgcgctatggactattggggccagggaacaagcgtgaccgtgtctagtacgcgtgcaagatattggtgtcgctacaggaacctcgagggaggcagctggagccaccctcagtttgaaaaagactacaaagacgatgacgataagggatcagattacaaggatgatgatgacaaggggtcagattataaagacgacgatgataaagggagcgactacaaggacgacgatgacaaggcctggtcccatccccagttcgagaaacaccatcaccaccaccatcatcacactagtggctccggcgagggcagaggaagtctactaacctgcggagatgtggaagaaaatcctggcccacatatgaccgagtacaagcccacggtgcgcctcgccacccgcgacgacgtccccagggccgtacgcaccctcgccgccgcgttcgccgactaccccgccacgcgccacaccgtcgatccggaccgccacatcgagcgggtcaccgagctgcaagaactcttcctcacgcgcgtcgggctcgacatcggcaaggtgtgggtcgcggacgacggcgccgcggtggcggtctggaccacgccggagagcgtcgaagcgggggcggtgttcgccgagatcggcccgcgcatggccgagttgagcggttcccggctggccgcgcagcaacagatggaaggcctcctggcgccgcaccggcccaaggagcccgcgtggttcctggccaccgtcggcgtctcgcccgaccaccagggcaagggtctgggcagcgccgtcgtgctccccggagtggaggcggccgagcgcgccggggtgcccgccttcctggagacctccgcgccccgcaacctccccttctacgagcggctcggcttcaccgtcaccgccgacgtcgaggtgcccgaaggaccgcgcacctggtgcatgacccgcaagcccggtgcctga

SEQ ID NO: 5294 - DNA, 1704 bp, synthetic construct
  source 1..1704: mol_type = other DNA
atggccttaccagtgaccgccttgctcctgccgctggccttgctgctccacgccgccaggccggacatccagatgacacagagccctagcagcctgtctgccagcgtgggagacagagtgaccatcacatgcaaggccagcgaccacatcaacaactggctggcctggtatcagcagaagcctggacaggcccctaagctgctgatctacggcgctaccacactggaaacaggcgtgcccagcagattttctggcagcggctctggcaccgactacaccctgacaatatccagcctccagcctgaggacttcgccacctactactgtcagcagagctggaacaccccttggacattcggccagggcaccaagctggaaatcaagagaggcggaggcggaagtggaggcggaggatctggcggcggaggctctcaagttcagcttcaacagcctggcgctgagctggtcaaacctggcgcttctgtgaagatgagctgcaaagccagcggctacgccttcaacagctactggatcaactggatgaagcagaaacccggccagggactcgaatggatcggccaaatctatcccggcgacggcgacaccaactacaacggcaagttcaagggcagagccacactgaccgccgatacctctagcagcacagcctacatgcagctgagcagcctgaccagcgaagatagcgccgtgtacttctgtgcccggtccatcacaacagtcgtgggctgcgctatggactattggggccagggaacaagcgtgaccgtgtctagtacgcgtgcaagaggacggtgtcgctacaggaacctcgagggaggcagctggagccaccctcagtttgaaaaagactacaaagacgatgacgataagggatcagattacaaggatgatgatgacaaggggtcagattataaagacgacgatgataaagggagcgactacaaggacgacgatgacaaggcctggtcccatccccagttcgagaaacaccatcaccaccaccatcatcacactagtggctccggcgagggcagaggaagtctactaacctgcggagatgtggaagaaaatcctggcccacatatgaccgagtacaagcccacggtgcgcctcgccacccgcgacgacgtccccagggccgtacgcaccctcgccgccgcgttcgccgactaccccgccacgcgccacaccgtcgatccggaccgccacatcgagcgggtcaccgagctgcaagaactcttcctcacgcgcgtcgggctcgacatcggcaaggtgtgggtcgcggacgacggcgccgcggtggcggtctggaccacgccggagagcgtcgaagcgggggcggtgttcgccgagatcggcccgcgcatggccgagttgagcggttcccggctggccgcgcagcaacagatggaaggcctcctggcgccgcaccggcccaaggagcccgcgtggttcctggccaccgtcggcgtctcgcccgaccaccagggcaagggtctgggcagcgccgtcgtgctccccggagtggaggcggccgagcgcgccggggtgcccgccttcctggagacctccgcgccccgcaacctccccttctacgagcggctcggcttcaccgtcaccgccgacgtcgaggtgcccgaaggaccgcgcacctggtgcatgacccgcaagcccggtgcctga

SEQ ID NO: 5295 - DNA, 1704 bp, synthetic construct
  source 1..1704: mol_type = other DNA
atggccttaccagtgaccgccttgctcctgccgctggccttgctgctccacgccgccaggccggacatccagatgacacagagccctagcagcctgtctgccagcgtgggagacagagtgaccatcacatgcaaggccagcgaccacatcaacaactggctggcctggtatcagcagaagcctggacaggcccctaagctgctgatctacggcgctaccacactggaaacaggcgtgcccagcagattttctggcagcggctctggcaccgactacaccctgacaatatccagcctccagcctgaggacttcgccacctactactgtcagcagagctggaacaccccttggacattcggccagggcaccaagctggaaatcaagagaggcggaggcggaagtggaggcggaggatctggcggcggaggctctcaagttcagcttcaacagcctggcgctgagctggtcaaacctggcgcttctgtgaagatgagctgcaaagccagcggctacgccttcaacagctactggatcaactggatgaagcagaaacccggccagggactcgaatggatcggccaaatctatcccggcgacggcgacaccaactacaacggcaagttcaagggcagagccacactgaccgccgatacctctagcagcacagcctacatgcagctgagcagcctgaccagcgaagatagcgccgtgtacttctgtgcccggtccatcacaacagtcgtgggctgcgctatggactattggggccagggaacaagcgtgaccgtgtctagtacgcgtgcaagagctgtgtgtcgctacaggaacctcgagggaggcagctggagccaccctcagtttgaaaaagactacaaagacgatgacgataagggatcagattacaaggatgatgatgacaaggggtcagattataaagacgacgatgataaagggagcgactacaaggacgacgatgacaaggcctggtcccatccccagttcgagaaacaccatcaccaccaccatcatcacactagtggctccggcgagggcagaggaagtctactaacctgcggagatgtggaagaaaatcctggcccacatatgaccgagtacaagcccacggtgcgcctcgccacccgcgacgacgtccccagggccgtacgcaccctcgccgccgcgttcgccgactaccccgccacgcgccacaccgtcgatccggaccgccacatcgagcgggtcaccgagctgcaagaactcttcctcacgcgcgtcgggctcgacatcggcaaggtgtgggtcgcggacgacggcgccgcggtggcggtctggaccacgccggagagcgtcgaagcgggggcggtgttcgccgagatcggcccgcgcatggccgagttgagcggttcccggctggccgcgcagcaacagatggaaggcctcctggcgccgcaccggcccaaggagcccgcgtggttcctggccaccgtcggcgtctcgcccgaccaccagggcaagggtctgggcagcgccgtcgtgctccccggagtggaggcggccgagcgcgccggggtgcccgccttcctggagacctccgcgccccgcaacctccccttctacgagcggctcggcttcaccgtcaccgccgacgtcgaggtgcccgaaggaccgcgcacctggtgcatgacccgcaagcccggtgcctga

SEQ ID NO: 5296 - DNA, 813 bp, synthetic construct
  source 1..813: mol_type = other DNA
atggccttaccagtgaccgccttgctcctgccgctggccttgctgctccacgccgccaggccggacatccagatgacacagagccctagcagcctgtctgccagcgtgggagacagagtgaccatcacatgcaaggccagcgaccacatcaacaactggctggcctggtatcagcagaagcctggacaggcccctaagctgctgatctacggcgctaccacactggaaacaggcgtgcccagcagattttctggcagcggctctggcaccgactacaccctgacaatatccagcctccagcctgaggacttcgccacctactactgtcagcagagctggaacaccccttggacattcggccagggcaccaagctggaaatcaagagaggcggaggcggaagtggaggcggaggatctggcggcggaggctctcaagttcagcttcaacagcctggcgctgagctggtcaaacctggcgcttctgtgaagatgagctgcaaagccagcggctacgccttcaacagctactggatcaactggatgaagcagaaacccggccagggactcgaatggatcggccaaatctatcccggcgacggcgacaccaactacaacggcaagttcaagggcagagccacactgaccgccgatacctctagcagcacagcctacatgcagctgagcagcctgaccagcgaagatagcgccgtgtacttctgtgcccggtccatcacaacagtcgtgggctgcgctatggactattggggccagggaacaagcgtgaccgtgtctagtacgcgtgcaagattgtag

SEQ ID NO: 5297 - DNA, 1704 bp, synthetic construct
  source 1..1704: mol_type = other DNA
atggccttaccagtgaccgccttgctcctgccgctggccttgctgctccacgccgccaggccggacatccagatgacacagagccctagcagcctgtctgccagcgtgggagacagagtgaccatcacatgcaaggccagcgaccacatcaacaactggctggcctggtatcagcagaagcctggacaggcccctaagctgctgatctacggcgctaccacactggaaacaggcgtgcccagcagattttctggcagcggctctggcaccgactacaccctgacaatatccagcctccagcctgaggacttcgccacctactactgtcagcagagctggaacaccccttggacattcggccagggcaccaagctggaaatcaagagaggcggaggcggaagtggaggcggaggatctggcggcggaggctctcaagttcagcttcaacagcctggcgctgagctggtcaaacctggcgcttctgtgaagatgagctgcaaagccagcggctacgccttcaacagctactggatcaactggatgaagcagaaacccggccagggactcgaatggatcggccaaatctatcccggcgacggcgacaccaactacaacggcaagttcaagggcagagccacactgaccgccgatacctctagcagcacagcctacatgcagctgagcagcctgaccagcgaagatagcgccgtgtacttctgtgcccggtccatcacaacagtcgtgggctgcgctatggactattggggccagggaacaagcgtgaccgtgtctagtacgcgtgcaagagagagtagacgctacaggaacctcgagggaggcagctggagccaccctcagtttgaaaaagactacaaagacgatgacgataagggatcagattacaaggatgatgatgacaaggggtcagattataaagacgacgatgataaagggagcgactacaaggacgacgatgacaaggcctggtcccatccccagttcgagaaacaccatcaccaccaccatcatcacactagtggctccggcgagggcagaggaagtctactaacctgcggagatgtggaagaaaatcctggcccacatatgaccgagtacaagcccacggtgcgcctcgccacccgcgacgacgtccccagggccgtacgcaccctcgccgccgcgttcgccgactaccccgccacgcgccacaccgtcgatccggaccgccacatcgagcgggtcaccgagctgcaagaactcttcctcacgcgcgtcgggctcgacatcggcaaggtgtgggtcgcggacgacggcgccgcggtggcggtctggaccacgccggagagcgtcgaagcgggggcggtgttcgccgagatcggcccgcgcatggccgagttgagcggttcccggctggccgcgcagcaacagatggaaggcctcctggcgccgcaccggcccaaggagcccgcgtggttcctggccaccgtcggcgtctcgcccgaccaccagggcaagggtctgggcagcgccgtcgtgctccccggagtggaggcggccgagcgcgccggggtgcccgccttcctggagacctccgcgccccgcaacctccccttctacgagcggctcggcttcaccgtcaccgccgacgtcgaggtgcccgaaggaccgcgcacctggtgcatgacccgcaagcccggtgcctga

SEQ ID NO: 5298 - DNA, 1704 bp, synthetic construct
  source 1..1704: mol_type = other DNA
atggccttaccagtgaccgccttgctcctgccgctggccttgctgctccacgccgccaggccggacatccagatgacacagagccctagcagcctgtctgccagcgtgggagacagagtgaccatcacatgcaaggccagcgaccacatcaacaactggctggcctggtatcagcagaagcctggacaggcccctaagctgctgatctacggcgctaccacactggaaacaggcgtgcccagcagattttctggcagcggctctggcaccgactacaccctgacaatatccagcctccagcctgaggacttcgccacctactactgtcagcagagctggaacaccccttggacattcggccagggcaccaagctggaaatcaagagaggcggaggcggaagtggaggcggaggatctggcggcggaggctctcaagttcagcttcaacagcctggcgctgagctggtcaaacctggcgcttctgtgaagatgagctgcaaagccagcggctacgccttcaacagctactggatcaactggatgaagcagaaacccggccagggactcgaatggatcggccaaatctatcccggcgacggcgacaccaactacaacggcaagttcaagggcagagccacactgaccgccgatacctctagcagcacagcctacatgcagctgagcagcctgaccagcgaagatagcgccgtgtacttctgtgcccggtccatcacaacagtcgtgggctgcgctatggactattggggccagggaacaagcgtgaccgtgtctagtacgcgtgcaagaaggagagggcgctacaggaacctcgagggaggcagctggagccaccctcagtttgaaaaagactacagagacgatgacgataagggatcagattacaaggatgatgatgacaaggggtcagattataaagacgacgatgataaagggagcgactacaaggacgacgatgacaaggcctggtcccatccccagttcgagaaacaccatcaccaccaccatcatcacactagtggctccggcgagggcagaggaagtctactaacctgcggagatgtggaagaaaatcctggcccacatatgaccgagtacaagcccacggtgcgcctcgccacccgcgacgacgtccccagggccgtacgcaccctcgccgccgcgttcgccgactaccccgccacgcgccacaccgtcgatccggaccgccacatcgagcgggtcaccgagctgcaagaactcttcctcacgcgcgtcgggctcgacatcggcaaggtgtgggtcgcggacgacggcgccgcggtggcggtctggaccacgccggagagcgtcgaagcgggggcggtgttcgccgagatcggcccgcgcatggccgagttgagcggttcccggctggccgcgcagcaacagatggaaggcctcctggcgccgcaccggcccaaggagcccgcgtggttcctggccaccgtcggcgtctcgcccgaccaccagggcaagggtctgggcagcgccgtcgtgctccccggagtggaggcggccgagcgcgccggggtgcccgccttcctggagacctccgcgccccgcaacctccccttctacgagcggctcggcttcaccgtcaccgccgacgtcgaggtgcccgaaggaccgcgcacctggtgcatgacccgcaagcccggtgcctga

SEQ ID NO: 5299 - DNA, 1704 bp, synthetic construct
  source 1..1704: mol_type = other DNA
atggccttaccagtgaccgccttgctcctgccgctggccttgctgctccacgccgccaggccggacatccagatgacacagagccctagcagcctgtctgccagcgtgggagacagagtgaccatcacatgcaaggccagcgaccacatcaacaactggctggcctggtatcagcagaagcctggacaggcccctaagctgctgatctacggcgctaccacactggaaacaggcgtgcccagcagattttctggcagcggctctggcaccgactacaccctgacaatatccagcctccagcctgaggacttcgccacctactactgtcagcagagctggaacaccccttggacattcggccagggcaccaagctggaaatcaagagaggcggaggcggaagtggaggcggaggatctggcggcggaggctctcaagttcagcttcaacagcctggcgctgagctggtcaaacctggcgcttctgtgaagatgagctgcaaagccagcggctacgccttcaacagctactggatcaactggatgaagcagaaacccggccagggactcgaatggatcggccaaatctatcccggcgacggcgacaccaactacaacggcaagttcaagggcagagccacactgaccgccgatacctctagcagcacagcctacatgcagctgagcagcctgaccagcgaagatagcgccgtgtacttctgtgcccggtccatcacaacagtcgtgggctgcgctatggactattggggccagggaacaagcgtgaccgtgtctagtacgcgtgcaagaaaattgacgcgctacaggaacctcgagggaggcagctggagccaccctcagtttgaaaaagactacaaagacgatgacgataagggatcagattacaaggatgatgatgacaaggggtcagattataaagacgacgatgataaagggagcgactacaaggacgacgatgacaaggcctggtcccatccccagttcgagaaacaccatcaccaccaccatcatcacactagtggctccggcgagggcagaggaagtctactaacctgcggagatgtggaagaaaatcctggcccacatatgaccgagtacaagcccacggtgcgcctcgccacccgcgacgacgtccccagggccgtacgcaccctcgccgccgcgttcgccgactaccccgccacgcgccacaccgtcgatccggaccgccacatcgagcgggtcaccgagctgcaagaactcttcctcacgcgcgtcgggctcgacatcggcaaggtgtgggtcgcggacgacggcgccgcggtggcggtctggaccacgccggagagcgtcgaagcgggggcggtgttcgccgagatcggcccgcgcatggccgagttgagcggttcccggctggccgcgcagcaacagatggaaggcctcctggcgccgcaccggcccaaggagcccgcgtggttcctggccaccgtcggcgtctcgcccgaccaccagggcaagggtctgggcagcgccgtcgtgctccccggagtggaggcggccgagcgcgccggggtgcccgccttcctggagacctccgcgccccgcaacctccccttctacgagcggctcggcttcaccgtcaccgccgacgtcgaggtgcccgaaggaccgcgcacctggtgcatgacccgcaagcccggtgcctga

SEQ ID NO: 5300 - DNA, 813 bp, synthetic construct
  source 1..813: mol_type = other DNA
atggccttaccagtgaccgccttgctcctgccgctggccttgctgctccacgccgccaggccggacatccagatgacacagagccctagcagcctgtctgccagcgtgggagacagagtgaccatcacatgcaaggccagcgaccacatcaacaactggctggcctggtatcagcagaagcctggacaggcccctaagctgctgatctacggcgctaccacactggaaacaggcgtgcccagcagattttctggcagcggctctggcaccgactacaccctgacaatatccagcctccagcctgaggacttcgccacctactactgtcagcagagctggaacaccccttggacattcggccagggcaccaagctggaaatcaagagaggcggaggcggaagtggaggcggaggatctggcggcggaggctctcaagttcagcttcaacagcctggcgctgagctggtcaaacctggcgcttctgtgaagatgagctgcaaagccagcggctacgccttcaacagctactggatcaactggatgaagcagaaacccggccagggactcgaatggatcggccaaatctatcccggcgacggcgacaccaactacaacggcaagttcaagggcagagccacactgaccgccgatacctctagcagcacagcctacatgcagctgagcagcctgaccagcgaagatagcgccgtgtacttctgtgcccggtccatcacaacagtcgtgggctgcgctatggactattggggccagggaacaagcgtgaccgtgtctagtacgcgtgcaagaaactga

SEQ ID NO: 5301 - DNA, 1704 bp, synthetic construct
  source 1..1704: mol_type = other DNA
atggccttaccagtgaccgccttgctcctgccgctggccttgctgctccacgccgccaggccggacatccagatgacacagagccctagcagcctgtctgccagcgtgggagacagagtgaccatcacatgcaaggccagcgaccacatcaacaactggctggcctggtatcagcagaagcctggacaggcccctaagctgctgatctacggcgctaccacactggaaacaggcgtgcccagcagattttctggcagcggctctggcaccgactacaccctgacaatatccagcctccagcctgaggacttcgccacctactactgtcagcagagctggaacaccccttggacattcggccagggcaccaagctggaaatcaagagaggcggaggcggaagtggaggcggaggatctggcggcggaggctctcaagttcagcttcaacagcctggcgctgagctggtcaaacctggcgcttctgtgaagatgagctgcaaagccagcggctacgccttcaacagctactggatcaactggatgaagcagaaacccggccagggactcgaatggatcggccaaatctatcccggcgacggcgacaccaactacaacggcaagttcaagggcagagccacactgaccgccgatacctctagcagcacagcctacatgcagctgagcagcctgaccagcgaagatagcgccgtgtacttctgtgcccggtccatcacaacagtcgtgggctgcgctatggactattggggccagggaacaagcgtgaccgtgtctagtacgcgtgcaagacgacgcgaccgctacaggaacctcgagggaggcagctggagccaccctcagtttgaaaaagactacaaagacgatgacgataagggatcagattacaaggatgatgatgacaaggggtcagattataaagacgacgatgataaagggagcgactacaaggacgacgatgacaaggcctggtcccatccccagttcgagaaacaccatcaccaccaccatcatcacactagtggctccggcgagggcagaggaagtctactaacctgcggagatgtggaagaaaatcctggcccacatatgaccgagtacaagcccacggtgcgcctcgccacccgcgacgacgtccccagggccgtacgcaccctcgccgccgcgttcgccgactaccccgccacgcgccacaccgtcgatccggaccgccacatcgagcgggtcaccgagctgcaagaactcttcctcacgcgcgtcgggctcgacatcggcaaggtgtgggtcgcggacgacggcgccgcggtggcggtctggaccacgccggagagcgtcgaagcgggggcggtgttcgccgagatcggcccgcgcatggccgagttgagcggttcccggctggccgcgcagcaacagatggaaggcctcctggcgccgcaccggcccaaggagcccgcgtggttcctggccaccgtcggcgtctcgcccgaccaccagggcaagggtctgggcagcgccgtcgtgctccccggagtggaggcggccgagcgcgccggggtgcccgccttcctggagacctccgcgccccgcaacctccccttctacgagcggctcggcttcaccgtcaccgccgacgtcgaggtgcccgaaggaccgcgcacctggtgcatgacccgcaagcccggtgcctga

SEQ ID NO: 5302 - DNA, 1704 bp, synthetic construct
  source 1..1704: mol_type = other DNA
atggccttaccagtgaccgccttgctcctgccgctggccttgctgctccacgccgccaggccggacatccagatgacacagagccctagcagcctgtctgccagcgtgggagacagagtgaccatcacatgcaaggccagcgaccacatcaacaactggctggcctggtatcagcagaagcctggacaggcccctaagctgctgatctacggcgctaccacactggaaacaggcgtgcccagcagattttctggcagcggctctggcaccgactacaccctgacaatatccagcctccagcctgaggacttcgccacctactactgtcagcagagctggaacaccccttggacattcggccagggcaccaagctggaaatcaagagaggcggaggcggaagtggaggcggaggatctggcggcggaggctctcaagttcagcttcaacagcctggcgctgagctggtcaaacctggcgcttctgtgaagatgagctgcaaagccagcggctacgccttcaacagctactggatcaactggatgaagcagaaacccggccagggactcgaatggatcggccaaatctatcccggcgacggcgacaccaactacaacggcaagttcaagggcagagccacactgaccgccgatacctctagcagcacagcctacatgcagctgagcagcctgaccagcgaagatagcgccgtgtacttctgtgcccggtccatcacaacagtcgtgggctgcgctatggactattggggccagggaacaagcgtgaccgtgtctagtacgcgtgcaagatgcggcggtcgctacaggaacctcgagggaggcagctggagccaccctcagtttgaaaaagactacaaagacgatgacgataagggatcagattacaaggatgatgatgacaaggggtcagattataaagacgacgatgataaagggagcgactacaaggacgacgatgacaaggcctggtcccatccccagttcgagaaacaccatcaccaccaccatcatcacactagtggctccggcgagggcagaggaagtctactaacctgcggagatgtggaagaaaatcctggcccacatatgaccgagtacaagcccacggtgcgcctcgccacccgcgacgacgtccccagggccgtacgcaccctcgccgccgcgttcgccgactaccccgccacgcgccacaccgtcgatccggaccgccacatcgagcgggtcaccgagctgcaagaactcttcctcacgcgcgtcgggctcgacatcggcaaggtgtgggtcgcggacgacggcgccgcggtggcggtctggaccacgccggagagcgtcgaagcgggggcggtgttcgccgagatcggcccgcgcatggccgagttgagcggttcccggctggccgcgcagcaacagatggaaggcctcctggcgccgcaccggcccaaggagcccgcgtggttcctggccaccgtcggcgtctcgcccgaccaccagggcaagggtctgggcagcgccgtcgtgctccccggagtggaggcggccgagcgcgccggggtgcccgccttcctggagacctccgcgccccgcaacctccccttctacgagcggctcggcttcaccgtcaccgccgacgtcgaggtgcccgaaggaccgcgcacctggtgcatgacccgcaagcccggtgcctga

SEQ ID NO: 5303 - DNA, 1704 bp, synthetic construct
  source 1..1704: mol_type = other DNA
atggccttaccagtgaccgccttgctcctgccgctggccttgctgctccacgccgccaggccggacatccagatgacacagagccctagcagcctgtctgccagcgtgggagacagagtgaccatcacatgcaaggccagcgaccacatcaacaactggctggcctggtatcagcagaagcctggacaggcccctaagctgctgatctacggcgctaccacactggaaacaggcgtgcccagcagattttctggcagcggctctggcaccgactacaccctgacaatatccagcctccagcctgaggacttcgccacctactactgtcagcagagctggaacaccccttggacattcggccagggcaccaagctggaaatcaagagaggcggaggcggaagtggaggcggaggatctggcggcggaggctctcaagttcagcttcaacagcctggcgctgagctggtcaaacctggcgcttctgtgaagatgagctgcaaagccagcggctacgccttcaacagctactggatcaactggatgaagcagaaacccggccagggactcgaatggatcggccaaatctatcccggcgacggcgacaccaactacaacggcaagttcaagggcagagccacactgaccgccgatacctctagcagcacagcctacatgcagctgagcagcctgaccagcgaagatagcgccgtgtacttctgtgcccggtccatcacaacagtcgtgggctgcgctatggactattggggccagggaacaagcgtgaccgtgtctagtacgcgtgcaagaaaatgctatcgctacaggaacctcgagggaggcagctggagccaccctcagtttgaaaaagactacaaagacgatgacgataagggatcagattacaaggatgatgatgacaaggggtcagattataaagacgacgatgataaagggagcgactacaaggacgacgatgacaaggcctggtcccatccccagttcgagaaacaccatcaccaccaccatcatcacactagtggctccggcgagggcagaggaagtctactaacctgcggagatgtggaagaaaatcctggcccacatatgaccgagtacaagcccacggtgcgcctcgccacccgcgacgacgtccccagggccgtacgcaccctcgccgccgcgttcgccgactaccccgccacgcgccacaccgtcgatccggaccgccacatcgagcgggtcaccgagctgcaagaactcttcctcacgcgcgtcgggctcgacatcggcaaggtgtgggtcgcggacgacggcgccgcggtggcggtctggaccacgccggagagcgtcgaagcgggggcggtgttcgccgagatcggcccgcgcatggccgagttgagcggttcccggctggccgcgcagcaacagatggaaggcctcctggcgccgcaccggcccaaggagcccgcgtggttcctggccaccgtcggcgtctcgcccgaccaccagggcaagggtctgggcagcgccgtcgtgctccccggagtggaggcggccgagcgcgccggggtgcccgccttcctggagacctccgcgccccgcaacctccccttctacgagcggctcggcttcaccgtcaccgccgacgtcgaggtgcccgaaggaccgcgcacctggtgcatgacccgcaagcccggtgcctga

SEQ ID NO: 5304 - DNA, 1704 bp, synthetic construct
  source 1..1704: mol_type = other DNA
atggccttaccagtgaccgccttgctcctgccgctggccttgctgctccacgccgccaggccggacatccagatgacacagagccctagcagcctgtctgccagcgtgggagacagagtgaccatcacatgcaaggccagcgaccacatcaacaactggctggcctggtatcagcagaagcctggacaggcccctaagctgctgatctacggcgctaccacactggaaacaggcgtgcccagcagattttctggcagcggctctggcaccgactacaccctgacaatatccagcctccagcctgaggacttcgccacctactactgtcagcagagctggaacaccccttggacattcggccagggcaccaagctggaaatcaagagaggcggaggcggaagtggaggcggaggatctggcggcggaggctctcaagttcagcttcaacagcctggcgctgagctggtcaaacctggcgcttctgtgaagatgagctgcaaagccagcggctacgccttcaacagctactggatcaactggatgaagcagaaacccggccagggactcgaatggatcggccaaatctatcccggcgacggcgacaccaactacaacggcaagttcaagggcagagccacactgaccgccgatacctctagcagcacagcctacatgcagctgagcagcctgaccagcgaagatagcgccgtgtacttctgtgcccggtccatcacaacagtcgtgggctgcgctatggactattggggccagggaacaagcgtgaccgtgtctagtacgcgtgcaagagtgtgctgtcgctacaggaacctcgagggaggcagctggagccaccctcagtttgaaaaagactacaaagacgatgacgataagggatcagattacaaggatgatgatgacaaggggtcagattataaagacgacgatgataaagggagcgactacaaggacgacgatgacaaggcctggtcccatccccagttcgagaaacaccatcaccaccaccatcatcacactagtggctccggcgagggcagaggaagtctactaacctgcggagatgtggaagaaaatcctggcccacatatgaccgagtacaagcccacggtgcgcctcgccacccgcgacgacgtccccagggccgtacgcaccctcgccgccgcgttcgccgactaccccgccacgcgccacaccgtcgatccggaccgccacatcgagcgggtcaccgagctgcaagaactcttcctcacgcgcgtcgggctcgacatcggcaaggtgtgggtcgcggacgacggcgccgcggtggcggtctggaccacgccggagagcgtcgaagcgggggcggtgttcgccgagatcggcccgcgcatggccgagttgagcggttcccggctggccgcgcagcaacagatggaaggcctcctggcgccgcaccggcccaaggagcccgcgtggttcctggccaccgtcggcgtctcgcccgaccaccagggcaagggtctgggcagcgccgtcgtgctccccggagtggaggcggccgagcgcgccggggtgcccgccttcctggagacctccgcgccccgcaacctccccttctacgagcggctcggcttcaccgtcaccgccgacgtcgaggtgcccgaaggaccgcgcacctggtgcatgacccgcaagcccggtgcctga

SEQ ID NO: 5305 - DNA, 816 bp, synthetic construct
  source 1..816: mol_type = other DNA
atggccttaccagtgaccgccttgctcctgccgctggccttgctgctccacgccgccaggccggacatccagatgacacagagccctagcagcctgtctgccagcgtgggagacagagtgaccatcacatgcaaggccagcgaccacatcaacaactggctggcctggtatcagcagaagcctggacaggcccctaagctgctgatctacggcgctaccacactggaaacaggcgtgcccagcagattttctggcagcggctctggcaccgactacaccctgacaatatccagcctccagcctgaggacttcgccacctactactgtcagcagagctggaacaccccttggacattcggccagggcaccaagctggaaatcaagagaggcggaggcggaagtggaggcggaggatctggcggcggaggctctcaagttcagcttcaacagcctggcgctgagctggtcaaacctggcgcttctgtgaagatgagctgcaaagccagcggctacgccttcaacagctactggatcaactggatgaagcagaaacccggccagggactcgaatggatcggccaaatctatcccggcgacggcgacaccaactacaacggcaagttcaagggcagagccacactgaccgccgatacctctagcagcacagcctacatgcagctgagcagcctgaccagcgaagatagcgccgtgtacttctgtgcccggtccatcacaacagtcgtgggctgcgctatggactattggggccagggaacaagcgtgaccgtgtctagtacgcgtgcaagacgatcgtaa

SEQ ID NO: 5306 - DNA, 1704 bp, synthetic construct
  source 1..1704: mol_type = other DNA
atggccttaccagtgaccgccttgctcctgccgctggccttgctgctccacgccgccaggccggacatccagatgacacagagccctagcagcctgtctgccagcgtgggagacagagtgaccatcacatgcaaggccagcgaccacatcaacaactggctggcctggtatcagcagaagcctggacaggcccctaagctgctgatctacggcgctaccacactggaaacaggcgtgcccagcagattttctggcagcggctctggcaccgactacaccctgacaatatccagcctccagcctgaggacttcgccacctactactgtcagcagagctggaacaccccttggacattcggccagggcaccaagctggaaatcaagagaggcggaggcggaagtggaggcggaggatctggcggcggaggctctcaagttcagcttcaacagcctggcgctgagctggtcaaacctggcgcttctgtgaagatgagctgcaaagccagcggctacgccttcaacagctactggatcaactggatgaagcagaaacccggccagggactcgaatggatcggccaaatctatcccggcgacggcgacaccaactacaacggcaagttcaagggcagagccacactgaccgccgatacctctagcagcacagcctacatgcagctgagcagcctgaccagcgaagatagcgccgtgtacttctgtgcccggtccatcacaacagtcgtgggctgcgctatggactattggggccagggaacaagcgtgaccgtgtctagtacgcgtgcaagacagcttctccgctacaggaacctcgagggaggcagctggagccaccctcagtttgaaaaagactacaaagacgatgacgataagggatcagattacaaggatgatgatgacaaggggtcagattataaagacgacgatgataaagggagcgactacaaggacgacgatgacaaggcctggtcccatccccagttcgagaaacaccatcaccaccaccatcatcacactagtggctccggcgagggcagaggaagtctactaacctgcggagatgtggaagaaaatcctggcccacatatgaccgagtacaagcccacggtgcgcctcgccacccgcgacgacgtccccagggccgtacgcaccctcgccgccgcgttcgccgactaccccgccacgcgccacaccgtcgatccggaccgccacatcgagcgggtcaccgagctgcaagaactcttcctcacgcgcgtcgggctcgacatcggcaaggtgtgggtcgcggacgacggcgccgcggtggcggtctggaccacgccggagagcgtcgaagcgggggcggtgttcgccgagatcggcccgcgcatggccgagttgagcggttcccggctggccgcgcagcaacagatggaaggcctcctggcgccgcaccggcccaaggagcccgcgtggttcctggccaccgtcggcgtctcgcccgaccaccagggcaagggtctgggcagcgccgtcgtgctccccggagtggaggcggccgagcgcgccggggtgcccgccttcctggagacctccgcgccccgcaacctccccttctacgagcggctcggcttcaccgtcaccgccgacgtcgaggtgcccgaaggaccgcgcacctggtgcatgacccgcaagcccggtgcctga

SEQ ID NO: 5307 - DNA, 1704 bp, synthetic construct
  source 1..1704: mol_type = other DNA
atggccttaccagtgaccgccttgctcctgccgctggccttgctgctccacgccgccaggccggacatccagatgacacagagccctagcagcctgtctgccagcgtgggagacagagtgaccatcacatgcaaggccagcgaccacatcaacaactggctggcctggtatcagcagaagcctggacaggcccctaagctgctgatctacggcgctaccacactggaaacaggcgtgcccagcagattttctggcagcggctctggcaccgactacaccctgacaatatccagcctccagcctgaggacttcgccacctactactgtcagcagagctggaacaccccttggacattcggccagggcaccaagctggaaatcaagagaggcggaggcggaagtggaggcggaggatctggcggcggaggctctcaagttcagcttcaacagcctggcgctgagctggtcaaacctggcgcttctgtgaagatgagctgcaaagccagcggctacgccttcaacagctactggatcaactggatgaagcagaaacccggccagggactcgaatggatcggccaaatctatcccggcgacggcgacaccaactacaacggcaagttcaagggcagagccacactgaccgccgatacctctagcagcacagcctacatgcagctgagcagcctgaccagcgaagatagcgccgtgtacttctgtgcccggtccatcacaacagtcgtgggctgcgctatggactattggggccagggaacaagcgtgaccgtgtctagtacgcgtgcaagaaaaaggtctcgctacaggaacctcgagggaggcagctggagccaccctcagtttgaaaaggactacaaagacgatgacgataagggatcagattacaaggatgatgatgacaaggggtcagattataaagacgacgatgataaagggagcgactacaaggacgacgatgacaaggcctggtcccatccccagttcgagaaacaccatcaccaccaccatcatcacactagtggctccggcgagggcagaggaagtctactaacctgcggagatgtggaagaaaatcctggcccacatatgaccgagtacaagcccacggtgcgcctcgccacccgcgacgacgtccccagggccgtacgcaccctcgccgccgcgttcgccgactaccccgccacgcgccacaccgtcgatccggaccgccacatcgagcgggtcaccgagctgcaagaactcttcctcacgcgcgtcgggctcgacatcggcaaggtgtgggtcgcggacgacggcgccgcggtggcggtctggaccacgccggagagcgtcgaagcgggggcggtgttcgccgagatcggcccgcgcatggccgagttgagcggttcccggctggccgcgcagcaacagatggaaggcctcctggcgccgcaccggcccaaggagcccgcgtggttcctggccaccgtcggcgtctcgcccgaccaccagggcaagggtctgggcagcgccgtcgtgctccccggagtggaggcggccgagcgcgccggggtgcccgccttcctggagacctccgcgccccgcaacctccccttctacgagcggctcggcttcaccgtcaccgccgacgtcgaggtgcccgaaggaccgcgcacctggtgcatgacccgcaagcccggtgcctga

SEQ ID NO: 5308 - DNA, 1704 bp, synthetic construct
  source 1..1704: mol_type = other DNA
atggccttaccagtgaccgccttgctcctgccgctggccttgctgctccacgccgccaggccggacatccagatgacacagagccctagcagcctgtctgccagcgtgggagacagagtgaccatcacatgcaaggccagcgaccacatcaacaactggctggcctggtatcagcagaagcctggacaggcccctaagctgctgatctacggcgctaccacactggaaacaggcgtgcccagcagattttctggcagcggctctggcaccgactacaccctgacaatatccagcctccagcctgaggacttcgccacctactactgtcagcagagctggaacaccccttggacattcggccagggcaccaagctggaaatcaagagaggcggaggcggaagtggaggcggaggatctggcggcggaggctctcaagttcagcttcaacagcctggcgctgagctggtcaaacctggcgcttctgtgaagatgagctgcaaagccagcggctacgccttcaacagctactggatcaactggatgaagcagaaacccggccagggactcgaatggatcggccaaatctatcccggcgacggcgacaccaactacaacggcaagttcaagggcagagccacactgaccgccgatacctctagcagcacagcctacatgcagctgagcagcctgaccagcgaagatagcgccgtgtacttctgtgcccggtccatcacaacagtcgtgggctgcgctatggactattggggccagggaacaagcgtgaccgtgtctagtacgcgtgcaagagccggttcgcgctacaggaacctcgagggaggcagctggagccaccctcagtttgaaaaagactacaaagacgatgacgataagggatcagattacaaggatgatgatgacaaggggtcagattataaagacgacgatgataaagggagcgactacaaggacgacgatgacaaggcctggtcccatccccagttcgagaaacaccatcaccaccaccatcatcacactagtggctccggcgagggcagaggaagtctactaacctgcggagatgtggaagaaaatcctggcccacatatgaccgagtacaagcccacggtgcgcctcgccacccgcgacgacgtccccagggccgtacgcaccctcgccgccgcgttcgccgactaccccgccacgcgccacaccgtcgatccggaccgccacatcgagcgggtcaccgagctgcaagaactcttcctcacgcgcgtcgggctcgacatcggcaaggtgtgggtcgcggacgacggcgccgcggtggcggtctggaccacgccggagagcgtcgaagcgggggcggtgttcgccgagatcggcccgcgcatggccgagttgagcggttcccggctggccgcgcagcaacagatggaaggcctcctggcgccgcaccggcccaaggagcccgcgtggttcctggccaccgtcggcgtctcgcccgaccaccagggcaagggtctgggcagcgccgtcgtgctccccggagtggaggcggccgagcgcgccggggtgcccgccttcctggagacctccgcgccccgcaacctccccttctacgagcggctcggcttcaccgtcaccgccgacgtcgaggtgcccgaaggaccgcgcacctggtgcatgacccgcaagcccggtgcctga

SEQ ID NO: 5309 - DNA, 1704 bp, synthetic construct
  source 1..1704: mol_type = other DNA
atggccttaccagtgaccgccttgctcctgccgctggccttgctgctccacgccgccaggccggacatccagatgacacagagccctagcagcctgtctgccagcgtgggagacagagtgaccatcacatgcaaggccagcgaccacatcaacaactggctggcctggtatcagcagaagcctggacaggcccctaagctgctgatctacggcgctaccacactggaaacaggcgtgcccagcagattttctggcagcggctctggcaccgactacaccctgacaatatccagcctccagcctgaggacttcgccacctactactgtcagcagagctggaacaccccttggacattcggccagggcaccaagctggaaatcaagagaggcggaggcggaagtggaggcggaggatctggcggcggaggctctcaagttcagcttcaacagcctggcgctgagctggtcaaacctggcgcttctgtgaagatgagctgcaaagccagcggctacgccttcaacagctactggatcaactggatgaagcagaaacccggccagggactcgaatggatcggccaaatctatcccggcgacggcgacaccaactacaacggcaagttcaagggcagagccacactgaccgccgatacctctagcagcacagcctacatgcagctgagcagcctgaccagcgaagatagcgccgtgtacttctgtgcccggtccatcacaacagtcgtgggctgcgctatggactattggggccagggaacaagcgtgaccgtgtctagtacgcgtgcaagaacgaaatgtcgctacaggaacctcgagggaggcagctggagccaccctcagtttgaaaaagactacaaagacgatgacgataagggatcagattacaaggatgatgatgacaaggggtcagattataaagacgacgatgataaagggagcgactacaaggacgacgatgacaaggcctggtcccatccccagttcgagaaacaccatcaccaccaccatcatcacactagtggctccggcgagggcagaggaagtctactaacctgcggagatgtggaagaaaatcctggcccacatatgaccgagtacaagcccacggtgcgcctcgccacccgcgacgacgtccccagggccgtacgcaccctcgccgccgcgttcgccgactaccccgccacgcgccacaccgtcgatccggaccgccacatcgagcgggtcaccgagctgcaagaactcttcctcacgcgcgtcgggctcgacatcggcaaggtgtgggtcgcggacgacggcgccgcggtggcggtctggaccacgccggagagcgtcgaagcgggggcggtgttcgccgagatcggcccgcgcatggccgagttgagcggttcccggctggccgcgcagcaacagatggaaggcctcctggcgccgcaccggcccaaggagcccgcgtggttcctggccaccgtcggcgtctcgcccgaccaccagggcaagggtctgggcagcgccgtcgtgctccccggagtggaggcggccgagcgcgccggggtgcccgccttcctggagacctccgcgccccgcaacctccccttctacgagcggctcggcttcaccgtcaccgccgacgtcgaggtgcccgaaggaccgcgcacctggtgcatgacccgcaagcccggtgcctga

SEQ ID NO: 5310 - DNA, 1698 bp, synthetic construct
  source 1..1698: mol_type = other DNA
atggccttaccagtgaccgccttgctcctgccgctggccttgctgctccacgccgccaggccggacatccagatgacacagagccctagcagcctgtctgccagcgtgggagacagagtgaccatcacatgcaaggccagcgaccacatcaacaactggctggcctggtatcagcagaagcctggacaggcccctaagctgctgatctacggcgctaccacactggaaacaggcgtgcccagcagattttctggcagcggctctggcaccgactacaccctgacaatatccagcctccagcctgaggacttcgccacctactactgtcagcagagctggaacaccccttggacattcggccagggcaccaagctggaaatcaagagaggcggaggcggaagtggaggcggaggatctggcggcggaggctctcaagttcagcttcaacagcctggcgctgagctggtcaaacctggcgcttctgtgaagatgagctgcaaagccagcggctacgccttcaacagctactggatcaactggatgaagcagaaacccggccagggactcgaatggatcggccaaatctatcccggcgacggcgacaccaactacaacggcaagttcaagggcagagccacactgaccgccgatacctctagcagcacagcctacatgcagctgagcagcctgaccagcgaagatagcgccgtgtacttctgtgcccggtccatcacaacagtcgtgggctgcgctatggactattggggccagggaacaagcgtgaccgtgtctagtacgcgtagaagtgaagtacgctacaggctcgagggaggcagctggagccaccctcagtttgaaaaagactacaaagacgatgacgataagggatcagattacaaggatgatgatgacaaggggtcagattataaagacgacgatgataaagggagcgactacaaggacgacgatgacaaggcctggtcccatccccagttcgagaaacaccatcaccaccaccatcatcacactagtggctccggcgagggcagaggaagtctactaacctgcggagatgtggaagaaaatcctggcccacatatgaccgagtacaagcccacggtgcgcctcgccacccgcgacgacgtccccagggccgtacgcaccctcgccgccgcgttcgccgactaccccgccacgcgccacaccgtcgatccggaccgccacatcgagcgggtcaccgagctgcaagaactcttcctcacgcgcgtcgggctcgacatcggcaaggtgtgggtcgcggacgacggcgccgcggtggcggtctggaccacgccggagagcgtcgaagcgggggcggtgttcgccgagatcggcccgcgcatggccgagttgagcggttcccggctggccgcgcagcaacagatggaaggcctcctggcgccgcaccggcccaaggagcccgcgtggttcctggccaccgtcggcgtctcgcccgaccaccagggcaagggtctgggcagcgccgtcgtgctccccggagtggaggcggccgagcgcgccggggtgcccgccttcctggagacctccgcgccccgcaacctccccttctacgagcggctcggcttcaccgtcaccgccgacgtcgaggtgcccgaaggaccgcgcacctggtgcatgacccgcaagcccggtgcctga

SEQ ID NO: 5311 - DNA, 1698 bp, synthetic construct; identical to SEQ ID NO: 5285
  source 1..1698: mol_type = other DNA

SEQ ID NO: 5312 - DNA, 1698 bp, synthetic construct; identical to SEQ ID NO: 5288
  source 1..1698: mol_type = other DNA

SEQ ID NO: 5313 - DNA, 1698 bp, synthetic construct
  source 1..1698: mol_type = other DNA
atggccttaccagtgaccgccttgctcctgccgctggccttgctgctccacgccgccaggccggacatccagatgacacagagccctagcagcctgtctgccagcgtgggagacagagtgaccatcacatgcaaggccagcgaccacatcaacaactggctggcctggtatcagcagaagcctggacaggcccctaagctgctgatctacggcgctaccacactggaaacaggcgtgcccagcagattttctggcagcggctctggcaccgactacaccctgacaatatccagcctccagcctgaggacttcgccacctactactgtcagcagagctggaacaccccttggacattcggccagggcaccaagctggaaatcaagagaggcggaggcggaagtggaggcggaggatctggcggcggaggctctcaagttcagcttcaacagcctggcgctgagctggtcaaacctggcgcttctgtgaagatgagctgcaaagccagcggctacgccttcaacagctactggatcaactggatgaagcagaaacccggccagggactcgaatggatcggccaaatctatcccggcgacggcgacaccaactacaacggcaagttcaagggcagagccacactgaccgccgatacctctagcagcacagcctacatgcagctgagcagcctgaccagcgaagatagcgccgtgtacttctgtgcccggtccatcacaacagtcgtgggctgcgctatggactattggggccagggaacaagcgtgaccgtgtctagtacgcgtagaagtgaaggccgctacaggctcgagggaggcagctggagccaccctcagtttgaaaaagactacaaagacgatgacgataagggatcagattacaaggatgatgatgacaaggggtcagattataaagacgacgatgataaagggagcgactacaaggacgacgatgacaaggcctggtcccatccccagttcgagaaacaccatcaccaccaccatcatcacactagtggctccggcgagggcagaggaagtctactaacctgcggagatgtggaagaaaatcctggcccacatatgaccgagtacaagcccacggtgcgcctcgccacccgcgacgacgtccccagggccgtacgcaccctcgccgccgcgttcgccgactaccccgccacgcgccacaccgtcgatccggaccgccacatcgagcgggtcaccgagctgcaagaactcttcctcacgcgcgtcgggctcgacatcggcaaggtgtgggtcgcggacgacggcgccgcggtggcggtctggaccacgccggagagcgtcgaagcgggggcggtgttcgccgagatcggcccgcgcatggccgagttgagcggttcccggctggccgcgcagcaacagatggaaggcctcctggcgccgcaccggcccaaggagcccgcgtggttcctggccaccgtcggcgtctcgcccgaccaccagggcaagggtctgggcagcgccgtcgtgctccccggagtggaggcggccgagcgcgccggggtgcccgccttcctggagacctccgcgccccgcaacctccccttctacgagcggctcggcttcaccgtcaccgccgacgtcgaggtgcccgaaggaccgcgcacctggtgcatgacccgcaagcccggtgcctga

SEQ ID NO: 5314 - DNA, 1698 bp, synthetic construct
  source 1..1698: mol_type = other DNA
atggccttaccagtgaccgccttgctcctgccgctggccttgctgctccacgccgccaggccggacatccagatgacacagagccctagcagcctgtctgccagcgtgggagacagagtgaccatcacatgcaaggccagcgaccacatcaacaactggctggcctggtatcagcagaagcctggacaggcccctaagctgctgatctacggcgctaccacactggaaacaggcgtgcccagcagattttctggcagcggctctggcaccgactacaccctgacaatatccagcctccagcctgaggacttcgccacctactactgtcagcagagctggaacaccccttggacattcggccagggcaccaagctggaaatcaagagaggcggaggcggaagtggaggcggaggatctggcggcggaggctctcaagttcagcttcaacagcctggcgctgagctggtcaaacctggcgcttctgtgaagatgagctgcaaagccagcggctacgccttcaacagctactggatcaactggatgaagcagaaacccggccagggactcgaatggatcggccaaatctatcccggcgacggcgacaccaactacaacggcaagttcaagggcagagccacactgaccgccgatacctctagcagcacagcctacatgcagctgagcagcctgaccagcgaagatagcgccgtgtacttctgtgcccggtccatcacaacagtcgtgggctgcgctatggactattggggccagggaacaagcgtgaccgtgtctagtacgcgtagaagtgaaatgcgctacaggctcgagggaggcagctggagccaccctcagtttgaaaaagactacaaagacgatgacgataagggatcagattacaaggatgatgatgacaaggggtcagattataaagacgacgatgataaagggagcgactacaaggacgacgatgacaaggcctggtcccatccccagttcgagaaacaccatcaccaccaccatcatcacactagtggctccggcgagggcagaggaagtctactaacctgcggagatgtggaagaaaatcctggcccacatatgaccgagtacaagcccacggtgcgcctcgccacccgcgacgacgtccccagggccgtacgcaccctcgccgccgcgttcgccgactaccccgccacgcgccacaccgtcgatccggaccgccacatcgagcgggtcaccgagctgcaagaactcttcctcacgcgcgtcgggctcgacatcggcaaggtgtgggtcgcggacgacggcgccgcggtggcggtctggaccacgccggagagcgtcgaagcgggggcggtgttcgccgagatcggcccgcgcatggccgagttgagcggttcccggctggccgcgcagcaacagatggaaggcctcctggcgccgcaccggcccaaggagcccgcgtggttcctggccaccgtcggcgtctcgcccgaccaccagggcaagggtctgggcagcgccgtcgtgctccccggagtggaggcggccgagcgcgccggggtgcccgccttcctggagacctccgcgccccgcaacctccccttctacgagcggctcggcttcaccgtcaccgccgacgtcgaggtgcccgaaggaccgcgcacctggtgcatgacccgcaagcccggtgcctga

SEQ ID NO: 5315 - DNA, 1860 bp, synthetic construct
  source 1..1860: mol_type = other DNA
atggccttaccagtgaccgccttgctcctgccgctggccttgctgctccacgccgccaggccggacatccagatgacacagagccctagcagcctgtctgccagcgtgggagacagagtgaccatcacatgcaaggccagcgaccacatcaacaactggctggcctggtatcagcagaagcctggacaggcccctaagctgctgatctacggcgctaccacactggaaacaggcgtgcccagcagattttctggcagcggctctggcaccgactacaccctgacaatatccagcctccagcctgaggacttcgccacctactactgtcagcagagctggaacaccccttggacattcggccagggcaccaagctggaaatcaagagaggcggaggcggaagtggaggcggaggatctggcggcggaggctctcaagttcagcttcaacagcctggcgctgagctggtcaaacctggcgcttctgtgaagatgagctgcaaagccagcggctacgccttcaacagctactggatcaactggatgaagcagaaacccggccagggactcgaatggatcggccaaatctatcccggcgacggcgacaccaactacaacggcaagttcaagggcagagccacactgaccgccgatacctctagcagcacagcctacatgcagctgagcagcctgaccagcgaagatagcgccgtgtacttctgtgcccggtccatcacaacagtcgtgggctgcgctatggactattggggccagggaacaagcgtgaccgtgtctagtacgcgtagaagtgaaggccgctacaggaaccctaaggggtcagcctgcaaaggcggcggaggaagcgaacttcctacacagggcaccttcagcaacgtgtccaccaatgtgtccccagccaagcctaccaccaccgcctgcgcacgcagcgaggacaggtataggaaccccaaaggaagtgcgtgcaagctcgagggaggcagctggagccaccctcagtttgaaaaagactacaaagacgatgacgataagggatcagattacaaggatgatgatgacaaggggtcagattataaagacgacgatgataaagggagcgactacaaggacgacgatgacaaggcctggtcccatccccagttcgagaaacaccatcaccaccaccatcatcacactagtggctccggcgagggcagaggaagtctactaacctgcggagatgtggaagaaaatcctggcccacatatgaccgagtacaagcccacggtgcgcctcgccacccgcgacgacgtccccagggccgtacgcaccctcgccgccgcgttcgccgactaccccgccacgcgccacaccgtcgatccggaccgccacatcgagcgggtcaccgagctgcaagaactcttcctcacgcgcgtcgggctcgacatcggcaaggtgtgggtcgcggacgacggcgccgcggtggcggtctggaccacgccggagagcgtcgaagcgggggcggtgttcgccgagatcggcccgcgcatggccgagttgagcggttcccggctggccgcgcagcaacagatggaaggcctcctggcgccgcaccggcccaaggagcccgcgtggttcctggccaccgtcggcgtctcgcccgaccaccagggcaagggtctgggcagcgccgtcgtgctccccggagtggaggcggccgagcgcgccggggtgcccgccttcctggagacctccgcgccccgcaacctccccttctacgagcggctcggcttcaccgtcaccgccgacgtcgaggtgcccgaaggaccgcgcacctggtgcatgacccgcaagcccggtgcctga

SEQ ID NO: 5316 - DNA, 1698 bp, synthetic construct
  source 1..1698: mol_type = other DNA
atggccttaccagtgaccgccttgctcctgccgctggccttgctgctccacgccgccaggccggacatccagatgacacagagccctagcagcctgtctgccagcgtgggagacagagtgaccatcacatgcaaggccagcgaccacatcaacaactggctggcctggtatcagcagaagcctggacaggcccctaagctgctgatctacggcgctaccacactggaaacaggcgtgcccagcagattttctggcagcggctctggcaccgactacaccctgacaatatccagcctccagcctgaggacttcgccacctactactgtcagcagagctggaacaccccttggacattcggccagggcaccaagctggaaatcaagagaggcggaggcggaagtggaggcggaggatctggcggcggaggctctcaagttcagcttcaacagcctggcgctgagctggtcaaacctggcgcttctgtgaagatgagctgcaaagccagcggctacgccttcaacagctactggatcaactggatgaagcagaaacccggccagggactcgaatggatcggccaaatctatcccggcgacggcgacaccaactacaacggcaagttcaagggcagagccacactgaccgccgatacctctagcagcacagcctacatgcagctgagcagcctgaccagcgaagatagcgccgtgtacttctgtgcccggtccatcacaacagtcgtgggctgcgctatggactattggggccagggaacaagcgtgaccgtgtctagtacgcgtagaagtgaaagtcgctacaggctcgagggaggcagctggagccaccctcagtttgaaaaagactacaaagacgatgacgataagggatcagattacaaggatgatgatgacaaggggtcagattataaagacgacgatgataaagggagcgactacaaggacgacgatgacaaggcctggtcccatccccagttcgagaaacaccatcaccaccaccatcatcacactagtggctccggcgagggcagaggaagtctactaacctgcggagatgtggaagaaaatcctggcccacatatgaccgagtacaagcccacggtgcgcctcgccacccgcgacgacgtccccagggccgtacgcaccctcgccgccgcgttcgccgactaccccgccacgcgccacaccgtcgatccggaccgccacatcgagcgggtcaccgagctgcaagaactcttcctcacgcgcgtcgggctcgacatcggcaaggtgtgggtcgcggacgacggcgccgcggtggcggtctggaccacgccggagagcgtcgaagcgggggcggtgttcgccgagatcggcccgcgcatggccgagttgagcggttcccggctggccgcgcagcaacagatggaaggcctcctggcgccgcaccggcccaaggagcccgcgtggttcctggccaccgtcggcgtctcgcccgaccaccagggcaagggtctgggcagcgccgtcgtgctccccggagtggaggcggccgagcgcgccggggtgcccgccttcctggagacctccgcgccccgcaacctccccttctacgagcggctcggcttcaccgtcaccgccgacgtcgaggtgcccgaaggaccgcgcacctggtgcatgacccgcaagcccggtgcctga

SEQ ID NO: 5317 - DNA, 1701 bp, synthetic construct
  source 1..1701: mol_type = other DNA
atggccttaccagtgaccgccttgctcctgccgctggccttgctgctccacgccgccaggccggacatccagatgacacagagccctagcagcctgtctgccagcgtgggagacagagtgaccatcacatgcaaggccagcgaccacatcaacaactggctggcctggtatcagcagaagcctggacaggcccctaagctgctgatctacggcgctaccacactggaaacaggcgtgcccagcagattttctggcagcggctctggcaccgactacaccctgacaatatccagcctccagcctgaggacttcgccacctactactgtcagcagagctggaacaccccttggacattcggccagggcaccaagctggaaatcaagagaggcggaggcggaagtggaggcggaggatctggcggcggaggctctcaagttcagcttcaacagcctggcgctgagctggtcaaacctggcgcttctgtgaagatgagctgcaaagccagcggctacgccttcaacagctactggatcaactggatgaagcagaaacccggccagggactcgaatggatcggccaaatctatcccggcgacggcgacaccaactacaacggcaagttcaagggcagagccacactgaccgccgatacctctagcagcacagcctacatgcagctgagcagcctgaccagcgaagatagcgccgtgtacttctgtgcccggtccatcacaacagtcgtgggctgcgctatggactattggggccagggaacaagcgtgaccgtgtctagtacgcgtagaccggaagatcgctacaggaacctcgagggaggcagctggagccaccctcagtttgaaaaagactacaaagacgatgacgataagggatcagattacaaggatgatgatgacaaggggtcagattataaagacgacgatgataaagggagcgactacaaggacgacgatgacaaggcctggtcccatccccagttcgagaaacaccatcaccaccaccatcatcacactagtggctccggcgagggcagaggaagtctactaacctgcggagatgtggaagaaaatcctggcccacatatgaccgagtacaagcccacggtgcgcctcgccacccgcgacgacgtccccagggccgtacgcaccctcgccgccgcgttcgccgactaccccgccacgcgccacaccgtcgatccggaccgccacatcgagcgggtcaccgagctgcaagaactcttcctcacgcgcgtcgggctcgacatcggcaaggtgtgggtcgcggacgacggcgccgcggtggcggtctggaccacgccggagagcgtcgaagcgggggcggtgttcgccgagatcggcccgcgcatggccgagttgagcggttcccggctggccgcgcagcaacagatggaaggcctcctggcgccgcaccggcccaaggagcccgcgtggttcctggccaccgtcggcgtctcgcccgaccaccagggcaagggtctgggcagcgccgtcgtgctccccggagtggaggcggccgagcgcgccggggtgcccgccttcctggagacctccgcgccccgcaacctccccttctacgagcggctcggcttcaccgtcaccgccgacgtcgaggtgcccgaaggaccgcgcacctggtgcatgacccgcaagcccggtgcctga

SEQ ID NO: 5318 - DNA, 1701 bp, synthetic construct
  source 1..1701: mol_type = other DNA
atggccttaccagtgaccgccttgctcctgccgctggccttgctgctccacgccgccaggccggacatccagatgacacagagccctagcagcctgtctgccagcgtgggagacagagtgaccatcacatgcaaggccagcgaccacatcaacaactggctggcctggtatcagcagaagcctggacaggcccctaagctgctgatctacggcgctaccacactggaaacaggcgtgcccagcagattttctggcagcggctctggcaccgactacaccctgacaatatccagcctccagcctgaggacttcgccacctactactgtcagcagagctggaacaccccttggacattcggccagggcaccaagctggaaatcaagagaggcggaggcggaagtggaggcggaggatctggcggcggaggctctcaagttcagcttcaacagcctggcgctgagctggtcaaacctggcgcttctgtgaagatgagctgcaaagccagcggctacgccttcaacagctactggatcaactggatgaagcagaaacccggccagggactcgaatggatcggccaaatctatcccggcgacggcgacaccaactacaacggcaagttcaagggcagagccacactgaccgccgatacctctagcagcacagcctacatgcagctgagcagcctgaccagcgaagatagcgccgtgtacttctgtgcccggtccatcacaacagtcgtgggctgcgctatggactattggggccagggaacaagcgtgaccgtgtctagtacgcgtagaggggaagatcgctacaggaacctcgagggaggcagctggagccaccctcagtttgaaaaagactacaaagacgatgacgataagggatcagattacaaggatgatgatgacaaggggtcagattataaagacgacgatgataaagggagcgactacaaggacgacgatgacaaggcctggtcccatccccagttcgagaaacaccatcaccaccaccatcatcacactagtggctccggcgagggcagaggaagtctactaacctgcggagatgtggaagaaaatcctggcccacatatgaccgagtacaagcccacggtgcgcctcgccacccgcgacgacgtccccagggccgtacgcaccctcgccgccgcgttcgccgactaccccgccacgcgccacaccgtcgatccggaccgccacatcgagcgggtcaccgagctgcaagaactcttcctcacgcgcgtcgggctcgacatcggcaaggtgtgggtcgcggacgacggcgccgcggtggcggtctggaccacgccggagagcgtcgaagcgggggcggtgttcgccgagatcggcccgcgcatggccgagttgagcggttcccggctggccgcgcagcaacagatggaaggcctcctggcgccgcaccggcccaaggagcccgcgtggttcctggccaccgtcggcgtctcgcccgaccaccagggcaagggtctgggcagcgccgtcgtgctccccggagtggaggcggccgagcgcgccggggtgcccgccttcctggagacctccgcgccccgcaacctccccttctacgagcggctcggcttcaccgtcaccgccgacgtcgaggtgcccgaaggaccgcgcacctggtgcatgacccgcaagcccggtgcctga

SEQ ID NO: 5319 - DNA, 1701 bp, synthetic construct
  source 1..1701: mol_type = other DNA
atggccttaccagtgaccgccttgctcctgccgctggccttgctgctccacgccgccaggccggacatccagatgacacagagccctagcagcctgtctgccagcgtgggagacagagtgaccatcacatgcaaggccagcgaccacatcaacaactggctggcctggtatcagcagaagcctggacaggcccctaagctgctgatctacggcgctaccacactggaaacaggcgtgcccagcagattttctggcagcggctctggcaccgactacaccctgacaatatccagcctccagcctgaggacttcgccacctactactgtcagcagagctggaacaccccttggacattcggccagggcaccaagctggaaatcaagagaggcggaggcggaagtggaggcggaggatctggcggcggaggctctcaagttcagcttcaacagcctggcgctgagctggtcaaacctggcgcttctgtgaagatgagctgcaaagccagcggctacgccttcaacagctactggatcaactggatgaagcagaaacccggccagggactcgaatggatcggccaaatctatcccggcgacggcgacaccaactacaacggcaagttcaagggcagagccacactgaccgccgatacctctagcagcacagcctacatgcagctgagcagcctgaccagcgaagatagcgccgtgtacttctgtgcccggtccatcacaacagtcgtgggctgcgctatggactattggggccagggaacaagcgtgaccgtgtctagtacgcgtagaattgaagatcgctacaggaacctcgagggaggcagctggagccaccctcagtttgaaaaagactacaaagacgatgacgataagggatcagattacaaggatgatgatgacaaggggtcagattataaagacgacgatgataaagggagcgactacaaggacgacgatgacaaggcctggtcccatccccagttcgagaaacaccatcaccaccaccatcatcacactagtggctccggcgagggcagaggaagtctactaacctgcggagatgtggaagaaaatcctggcccacatatgaccgagtacaagcccacggtgcgcctcgccacccgcgacgacgtccccagggccgtacgcaccctcgccgccgcgttcgccgactaccccgccacgcgccacaccgtcgatccggaccgccacatcgagcgggtcaccgagctgcaagaactcttcctcacgcgcgtcgggctcgacatcggcaaggtgtgggtcgcggacgacggcgccgcggtggcggtctggaccacgccggagagcgtcgaagcgggggcggtgttcgccgagatcggcccgcgcatggccgagttgagcggttcccggctggccgcgcagcaacagatggaaggcctcctggcgccgcaccggcccaaggagcccgcgtggttcctggccaccgtcggcgtctcgcccgaccaccagggcaagggtctgggcagcgccgtcgtgctccccggagtggaggcggccgagcgcgccggggtgcccgccttcctggagacctccgcgccccgcaacctccccttctacgagcggctcggcttcaccgtcaccgccgacgtcgaggtgcccgaaggaccgcgcacctggtgcatgacccgcaagcccggtgcctga

SEQ ID NO: 5320 - DNA, 1701 bp, synthetic construct
  source 1..1701: mol_type = other DNA
atggccttaccagtgaccgccttgctcctgccgctggccttgctgctccacgccgccaggccggacatccagatgacacagagccctagcagcctgtctgccagcgtgggagacagagtgaccatcacatgcaaggccagcgaccacatcaacaactggctggcctggtatcagcagaagcctggacaggcccctaagctgctgatctacggcgctaccacactggaaacaggcgtgcccagcagattttctggcagcggctctggcaccgactacaccctgacaatatccagcctccagcctgaggacttcgccacctactactgtcagcagagctggaacaccccttggacattcggccagggcaccaagctggaaatcaagagaggcggaggcggaagtggaggcggaggatctggcggcggaggctctcaagttcagcttcaacagcctggcgctgagctggtcaaacctggcgcttctgtgaagatgagctgcaaagccagcggctacgccttcaacagctactggatcaactggatgaagcagaaacccggccagggactcgaatggatcggccaaatctatcccggcgacggcgacaccaactacaacggcaagttcaagggcagagccacactgaccgccgatacctctagcagcacagcctacatgcagctgagcagcctgaccagcgaagatagcgccgtgtacttctgtgcccggtccatcacaacagtcgtgggctgcgctatggactattggggccagggaacaagcgtgaccgtgtctagtacgcgtagacgagaagatcgctacaggaacctcgagggaggcagctggagccaccctcagtttgaaaaagactacaaagacgatgacgataagggatcagattacaaggatgatgatgacaaggggtcagattataaagacgacgatgataaagggagcgactacaaggacgacgatgacaaggcctggtcccatccccagttcgagaaacaccatcaccaccaccatcatcacactagtggctccggcgagggcagaggaagtctactaacctgcggagatgtggaagaaaatcctggcccacatatgaccgagtacaagcccacggtgcgcctcgccacccgcgacgacgtccccagggccgtacgcaccctcgccgccgcgttcgccgactaccccgccacgcgccacaccgtcgatccggaccgccacatcgagcgggtcaccgagctgcaagaactcttcctcacgcgcgtcgggctcgacatcggcaaggtgtgggtcgcggacgacggcgccgcggtggcggtctggaccacgccggagagcgtcgaagcgggggcggtgttcgccgagatcggcccgcgcatggccgagttgagcggttcccggctggccgcgcagcaacagatggaaggcctcctggcgccgcaccggcccaaggagcccgcgtggttcctggccaccgtcggcgtctcgcccgaccaccagggcaagggtctgggcagcgccgtcgtgctccccggagtggaggcggccgagcgcgccggggtgcccgccttcctggagacctccgcgccccgcaacctccccttctacgagcggctcggcttcaccgtcaccgccgacgtcgaggtgcccgaaggaccgcgcacctggtgcatgacccgcaagcccggtgcctga

SEQ ID NO: 5321 - DNA, 1701 bp, synthetic construct
  source 1..1701: mol_type = other DNA
atggccttaccagtgaccgccttgctcctgccgctggccttgctgctccacgccgccaggccggacatccagatgacacagagccctagcagcctgtctgccagcgtgggagacagagtgaccatcacatgcaaggccagcgaccacatcaacaactggctggcctggtatcagcagaagcctggacaggcccctaagctgctgatctacggcgctaccacactggaaacaggcgtgcccagcagattttctggcagcggctctggcaccgactacaccctgacaatatccagcctccagcctgaggacttcgccacctactactgtcagcagagctggaacaccccttggacattcggccagggcaccaagctggaaatcaagagaggcggaggcggaagtggaggcggaggatctggcggcggaggctctcaagttcagcttcaacagcctggcgctgagctggtcaaacctggcgcttctgtgaagatgagctgcaaagccagcggctacgccttcaacagctactggatcaactggatgaagcagaaacccggccagggactcgaatggatcggccaaatctatcccggcgacggcgacaccaactacaacggcaagttcaagggcagagccacactgaccgccgatacctctagcagcacagcctacatgcagctgagcagcctgaccagcgaagatagcgccgtgtacttctgtgcccggtccatcacaacagtcgtgggctgcgctatggactattggggccagggaacaagcgtgaccgtgtctagtacgcgtagagtcgaagatcgctacaggaacctcgagggaggcagctggagccaccctcagtttgaaaaagactacaaagacgatgacgataagggatcagattacaaggatgatgatgacaaggggtcagattataaagacgacgatgataaagggagcgactacaaggacgacgatgacaaggcctggtcccatccccagttcgagaaacaccatcaccaccaccatcatcacactagtggctccggcgagggcagaggaagtctactaacctgcggagatgtggaagaaaatcctggcccacatatgaccgagtacaagcccacggtgcgcctcgccacccgcgacgacgtccccagggccgtacgcaccctcgccgccgcgttcgccgactaccccgccacgcgccacaccgtcgatccggaccgccacatcgagcgggtcaccgagctgcaagaactcttcctcacgcgcgtcgggctcgacatcggcaaggtgtgggtcgcggacgacggcgccgcggtggcggtctggaccacgccggagagcgtcgaagcgggggcggtgttcgccgagatcggcccgcgcatggccgagttgagcggttcccggctggccgcgcagcaacagatggaaggcctcctggcgccgcaccggcccaaggagcccgcgtggttcctggccaccgtcggcgtctcgcccgaccaccagggcaagggtctgggcagcgccgtcgtgctccccggagtggaggcggccgagcgcgccggggtgcccgccttcctggagacctccgcgccccgcaacctccccttctacgagcggctcggcttcaccgtcaccgccgacgtcgaggtgcccgaaggaccgcgcacctggtgcatgacccgcaagcccggtgcctga

SEQ ID NO: 5322 - DNA, 1701 bp, synthetic construct
  source 1..1701: mol_type = other DNA
atggccttaccagtgaccgccttgctcctgccgctggccttgctgctccacgccgccaggccggacatccagatgacacagagccctagcagcctgtctgccagcgtgggagacagagtgaccatcacatgcaaggccagcgaccacatcaacaactggctggcctggtatcagcagaagcctggacaggcccctaagctgctgatctacggcgctaccacactggaaacaggcgtgcccagcagattttctggcagcggctctggcaccgactacaccctgacaatatccagcctccagcctgaggacttcgccacctactactgtcagcagagctggaacaccccttggacattcggccagggcaccaagctggaaatcaagagaggcggaggcggaagtggaggcggaggatctggcggcggaggctctcaagttcagcttcaacagcctggcgctgagctggtcaaacctggcgcttctgtgaagatgagctgcaaagccagcggctacgccttcaacagctactggatcaactggatgaagcagaaacccggccagggactcgaatggatcggccaaatctatcccggcgacggcgacaccaactacaacggcaagttcaagggcagagccacactgaccgccgatacctctagcagcacagcctacatgcagctgagcagcctgaccagcgaagatagcgccgtgtacttctgtgcccggtccatcacaacagtcgtgggctgcgctatggactattggggccagggaacaagcgtgaccgtgtctagtacgcgtagattagaagatcgctacaggaacctcgagggaggcagctggagccaccctcagtttgaaaaagactacaaagacgatgacgataagggatcagattacaaggatgatgatgacaaggggtcagattataaagacgacgatgataaagggagcgactacaaggacgacgatgacaaggcctggtcccatccccagttcgagaaacaccatcaccaccaccatcatcacactagtggctccggcgagggcagaggaagtctactaacctgcggagatgtggaagaaaatcctggcccacatatgaccgagtacaagcccacggtgcgcctcgccacccgcgacgacgtccccagggccgtacgcaccctcgccgccgcgttcgccgactaccccgccacgcgccacaccgtcgatccggaccgccacatcgagcgggtcaccgagctgcaagaactcttcctcacgcgcgtcgggctcgacatcggcaaggtgtgggtcgcggacgacggcgccgcggtggcggtctggaccacgccggagagcgtcgaagcgggggcggtgttcgccgagatcggcccgcgcatggccgagttgagcggttcccggctggccgcgcagcaacagatggaaggcctcctggcgccgcaccggcccaaggagcccgcgtggttcctggccaccgtcggcgtctcgcccgaccaccagggcaagggtctgggcagcgccgtcgtgctccccggagtggaggcggccgagcgcgccggggtgcccgccttcctggagacctccgcgccccgcaacctccccttctacgagcggctcggcttcaccgtcaccgccgacgtcgaggtgcccgaaggaccgcgcacctggtgcatgacccgcaagcccggtgcctga

SEQ ID NO: 5323 - DNA, 807 bp, synthetic construct
  source 1..807: mol_type = other DNA
atggccttaccagtgaccgccttgctcctgccgctggccttgctgctccacgccgccaggccggacatccagatgacacagagccctagcagcctgtctgccagcgtgggagacagagtgaccatcacatgcaaggccagcgaccacatcaacaactggctggcctggtatcagcagaagcctggacaggcccctaagctgctgatctacggcgctaccacactggaaacaggcgtgcccagcagattttctggcagcggctctggcaccgactacaccctgacaatatccagcctccagcctgaggacttcgccacctactactgtcagcagagctggaacaccccttggacattcggccagggcaccaagctggaaatcaagagaggcggaggcggaagtggaggcggaggatctggcggcggaggctctcaagttcagcttcaacagcctggcgctgagctggtcaaacctggcgcttctgtgaagatgagctgcaaagccagcggctacgccttcaacagctactggatcaactggatgaagcagaaacccggccagggactcgaatggatcggccaaatctatcccggcgacggcgacaccaactacaacggcaagttcaagggcagagccacactgaccgccgatacctctagcagcacagcctacatgcagctgagcagcctgaccagcgaagatagcgccgtgtacttctgtgcccggtccatcacaacagtcgtgggctgcgctatggactattggggccagggaacaagcgtgaccgtgtctagtacgcgtagatga

SEQ ID NO: 5324 - DNA, 1701 bp, synthetic construct
  source 1..1701: mol_type = other DNA
atggccttaccagtgaccgccttgctcctgccgctggccttgctgctccacgccgccaggccggacatccagatgacacagagccctagcagcctgtctgccagcgtgggagacagagtgaccatcacatgcaaggccagcgaccacatcaacaactggctggcctggtatcagcagaagcctggacaggcccctaagctgctgatctacggcgctaccacactggaaacaggcgtgcccagcagattttctggcagcggctctggcaccgactacaccctgacaatatccagcctccagcctgaggacttcgccacctactactgtcagcagagctggaacaccccttggacattcggccagggcaccaagctggaaatcaagagaggcggaggcggaagtggaggcggaggatctggcggcggaggctctcaagttcagcttcaacagcctggcgctgagctggtcaaacctggcgcttctgtgaagatgagctgcaaagccagcggctacgccttcaacagctactggatcaactggatgaagcagaaacccggccagggactcgaatggatcggccaaatctatcccggcgacggcgacaccaactacaacggcaagttcaagggcagagccacactgaccgccgatacctctagcagcacagcctacatgcagctgagcagcctgaccagcgaagatagcgccgtgtacttctgtgcccggtccatcacaacagtcgtgggctgcgctatggactattggggccagggaacaagcgtgaccgtgtctagtacgcgtagaacggaagatcgctacaggaacctcgagggaggcagctggagccaccctcagtttgaaaaagactacaaagacgatgacgataagggatcagattacaaggatgatgatgacaaggggtcagattataaagacgacgatgataaagggagcgactacaaggacgacgatgacaaggcctggtcccatccccagttcgagaaacaccatcaccaccaccatcatcacactagtggctccggcgagggcagaggaagtctactaacctgcggagatgtggaagaaaatcctggcccacatatgaccgagtacaagcccacggtgcgcctcgccacccgcgacgacgtccccagggccgtacgcaccctcgccgccgcgttcgccgactaccccgccacgcgccacaccgtcgatccggaccgccacatcgagcgggtcaccgagctgcaagaactcttcctcacgcgcgtcgggctcgacatcggcaaggtgtgggtcgcggacgacggcgccgcggtggcggtctggaccacgccggagagcgtcgaagcgggggcggtgttcgccgagatcggcccgcgcatggccgagttgagcggttcccggctggccgcgcagcaacagatggaaggcctcctggcgccgcaccggcccaaggagcccgcgtggttcctggccaccgtcggcgtctcgcccgaccaccagggcaagggtctgggcagcgccgtcgtgctccccggagtggaggcggccgagcgcgccggggtgcccgccttcctggagacctccgcgccccgcaacctccccttctacgagcggctcggcttcaccgtcaccgccgacgtcgaggtgcccgaaggaccgcgcacctggtgcatgacccgcaagcccggtgcctga

SEQ ID NO: 5325 - DNA, 1704 bp, synthetic construct
  source 1..1704: mol_type = other DNA
atggccttaccagtgaccgccttgctcctgccgctggccttgctgctccacgccgccaggccggacatccagatgacacagagccctagcagcctgtctgccagcgtgggagacagagtgaccatcacatgcaaggccagcgaccacatcaacaactggctggcctggtatcagcagaagcctggacaggcccctaagctgctgatctacggcgctaccacactggaaacaggcgtgcccagcagattttctggcagcggctctggcaccgactacaccctgacaatatccagcctccagcctgaggacttcgccacctactactgtcagcagagctggaacaccccttggacattcggccagggcaccaagctggaaatcaagagaggcggaggcggaagtggaggcggaggatctggcggcggaggctctcaagttcagcttcaacagcctggcgctgagctggtcaaacctggcgcttctgtgaagatgagctgcaaagccagcggctacgccttcaacagctactggatcaactggatgaagcagaaacccggccagggactcgaatggatcggccaaatctatcccggcgacggcgacaccaactacaacggcaagttcaagggcagagccacactgaccgccgatacctctagcagcacagcctacatgcagctgagcagcctgaccagcgaagatagcgccgtgtacttctgtgcccggtccatcacaacagtcgtgggctgcgctatggactattggggccagggaacaagcgtgaccgtgtctagtacgcgtgcattgagtgaagatcgctacaggaacctcgagggaggcagctggagccaccctcagtttgaaaaagactacaaagacgatgacgataagggatcagattacaaggatgatgatgacaaggggtcagattataaagacgacgatgataaagggagcgactacaaggacgacgatgacaaggcctggtcccatccccagttcgagaaacaccatcaccaccaccatcatcacactagtggctccggcgagggcagaggaagtctactaacctgcggagatgtggaagaaaatcctggcccacatatgaccgagtacaagcccacggtgcgcctcgccacccgcgacgacgtccccagggccgtacgcaccctcgccgccgcgttcgccgactaccccgccacgcgccacaccgtcgatccggaccgccacatcgagcgggtcaccgagctgcaagaactcttcctcacgcgcgtcgggctcgacatcggcaaggtgtgggtcgcggacgacggcgccgcggtggcggtctggaccacgccggagagcgtcgaagcgggggcggtgttcgccgagatcggcccgcgcatggccgagttgagcggttcccggctggccgcgcagcaacagatggaaggcctcctggcgccgcaccggcccaaggagcccgcgtggttcctggccaccgtcggcgtctcgcccgaccaccagggcaagggtctgggcagcgccgtcgtgctccccggagtggaggcggccgagcgcgccggggtgcccgccttcctggagacctccgcgccccgcaacctccccttctacgagcggctcggcttcaccgtcaccgccgacgtcgaggtgcccgaaggaccgcgcacctggtgcatgacccgcaagcccggtgcctga

SEQ ID NO: 5326 - DNA, 1704 bp, synthetic construct
  source 1..1704: mol_type = other DNA
atggccttaccagtgaccgccttgctcctgccgctggccttgctgctccacgccgccaggccggacatccagatgacacagagccctagcagcctgtctgccagcgtgggagacagagtgaccatcacatgcaaggccagcgaccacatcaacaactggctggcctggtatcagcagaagcctggacaggcccctaagctgctgatctacggcgctaccacactggaaacaggcgtgcccagcagattttctggcagcggctctggcaccgactacaccctgacaatatccagcctccagcctgaggacttcgccacctactactgtcagcagagctggaacaccccttggacattcggccagggcaccaagctggaaatcaagagaggcggaggcggaagtggaggcggaggatctggcggcggaggctctcaagttcagcttcaacagcctggcgctgagctggtcaaacctggcgcttctgtgaagatgagctgcaaagccagcggctacgccttcaacagctactggatcaactggatgaagcagaaacccggccagggactcgaatggatcggccaaatctatcccggcgacggcgacaccaactacaacggcaagttcaagggcagagccacactgaccgccgatacctctagcagcacagcctacatgcagctgagcagcctgaccagcgaagatagcgccgtgtacttctgtgcccggtccatcacaacagtcgtgggctgcgctatggactattggggccagggaacaagcgtgaccgtgtctagtacgcgtgcacttagtgaagatcgctacaggaacctcgagggaggcagctggagccaccctcagtttgaaaaagactacaaagacgatgacgataagggatcagattacaaggatgatgatgacaaggggtcagattataaagacgacgatgataaagggagcgactacaaggacgacgatgacaaggcctggtcccatccccagttcgagaaacaccatcaccaccaccatcatcacactagtggctccggcgagggcagaggaagtctactaacctgcggagatgtggaagaaaatcctggcccacatatgaccgagtacaagcccacggtgcgcctcgccacccgcgacgacgtccccagggccgtacgcaccctcgccgccgcgttcgccgactaccccgccacgcgccacaccgtcgatccggaccgccacatcgagcgggtcaccgagctgcaagaactcttcctcacgcgcgtcgggctcgacatcggcaaggtgtgggtcgcggacgacggcgccgcggtggcggtctggaccacgccggagagcgtcgaagcgggggcggtgttcgccgagatcggcccgcgcatggccgagttgagcggttcccggctggccgcgcagcaacagatggaaggcctcctggcgccgcaccggcccaaggagcccgcgtggttcctggccaccgtcggcgtctcgcccgaccaccagggcaagggtctgggcagcgccgtcgtgctccccggagtggaggcggccgagcgcgccggggtgcccgccttcctggagacctccgcgccccgcaacctccccttctacgagcggctcggcttcaccgtcaccgccgacgtcgaggtgcccgaaggaccgcgcacctggtgcatgacccgcaagcccggtgcctga

SEQ ID NO: 5327 - DNA, 1704 bp, synthetic construct
  source 1..1704: mol_type = other DNA
atggccttaccagtgaccgccttgctcctgccgctggccttgctgctccacgccgccaggccggacatccagatgacacagagccctagcagcctgtctgccagcgtgggagacagagtgaccatcacatgcaaggccagcgaccacatcaacaactggctggcctggtatcagcagaagcctggacaggcccctaagctgctgatctacggcgctaccacactggaaacaggcgtgcccagcagattttctggcagcggctctggcaccgactacaccctgacaatatccagcctccagcctgaggacttcgccacctactactgtcagcagagctggaacaccccttggacattcggccagggcaccaagctggaaatcaagagaggcggaggcggaagtggaggcggaggatctggcggcggaggctctcaagttcagcttcaacagcctggcgctgagctggtcaaacctggcgcttctgtgaagatgagctgcaaagccagcggctacgccttcaacagctactggatcaactggatgaagcagaaacccggccagggactcgaatggatcggccaaatctatcccggcgacggcgacaccaactacaacggcaagttcaagggcagagccacactgaccgccgatacctctagcagcacagcctacatgcagctgagcagcctgaccagcgaagatagcgccgtgtacttctgtgcccggtccatcacaacagtcgtgggctgcgctatggactattggggccagggaacaagcgtgaccgtgtctagtacgcgtgcaattagtgaagatcgctacaggaacctcgagggaggcagctggagccaccctcagtttgaaaaagactacaaagacgatgacgataagggatcagattacaaggatgatgatgacaaggggtcagattataaagacgacgatgataaagggagcgactacaaggacgacgatgacaaggcctggtcccatccccagttcgagaaacaccatcaccaccaccatcatcacactagtggctccggcgagggcagaggaagtctactaacctgcggagatgtggaagaaaatcctggcccacatatgaccgagtacaagcccacggtgcgcctcgccacccgcgacgacgtccccagggccgtacgcaccctcgccgccgcgttcgccgactaccccgccacgcgccacaccgtcgatccggaccgccacatcgagcgggtcaccgagctgcaagaactcttcctcacgcgcgtcgggctcgacatcggcaaggtgtgggtcgcggacgacggcgccgcggtggcggtctggaccacgccggagagcgtcgaagcgggggcggtgttcgccgagatcggcccgcgcatggccgagttgagcggttcccggctggccgcgcagcaacagatggaaggcctcctggcgccgcaccggcccaaggagcccgcgtggttcctggccaccgtcggcgtctcgcccgaccaccagggcaagggtctgggcagcgccgtcgtgctccccggagtggaggcggccgagcgcgccggggtgcccgccttcctggagacctccgcgccccgcaacctccccttctacgagcggctcggcttcaccgtcaccgccgacgtcgaggtgcccgaaggaccgcgcacctggtgcatgacccgcaagcccggtgcctga

SEQ ID NO: 5328 - DNA, 1704 bp, synthetic construct
  source 1..1704: mol_type = other DNA
atggccttaccagtgaccgccttgctcctgccgctggccttgctgctccacgccgccaggccggacatccagatgacacagagccctagcagcctgtctgccagcgtgggagacagagtgaccatcacatgcaaggccagcgaccacatcaacaactggctggcctggtatcagcagaagcctggacaggcccctaagctgctgatctacggcgctaccacactggaaacaggcgtgcccagcagattttctggcagcggctctggcaccgactacaccctgacaatatccagcctccagcctgaggacttcgccacctactactgtcagcagagctggaacaccccttggacattcggccagggcaccaagctggaaatcaagagaggcggaggcggaagtggaggcggaggatctggcggcggaggctctcaagttcagcttcaacagcctggcgctgagctggtcaaacctggcgcttctgtgaagatgagctgcaaagccagcggctacgccttcaacagctactggatcaactggatgaagcagaaacccggccagggactcgaatggatcggccaaatctatcccggcgacggcgacaccaactacaacggcaagttcaagggcagagccacactgaccgccgatacctctagcagcacagcctacatgcagctgagcagcctgaccagcgaagatagcgccgtgtacttctgtgcccggtccatcacaacagtcgtgggctgcgctatggactattggggccagggaacaagcgtgaccgtgtctagtacgcgtgcatcgagtgaagatcgctacaggaacctcgagggaggcagctggagccaccctcagtttgaaaaagactacaaagacgatgacgataagggatcagattacaaggatgatgatgacaaggggtcagattataaagacgacgatgataaagggagcgactacaaggacgacgatgacaaggcctggtcccatccccagttcgagaaacaccatcaccaccaccatcatcacactagtggctccggcgagggcagaggaagtctactaacctgcggagatgtggaagaaaatcctggcccacatatgaccgagtacaagcccacggtgcgcctcgccacccgcgacgacgtccccagggccgtacgcaccctcgccgccgcgttcgccgactaccccgccacgcgccacaccgtcgatccggaccgccacatcgagcgggtcaccgagctgcaagaactcttcctcacgcgcgtcgggctcgacatcggcaaggtgtgggtcgcggacgacggcgccgcggtggcggtctggaccacgccggagagcgtcgaagcgggggcggtgttcgccgagatcggcccgcgcatggccgagttgagcggttcccggctggccgcgcagcaacagatggaaggcctcctggcgccgcaccggcccaaggagcccgcgtggttcctggccaccgtcggcgtctcgcccgaccaccagggcaagggtctgggcagcgccgtcgtgctccccggagtggaggcggccgagcgcgccggggtgcccgccttcctggagacctccgcgccccgcaacctccccttctacgagcggctcggcttcaccgtcaccgccgacgtcgaggtgcccgaaggaccgcgcacctggtgcatgacccgcaagcccggtgcctga

SEQ ID NO: 5329 - DNA, 1704 bp, synthetic construct
  source 1..1704: mol_type = other DNA
atggccttaccagtgaccgccttgctcctgccgctggccttgctgctccacgccgccaggccggacatccagatgacacagagccctagcagcctgtctgccagcgtgggagacagagtgaccatcacatgcaaggccagcgaccacatcaacaactggctggcctggtatcagcagaagcctggacaggcccctaagctgctgatctacggcgctaccacactggaaacaggcgtgcccagcagattttctggcagcggctctggcaccgactacaccctgacaatatccagcctccagcctgaggacttcgccacctactactgtcagcagagctggaacaccccttggacattcggccagggcaccaagctggaaatcaagagaggcggaggcggaagtggaggcggaggatctggcggcggaggctctcaagttcagcttcaacagcctggcgctgagctggtcaaacctggcgcttctgtgaagatgagctgcaaagccagcggctacgccttcaacagctactggatcaactggatgaagcagaaacccggccagggactcgaatggatcggccaaatctatcccggcgacggcgacaccaactacaacggcaagttcaagggcagagccacactgaccgccgatacctctagcagcacagcctacatgcagctgagcagcctgaccagcgaagatagcgccgtgtacttctgtgcccggtccatcacaacagtcgtgggctgcgctatggactattggggccagggaacaagcgtgaccgtgtctagtacgcgtgcaccgagtgaagatcgctacaggaacctcgagggaggcagctggagccaccctcagtttgaaaaagactacaaagacgatgacgataagggatcagattacaaggatgatgatgacaaggggtcagattataaagacgacgatgataaagggagcgactacaaggacgacgatgacaaggcctggtcccatccccagttcgagaaacaccatcaccaccaccatcatcacactagtggctccggcgagggcagaggaagtctactaacctgcggagatgtggaagaaaatcctggcccacatatgaccgagtacaagcccacggtgcgcctcgccacccgcgacgacgtccccagggccgtacgcaccctcgccgccgcgttcgccgactaccccgccacgcgccacaccgtcgatccggaccgccacatcgagcgggtcaccgagctgcaagaactcttcctcacgcgcgtcgggctcgacatcggcaaggtgtgggtcgcggacgacggcgccgcggtggcggtctggaccacgccggagagcgtcgaagcgggggcggtgttcgccgagatcggcccgcgcatggccgagttgagcggttcccggctggccgcgcagcaacagatggaaggcctcctggcgccgcaccggcccaaggagcccgcgtggttcctggccaccgtcggcgtctcgcccgaccaccagggcaagggtctgggcagcgccgtcgtgctccccggagtggaggcggccgagcgcgccggggtgcccgccttcctggagacctccgcgccccgcaacctccccttctacgagcggctcggcttcaccgtcaccgccgacgtcgaggtgcccgaaggaccgcgcacctggtgcatgacccgcaagcccggtgcctga

SEQ ID NO: 5330 - DNA, 1704 bp, synthetic construct
  source 1..1704: mol_type = other DNA
atggccttaccagtgaccgccttgctcctgccgctggccttgctgctccacgccgccaggccggacatccagatgacacagagccctagcagcctgtctgccagcgtgggagacagagtgaccatcacatgcaaggccagcgaccacatcaacaactggctggcctggtatcagcagaagcctggacaggcccctaagctgctgatctacggcgctaccacactggaaacaggcgtgcccagcagattttctggcagcggctctggcaccgactacaccctgacaatatccagcctccagcctgaggacttcgccacctactactgtcagcagagctggaacaccccttggacattcggccagggcaccaagctggaaatcaagagaggcggaggcggaagtggaggcggaggatctggcggcggaggctctcaagttcagcttcaacagcctggcgctgagctggtcaaacctggcgcttctgtgaagatgagctgcaaagccagcggctacgccttcaacagctactggatcaactggatgaagcagaaacccggccagggactcgaatggatcggccaaatctatcccggcgacggcgacaccaactacaacggcaagttcaagggcagagccacactgaccgccgatacctctagcagcacagcctacatgcagctgagcagcctgaccagcgaagatagcgccgtgtacttctgtgcccggtccatcacaacagtcgtgggctgcgctatggactattggggccagggaacaagcgtgaccgtgtctagtacgcgtgcatttagtgaagatcgctacaggaacctcgagggaggcagctggagccaccctcagtttgaaaaagactacaaagacgatgacgataagggatcagattacaaggatgatgatgacaaggggtcagattataaagacgacgatgataaagggagcgactacaaggacgacgatgacaaggcctggtcccatccccagttcgagaaacaccatcaccaccaccatcatcacactagtggctccggcgagggcagaggaagtctactaacctgcggagatgtggaagaaaatcctggcccacatatgaccgagtacaagcccacggtgcgcctcgccacccgcgacgacgtccccagggccgtacgcaccctcgccgccgcgttcgccgactaccccgccacgcgccacaccgtcgatccggaccgccacatcgagcgggtcaccgagctgcaagaactcttcctcacgcgcgtcgggctcgacatcggcaaggtgtgggtcgcggacgacggcgccgcggtggcggtctggaccacgccggagagcgtcgaagcgggggcggtgttcgccgagatcggcccgcgcatggccgagttgagcggttcccggctggccgcgcagcaacagatggaaggcctcctggcgccgcaccggcccaaggagcccgcgtggttcctggccaccgtcggcgtctcgcccgaccaccagggcaagggtctgggcagcgccgtcgtgctccccggagtggaggcggccgagcgcgccggggtgcccgccttcctggagacctccgcgccccgcaacctccccttctacgagcggctcggcttcaccgtcaccgccgacgtcgaggtgcccgaaggaccgcgcacctggtgcatgacccgcaagcccggtgcctga

SEQ ID NO: 5331 - DNA, 1704 bp, synthetic construct
  source 1..1704: mol_type = other DNA
atggccttaccagtgaccgccttgctcctgccgctggccttgctgctccacgccgccaggccggacatccagatgacacagagccctagcagcctgtctgccagcgtgggagacagagtgaccatcacatgcaaggccagcgaccacatcaacaactggctggcctggtatcagcagaagcctggacaggcccctaagctgctgatctacggcgctaccacactggaaacaggcgtgcccagcagattttctggcagcggctctggcaccgactacaccctgacaatatccagcctccagcctgaggacttcgccacctactactgtcagcagagctggaacaccccttggacattcggccagggcaccaagctggaaatcaagagaggcggaggcggaagtggaggcggaggatctggcggcggaggctctcaagttcagcttcaacagcctggcgctgagctggtcaaacctggcgcttctgtgaagatgagctgcaaagccagcggctacgccttcaacagctactggatcaactggatgaagcagaaacccggccagggactcgaatggatcggccaaatctatcccggcgacggcgacaccaactacaacggcaagttcaagggcagagccacactgaccgccgatacctctagcagcacagcctacatgcagctgagcagcctgaccagcgaagatagcgccgtgtacttctgtgcccggtccatcacaacagtcgtgggctgcgctatggactattggggccagggaacaagcgtgaccgtgtctagtacgcgtgcacgcagtgaagatcgctacaggaacctcgagggaggcagctggagccaccctcagtttgaaaaagactacaaagacgatgacgataagggatcagattacaaggatgatgatgacaaggggtcagattataaagacgacgatgataaagggagcgactacaaggacgacgatgacaaggcctggtcccatccccagttcgagaaacaccatcaccaccaccatcatcacactagtggctccggcgagggcagaggaagtctactaacctgcggagatgtggaagaaaatcctggcccacatatgaccgagtacaagcccacggtgcgcctcgccacccgcgacgacgtccccagggccgtacgcaccctcgccgccgcgttcgccgactaccccgccacgcgccacaccgtcgatccggaccgccacatcgagcgggtcaccgagctgcaagaactcttcctcacgcgcgtcgggctcgacatcggcaaggtgtgggtcgcggacgacggcgccgcggtggcggtctggaccacgccggagagcgtcgaagcgggggcggtgttcgccgagatcggcccgcgcatggccgagttgagcggttcccggctggccgcgcagcaacagatggaaggcctcctggcgccgcaccggcccaaggagcccgcgtggttcctggccaccgtcggcgtctcgcccgaccaccagggcaagggtctgggcagcgccgtcgtgctccccggagtggaggcggccgagcgcgccggggtgcccgccttcctggagacctccgcgccccgcaacctccccttctacgagcggctcggcttcaccgtcaccgccgacgtcgaggtgcccgaaggaccgcgcacctggtgcatgacccgcaagcccggtgcctga

SEQ ID NO: 5332 - DNA, 1704 bp, synthetic construct; identical to SEQ ID NO: 5325
  source 1..1704: mol_type = other DNA

SEQ ID NO: 5333 - DNA, 1701 bp, synthetic construct; identical to SEQ ID NO: 5214
  source 1..1701: mol_type = other DNA

SEQ ID NO: 5334 - DNA, 1701 bp, synthetic construct
  source 1..1701: mol_type = other DNA
atggccttaccagtgaccgccttgctcctgccgctggccttgctgctccacgccgccaggccggacatccagatgacacagagccctagcagcctgtctgccagcgtgggagacagagtgaccatcacatgcaaggccagcgaccacatcaacaactggctggcctggtatcagcagaagcctggacaggcccctaagctgctgatctacggcgctaccacactggaaacaggcgtgcccagcagattttctggcagcggctctggcaccgactacaccctgacaatatccagcctccagcctgaggacttcgccacctactactgtcagcagagctggaacaccccttggacattcggccagggcaccaagctggaaatcaagagaggcggaggcggaagtggaggcggaggatctggcggcggaggctctcaagttcagcttcaacagcctggcgctgagctggtcaaacctggcgcttctgtgaagatgagctgcaaagccagcggctacgccttcaacagctactggatcaactggatgaagcagaaacccggccagggactcgaatggatcggccaaatctatcccggcgacggcgacaccaactacaacggcaagttcaagggcagagccacactgaccgccgatacctctagcagcacagcctacatgcagctgagcagcctgaccagcgaagatagcgccgtgtacttctgtgcccggtccatcacaacagtcgtgggctgcgctatggactattggggccagggaacaagcgtgaccgtgtctagtacgcgtagaagtgtcgatcgctacaggaacctcgagggaggcagctggagccaccctcagtttgaaaaagactacaaagacgatgacgataagggatcagattacaaggatgatgatgacaaggggtcagattataaagacgacgatgataaagggagcgactacaaggacgacgatgacaaggcctggtcccatccccagttcgagaaacaccatcaccaccaccatcatcacactagtggctccggcgagggcagaggaagtctactaacctgcggagatgtggaagaaaatcctggcccacatatgaccgagtacaagcccacggtgcgcctcgccacccgcgacgacgtccccagggccgtacgcaccctcgccgccgcgttcgccgactaccccgccacgcgccacaccgtcgatccggaccgccacatcgagcgggtcaccgagctgcaagaactcttcctcacgcgcgtcgggctcgacatcggcaaggtgtgggtcgcggacgacggcgccgcggtggcggtctggaccacgccggagagcgtcgaagcgggggcggtgttcgccgagatcggcccgcgcatggccgagttgagcggttcccggctggccgcgcagcaacagatggaaggcctcctggcgccgcaccggcccaaggagcccgcgtggttcctggccaccgtcggcgtctcgcccgaccaccagggcaagggtctgggcagcgccgtcgtgctccccggagtggaggcggccgagcgcgccggggtgcccgccttcctggagacctccgcgccccgcaacctccccttctacgagcggctcggcttcaccgtcaccgccgacgtcgaggtgcccgaaggaccgcgcacctggtgcatgacccgcaagcccggtgcctga

SEQ ID NO: 5335 - DNA, 1701 bp, synthetic construct
  source 1..1701: mol_type = other DNA
atggccttaccagtgaccgccttgctcctgccgctggccttgctgctccacgccgccaggccggacatccagatgacacagagccctagcagcctgtctgccagcgtgggagacagagtgaccatcacatgcaaggccagcgaccacatcaacaactggctggcctggtatcagcagaagcctggacaggcccctaagctgctgatctacggcgctaccacactggaaacaggcgtgcccagcagattttctggcagcggctctggcaccgactacaccctgacaatatccagcctccagcctgaggacttcgccacctactactgtcagcagagctggaacaccccttggacattcggccagggcaccaagctggaaatcaagagaggcggaggcggaagtggaggcggaggatctggcggcggaggctctcaagttcagcttcaacagcctggcgctgagctggtcaaacctggcgcttctgtgaagatgagctgcaaagccagcggctacgccttcaacagctactggatcaactggatgaagcagaaacccggccagggactcgaatggatcggccaaatctatcccggcgacggcgacaccaactacaacggcaagttcaagggcagagccacactgaccgccgatacctctagcagcacagcctacatgcagctgagcagcctgaccagcgaagatagcgccgtgtacttctgtgcccggtccatcacaacagtcgtgggctgcgctatggactattggggccagggaacaagcgtgaccgtgtctagtacgcgtagaagtcatgatcgctacaggaacctcgagggaggcagctggagccaccctcagtttgaaaaagactacaaagacgatgacgataagggatcagattacaaggatgatgatgacaaggggtcagattataaagacgacgatgataaagggagcgactacaaggacgacgatgacaaggcctggtcccatccccagttcgagaaacaccatcaccaccaccatcatcacactagtggctccggcgagggcagaggaagtctactaacctgcggagatgtggaagaaaatcctggcccacatatgaccgagtacaagcccacggtgcgcctcgccacccgcgacgacgtccccagggccgtacgcaccctcgccgccgcgttcgccgactaccccgccacgcgccacaccgtcgatccggaccgccacatcgagcgggtcaccgagctgcaagaactcttcctcacgcgcgtcgggctcgacatcggcaaggtgtgggtcgcggacgacggcgccgcggtggcggtctggaccacgccggagagcgtcgaagcgggggcggtgttcgccgagatcggcccgcgcatggccgagttgagcggttcccggctggccgcgcagcaacagatggaaggcctcctggcgccgcaccggcccaaggagcccgcgtggttcctggccaccgtcggcgtctcgcccgaccaccagggcaagggtctgggcagcgccgtcgtgctccccggagtggaggcggccgagcgcgccggggtgcccgccttcctggagacctccgcgccccgcaacctccccttctacgagcggctcggcttcaccgtcaccgccgacgtcgaggtgcccgaaggaccgcgcacctggtgcatgacccgcaagcccggtgcctga

SEQ ID NO: 5336 - DNA, 1701 bp, synthetic construct
  source 1..1701: mol_type = other DNA
atggccttaccagtgaccgccttgctcctgccgctggccttgctgctccacgccgccaggccggacatccagatgacacagagccctagcagcctgtctgccagcgtgggagacagagtgaccatcacatgcaaggccagcgaccacatcaacaactggctggcctggtatcagcagaagcctggacaggcccctaagctgctgatctacggcgctaccacactggaaacaggcgtgcccagcagattttctggcagcggctctggcaccgactacaccctgacaatatccagcctccagcctgaggacttcgccacctactactgtcagcagagctggaacaccccttggacattcggccagggcaccaagctggaaatcaagagaggcggaggcggaagtggaggcggaggatctggcggcggaggctctcaagttcagcttcaacagcctggcgctgagctggtcaaacctggcgcttctgtgaagatgagctgcaaagccagcggctacgccttcaacagctactggatcaactggatgaagcagaaacccggccagggactcgaatggatcggccaaatctatcccggcgacggcgacaccaactacaacggcaagttcaagggcagagccacactgaccgccgatacctctagcagcacagcctacatgcagctgagcagcctgaccagcgaagatagcgccgtgtacttctgtgcccggtccatcacaacagtcgtgggctgcgctatggactattggggccagggaacaagcgtgaccgtgtctagtacgcgtagaagttccgatcgctacaggaacctcgagggaggcagctggagccaccctcagtttgaaaaagactacaaagacgatgacgataagggatcagattacaaggatgatgatgacaaggggtcagattataaagacgacgatgataaagggagcgactacaaggacgacgatgacaaggcctggtcccatccccagttcgagaaacaccatcaccaccaccatcatcacactagtggctccggcgagggcagaggaagtctactaacctgcggagatgtggaagaaaatcctggcccacatatgaccgagtacaagcccacggtgcgcctcgccacccgcgacgacgtccccagggccgtacgcaccctcgccgccgcgttcgccgactaccccgccacgcgccacaccgtcgatccggaccgccacatcgagcgggtcaccgagctgcaagaactcttcctcacgcgcgtcgggctcgacatcggcaaggtgtgggtcgcggacgacggcgccgcggtggcggtctggaccacgccggagagcgtcgaagcgggggcggtgttcgccgagatcggcccgcgcatggccgagttgagcggttcccggctggccgcgcagcaacagatggaaggcctcctggcgccgcaccggcccaaggagcccgcgtggttcctggccaccgtcggcgtctcgcccgaccaccagggcaagggtctgggcagcgccgtcgtgctccccggagtggaggcggccgagcgcgccggggtgcccgccttcctggagacctccgcgccccgcaacctccccttctacgagcggctcggcttcaccgtcaccgccgacgtcgaggtgcccgaaggaccgcgcacctggtgcatgacccgcaagcccggtgcctga

SEQ ID NO: 5337 - DNA, 1701 bp, synthetic construct
  source 1..1701: mol_type = other DNA
atggccttaccagtgaccgccttgctcctgccgctggccttgctgctccacgccgccaggccggacatccagatgacacagagccctagcagcctgtctgccagcgtgggagacagagtgaccatcacatgcaaggccagcgaccacatcaacaactggctggcctggtatcagcagaagcctggacaggcccctaagctgctgatctacggcgctaccacactggaaacaggcgtgcccagcagattttctggcagcggctctggcaccgactacaccctgacaatatccagcctccagcctgaggacttcgccacctactactgtcagcagagctggaacaccccttggacattcggccagggcaccaagctggaaatcaagagaggcggaggcggaagtggaggcggaggatctggcggcggaggctctcaagttcagcttcaacagcctggcgctgagctggtcaaacctggcgcttctgtgaagatgagctgcaaagccagcggctacgccttcaacagctactggatcaactggatgaagcagaaacccggccagggactcgaatggatcggccaaatctatcccggcgacggcgacaccaactacaacggcaagttcaagggcagagccacactgaccgccgatacctctagcagcacagcctacatgcagctgagcagcctgaccagcgaagatagcgccgtgtacttctgtgcccggtccatcacaacagtcgtgggctgcgctatggactattggggccagggaacaagcgtgaccgtgtctagtacgcgtagaagtgaattgcgctacaggaacctcgagggaggcagctggagccaccctcagtttgaaaaagactacaaagacgatgacgataagggatcagattacaaggatgatgatgacaaggggtcagattataaagacgacgatgataaagggagcgactacaaggacgacgatgacaaggcctggtcccatccccagttcgagaaacaccatcaccaccaccatcatcacactagtggctccggcgagggcagaggaagtctactaacctgcggagatgtggaagaaaatcctggcccacatatgaccgagtacaagcccacggtgcgcctcgccacccgcgacgacgtccccagggccgtacgcaccctcgccgccgcgttcgccgactaccccgccacgcgccacaccgtcgatccggaccgccacatcgagcgggtcaccgagctgcaagaactcttcctcacgcgcgtcgggctcgacatcggcaaggtgtgggtcgcggacgacggcgccgcggtggcggtctggaccacgccggagagcgtcgaagcgggggcggtgttcgccgagatcggcccgcgcatggccgagttgagcggttcccggctggccgcgcagcaacagatggaaggcctcctggcgccgcaccggcccaaggagcccgcgtggttcctggccaccgtcggcgtctcgcccgaccaccagggcaagggtctgggcagcgccgtcgtgctccccggagtggaggcggccgagcgcgccggggtgcccgccttcctggagacctccgcgccccgcaacctccccttctacgagcggctcggcttcaccgtcaccgccgacgtcgaggtgcccgaaggaccgcgcacctggtgcatgacccgcaagcccggtgcctga

SEQ ID NO: 5338 - DNA, 1701 bp, synthetic construct
  source 1..1701: mol_type = other DNA
atggccttaccagtgaccgccttgctcctgccgctggccttgctgctccacgccgccaggccggacatccagatgacacagagccctagcagcctgtctgccagcgtgggagacagagtgaccatcacatgcaaggccagcgaccacatcaacaactggctggcctggtatcagcagaagcctggacaggcccctaagctgctgatctacggcgctaccacactggaaacaggcgtgcccagcagattttctggcagcggctctggcaccgactacaccctgacaatatccagcctccagcctgaggacttcgccacctactactgtcagcagagctggaacaccccttggacattcggccagggcaccaagctggaaatcaagagaggcggaggcggaagtggaggcggaggatctggcggcggaggctctcaagttcagcttcaacagcctggcgctgagctggtcaaacctggcgcttctgtgaagatgagctgcaaagccagcggctacgccttcaacagctactggatcaactggatgaagcagaaacccggccagggactcgaatggatcggccaaatctatcccggcgacggcgacaccaactacaacggcaagttcaagggcagagccacactgaccgccgatacctctagcagcacagcctacatgcagctgagcagcctgaccagcgaagatagcgccgtgtacttctgtgcccggtccatcacaacagtcgtgggctgcgctatggactattggggccagggaacaagcgtgaccgtgtctagtacgcgtagaagtgaaggacgctacaggaacctcgagggaggcagctggagccaccctcagtttgaaaaagactacaaagacgatgacgataagggatcagattacaaggatgatgatgacaaggggtcagattataaagacgacgatgataaagggagcgactacaaggacgacgatgacaaggcctggtcccatccccagttcgagaaacaccatcaccaccaccatcatcacactagtggctccggcgagggcagaggaagtctactaacctgcggagatgtggaagaaaatcctggcccacatatgaccgagtacaagcccacggtgcgcctcgccacccgcgacgacgtccccagggccgtacgcaccctcgccgccgcgttcgccgactaccccgccacgcgccacaccgtcgatccggaccgccacatcgagcgggtcaccgagctgcaagaactcttcctcacgcgcgtcgggctcgacatcggcaaggtgtgggtcgcggacgacggcgccgcggtggcggtctggaccacgccggagagcgtcgaagcgggggcggtgttcgccgagatcggcccgcgcatggccgagttgagcggttcccggctggccgcgcagcaacagatggaaggcctcctggcgccgcaccggcccaaggagcccgcgtggttcctggccaccgtcggcgtctcgcccgaccaccagggcaagggtctgggcagcgccgtcgtgctccccggagtggaggcggccgagcgcgccggggtgcccgccttcctggagacctccgcgccccgcaacctccccttctacgagcggctcggcttcaccgtcaccgccgacgtcgaggtgcccgaaggaccgcgcacctggtgcatgacccgcaagcccggtgcctga

SEQ ID NO: 5339 - DNA, 1701 bp, synthetic construct
  source 1..1701: mol_type = other DNA
atggccttaccagtgaccgccttgctcctgccgctggccttgctgctccacgccgccaggccggacatccagatgacacagagccctagcagcctgtctgccagcgtgggagacagagtgaccatcacatgcaaggccagcgaccacatcaacaactggctggcctggtatcagcagaagcctggacaggcccctaagctgctgatctacggcgctaccacactggaaacaggcgtgcccagcagattttctggcagcggctctggcaccgactacaccctgacaatatccagcctccagcctgaggacttcgccacctactactgtcagcagagctggaacaccccttggacattcggccagggcaccaagctggaaatcaagagaggcggaggcggaagtggaggcggaggatctggcggcggaggctctcaagttcagcttcaacagcctggcgctgagctggtcaaacctggcgcttctgtgaagatgagctgcaaagccagcggctacgccttcaacagctactggatcaactggatgaagcagaaacccggccagggactcgaatggatcggccaaatctatcccggcgacggcgacaccaactacaacggcaagttcaagggcagagccacactgaccgccgatacctctagcagcacagcctacatgcagctgagcagcctgaccagcgaagatagcgccgtgtacttctgtgcccggtccatcacaacagtcgtgggctgcgctatggactattggggccagggaacaagcgtgaccgtgtctagtacgcgtagaagtgaagcgcgctacaggaacctcgagggaggcagctggagccaccctcagtttgaaaaagactacaaagacgatgacgataagggatcagattacaaggatgatgatgacaaggggtcagattataaagacgacgatgataaagggagcgactacaaggacgacgatgacaaggcctggtcccatccccagttcgagaaacaccatcaccaccaccatcatcacactagtggctccggcgagggcagaggaagtctactaacctgcggagatgtggaagaaaatcctggcccacatatgaccgagtacaagcccacggtgcgcctcgccacccgcgacgacgtccccagggccgtacgcaccctcgccgccgcgttcgccgactaccccgccacgcgccacaccgtcgatccggaccgccacatcgagcgggtcaccgagctgcaagaactcttcctcacgcgcgtcgggctcgacatcggcaaggtgtgggtcgcggacgacggcgccgcggtggcggtctggaccacgccggagagcgtcgaagcgggggcggtgttcgccgagatcggcccgcgcatggccgagttgagcggttcccggctggccgcgcagcaacagatggaaggcctcctggcgccgcaccggcccaaggagcccgcgtggttcctggccaccgtcggcgtctcgcccgaccaccagggcaagggtctgggcagcgccgtcgtgctccccggagtggaggcggccgagcgcgccggggtgcccgccttcctggagacctccgcgccccgcaacctccccttctacgagcggctcggcttcaccgtcaccgccgacgtcgaggtgcccgaaggaccgcgcacctggtgcatgacccgcaagcccggtgcctga

SEQ ID NO: 5340 - DNA, 1701 bp, synthetic construct; identical to SEQ ID NO: 5268
  source 1..1701: mol_type = other DNA

SEQ ID NO: 5341 - DNA, 1701 bp, synthetic construct
  source 1..1701: mol_type = other DNA
atggccttaccagtgaccgccttgctcctgccgctggccttgctgctccacgccgccaggccggacatccagatgacacagagccctagcagcctgtctgccagcgtgggagacagagtgaccatcacatgcaaggccagcgaccacatcaacaactggctggcctggtatcagcagaagcctggacaggcccctaagctgctgatctacggcgctaccacactggaaacaggcgtgcccagcagattttctggcagcggctctggcaccgactacaccctgacaatatccagcctccagcctgaggacttcgccacctactactgtcagcagagctggaacaccccttggacattcggccagggcaccaagctggaaatcaagagaggcggaggcggaagtggaggcggaggatctggcggcggaggctctcaagttcagcttcaacagcctggcgctgagctggtcaaacctggcgcttctgtgaagatgagctgcaaagccagcggctacgccttcaacagctactggatcaactggatgaagcagaaacccggccagggactcgaatggatcggccaaatctatcccggcgacggcgacaccaactacaacggcaagttcaagggcagagccacactgaccgccgatacctctagcagcacagcctacatgcagctgagcagcctgaccagcgaagatagcgccgtgtacttctgtgcccggtccatcacaacagtcgtgggctgcgctatggactattggggccagggaacaagcgtgaccgtgtctagtacgcgtagaagtgaattccgctacaggaacctcgagggaggcagctggagccaccctcagtttgaaaaagactacaaagacgatgacgataagggatcagattacaaggatgatgatgacaaggggtcagattataaagacgacgatgataaagggagcgactacaaggacgacgatgacaaggcctggtcccatccccagttcgagaaacaccatcaccaccaccatcatcacactagtggctccggcgagggcagaggaagtctactaacctgcggagatgtggaagaaaatcctggcccacatatgaccgagtacaagcccacggtgcgcctcgccacccgcgacgacgtccccagggccgtacgcaccctcgccgccgcgttcgccgactaccccgccacgcgccacaccgtcgatccggaccgccacatcgagcgggtcaccgagctgcaagaactcttcctcacgcgcgtcgggctcgacatcggcaaggtgtgggtcgcggacgacggcgccgcggtggcggtctggaccacgccggagagcgtcgaagcgggggcggtgttcgccgagatcggcccgcgcatggccgagttgagcggttcccggctggccgcgcagcaacagatggaaggcctcctggcgccgcaccggcccaaggagcccgcgtggttcctggccaccgtcggcgtctcgcccgaccaccagggcaagggtctgggcagcgccgtcgtgctccccggagtggaggcggccgagcgcgccggggtgcccgccttcctggagacctccgcgccccgcaacctccccttctacgagcggctcggcttcaccgtcaccgccgacgtcgaggtgcccgaaggaccgcgcacctggtgcatgacccgcaagcccggtgcctga

SEQ ID NO: 5342 - DNA, 1701 bp, synthetic construct; identical to SEQ ID NO: 5224
  source 1..1701: mol_type = other DNA

SEQ ID NO: 5343 - DNA, 1698 bp, synthetic construct
  source 1..1698: mol_type = other DNA
atggccttaccagtgaccgccttgctcctgccgctggccttgctgctccacgccgccaggccggacatccagatgacacagagccctagcagcctgtctgccagcgtgggagacagagtgaccatcacatgcaaggccagcgaccacatcaacaactggctggcctggtatcagcagaagcctggacaggcccctaagctgctgatctacggcgctaccacactggaaacaggcgtgcccagcagattttctggcagcggctctggcaccgactacaccctgacaatatccagcctccagcctgaggacttcgccacctactactgtcagcagagctggaacaccccttggacattcggccagggcaccaagctggaaatcaagagaggcggaggcggaagtggaggcggaggatctggcggcggaggctctcaagttcagcttcaacagcctggcgctgagctggtcaaacctggcgcttctgtgaagatgagctgcaaagccagcggctacgccttcaacagctactggatcaactggatgaagcagaaacccggccagggactcgaatggatcggccaaatctatcccggcgacggcgacaccaactacaacggcaagttcaagggcagagccacactgaccgccgatacctctagcagcacagcctacatgcagctgagcagcctgaccagcgaagatagcgccgtgtacttctgtgcccggtccatcacaacagtcgtgggctgcgctatggactattggggccagggaacaagcgtgaccgtgtctagtacgcgtagactagaagatcgctacaggctcgagggaggcagctggagccaccctcagtttgaaaaagactacaaagacgatgacgataagggatcagattacaaggatgatgatgacaaggggtcagattataaagacgacgatgataaagggagcgactacaaggacgacgatgacaaggcctggtcccatccccagttcgagaaacaccatcaccaccaccatcatcacactagtggctccggcgagggcagaggaagtctactaacctgcggagatgtggaagaaaatcctggcccacatatgaccgagtacaagcccacggtgcgcctcgccacccgcgacgacgtccccagggccgtacgcaccctcgccgccgcgttcgccgactaccccgccacgcgccacaccgtcgatccggaccgccacatcgagcgggtcaccgagctgcaagaactcttcctcacgcgcgtcgggctcgacatcggcaaggtgtgggtcgcggacgacggcgccgcggtggcggtctggaccacgccggagagcgtcgaagcgggggcggtgttcgccgagatcggcccgcgcatggccgagttgagcggttcccggctggccgcgcagcaacagatggaaggcctcctggcgccgcaccggcccaaggagcccgcgtggttcctggccaccgtcggcgtctcgcccgaccaccagggcaagggtctgggcagcgccgtcgtgctccccggagtggaggcggccgagcgcgccggggtgcccgccttcctggagacctccgcgccccgcaacctccccttctacgagcggctcggcttcaccgtcaccgccgacgtcgaggtgcccgaaggaccgcgcacctggtgcatgacccgcaagcccggtgcctga

SEQ ID NO: 5344 - DNA, 1698 bp, synthetic construct
  source 1..1698: mol_type = other DNA
atggccttaccagtgaccgccttgctcctgccgctggccttgctgctccacgccgccaggccggacatccagatgacacagagccctagcagcctgtctgccagcgtgggagacagagtgaccatcacatgcaaggccagcgaccacatcaacaactggctggcctggtatcagcagaagcctggacaggcccctaagctgctgatctacggcgctaccacactggaaacaggcgtgcccagcagattttctggcagcggctctggcaccgactacaccctgacaatatccagcctccagcctgaggacttcgccacctactactgtcagcagagctggaacaccccttggacattcggccagggcaccaagctggaaatcaagagaggcggaggcggaagtggaggcggaggatctggcggcggaggctctcaagttcagcttcaacagcctggcgctgagctggtcaaacctggcgcttctgtgaagatgagctgcaaagccagcggctacgccttcaacagctactggatcaactggatgaagcagaaacccggccagggactcgaatggatcggccaaatctatcccggcgacggcgacaccaactacaacggcaagttcaagggcagagccacactgaccgccgatacctctagcagcacagcctacatgcagctgagcagcctgaccagcgaagatagcgccgtgtacttctgtgcccggtccatcacaacagtcgtgggctgcgctatggactattggggccagggaacaagcgtgaccgtgtctagtacgcgtagaggcgaagatcgctacaggctcgagggaggcagctggagccaccctcagtttgaaaaagactacaaagacgatgacgataagggatcagattacaaggatgatgatgacaaggggtcagattataaagacgacgatgataaagggagcgactacaaggacgacgatgacaaggcctggtcccatccccagttcgagaaacaccatcaccaccaccatcatcacactagtggctccggcgagggcagaggaagtctactaacctgcggagatgtggaagaaaatcctggcccacatatgaccgagtacaagcccacggtgcgcctcgccacccgcgacgacgtccccagggccgtacgcaccctcgccgccgcgttcgccgactaccccgccacgcgccacaccgtcgatccggaccgccacatcgagcgggtcaccgagctgcaagaactcttcctcacgcgcgtcgggctcgacatcggcaaggtgtgggtcgcggacgacggcgccgcggtggcggtctggaccacgccggagagcgtcgaagcgggggcggtgttcgccgagatcggcccgcgcatggccgagttgagcggttcccggctggccgcgcagcaacagatggaaggcctcctggcgccgcaccggcccaaggagcccgcgtggttcctggccaccgtcggcgtctcgcccgaccaccagggcaagggtctgggcagcgccgtcgtgctccccggagtggaggcggccgagcgcgccggggtgcccgccttcctggagacctccgcgccccgcaacctccccttctacgagcggctcggcttcaccgtcaccgccgacgtcgaggtgcccgaaggaccgcgcacctggtgcatgacccgcaagcccggtgcctga

SEQ ID NO: 5345 - DNA, 1698 bp, synthetic construct; identical to SEQ ID NO: 5343
  source 1..1698: mol_type = other DNA

SEQ ID NO: 5346 - DNA, 1698 bp, synthetic construct
  source 1..1698: mol_type = other DNA
atggccttaccagtgaccgccttgctcctgccgctggccttgctgctccacgccgccaggccggacatccagatgacacagagccctagcagcctgtctgccagcgtgggagacagagtgaccatcacatgcaaggccagcgaccacatcaacaactggctggcctggtatcagcagaagcctggacaggcccctaagctgctgatctacggcgctaccacactggaaacaggcgtgcccagcagattttctggcagcggctctggcaccgactacaccctgacaatatccagcctccagcctgaggacttcgccacctactactgtcagcagagctggaacaccccttggacattcggccagggcaccaagctggaaatcaagagaggcggaggcggaagtggaggcggaggatctggcggcggaggctctcaagttcagcttcaacagcctggcgctgagctggtcaaacctggcgcttctgtgaagatgagctgcaaagccagcggctacgccttcaacagctactggatcaactggatgaagcagaaacccggccagggactcgaatggatcggccaaatctatcccggcgacggcgacaccaactacaacggcaagttcaagggcagagccacactgaccgccgatacctctagcagcacagcctacatgcagctgagcagcctgaccagcgaagatagcgccgtgtacttctgtgcccggtccatcacaacagtcgtgggctgcgctatggactattggggccagggaacaagcgtgaccgtgtctagtacgcgtagatgtgaagatcgctacaggctcgagggaggcagctggagccaccctcagtttgaaaaagactacaaagacgatgacgataagggatcagattacaaggatgatgatgacaaggggtcagattataaagacgacgatgataaagggagcgactacaaggacgacgatgacaaggcctggtcccatccccagttcgagaaacaccatcaccaccaccatcatcacactagtggctccggcgagggcagaggaagtctactaacctgcggagatgtggaagaaaatcctggcccacatatgaccgagtacaagcccacggtgcgcctcgccacccgcgacgacgtccccagggccgtacgcaccctcgccgccgcgttcgccgactaccccgccacgcgccacaccgtcgatccggaccgccacatcgagcgggtcaccgagctgcaagaactcttcctcacgcgcgtcgggctcgacatcggcaaggtgtgggtcgcggacgacggcgccgcggtggcggtctggaccacgccggagagcgtcgaagcgggggcggtgttcgccgagatcggcccgcgcatggccgagttgagcggttcccggctggccgcgcagcaacagatggaaggcctcctggcgccgcaccggcccaaggagcccgcgtggttcctggccaccgtcggcgtctcgcccgaccaccagggcaagggtctgggcagcgccgtcgtgctccccggagtggaggcggccgagcgcgccggggtgcccgccttcctggagacctccgcgccccgcaacctccccttctacgagcggctcggcttcaccgtcaccgccgacgtcgaggtgcccgaaggaccgcgcacctggtgcatgacccgcaagcccggtgcctga

SEQ ID NO: 5347 - DNA, 1698 bp, synthetic construct
  source 1..1698: mol_type = other DNA
atggccttaccagtgaccgccttgctcctgccgctggccttgctgctccacgccgccaggccggacatccagatgacacagagccctagcagcctgtctgccagcgtgggagacagagtgaccatcacatgcaaggccagcgaccacatcaacaactggctggcctggtatcagcagaagcctggacaggcccctaagctgctgatctacggcgctaccacactggaaacaggcgtgcccagcagattttctggcagcggctctggcaccgactacaccctgacaatatccagcctccagcctgaggacttcgccacctactactgtcagcagagctggaacaccccttggacattcggccagggcaccaagctggaaatcaagagaggcggaggcggaagtggaggcggaggatctggcggcggaggctctcaagttcagcttcaacagcctggcgctgagctggtcaaacctggcgcttctgtgaagatgagctgcaaagccagcggctacgccttcaacagctactggatcaactggatgaagcagaaacccggccagggactcgaatggatcggccaaatctatcccggcgacggcgacaccaactacaacggcaagttcaagggcagagccacactgaccgccgatacctctagcagcacagcctacatgcagctgagcagcctgaccagcgaagatagcgccgtgtacttctgtgcccggtccatcacaacagtcgtgggctgcgctatggactattggggccagggaacaagcgtgaccgtgtctagtacgcgtagattcgaagatcgctacaggctcgagggaggcagctggagccaccctcagtttgaaaaagactacaaagacgatgacgataagggatcagattacaaggatgatgatgacaaggggtcagattataaagacgacgatgataaagggagcgactacaaggacgacgatgacaaggcctggtcccatccccagttcgagaaacaccatcaccaccaccatcatcacactagtggctccggcgagggcagaggaagtctactaacctgcggagatgtggaagaaaatcctggcccacatatgaccgagtacaagcccacggtgcgcctcgccacccgcgacgacgtccccagggccgtacgcaccctcgccgccgcgttcgccgactaccccgccacgcgccacaccgtcgatccggaccgccacatcgagcgggtcaccgagctgcaagaactcttcctcacgcgcgtcgggctcgacatcggcaaggtgtgggtcgcggacgacggcgccgcggtggcggtctggaccacgccggagagcgtcgaagcgggggcggtgttcgccgagatcggcccgcgcatggccgagttgagcggttcccggctggccgcgcagcaacagatggaaggcctcctggcgccgcaccggcccaaggagcccgcgtggttcctggccaccgtcggcgtctcgcccgaccaccagggcaagggtctgggcagcgccgtcgtgctccccggagtggaggcggccgagcgcgccggggtgcccgccttcctggagacctccgcgccccgcaacctccccttctacgagcggctcggcttcaccgtcaccgccgacgtcgaggtgcccgaaggaccgcgcacctggtgcatgacccgcaagcccggtgcctga

SEQ ID NO: 5348 - DNA, 1698 bp, synthetic construct; identical to SEQ ID NO: 5230
  source 1..1698: mol_type = other DNA

SEQ ID NO: 5349 - DNA, 1698 bp, synthetic construct
  source 1..1698: mol_type = other DNA
atggccttaccagtgaccgccttgctcctgccgctggccttgctgctccacgccgccaggccggacatccagatgacacagagccctagcagcctgtctgccagcgtgggagacagagtgaccatcacatgcaaggccagcgaccacatcaacaactggctggcctggtatcagcagaagcctggacaggcccctaagctgctgatctacggcgctaccacactggaaacaggcgtgcccagcagattttctggcagcggctctggcaccgactacaccctgacaatatccagcctccagcctgaggacttcgccacctactactgtcagcagagctggaacaccccttggacattcggccagggcaccaagctggaaatcaagagaggcggaggcggaagtggaggcggaggatctggcggcggaggctctcaagttcagcttcaacagcctggcgctgagctggtcaaacctggcgcttctgtgaagatgagctgcaaagccagcggctacgccttcaacagctactggatcaactggatgaagcagaaacccggccagggactcgaatggatcggccaaatctatcccggcgacggcgacaccaactacaacggcaagttcaagggcagagccacactgaccgccgatacctctagcagcacagcctacatgcagctgagcagcctgaccagcgaagatagcgccgtgtacttctgtgcccggtccatcacaacagtcgtgggctgcgctatggactattggggccagggaacaagcgtgaccgtgtctagtacgcgaagaagtgctgatcgctacaggctcgagggaggcagctggagccaccctcagtttgaaaaagactacaaagacgatgacgataagggatcagattacaaggatgatgatgacaaggggtcagattataaagacgacgatgataaagggagcgactacaaggacgacgatgacaaggcctggtcccatccccagttcgagaaacaccatcaccaccaccatcatcacactagtggctccggcgagggcagaggaagtctactaacctgcggagatgtggaagaaaatcctggcccacatatgaccgagtacaagcccacggtgcgcctcgccacccgcgacgacgtccccagggccgtacgcaccctcgccgccgcgttcgccgactaccccgccacgcgccacaccgtcgatccggaccgccacatcgagcgggtcaccgagctgcaagaactcttcctcacgcgcgtcgggctcgacatcggcaaggtgtgggtcgcggacgacggcgccgcggtggcggtctggaccacgccggagagcgtcgaagcgggggcggtgttcgccgagatcggcccgcgcatggccgagttgagcggttcccggctggccgcgcagcaacagatggaaggcctcctggcgccgcaccggcccaaggagcccgcgtggttcctggccaccgtcggcgtctcgcccgaccaccagggcaagggtctgggcagcgccgtcgtgctccccggagtggaggcggccgagcgcgccggggtgcccgccttcctggagacctccgcgccccgcaacctccccttctacgagcggctcggcttcaccgtcaccgccgacgtcgaggtgcccgaaggaccgcgcacctggtgcatgacccgcaagcccggtgcctga

SEQ ID NO: 5350 - DNA, 1698 bp, synthetic construct
  source 1..1698: mol_type = other DNA
atggccttaccagtgaccgccttgctcctgccgctggccttgctgctccacgccgccaggccggacatccagatgacacagagccctagcagcctgtctgccagcgtgggagacagagtgaccatcacatgcaaggccagcgaccacatcaacaactggctggcctggtatcagcagaagcctggacaggcccctaagctgctgatctacggcgctaccacactggaaacaggcgtgcccagcagattttctggcagcggctctggcaccgactacaccctgacaatatccagcctccagcctgaggacttcgccacctactactgtcagcagagctggaacaccccttggacattcggccagggcaccaagctggaaatcaagagaggcggaggcggaagtggaggcggaggatctggcggcggaggctctcaagttcagcttcaacagcctggcgctgagctggtcaaacctggcgcttctgtgaagatgagctgcaaagccagcggctacgccttcaacagctactggatcaactggatgaagcagaaacccggccagggactcgaatggatcggccaaatctatcccggcgacggcgacaccaactacaacggcaagttcaagggcagagccacactgaccgccgatacctctagcagcacagcctacatgcagctgagcagcctgaccagcgaagatagcgccgtgtacttctgtgcccggtccatcacaacagtcgtgggctgcgctatggactattggggccagggaacaagcgtgaccgtgtctagtacgcgtagaagtgcagatcgctacaggctcgagggaggcagctggagccaccctcagtttgaaaaagactacaaagacgatgacgataagggatcagattacaaggatgatgatgacaaggggtcagattataaagacgacgatgataaagggagcgactacaaggacgacgatgacaaggcctggtcccatccccagttcgagaaacaccatcaccaccaccatcatcacactagtggctccggcgagggcagaggaagtctactaacctgcggagatgtggaagaaaatcctggcccacatatgaccgagtacaagcccacggtgcgcctcgccacccgcgacgacgtccccagggccgtacgcaccctcgccgccgcgttcgccgactaccccgccacgcgccacaccgtcgatccggaccgccacatcgagcgggtcaccgagctgcaagaactcttcctcacgcgcgtcgggctcgacatcggcaaggtgtgggtcgcggacgacggcgccgcggtggcggtctggaccacgccggagagcgtcgaagcgggggcggtgttcgccgagatcggcccgcgcatggccgagttgagcggttcccggctggccgcgcagcaacagatggaaggcctcctggcgccgcaccggcccaaggagcccgcgtggttcctggccaccgtcggcgtctcgcccgaccaccagggcaagggtctgggcagcgccgtcgtgctccccggagtggaggcggccgagcgcgccggggtgcccgccttcctggagacctccgcgccccgcaacctccccttctacgagcggctcggcttcaccgtcaccgccgacgtcgaggtgcccgaaggaccgcgcacctggtgcatgacccgcaagcccggtgcctga

SEQ ID NO: 5351 - DNA, 1698 bp, synthetic construct; identical to SEQ ID NO: 5280
  source 1..1698: mol_type = other DNA

SEQ ID NO: 5352 - DNA, 1698 bp, synthetic construct; identical to SEQ ID NO: 5281
  source 1..1698: mol_type = other DNA

SEQ ID NO: 5353 - DNA, 1698 bp, synthetic construct; identical to SEQ ID NO: 5281
  source 1..1698: mol_type = other DNA

SEQ ID NO: 5354 - DNA, 1698 bp, synthetic construct
  source 1..1698: mol_type = other DNA
atggccttaccagtgaccgccttgctcctgccgctggccttgctgctccacgccgccaggccggacatccagatgacacagagccctagcagcctgtctgccagcgtgggagacagagtgaccatcacatgcaaggccagcgaccacatcaacaactggctggcctggtatcagcagaagcctggacaggcccctaagctgctgatctacggcgctaccacactggaaacaggcgtgcccagcagattttctggcagcggctctggcaccgactacaccctgacaatatccagcctccagcctgaggacttcgccacctactactgtcagcagagctggaacaccccttggacattcggccagggcaccaagctggaaatcaagagaggcggaggcggaagtggaggcggaggatctggcggcggaggctctcaagttcagcttcaacagcctggcgctgagctggtcaaacctggcgcttctgtgaagatgagctgcaaagccagcggctacgccttcaacagctactggatcaactggatgaagcagaaacccggccagggactcgaatggatcggccaaatctatcccggcgacggcgacaccaactacaacggcaagttcaagggcagagccacactgaccgccgatacctctagcagcacagcctacatgcagctgagcagcctgaccagcgaagatagcgccgtgtacttctgtgcccggtccatcacaacagtcgtgggctgcgctatggactattggggccagggaacaagcgtgaccgtgtctagtacgcgtagaagtttcgatcgctacaggctcgagggaggcagctggagccaccctcagtttgaaaaagactacaaagacgatgacgataagggatcagattacaaggatgatgatgacaaggggtcagattataaagacgacgatgataaagggagcgactacaaggacgacgatgacaaggcctggtcccatccccagttcgagaaacaccatcaccaccaccatcatcacactagtggctccggcgagggcagaggaagtctactaacctgcggagatgtggaagaaaatcctggcccacatatgaccgagtacaagcccacggtgcgcctcgccacccgcgacgacgtccccagggccgtacgcaccctcgccgccgcgttcgccgactaccccgccacgcgccacaccgtcgatccggaccgccacatcgagcgggtcaccgagctgcaagaactcttcctcacgcgcgtcgggctcgacatcggcaaggtgtgggtcgcggacgacggcgccgcggtggcggtctggaccacgccggagagcgtcgaagcgggggcggtgttcgccgagatcggcccgcgcatggccgagttgagcggttcccggctggccgcgcagcaacagatggaaggcctcctggcgccgcaccggcccaaggagcccgcgtggttcctggccaccgtcggcgtctcgcccgaccaccagggcaagggtctgggcagcgccgtcgtgctccccggagtggaggcggccgagcgcgccggggtgcccgccttcctggagacctccgcgccccgcaacctccccttctacgagcggctcggcttcaccgtcaccgccgacgtcgaggtgcccgaaggaccgcgcacctggtgcatgacccgcaagcccggtgcctga

SEQ ID NO: 5355 - DNA, 1698 bp, synthetic construct
  source 1..1698: mol_type = other DNA
atggccttaccagtgaccgccttgctcctgccgctggccttgctgctccacgccgccaggccggacatccagatgacacagagccctagcagcctgtctgccagcgtgggagacagagtgaccatcacatgcaaggccagcgaccacatcaacaactggctggcctggtatcagcagaagcctggacaggcccctaagctgctgatctacggcgctaccacactggaaacaggcgtgcccagcagattttctggcagcggctctggcaccgactacaccctgacaatatccagcctccagcctgaggacttcgccacctactactgtcagcagagctggaacaccccttggacattcggccagggcaccaagctggaaatcaagagaggcggaggcggaagtggaggcggaggatctggcggcggaggctctcaagttcagcttcaacagcctggcgctgagctggtcaaacctggcgcttctgtgaagatgagctgcaaagccagcggctacgccttcaacagctactggatcaactggatgaagcagaaacccggccagggactcgaatggatcggccaaatctatcccggcgacggcgacaccaactacaacggcaagttcaagggcagagccacactgaccgccgatacctctagcagcacagcctacatgcagctgagcagcctgaccagcgaagatagcgccgtgtacttctgtgcccggtccatcacaacagtcgtgggctgcgctatggactattggggccagggaacaagcgtgaccgtgtctagtacgcgtagaagtgtggatcgctacaggctcgagggaggcagctggagccaccctcagtttgaaaaagactacaaagacgatgacgataagggatcagattacaaggatgatgatgacaaggggtcagattataaagacgacgatgataaagggagcgactacaaggacgacgatgacaaggcctggtcccatccccagttcgagaaacaccatcaccaccaccatcatcacactagtggctccggcgagggcagaggaagtctactaacctgcggagatgtggaagaaaatcctggcccacatatgaccgagtacaagcccacggtgcgcctcgccacccgcgacgacgtccccagggccgtacgcaccctcgccgccgcgttcgccgactaccccgccacgcgccacaccgtcgatccggaccgccacatcgagcgggtcaccgagctgcaagaactcttcctcacgcgcgtcgggctcgacatcggcaaggtgtgggtcgcggacgacggcgccgcggtggcggtctggaccacgccggagagcgtcgaagcgggggcggtgttcgccgagatcggcccgcgcatggccgagttgagcggttcccggctggccgcgcagcaacagatggaaggcctcctggcgccgcaccggcccaaggagcccgcgtggttcctggccaccgtcggcgtctcgcccgaccaccagggcaagggtctgggcagcgccgtcgtgctccccggagtggaggcggccgagcgcgccggggtgcccgccttcctggagacctccgcgccccgcaacctccccttctacgagcggctcggcttcaccgtcaccgccgacgtcgaggtgcccgaaggaccgcgcacctggtgcatgacccgcaagcccggtgcctga

SEQ ID NO: 5356 - DNA, 1704 bp, synthetic construct; identical to SEQ ID NO: 5328
  source 1..1704: mol_type = other DNA

SEQ ID NO: 5357 - DNA, 1704 bp, synthetic construct
  source 1..1704: mol_type = other DNA
atggccttaccagtgaccgccttgctcctgccgctggccttgctgctccacgccgccaggccggacatccagatgacacagagccctagcagcctgtctgccagcgtgggagacagagtgaccatcacatgcaaggccagcgaccacatcaacaactggctggcctggtatcagcagaagcctggacaggcccctaagctgctgatctacggcgctaccacactggaaacaggcgtgcccagcagattttctggcagcggctctggcaccgactacaccctgacaatatccagcctccagcctgaggacttcgccacctactactgtcagcagagctggaacaccccttggacattcggccagggcaccaagctggaaatcaagagaggcggaggcggaagtggaggcggaggatctggcggcggaggctctcaagttcagcttcaacagcctggcgctgagctggtcaaacctggcgcttctgtgaagatgagctgcaaagccagcggctacgccttcaacagctactggatcaactggatgaagcagaaacccggccagggactcgaatggatcggccaaatctatcccggcgacggcgacaccaactacaacggcaagttcaagggcagagccacactgaccgccgatacctctagcagcacagcctacatgcagctgagcagcctgaccagcgaagatagcgccgtgtacttctgtgcccggtccatcacaacagtcgtgggctgcgctatggactattggggccagggaacaagcgtgaccgtgtctagtacgcgtgcacggagtgaagatcgctacaggaacctcgagggaggcagctggagccaccctcagtttgaaaaagactacaaagacgatgacgataagggatcagattacaaggatgatgatgacaaggggtcagattataaagacgacgatgataaagggagcgactacaaggacgacgatgacaaggcctggtcccatccccagttcgagaaacaccatcaccaccaccatcatcacactagtggctccggcgagggcagaggaagtctactaacctgcggagatgtggaagaaaatcctggcccacatatgaccgagtacaagcccacggtgcgcctcgccacccgcgacgacgtccccagggccgtacgcaccctcgccgccgcgttcgccgactaccccgccacgcgccacaccgtcgatccggaccgccacatcgagcgggtcaccgagctgcaagaactcttcctcacgcgcgtcgggctcgacatcggcaaggtgtgggtcgcggacgacggcgccgcggtggcggtctggaccacgccggagagcgtcgaagcgggggcggtgttcgccgagatcggcccgcgcatggccgagttgagcggttcccggctggccgcgcagcaacagatggaaggcctcctggcgccgcaccggcccaaggagcccgcgtggttcctggccaccgtcggcgtctcgcccgaccaccagggcaagggtctgggcagcgccgtcgtgctccccggagtggaggcggccgagcgcgccggggtgcccgccttcctggagacctccgcgccccgcaacctccccttctacgagcggctcggcttcaccgtcaccgccgacgtcgaggtgcccgaaggaccgcgcacctggtgcatgacccgcaagcccggtgcctga

SEQ ID NO: 5358 - DNA, 1704 bp, synthetic construct
  source 1..1704: mol_type = other DNA
atggccttaccagtgaccgccttgctcctgccgctggccttgctgctccacgccgccaggccggacatccagatgacacagagccctagcagcctgtctgccagcgtgggagacagagtgaccatcacatgcaaggccagcgaccacatcaacaactggctggcctggtatcagcagaagcctggacaggcccctaagctgctgatctacggcgctaccacactggaaacaggcgtgcccagcagattttctggcagcggctctggcaccgactacaccctgacaatatccagcctccagcctgaggacttcgccacctactactgtcagcagagctggaacaccccttggacattcggccagggcaccaagctggaaatcaagagaggcggaggcggaagtggaggcggaggatctggcggcggaggctctcaagttcagcttcaacagcctggcgctgagctggtcaaacctggcgcttctgtgaagatgagctgcaaagccagcggctacgccttcaacagctactggatcaactggatgaagcagaaacccggccagggactcgaatggatcggccaaatctatcccggcgacggcgacaccaactacaacggcaagttcaagggcagagccacactgaccgccgatacctctagcagcacagcctacatgcagctgagcagcctgaccagcgaagatagcgccgtgtacttctgtgcccggtccatcacaacagtcgtgggctgcgctatggactattggggccagggaacaagcgtgaccgtgtctagtacgcgtgcaggtagtgaagatcgctacaggaacctcgagggaggcagctggagccaccctcagtttgaaaaagactacaaagacgatgacgataagggatcagattacaaggatgatgatgacaaggggtcagattataaagacgacgatgataaagggagcgactacaaggacgacgatgacaaggcctggtcccatccccagttcgagaaacaccatcaccaccaccatcatcacactagtggctccggcgagggcagaggaagtctactaacctgcggagatgtggaagaaaatcctggcccacatatgaccgagtacaagcccacggtgcgcctcgccacccgcgacgacgtccccagggccgtacgcaccctcgccgccgcgttcgccgactaccccgccacgcgccacaccgtcgatccggaccgccacatcgagcgggtcaccgagctgcaagaactcttcctcacgcgcgtcgggctcgacatcggcaaggtgtgggtcgcggacgacggcgccgcggtggcggtctggaccacgccggagagcgtcgaagcgggggcggtgttcgccgagatcggcccgcgcatggccgagttgagcggttcccggctggccgcgcagcaacagatggaaggcctcctggcgccgcaccggcccaaggagcccgcgtggttcctggccaccgtcggcgtctcgcccgaccaccagggcaagggtctgggcagcgccgtcgtgctccccggagtggaggcggccgagcgcgccggggtgcccgccttcctggagacctccgcgccccgcaacctccccttctacgagcggctcggcttcaccgtcaccgccgacgtcgaggtgcccgaaggaccgcgcacctggtgcatgacccgcaagcccggtgcctga

SEQ ID NO: 5359 - DNA, 1704 bp, synthetic construct; identical to SEQ ID NO: 5257
  source 1..1704: mol_type = other DNA

SEQ ID NO: 5360 - DNA, 1704 bp, synthetic construct
  source 1..1704: mol_type = other DNA
atggccttaccagtgaccgccttgctcctgccgctggccttgctgctccacgccgccaggccggacatccagatgacacagagccctagcagcctgtctgccagcgtgggagacagagtgaccatcacatgcaaggccagcgaccacatcaacaactggctggcctggtatcagcagaagcctggacaggcccctaagctgctgatctacggcgctaccacactggaaacaggcgtgcccagcagattttctggcagcggctctggcaccgactacaccctgacaatatccagcctccagcctgaggacttcgccacctactactgtcagcagagctggaacaccccttggacattcggccagggcaccaagctggaaatcaagagaggcggaggcggaagtggaggcggaggatctggcggcggaggctctcaagttcagcttcaacagcctggcgctgagctggtcaaacctggcgcttctgtgaagatgagctgcaaagccagcggctacgccttcaacagctactggatcaactggatgaagcagaaacccggccagggactcgaatggatcggccaaatctatcccggcgacggcgacaccaactacaacggcaagttcaagggcagagccacactgaccgccgatacctctagcagcacagcctacatgcagctgagcagcctgaccagcgaagatagcgccgtgtacttctgtgcccggtccatcacaacagtcgtgggctgcgctatggactattggggccagggaacaagcgtgaccgtgtctagtacgcgtgcaggaagtgaagatcgctacaggaacctcgagggaggcagctggagccaccctcagtttgaaaaagactacaaagacgatgacgataagggatcagattacaaggatgatgatgacaaggggtcagattataaagacgacgatgataaagggagcgactacaaggacgacgatgacaaggcctggtcccatccccagttcgagaaacaccatcaccaccaccatcatcacactagtggctccggcgagggcagaggaagtctactaacctgcggagatgtggaagaaaatcctggcccacatatgaccgagtacaagcccacggtgcgcctcgccacccgcgacgacgtccccagggccgtacgcaccctcgccgccgcgttcgccgactaccccgccacgcgccacaccgtcgatccggaccgccacatcgagcgggtcaccgagctgcaagaactcttcctcacgcgcgtcgggctcgacatcggcaaggtgtgggtcgcggacgacggcgccgcggtggcggtctggaccacgccggagagcgtcgaagcgggggcggtgttcgccgagatcggcccgcgcatggccgagttgagcggttcccggctggccgcgcagcaacagatggaaggcctcctggcgccgcaccggcccaaggagcccgcgtggttcctggccaccgtcggcgtctcgcccgaccaccagggcaagggtctgggcagcgccgtcgtgctccccggagtggaggcggccgagcgcgccggggtgcccgccttcctggagacctccgcgccccgcaacctccccttctacgagcggctcggcttcaccgtcaccgccgacgtcgaggtgcccgaaggaccgcgcacctggtgcatgacccgcaagcccggtgcctga

SEQ ID NO: 5361 - DNA, 1701 bp, synthetic construct; identical to SEQ ID NO: 5259
  source 1..1701: mol_type = other DNA

SEQ ID NO: 5362 - DNA, 1701 bp, synthetic construct
  source 1..1701: mol_type = other DNA
atggccttaccagtgaccgccttgctcctgccgctggccttgctgctccacgccgccaggccggacatccagatgacacagagccctagcagcctgtctgccagcgtgggagacagagtgaccatcacatgcaaggccagcgaccacatcaacaactggctggcctggtatcagcagaagcctggacaggcccctaagctgctgatctacggcgctaccacactggaaacaggcgtgcccagcagattttctggcagcggctctggcaccgactacaccctgacaatatccagcctccagcctgaggacttcgccacctactactgtcagcagagctggaacaccccttggacattcggccagggcaccaagctggaaatcaagagaggcggaggcggaagtggaggcggaggatctggcggcggaggctctcaagttcagcttcaacagcctggcgctgagctggtcaaacctggcgcttctgtgaagatgagctgcaaagccagcggctacgccttcaacagctactggatcaactggatgaagcagaaacccggccagggactcgaatggatcggccaaatctatcccggcgacggcgacaccaactacaacggcaagttcaagggcagagccacactgaccgccgatacctctagcagcacagcctacatgcagctgagcagcctgaccagcgaagatagcgccgtgtacttctgtgcccggtccatcacaacagtcgtgggctgcgctatggactattggggccagggaacaagcgtgaccgtgtctagtacgcgtagaagttctgatcgctacaggaacctcgagggaggcagctggagccaccctcagtttgaaaaagactacaaagacgatgacgataagggatcagattacaaggatgatgatgacaaggggtcagattataaagacgacgatgataaagggagcgactacaaggacgacgatgacaaggcctggtcccatccccagttcgagaaacaccatcaccaccaccatcatcacactagtggctccggcgagggcagaggaagtctactaacctgcggagatgtggaagaaaatcctggcccacatatgaccgagtacaagcccacggtgcgcctcgccacccgcgacgacgtccccagggccgtacgcaccctcgccgccgcgttcgccgactaccccgccacgcgccacaccgtcgatccggaccgccacatcgagcgggtcaccgagctgcaagaactcttcctcacgcgcgtcgggctcgacatcggcaaggtgtgggtcgcggacgacggcgccgcggtggcggtctggaccacgccggagagcgtcgaagcgggggcggtgttcgccgagatcggcccgcgcatggccgagttgagcggttcccggctggccgcgcagcaacagatggaaggcctcctggcgccgcaccggcccaaggagcccgcgtggttcctggccaccgtcggcgtctcgcccgaccaccagggcaagggtctgggcagcgccgtcgtgctccccggagtggaggcggccgagcgcgccggggtgcccgccttcctggagacctccgcgccccgcaacctccccttctacgagcggctcggcttcaccgtcaccgccgacgtcgaggtgcccgaaggaccgcgcacctggtgcatgacccgcaagcccggtgcctga

SEQ ID NO: 5363 - DNA, 1701 bp, synthetic construct
  source 1..1701: mol_type = other DNA
atggccttaccagtgaccgccttgctcctgccgctggccttgctgctccacgccgccaggccggacatccagatgacacagagccctagcagcctgtctgccagcgtgggagacagagtgaccatcacatgcaaggccagcgaccacatcaacaactggctggcctggtatcagcagaagcctggacaggcccctaagctgctgatctacggcgctaccacactggaaacaggcgtgcccagcagattttctggcagcggctctggcaccgactacaccctgacaatatccagcctccagcctgaggacttcgccacctactactgtcagcagagctggaacaccccttggacattcggccagggcaccaagctggaaatcaagagaggcggaggcggaagtggaggcggaggatctggcggcggaggctctcaagttcagcttcaacagcctggcgctgagctggtcaaacctggcgcttctgtgaagatgagctgcaaagccagcggctacgccttcaacagctactggatcaactggatgaagcagaaacccggccagggactcgaatggatcggccaaatctatcccggcgacggcgacaccaactacaacggcaagttcaagggcagagccacactgaccgccgatacctctagcagcacagcctacatgcagctgagcagcctgaccagcgaagatagcgccgtgtacttctgtgcccggtccatcacaacagtcgtgggctgcgctatggactattggggccagggaacaagcgtgaccgtgtctagtacgcgtagaagttgtgatcgctacaggaacctcgagggaggcagctggagccaccctcagtttgaaaaagactacaaagacgatgacgataagggatcagattacaaggatgatgatgacaaggggtcagattataaagacgacgatgataaagggagcgactacaaggacgacgatgacaaggcctggtcccatccccagttcgagaaacaccatcaccaccaccatcatcacactagtggctccggcgagggcagaggaagtctactaacctgcggagatgtggaagaaaatcctggcccacatatgaccgagtacaagcccacggtgcgcctcgccacccgcgacgacgtccccagggccgtacgcaccctcgccgccgcgttcgccgactaccccgccacgcgccacaccgtcgatccggaccgccacatcgagcgggtcaccgagctgcaagaactcttcctcacgcgcgtcgggctcgacatcggcaaggtgtgggtcgcggacgacggcgccgcggtggcggtctggaccacgccggagagcgtcgaagcgggggcggtgttcgccgagatcggcccgcgcatggccgagttgagcggttcccggctggccgcgcagcaacagatggaaggcctcctggcgccgcaccggcccaaggagcccgcgtggttcctggccaccgtcggcgtctcgcccgaccaccagggcaagggtctgggcagcgccgtcgtgctccccggagtggaggcggccgagcgcgccggggtgcccgccttcctggagacctccgcgccccgcaacctccccttctacgagcggctcggcttcaccgtcaccgccgacgtcgaggtgcccgaaggaccgcgcacctggtgcatgacccgcaagcccggtgcctga

SEQ ID NO: 5364 - DNA, 1701 bp, synthetic construct
  source 1..1701: mol_type = other DNA
atggccttaccagtgaccgccttgctcctgccgctggccttgctgctccacgccgccaggccggacatccagatgacacagagccctagcagcctgtctgccagcgtgggagacagagtgaccatcacatgcaaggccagcgaccacatcaacaactggctggcctggtatcagcagaagcctggacaggcccctaagctgctgatctacggcgctaccacactggaaacaggcgtgcccagcagattttctggcagcggctctggcaccgactacaccctgacaatatccagcctccagcctgaggacttcgccacctactactgtcagcagagctggaacaccccttggacattcggccagggcaccaagctggaaatcaagagaggcggaggcggaagtggaggcggaggatctggcggcggaggctctcaagttcagcttcaacagcctggcgctgagctggtcaaacctggcgcttctgtgaagatgagctgcaaagccagcggctacgccttcaacagctactggatcaactggatgaagcagaaacccggccagggactcgaatggatcggccaaatctatcccggcgacggcgacaccaactacaacggcaagttcaagggcagagccacactgaccgccgatacctctagcagcacagcctacatgcagctgagcagcctgaccagcgaagatagcgccgtgtacttctgtgcccggtccatcacaacagtcgtgggctgcgctatggactattggggccagggaacaagcgtgaccgtgtctagtacgcgtagaagtggggatcgctacaggaacctcgagggaggcagctggagccaccctcagtttgaaaaagactacaaagacgatgacgataagggatcagattacaaggatgatgatgacaaggggtcagattataaagacgacgatgataaagggagcgactacaaggacgacgatgacaaggcctggtcccatccccagttcgagaaacaccatcaccaccaccatcatcacactagtggctccggcgagggcagaggaagtctactaacctgcggagatgtggaagaaaatcctggcccacatatgaccgagtacaagcccacggtgcgcctcgccacccgcgacgacgtccccagggccgtacgcaccctcgccgccgcgttcgccgactaccccgccacgcgccacaccgtcgatccggaccgccacatcgagcgggtcaccgagctgcaagaactcttcctcacgcgcgtcgggctcgacatcggcaaggtgtgggtcgcggacgacggcgccgcggtggcggtctggaccacgccggagagcgtcgaagcgggggcggtgttcgccgagatcggcccgcgcatggccgagttgagcggttcccggctggccgcgcagcaacagatggaaggcctcctggcgccgcaccggcccaaggagcccgcgtggttcctggccaccgtcggcgtctcgcccgaccaccagggcaagggtctgggcagcgccgtcgtgctccccggagtggaggcggccgagcgcgccggggtgcccgccttcctggagacctccgcgccccgcaacctccccttctacgagcggctcggcttcaccgtcaccgccgacgtcgaggtgcccgaaggaccgcgcacctggtgcatgacccgcaagcccggtgcctga

SEQ ID NO: 5365 - DNA, 1701 bp, synthetic construct
  source 1..1701: mol_type = other DNA
atggccttaccagtgaccgccttgctcctgccgctggccttgctgctccacgccgccaggccggacatccagatgacacagagccctagcagcctgtctgccagcgtgggagacagagtgaccatcacatgcaaggccagcgaccacatcaacaactggctggcctggtatcagcagaagcctggacaggcccctaagctgctgatctacggcgctaccacactggaaacaggcgtgcccagcagattttctggcagcggctctggcaccgactacaccctgacaatatccagcctccagcctgaggacttcgccacctactactgtcagcagagctggaacaccccttggacattcggccagggcaccaagctggaaatcaagagaggcggaggcggaagtggaggcggaggatctggcggcggaggctctcaagttcagcttcaacagcctggcgctgagctggtcaaacctggcgcttctgtgaagatgagctgcaaagccagcggctacgccttcaacagctactggatcaactggatgaagcagaaacccggccagggactcgaatggatcggccaaatctatcccggcgacggcgacaccaactacaacggcaagttcaagggcagagccacactgaccgccgatacctctagcagcacagcctacatgcagctgagcagcctgaccagcgaagatagcgccgtgtacttctgtgcccggtccatcacaacagtcgtgggctgcgctatggactattggggccagggaacaagcgtgaccgtgtctagtacgcgtagaagttacgatcgctacaggaacctcgagggaggcagctggagccaccctcagtttgaaaaagactacaaagacgatgacgataagggatcagattacaaggatgatgatgacaaggggtcagattataaagacgacgatgataaagggagcgactacaaggacgacgatgacaaggcctggtcccatccccagttcgagaaacaccatcaccaccaccatcatcacactagtggctccggcgagggcagaggaagtctactaacctgcggagatgtggaagaaaatcctggcccacatatgaccgagtacaagcccacggtgcgcctcgccacccgcgacgacgtccccagggccgtacgcaccctcgccgccgcgttcgccgactaccccgccacgcgccacaccgtcgatccggaccgccacatcgagcgggtcaccgagctgcaagaactcttcctcacgcgcgtcgggctcgacatcggcaaggtgtgggtcgcggacgacggcgccgcggtggcggtctggaccacgccggagagcgtcgaagcgggggcggtgttcgccgagatcggcccgcgcatggccgagttgagcggttcccggctggccgcgcagcaacagatggaaggcctcctggcgccgcaccggcccaaggagcccgcgtggttcctggccaccgtcggcgtctcgcccgaccaccagggcaagggtctgggcagcgccgtcgtgctccccggagtggaggcggccgagcgcgccggggtgcccgccttcctggagacctccgcgccccgcaacctccccttctacgagcggctcggcttcaccgtcaccgccgacgtcgaggtgcccgaaggaccgcgcacctggtgcatgacccgcaagcccggtgcctga

SEQ ID NO: 5366 - DNA, 1701 bp, synthetic construct; identical to SEQ ID NO: 5218
  source 1..1701: mol_type = other DNA

SEQ ID NO: 5367 - DNA, 1701 bp, synthetic construct; identical to SEQ ID NO: 5364
  source 1..1701: mol_type = other DNA

SEQ ID NO: 5368 - DNA, 1701 bp, synthetic construct; identical to SEQ ID NO: 5193
  source 1..1701: mol_type = other DNA

SEQ ID NO: 5369 - DNA, 1701 bp, synthetic construct; identical to SEQ ID NO: 5221
  source 1..1701: mol_type = other DNA

SEQ ID NO: 5370 - DNA, 1701 bp, synthetic construct
  source 1..1701: mol_type = other DNA
atggccttaccagtgaccgccttgctcctgccgctggccttgctgctccacgccgccaggccggacatccagatgacacagagccctagcagcctgtctgccagcgtgggagacagagtgaccatcacatgcaaggccagcgaccacatcaacaactggctggcctggtatcagcagaagcctggacaggcccctaagctgctgatctacggcgctaccacactggaaacaggcgtgcccagcagattttctggcagcggctctggcaccgactacaccctgacaatatccagcctccagcctgaggacttcgccacctactactgtcagcagagctggaacaccccttggacattcggccagggcaccaagctggaaatcaagagaggcggaggcggaagtggaggcggaggatctggcggcggaggctctcaagttcagcttcaacagcctggcgctgagctggtcaaacctggcgcttctgtgaagatgagctgcaaagccagcggctacgccttcaacagctactggatcaactggatgaagcagaaacccggccagggactcgaatggatcggccaaatctatcccggcgacggcgacaccaactacaacggcaagttcaagggcagagccacactgaccgccgatacctctagcagcacagcctacatgcagctgagcagcctgaccagcgaagatagcgccgtgtacttctgtgcccggtccatcacaacagtcgtgggctgcgctatggactattggggccagggaacaagcgtgaccgtgtctagtacgcgtagaagtgaaatacgctacaggaacctcgagggaggcagctggagccaccctcagtttgaaaaagactacaaagacgatgacgataagggatcagattacaaggatgatgatgacaaggggtcagattataaagacgacgatgataaagggagcgactacaaggacgacgatgacaaggcctggtcccatccccagttcgagaaacaccatcaccaccaccatcatcacactagtggctccggcgagggcagaggaagtctactaacctgcggagatgtggaagaaaatcctggcccacatatgaccgagtacaagcccacggtgcgcctcgccacccgcgacgacgtccccagggccgtacgcaccctcgccgccgcgttcgccgactaccccgccacgcgccacaccgtcgatccggaccgccacatcgagcgggtcaccgagctgcaagaactcttcctcacgcgcgtcgggctcgacatcggcaaggtgtgggtcgcggacgacggcgccgcggtggcggtctggaccacgccggagagcgtcgaagcgggggcggtgttcgccgagatcggcccgcgcatggccgagttgagcggttcccggctggccgcgcagcaacagatggaaggcctcctggcgccgcaccggcccaaggagcccgcgtggttcctggccaccgtcggcgtctcgcccgaccaccagggcaagggtctgggcagcgccgtcgtgctccccggagtggaggcggccgagcgcgccggggtgcccgccttcctggagacctccgcgccccgcaacctccccttctacgagcggctcggcttcaccgtcaccgccgacgtcgaggtgcccgaaggaccgcgcacctggtgcatgacccgcaagcccggtgcctga

SEQ ID NO: 5371 - DNA, 1701 bp, synthetic construct; identical to SEQ ID NO: 5337
  source 1..1701: mol_type = other DNA

SEQ ID NO: 5372 - DNA, 1701 bp, synthetic construct
  source 1..1701: mol_type = other DNA
atggccttaccagtgaccgccttgctcctgccgctggccttgctgctccacgccgccaggccggacatccagatgacacagagccctagcagcctgtctgccagcgtgggagacagagtgaccatcacatgcaaggccagcgaccacatcaacaactggctggcctggtatcagcagaagcctggacaggcccctaagctgctgatctacggcgctaccacactggaaacaggcgtgcccagcagattttctggcagcggctctggcaccgactacaccctgacaatatccagcctccagcctgaggacttcgccacctactactgtcagcagagctggaacaccccttggacattcggccagggcaccaagctggaaatcaagagaggcggaggcggaagtggaggcggaggatctggcggcggaggctctcaagttcagcttcaacagcctggcgctgagctggtcaaacctggcgcttctgtgaagatgagctgcaaagccagcggctacgccttcaacagctactggatcaactggatgaagcagaaacccggccagggactcgaatggatcggccaaatctatcccggcgacggcgacaccaactacaacggcaagttcaagggcagagccacactgaccgccgatacctctagcagcacagcctacatgcagctgagcagcctgaccagcgaagatagcgccgtgtacttctgtgcccggtccatcacaacagtcgtgggctgcgctatggactattggggccagggaacaagcgtgaccgtgtctagtacgcgtagaagtgaacagcgctacaggaacctcgagggaggcagctggagccaccctcagtttgaaaaagactacaaagacgatgacgataagggatcagattacaaggatgatgatgacaaggggtcagattataaagacgacgatgataaagggagcgactacaaggacgacgatgacaaggcctggtcccatccccagttcgagaaacaccatcaccaccaccatcatcacactagtggctccggcgagggcagaggaagtctactaacctgcggagatgtggaagaaaatcctggcccacatatgaccgagtacaagcccacggtgcgcctcgccacccgcgacgacgtccccagggccgtacgcaccctcgccgccgcgttcgccgactaccccgccacgcgccacaccgtcgatccggaccgccacatcgagcgggtcaccgagctgcaagaactcttcctcacgcgcgtcgggctcgacatcggcaaggtgtgggtcgcggacgacggcgccgcggtggcggtctggaccacgccggagagcgtcgaagcgggggcggtgttcgccgagatcggcccgcgcatggccgagttgagcggttcccggctggccgcgcagcaacagatggaaggcctcctggcgccgcaccggcccaaggagcccgcgtggttcctggccaccgtcggcgtctcgcccgaccaccagggcaagggtctgggcagcgccgtcgtgctccccggagtggaggcggccgagcgcgccggggtgcccgccttcctggagacctccgcgccccgcaacctccccttctacgagcggctcggcttcaccgtcaccgccgacgtcgaggtgcccgaaggaccgcgcacctggtgcatgacccgcaagcccggtgcctga

SEQ ID NO: 5373 - DNA, 1701 bp, synthetic construct
  source 1..1701: mol_type = other DNA
atggccttaccagtgaccgccttgctcctgccgctggccttgctgctccacgccgccaggccggacatccagatgacacagagccctagcagcctgtctgccagcgtgggagacagagtgaccatcacatgcaaggccagcgaccacatcaacaactggctggcctggtatcagcagaagcctggacaggcccctaagctgctgatctacggcgctaccacactggaaacaggcgtgcccagcagattttctggcagcggctctggcaccgactacaccctgacaatatccagcctccagcctgaggacttcgccacctactactgtcagcagagctggaacaccccttggacattcggccagggcaccaagctggaaatcaagagaggcggaggcggaagtggaggcggaggatctggcggcggaggctctcaagttcagcttcaacagcctggcgctgagctggtcaaacctggcgcttctgtgaagatgagctgcaaagccagcggctacgccttcaacagctactggatcaactggatgaagcagaaacccggccagggactcgaatggatcggccaaatctatcccggcgacggcgacaccaactacaacggcaagttcaagggcagagccacactgaccgccgatacctctagcagcacagcctacatgcagctgagcagcctgaccagcgaagatagcgccgtgtacttctgtgcccggtccatcacaacagtcgtgggctgcgctatggactattggggccagggaacaagcgtgaccgtgtctagtacgcgtagaagtgaagcccgctacaggaacctcgagggaggcagctggagccaccctcagtttgaaaaagactacaaagacgatgacgataagggatcagattacaaggatgatgatgacaaggggtcagattataaagacgacgatgataaagggagcgactacaaggacgacgatgacaaggcctggtcccatccccagttcgagaaacaccatcaccaccaccatcatcacactagtggctccggcgagggcagaggaagtctactaacctgcggagatgtggaagaaaatcctggcccacatatgaccgagtacaagcccacggtgcgcctcgccacccgcgacgacgtccccagggccgtacgcaccctcgccgccgcgttcgccgactaccccgccacgcgccacaccgtcgatccggaccgccacatcgagcgggtcaccgagctgcaagaactcttcctcacgcgcgtcgggctcgacatcggcaaggtgtgggtcgcggacgacggcgccgcggtggcggtctggaccacgccggagagcgtcgaagcgggggcggtgttcgccgagatcggcccgcgcatggccgagttgagcggttcccggctggccgcgcagcaacagatggaaggcctcctggcgccgcaccggcccaaggagcccgcgtggttcctggccaccgtcggcgtctcgcccgaccaccagggcaagggtctgggcagcgccgtcgtgctccccggagtggaggcggccgagcgcgccggggtgcccgccttcctggagacctccgcgccccgcaacctccccttctacgagcggctcggcttcaccgtcaccgccgacgtcgaggtgcccgaaggaccgcgcacctggtgcatgacccgcaagcccggtgcctga

SEQ ID NO: 5374 - DNA, 1701 bp, synthetic construct; identical to SEQ ID NO: 5373
  source 1..1701: mol_type = other DNA

SEQ ID NO: 5375 - DNA, 1698 bp, synthetic construct; identical to SEQ ID NO: 5195
  source 1..1698: mol_type = other DNA

SEQ ID NO: 5376 - DNA, 1698 bp, synthetic construct
  source 1..1698: mol_type = other DNA
atggccttaccagtgaccgccttgctcctgccgctggccttgctgctccacgccgccaggccggacatccagatgacacagagccctagcagcctgtctgccagcgtgggagacagagtgaccatcacatgcaaggccagcgaccacatcaacaactggctggcctggtatcagcagaagcctggacaggcccctaagctgctgatctacggcgctaccacactggaaacaggcgtgcccagcagattttctggcagcggctctggcaccgactacaccctgacaatatccagcctccagcctgaggacttcgccacctactactgtcagcagagctggaacaccccttggacattcggccagggcaccaagctggaaatcaagagaggcggaggcggaagtggaggcggaggatctggcggcggaggctctcaagttcagcttcaacagcctggcgctgagctggtcaaacctggcgcttctgtgaagatgagctgcaaagccagcggctacgccttcaacagctactggatcaactggatgaagcagaaacccggccagggactcgaatggatcggccaaatctatcccggcgacggcgacaccaactacaacggcaagttcaagggcagagccacactgaccgccgatacctctagcagcacagcctacatgcagctgagcagcctgaccagcgaagatagcgccgtgtacttctgtgcccggtccatcacaacagtcgtgggctgcgctatggactattggggccagggaacaagcgtgaccgtgtctagtacgcgtagagccgaagatcgctacaggctcgagggaggcagctggagccaccctcagtttgaaaaagactacaaagacgatgacgataagggatcagattacaaggatgatgatgacaaggggtcagattataaagacgacgatgataaagggagcgactacaaggacgacgatgacaaggcctggtcccatccccagttcgagaaacaccatcaccaccaccatcatcacactagtggctccggcgagggcagaggaagtctactaacctgcggagatgtggaagaaaatcctggcccacatatgaccgagtacaagcccacggtgcgcctcgccacccgcgacgacgtccccagggccgtacgcaccctcgccgccgcgttcgccgactaccccgccacgcgccacaccgtcgatccggaccgccacatcgagcgggtcaccgagctgcaagaactcttcctcacgcgcgtcgggctcgacatcggcaaggtgtgggtcgcggacgacggcgccgcggtggcggtctggaccacgccggagagcgtcgaagcgggggcggtgttcgccgagatcggcccgcgcatggccgagttgagcggttcccggctggccgcgcagcaacagatggaaggcctcctggcgccgcaccggcccaaggagcccgcgtggttcctggccaccgtcggcgtctcgcccgaccaccagggcaagggtctgggcagcgccgtcgtgctccccggagtggaggcggccgagcgcgccggggtgcccgccttcctggagacctccgcgccccgcaacctccccttctacgagcggctcggcttcaccgtcaccgccgacgtcgaggtgcccgaaggaccgcgcacctggtgcatgacccgcaagcccggtgcctga

SEQ ID NO: 5377 - DNA, 1698 bp, synthetic construct; identical to SEQ ID NO: 5273
  source 1..1698: mol_type = other DNA

SEQ ID NO: 5378 - DNA, 1698 bp, synthetic construct; identical to SEQ ID NO: 5347
  source 1..1698: mol_type = other DNA

SEQ ID NO: 5379 - DNA, 1698 bp, synthetic construct
  source 1..1698: mol_type = other DNA
atggccttaccagtgaccgccttgctcctgccgctggccttgctgctccacgccgccaggccggacatccagatgacacagagccctagcagcctgtctgccagcgtgggagacagagtgaccatcacatgcaaggccagcgaccacatcaacaactggctggcctggtatcagcagaagcctggacaggcccctaagctgctgatctacggcgctaccacactggaaacaggcgtgcccagcagattttctggcagcggctctggcaccgactacaccctgacaatatccagcctccagcctgaggacttcgccacctactactgtcagcagagctggaacaccccttggacattcggccagggcaccaagctggaaatcaagagaggcggaggcggaagtggaggcggaggatctggcggcggaggctctcaagttcagcttcaacagcctggcgctgagctggtcaaacctggcgcttctgtgaagatgagctgcaaagccagcggctacgccttcaacagctactggatcaactggatgaagcagaaacccggccagggactcgaatggatcggccaaatctatcccggcgacggcgacaccaactacaacggcaagttcaagggcagagccacactgaccgccgatacctctagcagcacagcctacatgcagctgagcagcctgaccagcgaagatagcgccgtgtacttctgtgcccggtccatcacaacagtcgtgggctgcgctatggactattggggccagggaacaagcgtgaccgtgtctagtacgcgtagacacgaagatcgctacaggctcgagggaggcagctggagccaccctcagtttgaaaaagactacaaagacgatgacgataagggatcagattacaaggatgatgatgacaaggggtcagattataaagacgacgatgataaagggagcgactacaaggacgacgatgacaaggcctggtcccatccccagttcgagaaacaccatcaccaccaccatcatcacactagtggctccggcgagggcagaggaagtctactaacctgcggagatgtggaagaaaatcctggcccacatatgaccgagtacaagcccacggtgcgcctcgccacccgcgacgacgtccccagggccgtacgcaccctcgccgccgcgttcgccgactaccccgccacgcgccacaccgtcgatccggaccgccacatcgagcgggtcaccgagctgcaagaactcttcctcacgcgcgtcgggctcgacatcggcaaggtgtgggtcgcggacgacggcgccgcggtggcggtctggaccacgccggagagcgtcgaagcgggggcggtgttcgccgagatcggcccgcgcatggccgagttgagcggttcccggctggccgcgcagcaacagatggaaggcctcctggcgccgcaccggcccaaggagcccgcgtggttcctggccaccgtcggcgtctcgcccgaccaccagggcaagggtctgggcagcgccgtcgtgctccccggagtggaggcggccgagcgcgccggggtgcccgccttcctggagacctccgcgccccgcaacctccccttctacgagcggctcggcttcaccgtcaccgccgacgtcgaggtgcccgaaggaccgcgcacctggtgcatgacccgcaagcccggtgcctga

SEQ ID NO: 5380 - DNA, 1698 bp, synthetic construct
  source 1..1698: mol_type = other DNA
atggccttaccagtgaccgccttgctcctgccgctggccttgctgctccacgccgccaggccggacatccagatgacacagagccctagcagcctgtctgccagcgtgggagacagagtgaccatcacatgcaaggccagcgaccacatcaacaactggctggcctggtatcagcagaagcctggacaggcccctaagctgctgatctacggcgctaccacactggaaacaggcgtgcccagcagattttctggcagcggctctggcaccgactacaccctgacaatatccagcctccagcctgaggacttcgccacctactactgtcagcagagctggaacaccccttggacattcggccagggcaccaagctggaaatcaagagaggcggaggcggaagtggaggcggaggatctggcggcggaggctctcaagttcagcttcaacagcctggcgctgagctggtcaaacctggcgcttctgtgaagatgagctgcaaagccagcggctacgccttcaacagctactggatcaactggatgaagcagaaacccggccagggactcgaatggatcggccaaatctatcccggcgacggcgacaccaactacaacggcaagttcaagggcagagccacactgaccgccgatacctctagcagcacagcctacatgcagctgagcagcctgaccagcgaagatagcgccgtgtacttctgtgcccggtccatcacaacagtcgtgggctgcgctatggactattggggccagggaacaagcgtgaccgtgtctagtacgcgtagaattgaagatcgctacaggctcgagggaggcagctggagccaccctcagtttgaaaaagactacaaagacgatgacgataagggatcagattacaaggatgatgatgacaaggggtcagattataaagacgacgatgataaagggagcgactacaaggacgacgatgacaaggcctggtcccatccccagttcgagaaacaccatcaccaccaccatcatcacactagtggctccggcgagggcagaggaagtctactaacctgcggagatgtggaagaaaatcctggcccacatatgaccgagtacaagcccacggtgcgcctcgccacccgcgacgacgtccccagggccgtacgcaccctcgccgccgcgttcgccgactaccccgccacgcgccacaccgtcgatccggaccgccacatcgagcgggtcaccgagctgcaagaactcttcctcacgcgcgtcgggctcgacatcggcaaggtgtgggtcgcggacgacggcgccgcggtggcggtctggaccacgccggagagcgtcgaagcgggggcggtgttcgccgagatcggcccgcgcatggccgagttgagcggttcccggctggccgcgcagcaacagatggaaggcctcctggcgccgcaccggcccaaggagcccgcgtggttcctggccaccgtcggcgtctcgcccgaccaccagggcaagggtctgggcagcgccgtcgtgctccccggagtggaggcggccgagcgcgccggggtgcccgccttcctggagacctccgcgccccgcaacctccccttctacgagcggctcggcttcaccgtcaccgccgacgtcgaggtgcccgaaggaccgcgcacctggtgcatgacccgcaagcccggtgcctga

SEQ ID NO: 5381 - DNA, 1698 bp, synthetic construct; identical to SEQ ID NO: 5196
  source 1..1698: mol_type = other DNA

SEQ ID NO: 5382 - DNA, 1698 bp, synthetic construct
  source 1..1698: mol_type = other DNA
atggccttaccagtgaccgccttgctcctgccgctggccttgctgctccacgccgccaggccggacatccagatgacacagagccctagcagcctgtctgccagcgtgggagacagagtgaccatcacatgcaaggccagcgaccacatcaacaactggctggcctggtatcagcagaagcctggacaggcccctaagctgctgatctacggcgctaccacactggaaacaggcgtgcccagcagattttctggcagcggctctggcaccgactacaccctgacaatatccagcctccagcctgaggacttcgccacctactactgtcagcagagctggaacaccccttggacattcggccagggcaccaagctggaaatcaagagaggcggaggcggaagtggaggcggaggatctggcggcggaggctctcaagttcagcttcaacagcctggcgctgagctggtcaaacctggcgcttctgtgaagatgagctgcaaagccagcggctacgccttcaacagctactggatcaactggatgaagcagaaacccggccagggactcgaatggatcggccaaatctatcccggcgacggcgacaccaactacaacggcaagttcaagggcagagccacactgaccgccgatacctctagcagcacagcctacatgcagctgagcagcctgaccagcgaagatagcgccgtgtacttctgtgcccggtccatcacaacagtcgtgggctgcgctatggactattggggccagggaacaagcgtgaccgtgtctagtacgcgtagacatgaagatcgctacaggctcgagggaggcagctggagccaccctcagtttgaaaaagactacaaagacgatgacgataagggatcagattacaaggatgatgatgacaaggggtcagattataaagacgacgatgataaagggagcgactacaaggacgacgatgacaaggcctggtcccatccccagttcgagaaacaccatcaccaccaccatcatcacactagtggctccggcgagggcagaggaagtctactaacctgcggagatgtggaagaaaatcctggcccacatatgaccgagtacaagcccacggtgcgcctcgccacccgcgacgacgtccccagggccgtacgcaccctcgccgccgcgttcgccgactaccccgccacgcgccacaccgtcgatccggaccgccacatcgagcgggtcaccgagctgcaagaactcttcctcacgcgcgtcgggctcgacatcggcaaggtgtgggtcgcggacgacggcgccgcggtggcggtctggaccacgccggagagcgtcgaagcgggggcggtgttcgccgagatcggcccgcgcatggccgagttgagcggttcccggctggccgcgcagcaacagatggaaggcctcctggcgccgcaccggcccaaggagcccgcgtggttcctggccaccgtcggcgtctcgcccgaccaccagggcaagggtctgggcagcgccgtcgtgctccccggagtggaggcggccgagcgcgccggggtgcccgccttcctggagacctccgcgccccgcaacctccccttctacgagcggctcggcttcaccgtcaccgccgacgtcgaggtgcccgaaggaccgcgcacctggtgcatgacccgcaagcccggtgcctga

SEQ ID NO: 5383 - DNA, 1698 bp, synthetic construct
  source 1..1698: mol_type = other DNA
atggccttaccagtgaccgccttgctcctgccgctggccttgctgctccacgccgccaggccggacatccagatgacacagagccctagcagcctgtctgccagcgtgggagacagagtgaccatcacatgcaaggccagcgaccacatcaacaactggctggcctggtatcagcagaagcctggacaggcccctaagctgctgatctacggcgctaccacactggaaacaggcgtgcccagcagattttctggcagcggctctggcaccgactacaccctgacaatatccagcctccagcctgaggacttcgccacctactactgtcagcagagctggaacaccccttggacattcggccagggcaccaagctggaaatcaagagaggcggaggcggaagtggaggcggaggatctggcggcggaggctctcaagttcagcttcaacagcctggcgctgagctggtcaaacctggcgcttctgtgaagatgagctgcaaagccagcggctacgccttcaacagctactggatcaactggatgaagcagaaacccggccagggactcgaatggatcggccaaatctatcccggcgacggcgacaccaactacaacggcaagttcaagggcagagccacactgaccgccgatacctctagcagcacagcctacatgcagctgagcagcctgaccagcgaagatagcgccgtgtacttctgtgcccggtccatcacaacagtcgtgggctgcgctatggactattggggccagggaacaagcgtgaccgtgtctagtacgcgtagaatagaagatcgctacaggctcgagggaggcagctggagccaccctcagtttgaaaaagactacaaagacgatgacgataagggatcagattacaaggatgatgatgacaaggggtcagattataaagacgacgatgataaagggagcgactacaaggacgacgatgacaaggcctggtcccatccccagttcgagaaacaccatcaccaccaccatcatcacactagtggctccggcgagggcagaggaagtctactaacctgcggagatgtggaagaaaatcctggcccacatatgaccgagtacaagcccacggtgcgcctcgccacccgcgacgacgtccccagggccgtacgcaccctcgccgccgcgttcgccgactaccccgccacgcgccacaccgtcgatccggaccgccacatcgagcgggtcaccgagctgcaagaactcttcctcacgcgcgtcgggctcgacatcggcaaggtgtgggtcgcggacgacggcgccgcggtggcggtctggaccacgccggagagcgtcgaagcgggggcggtgttcgccgagatcggcccgcgcatggccgagttgagcggttcccggctggccgcgcagcaacagatggaaggcctcctggcgccgcaccggcccaaggagcccgcgtggttcctggccaccgtcggcgtctcgcccgaccaccagggcaagggtctgggcagcgccgtcgtgctccccggagtggaggcggccgagcgcgccggggtgcccgccttcctggagacctccgcgccccgcaacctccccttctacgagcggctcggcttcaccgtcaccgccgacgtcgaggtgcccgaaggaccgcgcacctggtgcatgacccgcaagcccggtgcctga

SEQ ID NO: 5384 - DNA, 1698 bp, synthetic construct
  source 1..1698: mol_type = other DNA
atggccttaccagtgaccgccttgctcctgccgctggccttgctgctccacgccgccaggccggacatccagatgacacagagccctagcagcctgtctgccagcgtgggagacagagtgaccatcacatgcaaggccagcgaccacatcaacaactggctggcctggtatcagcagaagcctggacaggcccctaagctgctgatctacggcgctaccacactggaaacaggcgtgcccagcagattttctggcagcggctctggcaccgactacaccctgacaatatccagcctccagcctgaggacttcgccacctactactgtcagcagagctggaacaccccttggacattcggccagggcaccaagctggaaatcaagagaggcggaggcggaagtggaggcggaggatctggcggcggaggctctcaagttcagcttcaacagcctggcgctgagctggtcaaacctggcgcttctgtgaagatgagctgcaaagccagcggctacgccttcaacagctactggatcaactggatgaagcagaaacccggccagggactcgaatggatcggccaaatctatcccggcgacggcgacaccaactacaacggcaagttcaagggcagagccacactgaccgccgatacctctagcagcacagcctacatgcagctgagcagcctgaccagcgaagatagcgccgtgtacttctgtgcccggtccatcacaacagtcgtgggctgcgctatggactattggggccagggaacaagcgtgaccgtgtctagtacgcgtagaagtggtgatcgctacaggctcgagggaggcagctggagccaccctcagtttgaaaaagactacaaagacgatgacgataagggatcagattacaaggatgatgatgacaaggggtcagattataaagacgacgatgataaagggagcgactacaaggacgacgatgacaaggcctggtcccatccccagttcgagaaacaccatcaccaccaccatcatcacactagtggctccggcgagggcagaggaagtctactaacctgcggagatgtggaagaaaatcctggcccacatatgaccgagtacaagcccacggtgcgcctcgccacccgcgacgacgtccccagggccgtacgcaccctcgccgccgcgttcgccgactaccccgccacgcgccacaccgtcgatccggaccgccacatcgagcgggtcaccgagctgcaagaactcttcctcacgcgcgtcgggctcgacatcggcaaggtgtgggtcgcggacgacggcgccgcggtggcggtctggaccacgccggagagcgtcgaagcgggggcggtgttcgccgagatcggcccgcgcatggccgagttgagcggttcccggctggccgcgcagcaacagatggaaggcctcctggcgccgcaccggcccaaggagcccgcgtggttcctggccaccgtcggcgtctcgcccgaccaccagggcaagggtctgggcagcgccgtcgtgctccccggagtggaggcggccgagcgcgccggggtgcccgccttcctggagacctccgcgccccgcaacctccccttctacgagcggctcggcttcaccgtcaccgccgacgtcgaggtgcccgaaggaccgcgcacctggtgcatgacccgcaagcccggtgcctga

SEQ ID NO: 5385 - DNA, 1698 bp, synthetic construct
  source 1..1698: mol_type = other DNA
atggccttaccagtgaccgccttgctcctgccgctggccttgctgctccacgccgccaggccggacatccagatgacacagagccctagcagcctgtctgccagcgtgggagacagagtgaccatcacatgcaaggccagcgaccacatcaacaactggctggcctggtatcagcagaagcctggacaggcccctaagctgctgatctacggcgctaccacactggaaacaggcgtgcccagcagattttctggcagcggctctggcaccgactacaccctgacaatatccagcctccagcctgaggacttcgccacctactactgtcagcagagctggaacaccccttggacattcggccagggcaccaagctggaaatcaagagaggcggaggcggaagtggaggcggaggatctggcggcggaggctctcaagttcagcttcaacagcctggcgctgagctggtcaaacctggcgcttctgtgaagatgagctgcaaagccagcggctacgccttcaacagctactggatcaactggatgaagcagaaacccggccagggactcgaatggatcggccaaatctatcccggcgacggcgacaccaactacaacggcaagttcaagggcagagccacactgaccgccgatacctctagcagcacagcctacatgcagctgagcagcctgaccagcgaagatagcgccgtgtacttctgtgcccggtccatcacaacagtcgtgggctgcgctatggactattggggccagggaacaagcgtgaccgtgtctagtacgcgtagaagttcagatcgctacaggctcgagggaggcagctggagccaccctcagtttgaaaaagactacaaagacgatgacgataagggatcagattacaaggatgatgatgacaaggggtcagattataaagacgacgatgataaagggagcgactacaaggacgacgatgacaaggcctggtcccatccccagttcgagaaacaccatcaccaccaccatcatcacactagtggctccggcgagggcagaggaagtctactaacctgcggagatgtggaagaaaatcctggcccacatatgaccgagtacaagcccacggtgcgcctcgccacccgcgacgacgtccccagggccgtacgcaccctcgccgccgcgttcgccgactaccccgccacgcgccacaccgtcgatccggaccgccacatcgagcgggtcaccgagctgcaagaactcttcctcacgcgcgtcgggctcgacatcggcaaggtgtgggtcgcggacgacggcgccgcggtggcggtctggaccacgccggagagcgtcgaagcgggggcggtgttcgccgagatcggcccgcgcatggccgagttgagcggttcccggctggccgcgcagcaacagatggaaggcctcctggcgccgcaccggcccaaggagcccgcgtggttcctggccaccgtcggcgtctcgcccgaccaccagggcaagggtctgggcagcgccgtcgtgctccccggagtggaggcggccgagcgcgccggggtgcccgccttcctggagacctccgcgccccgcaacctccccttctacgagcggctcggcttcaccgtcaccgccgacgtcgaggtgcccgaaggaccgcgcacctggtgcatgacccgcaagcccggtgcctga

SEQ ID NO: 5386 - DNA, 1698 bp, synthetic construct
  source 1..1698: mol_type = other DNA
atggccttaccagtgaccgccttgctcctgccgctggccttgctgctccacgccgccaggccggacatccagatgacacagagccctagcagcctgtctgccagcgtgggagacagagtgaccatcacatgcaaggccagcgaccacatcaacaactggctggcctggtatcagcagaagcctggacaggcccctaagctgctgatctacggcgctaccacactggaaacaggcgtgcccagcagattttctggcagcggctctggcaccgactacaccctgacaatatccagcctccagcctgaggacttcgccacctactactgtcagcagagctggaacaccccttggacattcggccagggcaccaagctggaaatcaagagaggcggaggcggaagtggaggcggaggatctggcggcggaggctctcaagttcagcttcaacagcctggcgctgagctggtcaaacctggcgcttctgtgaagatgagctgcaaagccagcggctacgccttcaacagctactggatcaactggatgaagcagaaacccggccagggactcgaatggatcggccaaatctatcccggcgacggcgacaccaactacaacggcaagttcaagggcagagccacactgaccgccgatacctctagcagcacagcctacatgcagctgagcagcctgaccagcgaagatagcgccgtgtacttctgtgcccggtccatcacaacagtcgtgggctgcgctatggactattggggccagggaacaagcgtgaccgtgtctagtacgcgtagaagttgtgatcgctacaggctcgagggaggcagctggagccaccctcagtttgaaaaagactacaaagacgatgacgataagggatcagattacaaggatgatgatgacaaggggtcagattataaagacgacgatgataaagggagcgactacaaggacgacgatgacaaggcctggtcccatccccagttcgagaaacaccatcaccaccaccatcatcacactagtggctccggcgagggcagaggaagtctactaacctgcggagatgtggaagaaaatcctggcccacatatgaccgagtacaagcccacggtgcgcctcgccacccgcgacgacgtccccagggccgtacgcaccctcgccgccgcgttcgccgactaccccgccacgcgccacaccgtcgatccggaccgccacatcgagcgggtcaccgagctgcaagaactcttcctcacgcgcgtcgggctcgacatcggcaaggtgtgggtcgcggacgacggcgccgcggtggcggtctggaccacgccggagagcgtcgaagcgggggcggtgttcgccgagatcggcccgcgcatggccgagttgagcggttcccggctggccgcgcagcaacagatggaaggcctcctggcgccgcaccggcccaaggagcccgcgtggttcctggccaccgtcggcgtctcgcccgaccaccagggcaagggtctgggcagcgccgtcgtgctccccggagtggaggcggccgagcgcgccggggtgcccgccttcctggagacctccgcgccccgcaacctccccttctacgagcggctcggcttcaccgtcaccgccgacgtcgaggtgcccgaaggaccgcgcacctggtgcatgacccgcaagcccggtgcctga

SEQ ID NO: 5387 - DNA, 1698 bp, synthetic construct
  source 1..1698: mol_type = other DNA
atggccttaccagtgaccgccttgctcctgccgctggccttgctgctccacgccgccaggccggacatccagatgacacagagccctagcagcctgtctgccagcgtgggagacagagtgaccatcacatgcaaggccagcgaccacatcaacaactggctggcctggtatcagcagaagcctggacaggcccctaagctgctgatctacggcgctaccacactggaaacaggcgtgcccagcagattttctggcagcggctctggcaccgactacaccctgacaatatccagcctccagcctgaggacttcgccacctactactgtcagcagagctggaacaccccttggacattcggccagggcaccaagctggaaatcaagagaggcggaggcggaagtggaggcggaggatctggcggcggaggctctcaagttcagcttcaacagcctggcgctgagctggtcaaacctggcgcttctgtgaagatgagctgcaaagccagcggctacgccttcaacagctactggatcaactggatgaagcagaaacccggccagggactcgaatggatcggccaaatctatcccggcgacggcgacaccaactacaacggcaagttcaagggcagagccacactgaccgccgatacctctagcagcacagcctacatgcagctgagcagcctgaccagcgaagatagcgccgtgtacttctgtgcccggtccatcacaacagtcgtgggctgcgctatggactattggggccagggaacaagcgtgaccgtgtctagtacgcgtagaagtacggatcgctacaggctcgagggaggcagctggagccaccctcagtttgaaaaagactacaaagacgatgacgataagggatcagattacaaggatgatgatgacaaggggtcagattataaagacgacgatgataaagggagcgactacaaggacgacgatgacaaggcctggtcccatccccagttcgagaaacaccatcaccaccaccatcatcacactagtggctccggcgagggcagaggaagtctactaacctgcggagatgtggaagaaaatcctggcccacatatgaccgagtacaagcccacggtgcgcctcgccacccgcgacgacgtccccagggccgtacgcaccctcgccgccgcgttcgccgactaccccgccacgcgccacaccgtcgatccggaccgccacatcgagcgggtcaccgagctgcaagaactcttcctcacgcgcgtcgggctcgacatcggcaaggtgtgggtcgcggacgacggcgccgcggtggcggtctggaccacgccggagagcgtcgaagcgggggcggtgttcgccgagatcggcccgcgcatggccgagttgagcggttcccggctggccgcgcagcaacagatggaaggcctcctggcgccgcaccggcccaaggagcccgcgtggttcctggccaccgtcggcgtctcgcccgaccaccagggcaagggtctgggcagcgccgtcgtgctccccggagtggaggcggccgagcgcgccggggtgcccgccttcctggagacctccgcgccccgcaacctccccttctacgagcggctcggcttcaccgtcaccgccgacgtcgaggtgcccgaaggaccgcgcacctggtgcatgacccgcaagcccggtgcctga

SEQ ID NO: 5388 - DNA, 1698 bp, synthetic construct; identical to SEQ ID NO: 5385
  source 1..1698: mol_type = other DNA

SEQ ID NO: 5389 - DNA, 1698 bp, synthetic construct
  source 1..1698: mol_type = other DNA
atggccttaccagtgaccgccttgctcctgccgctggccttgctgctccacgccgccaggccggacatccagatgacacagagccctagcagcctgtctgccagcgtgggagacagagtgaccatcacatgcaaggccagcgaccacatcaacaactggctggcctggtatcagcagaagcctggacaggcccctaagctgctgatctacggcgctaccacactggaaacaggcgtgcccagcagattttctggcagcggctctggcaccgactacaccctgacaatatccagcctccagcctgaggacttcgccacctactactgtcagcagagctggaacaccccttggacattcggccagggcaccaagctggaaatcaagagaggcggaggcggaagtggaggcggaggatctggcggcggaggctctcaagttcagcttcaacagcctggcgctgagctggtcaaacctggcgcttctgtgaagatgagctgcaaagccagcggctacgccttcaacagctactggatcaactggatgaagcagaaacccggccagggactcgaatggatcggccaaatctatcccggcgacggcgacaccaactacaacggcaagttcaagggcagagccacactgaccgccgatacctctagcagcacagcctacatgcagctgagcagcctgaccagcgaagatagcgccgtgtacttctgtgcccggtccatcacaacagtcgtgggctgcgctatggactattggggccagggaacaagcgtgaccgtgtctagtacgcgtagaagtactgatcgctacaggctcgagggaggcagctggagccaccctcagtttgaaaaagactacaaagacgatgacgataagggatcagattacaaggatgatgatgacaaggggtcagattataaagacgacgatgataaagggagcgactacaaggacgacgatgacaaggcctggtcccatccccagttcgagaaacaccatcaccaccaccatcatcacactagtggctccggcgagggcagaggaagtctactaacctgcggagatgtggaagaaaatcctggcccacatatgaccgagtacaagcccacggtgcgcctcgccacccgcgacgacgtccccagggccgtacgcaccctcgccgccgcgttcgccgactaccccgccacgcgccacaccgtcgatccggaccgccacatcgagcgggtcaccgagctgcaagaactcttcctcacgcgcgtcgggctcgacatcggcaaggtgtgggtcgcggacgacggcgccgcggtggcggtctggaccacgccggagagcgtcgaagcgggggcggtgttcgccgagatcggcccgcgcatggccgagttgagcggttcccggctggccgcgcagcaacagatggaaggcctcctggcgccgcaccggcccaaggagcccgcgtggttcctggccaccgtcggcgtctcgcccgaccaccagggcaagggtctgggcagcgccgtcgtgctccccggagtggaggcggccgagcgcgccggggtgcccgccttcctggagacctccgcgccccgcaacctccccttctacgagcggctcggcttcaccgtcaccgccgacgtcgaggtgcccgaaggaccgcgcacctggtgcatgacccgcaagcccggtgcctga

SEQ ID NO: 5390 - DNA, 1698 bp, synthetic construct; identical to SEQ ID NO: 5386
  source 1..1698: mol_type = other DNA

SEQ ID NO: 5391 - DNA, 1698 bp, synthetic construct
  source 1..1698: mol_type = other DNA
atggccttaccagtgaccgccttgctcctgccgctggccttgctgctccacgccgccaggccggacatccagatgacacagagccctagcagcctgtctgccagcgtgggagacagagtgaccatcacatgcaaggccagcgaccacatcaacaactggctggcctggtatcagcagaagcctggacaggcccctaagctgctgatctacggcgctaccacactggaaacaggcgtgcccagcagattttctggcagcggctctggcaccgactacaccctgacaatatccagcctccagcctgaggacttcgccacctactactgtcagcagagctggaacaccccttggacattcggccagggcaccaagctggaaatcaagagaggcggaggcggaagtggaggcggaggatctggcggcggaggctctcaagttcagcttcaacagcctggcgctgagctggtcaaacctggcgcttctgtgaagatgagctgcaaagccagcggctacgccttcaacagctactggatcaactggatgaagcagaaacccggccagggactcgaatggatcggccaaatctatcccggcgacggcgacaccaactacaacggcaagttcaagggcagagccacactgaccgccgatacctctagcagcacagcctacatgcagctgagcagcctgaccagcgaagatagcgccgtgtacttctgtgcccggtccatcacaacagtcgtgggctgcgctatggactattggggccagggaacaagcgtgaccgtgtctagtacgcgtagaagtgaagggcgctacaggctcgagggaggcagctggagccaccctcagtttgaaaaagactacaaagacgatgacgataagggatcagattacaaggatgatgatgacaaggggtcagattataaagacgacgatgataaagggagcgactacaaggacgacgatgacaaggcctggtcccatccccagttcgagaaacaccatcaccaccaccatcatcacactagtggctccggcgagggcagaggaagtctactaacctgcggagatgtggaagaaaatcctggcccacatatgaccgagtacaagcccacggtgcgcctcgccacccgcgacgacgtccccagggccgtacgcaccctcgccgccgcgttcgccgactaccccgccacgcgccacaccgtcgatccggaccgccacatcgagcgggtcaccgagctgcaagaactcttcctcacgcgcgtcgggctcgacatcggcaaggtgtgggtcgcggacgacggcgccgcggtggcggtctggaccacgccggagagcgtcgaagcgggggcggtgttcgccgagatcggcccgcgcatggccgagttgagcggttcccggctggccgcgcagcaacagatggaaggcctcctggcgccgcaccggcccaaggagcccgcgtggttcctggccaccgtcggcgtctcgcccgaccaccagggcaagggtctgggcagcgccgtcgtgctccccggagtggaggcggccgagcgcgccggggtgcccgccttcctggagacctccgcgccccgcaacctccccttctacgagcggctcggcttcaccgtcaccgccgacgtcgaggtgcccgaaggaccgcgcacctggtgcatgacccgcaagcccggtgcctga

SEQ ID NO: 5392 - DNA, 1698 bp, synthetic construct
  source 1..1698: mol_type = other DNA
atggccttaccagtgaccgccttgctcctgccgctggccttgctgctccacgccgccaggccggacatccagatgacacagagccctagcagcctgtctgccagcgtgggagacagagtgaccatcacatgcaaggccagcgaccacatcaacaactggctggcctggtatcagcagaagcctggacaggcccctaagctgctgatctacggcgctaccacactggaaacaggcgtgcccagcagattttctggcagcggctctggcaccgactacaccctgacaatatccagcctccagcctgaggacttcgccacctactactgtcagcagagctggaacaccccttggacattcggccagggcaccaagctggaaatcaagagaggcggaggcggaagtggaggcggaggatctggcggcggaggctctcaagttcagcttcaacagcctggcgctgagctggtcaaacctggcgcttctgtgaagatgagctgcaaagccagcggctacgccttcaacagctactggatcaactggatgaagcagaaacccggccagggactcgaatggatcggccaaatctatcccggcgacggcgacaccaactacaacggcaagttcaagggcagagccacactgaccgccgatacctctagcagcacagcctacatgcagctgagcagcctgaccagcgaagatagcgccgtgtacttctgtgcccggtccatcacaacagtcgtgggctgcgctatggactattggggccagggaacaagcgtgaccgtgtctagtacgcgtagaagtgaagttcgctacaggctcgagggaggcagctggagccaccctcagtttgaaaaagactacaaagacgatgacgataagggatcagattacaaggatgatgatgacaaggggtcagattataaagacgacgatgataaagggagcgactacaaggacgacgatgacaaggcctggtcccatccccagttcgagaaacaccatcaccaccaccatcatcacactagtggctccggcgagggcagaggaagtctactaacctgcggagatgtggaagaaaatcctggcccacatatgaccgagtacaagcccacggtgcgcctcgccacccgcgacgacgtccccagggccgtacgcaccctcgccgccgcgttcgccgactaccccgccacgcgccacaccgtcgatccggaccgccacatcgagcgggtcaccgagctgcaagaactcttcctcacgcgcgtcgggctcgacatcggcaaggtgtgggtcgcggacgacggcgccgcggtggcggtctggaccacgccggagagcgtcgaagcgggggcggtgttcgccgagatcggcccgcgcatggccgagttgagcggttcccggctggccgcgcagcaacagatggaaggcctcctggcgccgcaccggcccaaggagcccgcgtggttcctggccaccgtcggcgtctcgcccgaccaccagggcaagggtctgggcagcgccgtcgtgctccccggagtggaggcggccgagcgcgccggggtgcccgccttcctggagacctccgcgccccgcaacctccccttctacgagcggctcggcttcaccgtcaccgccgacgtcgaggtgcccgaaggaccgcgcacctggtgcatgacccgcaagcccggtgcctga

SEQ ID NO: 5393 - DNA, 1698 bp, synthetic construct
  source 1..1698: mol_type = other DNA
atggccttaccagtgaccgccttgctcctgccgctggccttgctgctccacgccgccaggccggacatccagatgacacagagccctagcagcctgtctgccagcgtgggagacagagtgaccatcacatgcaaggccagcgaccacatcaacaactggctggcctggtatcagcagaagcctggacaggcccctaagctgctgatctacggcgctaccacactggaaacaggcgtgcccagcagattttctggcagcggctctggcaccgactacaccctgacaatatccagcctccagcctgaggacttcgccacctactactgtcagcagagctggaacaccccttggacattcggccagggcaccaagctggaaatcaagagaggcggaggcggaagtggaggcggaggatctggcggcggaggctctcaagttcagcttcaacagcctggcgctgagctggtcaaacctggcgcttctgtgaagatgagctgcaaagccagcggctacgccttcaacagctactggatcaactggatgaagcagaaacccggccagggactcgaatggatcggccaaatctatcccggcgacggcgacaccaactacaacggcaagttcaagggcagagccacactgaccgccgatacctctagcagcacagcctacatgcagctgagcagcctgaccagcgaagatagcgccgtgtacttctgtgcccggtccatcacaacagtcgtgggctgcgctatggactattggggccagggaacaagcgtgaccgtgtctagtacgcgtagaagtgaaccacgctacaggctcgagggaggcagctggagccaccctcagtttgaaaaagactacaaagacgatgacgataagggatcagattacaaggatgatgatgacaaggggtcagattataaagacgacgatgataaagggagcgactacaaggacgacgatgacaaggcctggtcccatccccagttcgagaaacaccatcaccaccaccatcatcacactagtggctccggcgagggcagaggaagtctactaacctgcggagatgtggaagaaaatcctggcccacatatgaccgagtacaagcccacggtgcgcctcgccacccgcgacgacgtccccagggccgtacgcaccctcgccgccgcgttcgccgactaccccgccacgcgccacaccgtcgatccggaccgccacatcgagcgggtcaccgagctgcaagaactcttcctcacgcgcgtcgggctcgacatcggcaaggtgtgggtcgcggacgacggcgccgcggtggcggtctggaccacgccggagagcgtcgaagcgggggcggtgttcgccgagatcggcccgcgcatggccgagttgagcggttcccggctggccgcgcagcaacagatggaaggcctcctggcgccgcaccggcccaaggagcccgcgtggttcctggccaccgtcggcgtctcgcccgaccaccagggcaagggtctgggcagcgccgtcgtgctccccggagtggaggcggccgagcgcgccggggtgcccgccttcctggagacctccgcgccccgcaacctccccttctacgagcggctcggcttcaccgtcaccgccgacgtcgaggtgcccgaaggaccgcgcacctggtgcatgacccgcaagcccggtgcctga

SEQ ID NO: 5394 - DNA, 1698 bp, synthetic construct; identical to SEQ ID NO: 5285
  source 1..1698: mol_type = other DNA

SEQ ID NO: 5395 - DNA, 1698 bp, synthetic construct
  source 1..1698: mol_type = other DNA
atggccttaccagtgaccgccttgctcctgccgctggccttgctgctccacgccgccaggccggacatccagatgacacagagccctagcagcctgtctgccagcgtgggagacagagtgaccatcacatgcaaggccagcgaccacatcaacaactggctggcctggtatcagcagaagcctggacaggcccctaagctgctgatctacggcgctaccacactggaaacaggcgtgcccagcagattttctggcagcggctctggcaccgactacaccctgacaatatccagcctccagcctgaggacttcgccacctactactgtcagcagagctggaacaccccttggacattcggccagggcaccaagctggaaatcaagagaggcggaggcggaagtggaggcggaggatctggcggcggaggctctcaagttcagcttcaacagcctggcgctgagctggtcaaacctggcgcttctgtgaagatgagctgcaaagccagcggctacgccttcaacagctactggatcaactggatgaagcagaaacccggccagggactcgaatggatcggccaaatctatcccggcgacggcgacaccaactacaacggcaagttcaagggcagagccacactgaccgccgatacctctagcagcacagcctacatgcagctgagcagcctgaccagcgaagatagcgccgtgtacttctgtgcccggtccatcacaacagtcgtgggctgcgctatggactattggggccagggaacaagcgtgaccgtgtctagtacgcgtagaagtgaaatccgctacaggctcgagggaggcagctggagccaccctcagtttgaaaaagactacaaagacgatgacgataagggatcagattacaaggatgatgatgacaaggggtcagattataaagacgacgatgataaagggagcgactacaaggacgacgatgacaaggcctggtcccatccccagttcgagaaacaccatcaccaccaccatcatcacactagtggctccggcgagggcagaggaagtctactaacctgcggagatgtggaagaaaatcctggcccacatatgaccgagtacaagcccacggtgcgcctcgccacccgcgacgacgtccccagggccgtacgcaccctcgccgccgcgttcgccgactaccccgccacgcgccacaccgtcgatccggaccgccacatcgagcgggtcaccgagctgcaagaactcttcctcacgcgcgtcgggctcgacatcggcaaggtgtgggtcgcggacgacggcgccgcggtggcggtctggaccacgccggagagcgtcgaagcgggggcggtgttcgccgagatcggcccgcgcatggccgagttgagcggttcccggctggccgcgcagcaacagatggaaggcctcctggcgccgcaccggcccaaggagcccgcgtggttcctggccaccgtcggcgtctcgcccgaccaccagggcaagggtctgggcagcgccgtcgtgctccccggagtggaggcggccgagcgcgccggggtgcccgccttcctggagacctccgcgccccgcaacctccccttctacgagcggctcggcttcaccgtcaccgccgacgtcgaggtgcccgaaggaccgcgcacctggtgcatgacccgcaagcccggtgcctga

SEQ ID NO: 5396 - DNA, 1698 bp, synthetic construct
  source 1..1698: mol_type = other DNA
atggccttaccagtgaccgccttgctcctgccgctggccttgctgctccacgccgccaggccggacatccagatgacacagagccctagcagcctgtctgccagcgtgggagacagagtgaccatcacatgcaaggccagcgaccacatcaacaactggctggcctggtatcagcagaagcctggacaggcccctaagctgctgatctacggcgctaccacactggaaacaggcgtgcccagcagattttctggcagcggctctggcaccgactacaccctgacaatatccagcctccagcctgaggacttcgccacctactactgtcagcagagctggaacaccccttggacattcggccagggcaccaagctggaaatcaagagaggcggaggcggaagtggaggcggaggatctggcggcggaggctctcaagttcagcttcaacagcctggcgctgagctggtcaaacctggcgcttctgtgaagatgagctgcaaagccagcggctacgccttcaacagctactggatcaactggatgaagcagaaacccggccagggactcgaatggatcggccaaatctatcccggcgacggcgacaccaactacaacggcaagttcaagggcagagccacactgaccgccgatacctctagcagcacagcctacatgcagctgagcagcctgaccagcgaagatagcgccgtgtacttctgtgcccggtccatcacaacagtcgtgggctgcgctatggactattggggccagggaacaagcgtgaccgtgtctagtacgcgtagaagtgaacgtcgctacaggctcgagggaggcagctggagccaccctcagtttgaaaaagactacaaagacgatgacgataagggatcagattacaaggatgatgatgacaaggggtcagattataaagacgacgatgataaagggagcgactacaaggacgacgatgacaaggcctggtcccatccccagttcgagaaacaccatcaccaccaccatcatcacactagtggctccggcgagggcagaggaagtctactaacctgcggagatgtggaagaaaatcctggcccacatatgaccgagtacaagcccacggtgcgcctcgccacccgcgacgacgtccccagggccgtacgcaccctcgccgccgcgttcgccgactaccccgccacgcgccacaccgtcgatccggaccgccacatcgagcgggtcaccgagctgcaagaactcttcctcacgcgcgtcgggctcgacatcggcaaggtgtgggtcgcggacgacggcgccgcggtggcggtctggaccacgccggagagcgtcgaagcgggggcggtgttcgccgagatcggcccgcgcatggccgagttgagcggttcccggctggccgcgcagcaacagatggaaggcctcctggcgccgcaccggcccaaggagcccgcgtggttcctggccaccgtcggcgtctcgcccgaccaccagggcaagggtctgggcagcgccgtcgtgctccccggagtggaggcggccgagcgcgccggggtgcccgccttcctggagacctccgcgccccgcaacctccccttctacgagcggctcggcttcaccgtcaccgccgacgtcgaggtgcccgaaggaccgcgcacctggtgcatgacccgcaagcccggtgcctga

SEQ ID NO: 5397 - DNA, 1701 bp, synthetic construct; identical to SEQ ID NO: 5246
  source 1..1701: mol_type = other DNA

SEQ ID NO: 5398 - DNA, 1701 bp, synthetic construct; identical to SEQ ID NO: 5289
  source 1..1701: mol_type = other DNA

SEQ ID NO: 5399 - DNA, 1701 bp, synthetic construct
  source 1..1701: mol_type = other DNA
atggccttaccagtgaccgccttgctcctgccgctggccttgctgctccacgccgccaggccggacatccagatgacacagagccctagcagcctgtctgccagcgtgggagacagagtgaccatcacatgcaaggccagcgaccacatcaacaactggctggcctggtatcagcagaagcctggacaggcccctaagctgctgatctacggcgctaccacactggaaacaggcgtgcccagcagattttctggcagcggctctggcaccgactacaccctgacaatatccagcctccagcctgaggacttcgccacctactactgtcagcagagctggaacaccccttggacattcggccagggcaccaagctggaaatcaagagaggcggaggcggaagtggaggcggaggatctggcggcggaggctctcaagttcagcttcaacagcctggcgctgagctggtcaaacctggcgcttctgtgaagatgagctgcaaagccagcggctacgccttcaacagctactggatcaactggatgaagcagaaacccggccagggactcgaatggatcggccaaatctatcccggcgacggcgacaccaactacaacggcaagttcaagggcagagccacactgaccgccgatacctctagcagcacagcctacatgcagctgagcagcctgaccagcgaagatagcgccgtgtacttctgtgcccggtccatcacaacagtcgtgggctgcgctatggactattggggccagggaacaagcgtgaccgtgtctagtacgcgtagaacagaagatcgctacaggaacctcgagggaggcagctggagccaccctcagtttgaaaaagactacaaagacgatgacgataagggatcagattacaaggatgatgatgacaaggggtcagattataaagacgacgatgataaagggagcgactacaaggacgacgatgacaaggcctggtcccatccccagttcgagaaacaccatcaccaccaccatcatcacactagtggctccggcgagggcagaggaagtctactaacctgcggagatgtggaagaaaatcctggcccacatatgaccgagtacaagcccacggtgcgcctcgccacccgcgacgacgtccccagggccgtacgcaccctcgccgccgcgttcgccgactaccccgccacgcgccacaccgtcgatccggaccgccacatcgagcgggtcaccgagctgcaagaactcttcctcacgcgcgtcgggctcgacatcggcaaggtgtgggtcgcggacgacggcgccgcggtggcggtctggaccacgccggagagcgtcgaagcgggggcggtgttcgccgagatcggcccgcgcatggccgagttgagcggttcccggctggccgcgcagcaacagatggaaggcctcctggcgccgcaccggcccaaggagcccgcgtggttcctggccaccgtcggcgtctcgcccgaccaccagggcaagggtctgggcagcgccgtcgtgctccccggagtggaggcggccgagcgcgccggggtgcccgccttcctggagacctccgcgccccgcaacctccccttctacgagcggctcggcttcaccgtcaccgccgacgtcgaggtgcccgaaggaccgcgcacctggtgcatgacccgcaagcccggtgcctga

SEQ ID NO: 5400 - DNA, 1701 bp, synthetic construct
  source 1..1701: mol_type = other DNA
atggccttaccagtgaccgccttgctcctgccgctggccttgctgctccacgccgccaggccggacatccagatgacacagagccctagcagcctgtctgccagcgtgggagacagagtgaccatcacatgcaaggccagcgaccacatcaacaactggctggcctggtatcagcagaagcctggacaggcccctaagctgctgatctacggcgctaccacactggaaacaggcgtgcccagcagattttctggcagcggctctggcaccgactacaccctgacaatatccagcctccagcctgaggacttcgccacctactactgtcagcagagctggaacaccccttggacattcggccagggcaccaagctggaaatcaagagaggcggaggcggaagtggaggcggaggatctggcggcggaggctctcaagttcagcttcaacagcctggcgctgagctggtcaaacctggcgcttctgtgaagatgagctgcaaagccagcggctacgccttcaacagctactggatcaactggatgaagcagaaacccggccagggactcgaatggatcggccaaatctatcccggcgacggcgacaccaactacaacggcaagttcaagggcagagccacactgaccgccgatacctctagcagcacagcctacatgcagctgagcagcctgaccagcgaagatagcgccgtgtacttctgtgcccggtccatcacaacagtcgtgggctgcgctatggactattggggccagggaacaagcgtgaccgtgtctagtacgcgtagactagaagatcgctacaggaacctcgagggaggcagctggagccaccctcagtttgaaaaagactacaaagacgatgacgataagggatcagattacaaggatgatgatgacaaggggtcagattataaagacgacgatgataaagggagcgactacaaggacgacgatgacaaggcctggtcccatccccagttcgagaaacaccatcaccaccaccatcatcacactagtggctccggcgagggcagaggaagtctactaacctgcggagatgtggaagaaaatcctggcccacatatgaccgagtacaagcccacggtgcgcctcgccacccgcgacgacgtccccagggccgtacgcaccctcgccgccgcgttcgccgactaccccgccacgcgccacaccgtcgatccggaccgccacatcgagcgggtcaccgagctgcaagaactcttcctcacgcgcgtcgggctcgacatcggcaaggtgtgggtcgcggacgacggcgccgcggtggcggtctggaccacgccggagagcgtcgaagcgggggcggtgttcgccgagatcggcccgcgcatggccgagttgagcggttcccggctggccgcgcagcaacagatggaaggcctcctggcgccgcaccggcccaaggagcccgcgtggttcctggccaccgtcggcgtctcgcccgaccaccagggcaagggtctgggcagcgccgtcgtgctccccggagtggaggcggccgagcgcgccggggtgcccgccttcctggagacctccgcgccccgcaacctccccttctacgagcggctcggcttcaccgtcaccgccgacgtcgaggtgcccgaaggaccgcgcacctggtgcatgacccgcaagcccggtgcctga

SEQ ID NO: 5401 - DNA, 1698 bp, synthetic construct; identical to SEQ ID NO: 5392
  source 1..1698: mol_type = other DNA

SEQ ID NO: 5402 - DNA, 1698 bp, synthetic construct; identical to SEQ ID NO: 5243
  source 1..1698: mol_type = other DNA

SEQ ID NO: 5403 - DNA, 1698 bp, synthetic construct; identical to SEQ ID NO: 5310
  source 1..1698: mol_type = other DNA

SEQ ID NO: 5404 - DNA, 1701 bp, synthetic construct
  source 1..1701: mol_type = other DNA
atggccttaccagtgaccgccttgctcctgccgctggccttgctgctccacgccgccaggccggacatccagatgacacagagccctagcagcctgtctgccagcgtgggagacagagtgaccatcacatgcaaggccagcgaccacatcaacaactggctggcctggtatcagcagaagcctggacaggcccctaagctgctgatctacggcgctaccacactggaaacaggcgtgcccagcagattttctggcagcggctctggcaccgactacaccctgacaatatccagcctccagcctgaggacttcgccacctactactgtcagcagagctggaacaccccttggacattcggccagggcaccaagctggaaatcaagagaggcggaggcggaagtggaggcggaggatctggcggcggaggctctcaagttcagcttcaacagcctggcgctgagctggtcaaacctggcgcttctgtgaagatgagctgcaaagccagcggctacgccttcaacagctactggatcaactggatgaagcagaaacccggccagggactcgaatggatcggccaaatctatcccggcgacggcgacaccaactacaacggcaagttcaagggcagagccacactgaccgccgatacctctagcagcacagcctacatgcagctgagcagcctgaccagcgaagatagcgccgtgtacttctgtgcccggtccatcacaacagtcgtgggctgcgctatggactattggggccagggaacaagcgtgaccgtgtctagtacgcgtagacccgaagatcgctacaggaacctcgagggaggcagctggagccaccctcagtttgaaaaagactacaaagacgatgacgataagggatcagattacaaggatgatgatgacaaggggtcagattataaagacgacgatgataaagggagcgactacaaggacgacgatgacaaggcctggtcccatccccagttcgagaaacaccatcaccaccaccatcatcacactagtggctccggcgagggcagaggaagtctactaacctgcggagatgtggaagaaaatcctggcccacatatgaccgagtacaagcccacggtgcgcctcgccacccgcgacgacgtccccagggccgtacgcaccctcgccgccgcgttcgccgactaccccgccacgcgccacaccgtcgatccggaccgccacatcgagcgggtcaccgagctgcaagaactcttcctcacgcgcgtcgggctcgacatcggcaaggtgtgggtcgcggacgacggcgccgcggtggcggtctggaccacgccggagagcgtcgaagcgggggcggtgttcgccgagatcggcccgcgcatggccgagttgagcggttcccggctggccgcgcagcaacagatggaaggcctcctggcgccgcaccggcccaaggagcccgcgtggttcctggccaccgtcggcgtctcgcccgaccaccagggcaagggtctgggcagcgccgtcgtgctccccggagtggaggcggccgagcgcgccggggtgcccgccttcctggagacctccgcgccccgcaacctccccttctacgagcggctcggcttcaccgtcaccgccgacgtcgaggtgcccgaaggaccgcgcacctggtgcatgacccgcaagcccggtgcctga

SEQ ID NO: 5405 - DNA, 1701 bp, synthetic construct
  source 1..1701: mol_type = other DNA
atggccttaccagtgaccgccttgctcctgccgctggccttgctgctccacgccgccaggccggacatccagatgacacagagccctagcagcctgtctgccagcgtgggagacagagtgaccatcacatgcaaggccagcgaccacatcaacaactggctggcctggtatcagcagaagcctggacaggcccctaagctgctgatctacggcgctaccacactggaaacaggcgtgcccagcagattttctggcagcggctctggcaccgactacaccctgacaatatccagcctccagcctgaggacttcgccacctactactgtcagcagagctggaacaccccttggacattcggccagggcaccaagctggaaatcaagagaggcggaggcggaagtggaggcggaggatctggcggcggaggctctcaagttcagcttcaacagcctggcgctgagctggtcaaacctggcgcttctgtgaagatgagctgcaaagccagcggctacgccttcaacagctactggatcaactggatgaagcagaaacccggccagggactcgaatggatcggccaaatctatcccggcgacggcgacaccaactacaacggcaagttcaagggcagagccacactgaccgccgatacctctagcagcacagcctacatgcagctgagcagcctgaccagcgaagatagcgccgtgtacttctgtgcccggtccatcacaacagtcgtgggctgcgctatggactattggggccagggaacaagcgtgaccgtgtctagtacgcgtagatatgaagatcgctacaggaacctcgagggaggcagctggagccaccctcagtttgaaaaagactacaaagacgatgacgataagggatcagattacaaggatgatgatgacaaggggtcagattataaagacgacgatgataaagggagcgactacaaggacgacgatgacaaggcctggtcccatccccagttcgagaaacaccatcaccaccaccatcatcacactagtggctccggcgagggcagaggaagtctactaacctgcggagatgtggaagaaaatcctggcccacatatgaccgagtacaagcccacggtgcgcctcgccacccgcgacgacgtccccagggccgtacgcaccctcgccgccgcgttcgccgactaccccgccacgcgccacaccgtcgatccggaccgccacatcgagcgggtcaccgagctgcaagaactcttcctcacgcgcgtcgggctcgacatcggcaaggtgtgggtcgcggacgacggcgccgcggtggcggtctggaccacgccggagagcgtcgaagcgggggcggtgttcgccgagatcggcccgcgcatggccgagttgagcggttcccggctggccgcgcagcaacagatggaaggcctcctggcgccgcaccggcccaaggagcccgcgtggttcctggccaccgtcggcgtctcgcccgaccaccagggcaagggtctgggcagcgccgtcgtgctccccggagtggaggcggccgagcgcgccggggtgcccgccttcctggagacctccgcgccccgcaacctccccttctacgagcggctcggcttcaccgtcaccgccgacgtcgaggtgcccgaaggaccgcgcacctggtgcatgacccgcaagcccggtgcctga

SEQ ID NO: 5406 - DNA, 1701 bp, synthetic construct; identical to SEQ ID NO: 5324
  source 1..1701: mol_type = other DNA

SEQ ID NO: 5407 - DNA, 1701 bp, synthetic construct
  source 1..1701: mol_type = other DNA
atggccttaccagtgaccgccttgctcctgccgctggccttgctgctccacgccgccaggccggacatccagatgacacagagccctagcagcctgtctgccagcgtgggagacagagtgaccatcacatgcaaggccagcgaccacatcaacaactggctggcctggtatcagcagaagcctggacaggcccctaagctgctgatctacggcgctaccacactggaaacaggcgtgcccagcagattttctggcagcggctctggcaccgactacaccctgacaatatccagcctccagcctgaggacttcgccacctactactgtcagcagagctggaacaccccttggacattcggccagggcaccaagctggaaatcaagagaggcggaggcggaagtggaggcggaggatctggcggcggaggctctcaagttcagcttcaacagcctggcgctgagctggtcaaacctggcgcttctgtgaagatgagctgcaaagccagcggctacgccttcaacagctactggatcaactggatgaagcagaaacccggccagggactcgaatggatcggccaaatctatcccggcgacggcgacaccaactacaacggcaagttcaagggcagagccacactgaccgccgatacctctagcagcacagcctacatgcagctgagcagcctgaccagcgaagatagcgccgtgtacttctgtgcccggtccatcacaacagtcgtgggctgcgctatggactattggggccagggaacaagcgtgaccgtgtctagtacgcgtagactcgaagatcgctacaggaacctcgagggaggcagctggagccaccctcagtttgaaaaagactacaaagacgatgacgataagggatcagattacaaggatgatgatgacaaggggtcagattataaagacgacgatgataaagggagcgactacaaggacgacgatgacaaggcctggtcccatccccagttcgagaaacaccatcaccaccaccatcatcacactagtggctccggcgagggcagaggaagtctactaacctgcggagatgtggaagaaaatcctggcccacatatgaccgagtacaagcccacggtgcgcctcgccacccgcgacgacgtccccagggccgtacgcaccctcgccgccgcgttcgccgactaccccgccacgcgccacaccgtcgatccggaccgccacatcgagcgggtcaccgagctgcaagaactcttcctcacgcgcgtcgggctcgacatcggcaaggtgtgggtcgcggacgacggcgccgcggtggcggtctggaccacgccggagagcgtcgaagcgggggcggtgttcgccgagatcggcccgcgcatggccgagttgagcggttcccggctggccgcgcagcaacagatggaaggcctcctggcgccgcaccggcccaaggagcccgcgtggttcctggccaccgtcggcgtctcgcccgaccaccagggcaagggtctgggcagcgccgtcgtgctccccggagtggaggcggccgagcgcgccggggtgcccgccttcctggagacctccgcgccccgcaacctccccttctacgagcggctcggcttcaccgtcaccgccgacgtcgaggtgcccgaaggaccgcgcacctggtgcatgacccgcaagcccggtgcctga

SEQ ID NO: 5408 - DNA, 1701 bp, synthetic construct; identical to SEQ ID NO: 5407
  source 1..1701: mol_type = other DNA

SEQ ID NO: 5409 - DNA, 1701 bp, synthetic construct
  source 1..1701: mol_type = other DNA
atggccttaccagtgaccgccttgctcctgccgctggccttgctgctccacgccgccaggccggacatccagatgacacagagccctagcagcctgtctgccagcgtgggagacagagtgaccatcacatgcaaggccagcgaccacatcaacaactggctggcctggtatcagcagaagcctggacaggcccctaagctgctgatctacggcgctaccacactggaaacaggcgtgcccagcagattttctggcagcggctctggcaccgactacaccctgacaatatccagcctccagcctgaggacttcgccacctactactgtcagcagagctggaacaccccttggacattcggccagggcaccaagctggaaatcaagagaggcggaggcggaagtggaggcggaggatctggcggcggaggctctcaagttcagcttcaacagcctggcgctgagctggtcaaacctggcgcttctgtgaagatgagctgcaaagccagcggctacgccttcaacagctactggatcaactggatgaagcagaaacccggccagggactcgaatggatcggccaaatctatcccggcgacggcgacaccaactacaacggcaagttcaagggcagagccacactgaccgccgatacctctagcagcacagcctacatgcagctgagcagcctgaccagcgaagatagcgccgtgtacttctgtgcccggtccatcacaacagtcgtgggctgcgctatggactattggggccagggaacaagcgtgaccgtgtctagtacgcgtagaggtgaagatcgctacaggaacctcgagggaggcagctggagccaccctcagtttgaaaaagactacaaagacgatgacgataagggatcagattacaaggatgatgatgacaaggggtcagattataaagacgacgatgataaagggagcgactacaaggacgacgatgacaaggcctggtcccatccccagttcgagaaacaccatcaccaccaccatcatcacactagtggctccggcgagggcagaggaagtctactaacctgcggagatgtggaagaaaatcctggcccacatatgaccgagtacaagcccacggtgcgcctcgccacccgcgacgacgtccccagggccgtacgcaccctcgccgccgcgttcgccgactaccccgccacgcgccacaccgtcgatccggaccgccacatcgagcgggtcaccgagctgcaagaactcttcctcacgcgcgtcgggctcgacatcggcaaggtgtgggtcgcggacgacggcgccgcggtggcggtctggaccacgccggagagcgtcgaagcgggggcggtgttcgccgagatcggcccgcgcatggccgagttgagcggttcccggctggccgcgcagcaacagatggaaggcctcctggcgccgcaccggcccaaggagcccgcgtggttcctggccaccgtcggcgtctcgcccgaccaccagggcaagggtctgggcagcgccgtcgtgctccccggagtggaggcggccgagcgcgccggggtgcccgccttcctggagacctccgcgccccgcaacctccccttctacgagcggctcggcttcaccgtcaccgccgacgtcgaggtgcccgaaggaccgcgcacctggtgcatgacccgcaagcccggtgcctga

SEQ ID NO: 5410 - DNA, 1698 bp, synthetic construct
  source 1..1698: mol_type = other DNA
atggccttaccagtgaccgccttgctcctgccgctggccttgctgctccacgccgccaggccggacatccagatgacacagagccctagcagcctgtctgccagcgtgggagacagagtgaccatcacatgcaaggccagcgaccacatcaacaactggctggcctggtatcagcagaagcctggacaggcccctaagctgctgatctacggcgctaccacactggaaacaggcgtgcccagcagattttctggcagcggctctggcaccgactacaccctgacaatatccagcctccagcctgaggacttcgccacctactactgtcagcagagctggaacaccccttggacattcggccagggcaccaagctggaaatcaagagaggcggaggcggaagtggaggcggaggatctggcggcggaggctctcaagttcagcttcaacagcctggcgctgagctggtcaaacctggcgcttctgtgaagatgagctgcaaagccagcggctacgccttcaacagctactggatcaactggatgaagcagaaacccggccagggactcgaatggatcggccaaatctatcccggcgacggcgacaccaactacaacggcaagttcaagggcagagccacactgaccgccgatacctctagcagcacagcctacatgcagctgagcagcctgaccagcgaagatagcgccgtgtacttctgtgcccggtccatcacaacagtcgtgggctgcgctatggactattggggccagggaacaagcgtgaccgtgtctagtacgcgtagacaggaagatcgctacaggctcgagggaggcagctggagccaccctcagtttgaaaaagactacaaagacgatgacgataagggatcagattacaaggatgatgatgacaaggggtcagattataaagacgacgatgataaagggagcgactacaaggacgacgatgacaaggcctggtcccatccccagttcgagaaacaccatcaccaccaccatcatcacactagtggctccggcgagggcagaggaagtctactaacctgcggagatgtggaagaaaatcctggcccacatatgaccgagtacaagcccacggtgcgcctcgccacccgcgacgacgtccccagggccgtacgcaccctcgccgccgcgttcgccgactaccccgccacgcgccacaccgtcgatccggaccgccacatcgagcgggtcaccgagctgcaagaactcttcctcacgcgcgtcgggctcgacatcggcaaggtgtgggtcgcggacgacggcgccgcggtggcggtctggaccacgccggagagcgtcgaagcgggggcggtgttcgccgagatcggcccgcgcatggccgagttgagcggttcccggctggccgcgcagcaacagatggaaggcctcctggcgccgcaccggcccaaggagcccgcgtggttcctggccaccgtcggcgtctcgcccgaccaccagggcaagggtctgggcagcgccgtcgtgctccccggagtggaggcggccgagcgcgccggggtgcccgccttcctggagacctccgcgccccgcaacctccccttctacgagcggctcggcttcaccgtcaccgccgacgtcgaggtgcccgaaggaccgcgcacctggtgcatgacccgcaagcccggtgcctga

SEQ ID NO: 5411 - DNA, 1698 bp, synthetic construct
  source 1..1698: mol_type = other DNA
atggccttaccagtgaccgccttgctcctgccgctggccttgctgctccacgccgccaggccggacatccagatgacacagagccctagcagcctgtctgccagcgtgggagacagagtgaccatcacatgcaaggccagcgaccacatcaacaactggctggcctggtatcagcagaagcctggacaggcccctaagctgctgatctacggcgctaccacactggaaacaggcgtgcccagcagattttctggcagcggctctggcaccgactacaccctgacaatatccagcctccagcctgaggacttcgccacctactactgtcagcagagctggaacaccccttggacattcggccagggcaccaagctggaaatcaagagaggcggaggcggaagtggaggcggaggatctggcggcggaggctctcaagttcagcttcaacagcctggcgctgagctggtcaaacctggcgcttctgtgaagatgagctgcaaagccagcggctacgccttcaacagctactggatcaactggatgaagcagaaacccggccagggactcgaatggatcggccaaatctatcccggcgacggcgacaccaactacaacggcaagttcaagggcagagccacactgaccgccgatacctctagcagcacagcctacatgcagctgagcagcctgaccagcgaagatagcgccgtgtacttctgtgcccggtccatcacaacagtcgtgggctgcgctatggactattggggccagggaacaagcgtgaccgtgtctagtacgcgtagaagtgatgaacgctacaggctcgagggaggcagctggagccaccctcagtttgaaaaagactacaaagacgatgacgataagggatcagattacaaggatgatgatgacaaggggtcagattataaagacgacgatgataaagggagcgactacaaggacgacgatgacaaggcctggtcccatccccagttcgagaaacaccatcaccaccaccatcatcacactagtggctccggcgagggcagaggaagtctactaacctgcggagatgtggaagaaaatcctggcccacatatgaccgagtacaagcccacggtgcgcctcgccacccgcgacgacgtccccagggccgtacgcaccctcgccgccgcgttcgccgactaccccgccacgcgccacaccgtcgatccggaccgccacatcgagcgggtcaccgagctgcaagaactcttcctcacgcgcgtcgggctcgacatcggcaaggtgtgggtcgcggacgacggcgccgcggtggcggtctggaccacgccggagagcgtcgaagcgggggcggtgttcgccgagatcggcccgcgcatggccgagttgagcggttcccggctggccgcgcagcaacagatggaaggcctcctggcgccgcaccggcccaaggagcccgcgtggttcctggccaccgtcggcgtctcgcccgaccaccagggcaagggtctgggcagcgccgtcgtgctccccggagtggaggcggccgagcgcgccggggtgcccgccttcctggagacctccgcgccccgcaacctccccttctacgagcggctcggcttcaccgtcaccgccgacgtcgaggtgcccgaaggaccgcgcacctggtgcatgacccgcaagcccggtgcctga

SEQ ID NO: 5412 - DNA, 1698 bp, synthetic construct
  source 1..1698: mol_type = other DNA
atggccttaccagtgaccgccttgctcctgccgctggccttgctgctccacgccgccaggccggacatccagatgacacagagccctagcagcctgtctgccagcgtgggagacagagtgaccatcacatgcaaggccagcgaccacatcaacaactggctggcctggtatcagcagaagcctggacaggcccctaagctgctgatctacggcgctaccacactggaaacaggcgtgcccagcagattttctggcagcggctctggcaccgactacaccctgacaatatccagcctccagcctgaggacttcgccacctactactgtcagcagagctggaacaccccttggacattcggccagggcaccaagctggaaatcaagagaggcggaggcggaagtggaggcggaggatctggcggcggaggctctcaagttcagcttcaacagcctggcgctgagctggtcaaacctggcgcttctgtgaagatgagctgcaaagccagcggctacgccttcaacagctactggatcaactggatgaagcagaaacccggccagggactcgaatggatcggccaaatctatcccggcgacggcgacaccaactacaacggcaagttcaagggcagagccacactgaccgccgatacctctagcagcacagcctacatgcagctgagcagcctgaccagcgaagatagcgccgtgtacttctgtgcccggtccatcacaacagtcgtgggctgcgctatggactattggggccagggaacaagcgtgaccgtgtctagtacgcgtagaagtgaagaacgctacaggctcgagggaggcagctggagccaccctcagtttgaaaaagactacaaagacgatgacgataagggatcagattacaaggatgatgatgacaaggggtcagattataaagacgacgatgataaagggagcgactacaaggacgacgatgacaaggcctggtcccatccccagttcgagaaacaccatcaccaccaccatcatcacactagtggctccggcgagggcagaggaagtctactaacctgcggagatgtggaagaaaatcctggcccacatatgaccgagtacaagcccacggtgcgcctcgccacccgcgacgacgtccccagggccgtacgcaccctcgccgccgcgttcgccgactaccccgccacgcgccacaccgtcgatccggaccgccacatcgagcgggtcaccgagctgcaagaactcttcctcacgcgcgtcgggctcgacatcggcaaggtgtgggtcgcggacgacggcgccgcggtggcggtctggaccacgccggagagcgtcgaagcgggggcggtgttcgccgagatcggcccgcgcatggccgagttgagcggttcccggctggccgcgcagcaacagatggaaggcctcctggcgccgcaccggcccaaggagcccgcgtggttcctggccaccgtcggcgtctcgcccgaccaccagggcaagggtctgggcagcgccgtcgtgctccccggagtggaggcggccgagcgcgccggggtgcccgccttcctggagacctccgcgccccgcaacctccccttctacgagcggctcggcttcaccgtcaccgccgacgtcgaggtgcccgaaggaccgcgcacctggtgcatgacccgcaagcccggtgcctga

SEQ ID NO: 5413 - DNA, 1698 bp, synthetic construct
  source 1..1698: mol_type = other DNA
atggccttaccagtgaccgccttgctcctgccgctggccttgctgctccacgccgccaggccggacatccagatgacacagagccctagcagcctgtctgccagcgtgggagacagagtgaccatcacatgcaaggccagcgaccacatcaacaactggctggcctggtatcagcagaagcctggacaggcccctaagctgctgatctacggcgctaccacactggaaacaggcgtgcccagcagattttctggcagcggctctggcaccgactacaccctgacaatatccagcctccagcctgaggacttcgccacctactactgtcagcagagctggaacaccccttggacattcggccagggcaccaagctggaaatcaagagaggcggaggcggaagtggaggcggaggatctggcggcggaggctctcaagttcagcttcaacagcctggcgctgagctggtcaaacctggcgcttctgtgaagatgagctgcaaagccagcggctacgccttcaacagctactggatcaactggatgaagcagaaacccggccagggactcgaatggatcggccaaatctatcccggcgacggcgacaccaactacaacggcaagttcaagggcagagccacactgaccgccgatacctctagcagcacagcctacatgcagctgagcagcctgaccagcgaagatagcgccgtgtacttctgtgcccggtccatcacaacagtcgtgggctgcgctatggactattggggccagggaacaagcgtgaccgtgtctagtacgcgtagaagtgatgatcgctacaggctcgagggaggcagctggagccaccctcagtttgaaaaagactacaaagacgatgacgataagggatcagattacaaggatgatgatgacaaggggtcagattataaagacgacgatgataaagggagcgactacaaggacgacgatgacaaggcctggtcccatccccagttcgagaaacaccatcaccaccaccatcatcacactagtggctccggcgagggcagaggaagtctactaacctgcggagatgtggaagaaaatcctggcccacatatgaccgagtacaagcccacggtgcgcctcgccacccgcgacgacgtccccagggccgtacgcaccctcgccgccgcgttcgccgactaccccgccacgcgccacaccgtcgatccggaccgccacatcgagcgggtcaccgagctgcaagaactcttcctcacgcgcgtcgggctcgacatcggcaaggtgtgggtcgcggacgacggcgccgcggtggcggtctggaccacgccggagagcgtcgaagcgggggcggtgttcgccgagatcggcccgcgcatggccgagttgagcggttcccggctggccgcgcagcaacagatggaaggcctcctggcgccgcaccggcccaaggagcccgcgtggttcctggccaccgtcggcgtctcgcccgaccaccagggcaagggtctgggcagcgccgtcgtgctccccggagtggaggcggccgagcgcgccggggtgcccgccttcctggagacctccgcgccccgcaacctccccttctacgagcggctcggcttcaccgtcaccgccgacgtcgaggtgcccgaaggaccgcgcacctggtgcatgacccgcaagcccggtgcctga

SEQ ID NO: 5414 - DNA, 1698 bp, synthetic construct; identical to SEQ ID NO: 5412
  source 1..1698: mol_type = other DNA

SEQ ID NO: 5415 - DNA, 1698 bp, synthetic construct; identical to SEQ ID NO: 5411
  source 1..1698: mol_type = other DNA

SEQ ID NO: 5416 - DNA, 1698 bp, synthetic construct; identical to SEQ ID NO: 5413
  source 1..1698: mol_type = other DNA

SEQ ID NO: 5417 - DNA, 1698 bp, synthetic construct
  source 1..1698: mol_type = other DNA
atggccttaccagtgaccgccttgctcctgccgctggccttgctgctccacgccgccaggccggacatccagatgacacagagccctagcagcctgtctgccagcgtgggagacagagtgaccatcacatgcaaggccagcgaccacatcaacaactggctggcctggtatcagcagaagcctggacaggcccctaagctgctgatctacggcgctaccacactggaaacaggcgtgcccagcagattttctggcagcggctctggcaccgactacaccctgacaatatccagcctccagcctgaggacttcgccacctactactgtcagcagagctggaacaccccttggacattcggccagggcaccaagctggaaatcaagagaggcggaggcggaagtggaggcggaggatctggcggcggaggctctcaagttcagcttcaacagcctggcgctgagctggtcaaacctggcgcttctgtgaagatgagctgcaaagccagcggctacgccttcaacagctactggatcaactggatgaagcagaaacccggccagggactcgaatggatcggccaaatctatcccggcgacggcgacaccaactacaacggcaagttcaagggcagagccacactgaccgccgatacctctagcagcacagcctacatgcagctgagcagcctgaccagcgaagatagcgccgtgtacttctgtgcccggtccatcacaacagtcgtgggctgcgctatggactattggggccagggaacaagcgtgaccgtgtctagtacgcgtagaagtgaagatcgctacaggctcgagggaggcagctggagccaccctcagtttgaaaaagactacaaagacgatgacgataagggatcagattacaaggatgatgatgacaaggggtcagattataaagacgacgatgataaagggagcgactacaaggacgacgatgacaaggcctggtcccatccccagttcgagaaacaccatcaccaccaccatcatcacactagtggctccggcgagggcagaggaagtctactaacctgcggagatgtggaagaaaatcctggcccacatatgaccgagtacaagcccacggtgcgcctcgccacccgcgacgacgtccccagggccgtacgcaccctcgccgccgcgttcgccgactaccccgccacgcgccacaccgtcgatccggaccgccacatcgagcgggtcaccgagctgcaagaactcttcctcacgcgcgtcgggctcgacatcggcaaggtgtgggtcgcggacgacggcgccgcggtggcggtctggaccacgccggagagcgtcgaagcgggggcggtgttcgccgagatcggcccgcgcatggccgagttgagcggttcccggctggccgcgcagcaacagatggaaggcctcctggcgccgcaccggcccaaggagcccgcgtggttcctggccaccgtcggcgtctcgcccgaccaccagggcaagggtctgggcagcgccgtcgtgctccccggagtggaggcggccgagcgcgccggggtgcccgccttcctggagacctccgcgccccgcaacctccccttctacgagcggctcggcttcaccgtcaccgccgacgtcgaggtgcccgaaggaccgcgcacctggtgcatgacccgcaagcccggtgcctga

SEQ ID NO: 5418 - DNA, 1698 bp, synthetic construct; identical to SEQ ID NO: 5413
  source 1..1698: mol_type = other DNA

SEQ ID NO: 5419 - DNA, 1698 bp, synthetic construct; identical to SEQ ID NO: 5413
  source 1..1698: mol_type = other DNA

SEQ ID NO: 5420 - DNA, 1701 bp, synthetic construct; identical to SEQ ID NO: 5249
  source 1..1701: mol_type = other DNA

SEQ ID NO: 5421 - DNA, 1701 bp, synthetic construct
  source 1..1701: mol_type = other DNA
atggccttaccagtgaccgccttgctcctgccgctggccttgctgctccacgccgccaggccggacatccagatgacacagagccctagcagcctgtctgccagcgtgggagacagagtgaccatcacatgcaaggccagcgaccacatcaacaactggctggcctggtatcagcagaagcctggacaggcccctaagctgctgatctacggcgctaccacactggaaacaggcgtgcccagcagattttctggcagcggctctggcaccgactacaccctgacaatatccagcctccagcctgaggacttcgccacctactactgtcagcagagctggaacaccccttggacattcggccagggcaccaagctggaaatcaagagaggcggaggcggaagtggaggcggaggatctggcggcggaggctctcaagttcagcttcaacagcctggcgctgagctggtcaaacctggcgcttctgtgaagatgagctgcaaagccagcggctacgccttcaacagctactggatcaactggatgaagcagaaacccggccagggactcgaatggatcggccaaatctatcccggcgacggcgacaccaactacaacggcaagttcaagggcagagccacactgaccgccgatacctctagcagcacagcctacatgcagctgagcagcctgaccagcgaagatagcgccgtgtacttctgtgcccggtccatcacaacagtcgtgggctgcgctatggactattggggccagggaacaagcgtgaccgtgtctagtacgcgtagagcggaagatcgctacaggaacctcgagggaggcagctggagccaccctcagtttgaaaaagactacaaagacgatgacgataagggatcagattacaaggatgatgatgacaaggggtcagattataaagacgacgatgataaagggagcgactacaaggacgacgatgacaaggcctggtcccatccccagttcgagaaacaccatcaccaccaccatcatcacactagtggctccggcgagggcagaggaagtctactaacctgcggagatgtggaagaaaatcctggcccacatatgaccgagtacaagcccacggtgcgcctcgccacccgcgacgacgtccccagggccgtacgcaccctcgccgccgcgttcgccgactaccccgccacgcgccacaccgtcgatccggaccgccacatcgagcgggtcaccgagctgcaagaactcttcctcacgcgcgtcgggctcgacatcggcaaggtgtgggtcgcggacgacggcgccgcggtggcggtctggaccacgccggagagcgtcgaagcgggggcggtgttcgccgagatcggcccgcgcatggccgagttgagcggttcccggctggccgcgcagcaacagatggaaggcctcctggcgccgcaccggcccaaggagcccgcgtggttcctggccaccgtcggcgtctcgcccgaccaccagggcaagggtctgggcagcgccgtcgtgctccccggagtggaggcggccgagcgcgccggggtgcccgccttcctggagacctccgcgccccgcaacctccccttctacgagcggctcggcttcaccgtcaccgccgacgtcgaggtgcccgaaggaccgcgcacctggtgcatgacccgcaagcccggtgcctga

SEQ ID NO: 5422 - DNA, 1701 bp, synthetic construct
  source 1..1701: mol_type = other DNA
atggccttaccagtgaccgccttgctcctgccgctggccttgctgctccacgccgccaggccggacatccagatgacacagagccctagcagcctgtctgccagcgtgggagacagagtgaccatcacatgcaaggccagcgaccacatcaacaactggctggcctggtatcagcagaagcctggacaggcccctaagctgctgatctacggcgctaccacactggaaacaggcgtgcccagcagattttctggcagcggctctggcaccgactacaccctgacaatatccagcctccagcctgaggacttcgccacctactactgtcagcagagctggaacaccccttggacattcggccagggcaccaagctggaaatcaagagaggcggaggcggaagtggaggcggaggatctggcggcggaggctctcaagttcagcttcaacagcctggcgctgagctggtcaaacctggcgcttctgtgaagatgagctgcaaagccagcggctacgccttcaacagctactggatcaactggatgaagcagaaacccggccagggactcgaatggatcggccaaatctatcccggcgacggcgacaccaactacaacggcaagttcaagggcagagccacactgaccgccgatacctctagcagcacagcctacatgcagctgagcagcctgaccagcgaagatagcgccgtgtacttctgtgcccggtccatcacaacagtcgtgggctgcgctatggactattggggccagggaacaagcgtgaccgtgtctagtacgcgtagacacgaagatcgctacaggaacctcgagggaggcagctggagccaccctcagtttgaaaaagactacaaagacgatgacgataagggatcagattacaaggatgatgatgacaaggggtcagattataaagacgacgatgataaagggagcgactacaaggacgacgatgacaaggcctggtcccatccccagttcgagaaacaccatcaccaccaccatcatcacactagtggctccggcgagggcagaggaagtctactaacctgcggagatgtggaagaaaatcctggcccacatatgaccgagtacaagcccacggtgcgcctcgccacccgcgacgacgtccccagggccgtacgcaccctcgccgccgcgttcgccgactaccccgccacgcgccacaccgtcgatccggaccgccacatcgagcgggtcaccgagctgcaagaactcttcctcacgcgcgtcgggctcgacatcggcaaggtgtgggtcgcggacgacggcgccgcggtggcggtctggaccacgccggagagcgtcgaagcgggggcggtgttcgccgagatcggcccgcgcatggccgagttgagcggttcccggctggccgcgcagcaacagatggaaggcctcctggcgccgcaccggcccaaggagcccgcgtggttcctggccaccgtcggcgtctcgcccgaccaccagggcaagggtctgggcagcgccgtcgtgctccccggagtggaggcggccgagcgcgccggggtgcccgccttcctggagacctccgcgccccgcaacctccccttctacgagcggctcggcttcaccgtcaccgccgacgtcgaggtgcccgaaggaccgcgcacctggtgcatgacccgcaagcccggtgcctga

SEQ ID NO: 5423 - DNA, 807 bp, synthetic construct
  source 1..807: mol_type = other DNA
atggccttaccagtgaccgccttgctcctgccgctggccttgctgctccacgccgccaggccggacatccagatgacacagagccctagcagcctgtctgccagcgtgggagacagagtgaccatcacatgcaaggccagcgaccacatcaacaactggctggcctggtatcagcagaagcctggacaggcccctaagctgctgatctacggcgctaccacactggaaacaggcgtgcccagcagattttctggcagcggctctggcaccgactacaccctgacaatatccagcctccagcctgaggacttcgccacctactactgtcagcagagctggaacaccccttggacattcggccagggcaccaagctggaaatcaagagaggcggaggcggaagtggaggcggaggatctggcggcggaggctctcaagttcagcttcaacagcctggcgctgagctggtcaaacctggcgcttctgtgaagatgagctgcaaagccagcggctacgccttcaacagctactggatcaactggatgaagcagaaacccggccagggactcgaatggatcggccaaatctatcccggcgacggcgacaccaactacaacggcaagttcaagggcagagccacactgaccgccgatacctctagcagcacagcctacatgcagctgagcagcctgaccagcgaagatagcgccgtgtacttctgtgcccggtccatcacaacagtcgtgggctgcgctatggactattggggccagggaacaagcgtgaccgtgtctagtacgcgtagatag

SEQ ID NO: 5424 - DNA, 1701 bp, synthetic construct
  source 1..1701: mol_type = other DNA
atggccttaccagtgaccgccttgctcctgccgctggccttgctgctccacgccgccaggccggacatccagatgacacagagccctagcagcctgtctgccagcgtgggagacagagtgaccatcacatgcaaggccagcgaccacatcaacaactggctggcctggtatcagcagaagcctggacaggcccctaagctgctgatctacggcgctaccacactggaaacaggcgtgcccagcagattttctggcagcggctctggcaccgactacaccctgacaatatccagcctccagcctgaggacttcgccacctactactgtcagcagagctggaacaccccttggacattcggccagggcaccaagctggaaatcaagagaggcggaggcggaagtggaggcggaggatctggcggcggaggctctcaagttcagcttcaacagcctggcgctgagctggtcaaacctggcgcttctgtgaagatgagctgcaaagccagcggctacgccttcaacagctactggatcaactggatgaagcagaaacccggccagggactcgaatggatcggccaaatctatcccggcgacggcgacaccaactacaacggcaagttcaagggcagagccacactgaccgccgatacctctagcagcacagcctacatgcagctgagcagcctgaccagcgaagatagcgccgtgtacttctgtgcccggtccatcacaacagtcgtgggctgcgctatggactattggggccagggaacaagcgtgaccgtgtctagtacgcgtagatcggaagatcgctacaggaacctcgagggaggcagctggagccaccctcagtttgaaaaagactacaaagacgatgacgataagggatcagattacaaggatgatgatgacaaggggtcagattataaagacgacgatgataaagggagcgactacaaggacgacgatgacaaggcctggtcccatccccagttcgagaaacaccatcaccaccaccatcatcacactagtggctccggcgagggcagaggaagtctactaacctgcggagatgtggaagaaaatcctggcccacatatgaccgagtacaagcccacggtgcgcctcgccacccgcgacgacgtccccagggccgtacgcaccctcgccgccgcgttcgccgactaccccgccacgcgccacaccgtcgatccggaccgccacatcgagcgggtcaccgagctgcaagaactcttcctcacgcgcgtcgggctcgacatcggcaaggtgtgggtcgcggacgacggcgccgcggtggcggtctggaccacgccggagagcgtcgaagcgggggcggtgttcgccgagatcggcccgcgcatggccgagttgagcggttcccggctggccgcgcagcaacagatggaaggcctcctggcgccgcaccggcccaaggagcccgcgtggttcctggccaccgtcggcgtctcgcccgaccaccagggcaagggtctgggcagcgccgtcgtgctccccggagtggaggcggccgagcgcgccggggtgcccgccttcctggagacctccgcgccccgcaacctccccttctacgagcggctcggcttcaccgtcaccgccgacgtcgaggtgcccgaaggaccgcgcacctggtgcatgacccgcaagcccggtgcctga

SEQ ID NO: 5425 - DNA, 1701 bp, synthetic construct
  source 1..1701: mol_type = other DNA
atggccttaccagtgaccgccttgctcctgccgctggccttgctgctccacgccgccaggccggacatccagatgacacagagccctagcagcctgtctgccagcgtgggagacagagtgaccatcacatgcaaggccagcgaccacatcaacaactggctggcctggtatcagcagaagcctggacaggcccctaagctgctgatctacggcgctaccacactggaaacaggcgtgcccagcagattttctggcagcggctctggcaccgactacaccctgacaatatccagcctccagcctgaggacttcgccacctactactgtcagcagagctggaacaccccttggacattcggccagggcaccaagctggaaatcaagagaggcggaggcggaagtggaggcggaggatctggcggcggaggctctcaagttcagcttcaacagcctggcgctgagctggtcaaacctggcgcttctgtgaagatgagctgcaaagccagcggctacgccttcaacagctactggatcaactggatgaagcagaaacccggccagggactcgaatggatcggccaaatctatcccggcgacggcgacaccaactacaacggcaagttcaagggcagagccacactgaccgccgatacctctagcagcacagcctacatgcagctgagcagcctgaccagcgaagatagcgccgtgtacttctgtgcccggtccatcacaacagtcgtgggctgcgctatggactattggggccagggaacaagcgtgaccgtgtctagtacgcgtagagaggaagatcgctacaggaacctcgagggaggcagctggagccaccctcagtttgaaaaagactacaaagacgatgacgataagggatcagattacaaggatgatgatgacaaggggtcagattataaagacgacgatgataaagggagcgactacaaggacgacgatgacaaggcctggtcccatccccagttcgagaaacaccatcaccaccaccatcatcacactagtggctccggcgagggcagaggaagtctactaacctgcggagatgtggaagaaaatcctggcccacatatgaccgagtacaagcccacggtgcgcctcgccacccgcgacgacgtccccagggccgtacgcaccctcgccgccgcgttcgccgactaccccgccacgcgccacaccgtcgatccggaccgccacatcgagcgggtcaccgagctgcaagaactcttcctcacgcgcgtcgggctcgacatcggcaaggtgtgggtcgcggacgacggcgccgcggtggcggtctggaccacgccggagagcgtcgaagcgggggcggtgttcgccgagatcggcccgcgcatggccgagttgagcggttcccggctggccgcgcagcaacagatggaaggcctcctggcgccgcaccggcccaaggagcccgcgtggttcctggccaccgtcggcgtctcgcccgaccaccagggcaagggtctgggcagcgccgtcgtgctccccggagtggaggcggccgagcgcgccggggtgcccgccttcctggagacctccgcgccccgcaacctccccttctacgagcggctcggcttcaccgtcaccgccgacgtcgaggtgcccgaaggaccgcgcacctggtgcatgacccgcaagcccggtgcctga

SEQ ID NO: 5426 - DNA, 807 bp, synthetic construct; identical to SEQ ID NO: 5231
  source 1..807: mol_type = other DNA

SEQ ID NO: 5427 - DNA, 1701 bp, synthetic construct; identical to SEQ ID NO: 5424
  source 1..1701: mol_type = other DNA

SEQ ID NO: 5428 - DNA, 1701 bp, synthetic construct
  source 1..1701: mol_type = other DNA
atggccttaccagtgaccgccttgctcctgccgctggccttgctgctccacgccgccaggccggacatccagatgacacagagccctagcagcctgtctgccagcgtgggagacagagtgaccatcacatgcaaggccagcgaccacatcaacaactggctggcctggtatcagcagaagcctggacaggcccctaagctgctgatctacggcgctaccacactggaaacaggcgtgcccagcagattttctggcagcggctctggcaccgactacaccctgacaatatccagcctccagcctgaggacttcgccacctactactgtcagcagagctggaacaccccttggacattcggccagggcaccaagctggaaatcaagagaggcggaggcggaagtggaggcggaggatctggcggcggaggctctcaagttcagcttcaacagcctggcgctgagctggtcaaacctggcgcttctgtgaagatgagctgcaaagccagcggctacgccttcaacagctactggatcaactggatgaagcagaaacccggccagggactcgaatggatcggccaaatctatcccggcgacggcgacaccaactacaacggcaagttcaagggcagagccacactgaccgccgatacctctagcagcacagcctacatgcagctgagcagcctgaccagcgaagatagcgccgtgtacttctgtgcccggtccatcacaacagtcgtgggctgcgctatggactattggggccagggaacaagcgtgaccgtgtctagtacgcgtagatccgaagatcgctacaggaacctcgagggaggcagctggagccaccctcagtttgaaaaagactacaaagacgatgacgataagggatcagattacaaggatgatgatgacaaggggtcagattataaagacgacgatgataaagggagcgactacaaggacgacgatgacaaggcctggtcccatccccagttcgagaaacaccatcaccaccaccatcatcacactagtggctccggcgagggcagaggaagtctactaacctgcggagatgtggaagaaaatcctggcccacatatgaccgagtacaagcccacggtgcgcctcgccacccgcgacgacgtccccagggccgtacgcaccctcgccgccgcgttcgccgactaccccgccacgcgccacaccgtcgatccggaccgccacatcgagcgggtcaccgagctgcaagaactcttcctcacgcgcgtcgggctcgacatcggcaaggtgtgggtcgcggacgacggcgccgcggtggcggtctggaccacgccggagagcgtcgaagcgggggcggtgttcgccgagatcggcccgcgcatggccgagttgagcggttcccggctggccgcgcagcaacagatggaaggcctcctggcgccgcaccggcccaaggagcccgcgtggttcctggccaccgtcggcgtctcgcccgaccaccagggcaagggtctgggcagcgccgtcgtgctccccggagtggaggcggccgagcgcgccggggtgcccgccttcctggagacctccgcgccccgcaacctccccttctacgagcggctcggcttcaccgtcaccgccgacgtcgaggtgcccgaaggaccgcgcacctggtgcatgacccgcaagcccggtgcctga

SEQ ID NO: 5429 - DNA, 1701 bp, synthetic construct; identical to SEQ ID NO: 5428
  source 1..1701: mol_type = other DNA

SEQ ID NO: 5430 - DNA, 1701 bp, synthetic construct; identical to SEQ ID NO: 5322
  source 1..1701: mol_type = other DNA

SEQ ID NO: 5431 - DNA, 1701 bp, synthetic construct; identical to SEQ ID NO: 5321
  source 1..1701: mol_type = other DNA

SEQ ID NO: 5432 - DNA, 1701 bp, synthetic construct
  source 1..1701: mol_type = other DNA
atggccttaccagtgaccgccttgctcctgccgctggccttgctgctccacgccgccaggccggacatccagatgacacagagccctagcagcctgtctgccagcgtgggagacagagtgaccatcacatgcaaggccagcgaccacatcaacaactggctggcctggtatcagcagaagcctggacaggcccctaagctgctgatctacggcgctaccacactggaaacaggcgtgcccagcagattttctggcagcggctctggcaccgactacaccctgacaatatccagcctccagcctgaggacttcgccacctactactgtcagcagagctggaacaccccttggacattcggccagggcaccaagctggaaatcaagagaggcggaggcggaagtggaggcggaggatctggcggcggaggctctcaagttcagcttcaacagcctggcgctgagctggtcaaacctggcgcttctgtgaagatgagctgcaaagccagcggctacgccttcaacagctactggatcaactggatgaagcagaaacccggccagggactcgaatggatcggccaaatctatcccggcgacggcgacaccaactacaacggcaagttcaagggcagagccacactgaccgccgatacctctagcagcacagcctacatgcagctgagcagcctgaccagcgaagatagcgccgtgtacttctgtgcccggtccatcacaacagtcgtgggctgcgctatggactattggggccagggaacaagcgtgaccgtgtctagtacgcgtagagaagaagatcgctacaggaacctcgagggaggcagctggagccaccctcagtttgaaaaagactacaaagacgatgacgataagggatcagattacaaggatgatgatgacaaggggtcagattataaagacgacgatgataaagggagcgactacaaggacgacgatgacaaggcctggtcccatccccagttcgagaaacaccatcaccaccaccatcatcacactagtggctccggcgagggcagaggaagtctactaacctgcggagatgtggaagaaaatcctggcccacatatgaccgagtacaagcccacggtgcgcctcgccacccgcgacgacgtccccagggccgtacgcaccctcgccgccgcgttcgccgactaccccgccacgcgccacaccgtcgatccggaccgccacatcgagcgggtcaccgagctgcaagaactcttcctcacgcgcgtcgggctcgacatcggcaaggtgtgggtcgcggacgacggcgccgcggtggcggtctggaccacgccggagagcgtcgaagcgggggcggtgttcgccgagatcggcccgcgcatggccgagttgagcggttcccggctggccgcgcagcaacagatggaaggcctcctggcgccgcaccggcccaaggagcccgcgtggttcctggccaccgtcggcgtctcgcccgaccaccagggcaagggtctgggcagcgccgtcgtgctccccggagtggaggcggccgagcgcgccggggtgcccgccttcctggagacctccgcgccccgcaacctccccttctacgagcggctcggcttcaccgtcaccgccgacgtcgaggtgcccgaaggaccgcgcacctggtgcatgacccgcaagcccggtgcctga

SEQ ID NO: 5433 - DNA, 1701 bp, synthetic construct
  source 1..1701: mol_type = other DNA
atggccttaccagtgaccgccttgctcctgccgctggccttgctgctccacgccgccaggccggacatccagatgacacagagccctagcagcctgtctgccagcgtgggagacagagtgaccatcacatgcaaggccagcgaccacatcaacaactggctggcctggtatcagcagaagcctggacaggcccctaagctgctgatctacggcgctaccacactggaaacaggcgtgcccagcagattttctggcagcggctctggcaccgactacaccctgacaatatccagcctccagcctgaggacttcgccacctactactgtcagcagagctggaacaccccttggacattcggccagggcaccaagctggaaatcaagagaggcggaggcggaagtggaggcggaggatctggcggcggaggctctcaagttcagcttcaacagcctggcgctgagctggtcaaacctggcgcttctgtgaagatgagctgcaaagccagcggctacgccttcaacagctactggatcaactggatgaagcagaaacccggccagggactcgaatggatcggccaaatctatcccggcgacggcgacaccaactacaacggcaagttcaagggcagagccacactgaccgccgatacctctagcagcacagcctacatgcagctgagcagcctgaccagcgaagatagcgccgtgtacttctgtgcccggtccatcacaacagtcgtgggctgcgctatggactattggggccagggaacaagcgtgaccgtgtctagtacgcgtagaagtgatgaacgctacaggaacctcgagggaggcagctggagccaccctcagtttgaaaaagactacaaagacgatgacgataagggatcagattacaaggatgatgatgacaaggggtcagattataaagacgacgatgataaagggagcgactacaaggacgacgatgacaaggcctggtcccatccccagttcgagaaacaccatcaccaccaccatcatcacactagtggctccggcgagggcagaggaagtctactaacctgcggagatgtggaagaaaatcctggcccacatatgaccgagtacaagcccacggtgcgcctcgccacccgcgacgacgtccccagggccgtacgcaccctcgccgccgcgttcgccgactaccccgccacgcgccacaccgtcgatccggaccgccacatcgagcgggtcaccgagctgcaagaactcttcctcacgcgcgtcgggctcgacatcggcaaggtgtgggtcgcggacgacggcgccgcggtggcggtctggaccacgccggagagcgtcgaagcgggggcggtgttcgccgagatcggcccgcgcatggccgagttgagcggttcccggctggccgcgcagcaacagatggaaggcctcctggcgccgcaccggcccaaggagcccgcgtggttcctggccaccgtcggcgtctcgcccgaccaccagggcaagggtctgggcagcgccgtcgtgctccccggagtggaggcggccgagcgcgccggggtgcccgccttcctggagacctccgcgccccgcaacctccccttctacgagcggctcggcttcaccgtcaccgccgacgtcgaggtgcccgaaggaccgcgcacctggtgcatgacccgcaagcccggtgcctga

SEQ ID NO: 5434 - DNA, 1701 bp, synthetic construct; identical to SEQ ID NO: 5261
  source 1..1701: mol_type = other DNA

SEQ ID NO: 5435 - DNA, 1701 bp, synthetic construct
  source 1..1701: mol_type = other DNA
atggccttaccagtgaccgccttgctcctgccgctggccttgctgctccacgccgccaggccggacatccagatgacacagagccctagcagcctgtctgccagcgtgggagacagagtgaccatcacatgcaaggccagcgaccacatcaacaactggctggcctggtatcagcagaagcctggacaggcccctaagctgctgatctacggcgctaccacactggaaacaggcgtgcccagcagattttctggcagcggctctggcaccgactacaccctgacaatatccagcctccagcctgaggacttcgccacctactactgtcagcagagctggaacaccccttggacattcggccagggcaccaagctggaaatcaagagaggcggaggcggaagtggaggcggaggatctggcggcggaggctctcaagttcagcttcaacagcctggcgctgagctggtcaaacctggcgcttctgtgaagatgagctgcaaagccagcggctacgccttcaacagctactggatcaactggatgaagcagaaacccggccagggactcgaatggatcggccaaatctatcccggcgacggcgacaccaactacaacggcaagttcaagggcagagccacactgaccgccgatacctctagcagcacagcctacatgcagctgagcagcctgaccagcgaagatagcgccgtgtacttctgtgcccggtccatcacaacagtcgtgggctgcgctatggactattggggccagggaacaagcgtgaccgtgtctagtacgcgtagaagtgaagaacgctacaggaacctcgagggaggcagctggagccaccctcagtttgaaaaagactacaaagacgatgacgataagggatcagattacaaggatgatgatgacaaggggtcagattataaagacgacgatgataaagggagcgactacaaggacgacgatgacaaggcctggtcccatccccagttcgagaaacaccatcaccaccaccatcatcacactagtggctccggcgagggcagaggaagtctactaacctgcggagatgtggaagaaaatcctggcccacatatgaccgagtacaagcccacggtgcgcctcgccacccgcgacgacgtccccagggccgtacgcaccctcgccgccgcgttcgccgactaccccgccacgcgccacaccgtcgatccggaccgccacatcgagcgggtcaccgagctgcaagaactcttcctcacgcgcgtcgggctcgacatcggcaaggtgtgggtcgcggacgacggcgccgcggtggcggtctggaccacgccggagagcgtcgaagcgggggcggtgttcgccgagatcggcccgcgcatggccgagttgagcggttcccggctggccgcgcagcaacagatggaaggcctcctggcgccgcaccggcccaaggagcccgcgtggttcctggccaccgtcggcgtctcgcccgaccaccagggcaagggtctgggcagcgccgtcgtgctccccggagtggaggcggccgagcgcgccggggtgcccgccttcctggagacctccgcgccccgcaacctccccttctacgagcggctcggcttcaccgtcaccgccgacgtcgaggtgcccgaaggaccgcgcacctggtgcatgacccgcaagcccggtgcctga

SEQ ID NO: 5436 - DNA, 1701 bp, synthetic construct; identical to SEQ ID NO: 5261
  source 1..1701: mol_type = other DNA

SEQ ID NO: 5437 - DNA, 1701 bp, synthetic construct; identical to SEQ ID NO: 5261
  source 1..1701: mol_type = other DNA

SEQ ID NO: 5438 - DNA, 1701 bp, synthetic construct; identical to SEQ ID NO: 5433
  source 1..1701: mol_type = other DNA

SEQ ID NO: 5439 - DNA, 1701 bp, synthetic construct; identical to SEQ ID NO: 5433
  source 1..1701: mol_type = other DNA

SEQ ID NO: 5440 - DNA, 1701 bp, synthetic construct; identical to SEQ ID NO: 5433
  source 1..1701: mol_type = other DNA

SEQ ID NO: 5441 - DNA, 1701 bp, synthetic construct; identical to SEQ ID NO: 5433
  source 1..1701: mol_type = other DNA

SEQ ID NO: 5442 - DNA, 1701 bp, synthetic construct; identical to SEQ ID NO: 5433
  source 1..1701: mol_type = other DNA

SEQ ID NO: 5443 - DNA, 1701 bp, synthetic construct; identical to SEQ ID NO: 5261
  source 1..1701: mol_type = other DNA

SEQ ID NO: 5444 - DNA, 1701 bp, synthetic construct; identical to SEQ ID NO: 5261
  source 1..1701: mol_type = other DNA

SEQ ID NO: 5445 - DNA, 1698 bp, synthetic construct; identical to SEQ ID NO: 5376
  source 1..1698: mol_type = other DNA

SEQ ID NO: 5446 - DNA, 1698 bp, synthetic construct
  source 1..1698: mol_type = other DNA
atggccttaccagtgaccgccttgctcctgccgctggccttgctgctccacgccgccaggccggacatccagatgacacagagccctagcagcctgtctgccagcgtgggagacagagtgaccatcacatgcaaggccagcgaccacatcaacaactggctggcctggtatcagcagaagcctggacaggcccctaagctgctgatctacggcgctaccacactggaaacaggcgtgcccagcagattttctggcagcggctctggcaccgactacaccctgacaatatccagcctccagcctgaggacttcgccacctactactgtcagcagagctggaacaccccttggacattcggccagggcaccaagctggaaatcaagagaggcggaggcggaagtggaggcggaggatctggcggcggaggctctcaagttcagcttcaacagcctggcgctgagctggtcaaacctggcgcttctgtgaagatgagctgcaaagccagcggctacgccttcaacagctactggatcaactggatgaagcagaaacccggccagggactcgaatggatcggccaaatctatcccggcgacggcgacaccaactacaacggcaagttcaagggcagagccacactgaccgccgatacctctagcagcacagcctacatgcagctgagcagcctgaccagcgaagatagcgccgtgtacttctgtgcccggtccatcacaacagtcgtgggctgcgctatggactattggggccagggaacaagcgtgaccgtgtctagtacgcgtagacaagaagatcgctacaggctcgagggaggcagctggagccaccctcagtttgaaaaagactacaaagacgatgacgataagggatcagattacaaggatgatgatgacaaggggtcagattataaagacgacgatgataaagggagcgactacaaggacgacgatgacaaggcctggtcccatccccagttcgagaaacaccatcaccaccaccatcatcacactagtggctccggcgagggcagaggaagtctactaacctgcggagatgtggaagaaaatcctggcccacatatgaccgagtacaagcccacggtgcgcctcgccacccgcgacgacgtccccagggccgtacgcaccctcgccgccgcgttcgccgactaccccgccacgcgccacaccgtcgatccggaccgccacatcgagcgggtcaccgagctgcaagaactcttcctcacgcgcgtcgggctcgacatcggcaaggtgtgggtcgcggacgacggcgccgcggtggcggtctggaccacgccggagagcgtcgaagcgggggcggtgttcgccgagatcggcccgcgcatggccgagttgagcggttcccggctggccgcgcagcaacagatggaaggcctcctggcgccgcaccggcccaaggagcccgcgtggttcctggccaccgtcggcgtctcgcccgaccaccagggcaagggtctgggcagcgccgtcgtgctccccggagtggaggcggccgagcgcgccggggtgcccgccttcctggagacctccgcgccccgcaacctccccttctacgagcggctcggcttcaccgtcaccgccgacgtcgaggtgcccgaaggaccgcgcacctggtgcatgacccgcaagcccggtgcctga

SEQ ID NO: 5447 - DNA, 1698 bp, synthetic construct
  source 1..1698: mol_type = other DNA
atggccttaccagtgaccgccttgctcctgccgctggccttgctgctccacgccgccaggccggacatccagatgacacagagccctagcagcctgtctgccagcgtgggagacagagtgaccatcacatgcaaggccagcgaccacatcaacaactggctggcctggtatcagcagaagcctggacaggcccctaagctgctgatctacggcgctaccacactggaaacaggcgtgcccagcagattttctggcagcggctctggcaccgactacaccctgacaatatccagcctccagcctgaggacttcgccacctactactgtcagcagagctggaacaccccttggacattcggccagggcaccaagctggaaatcaagagaggcggaggcggaagtggaggcggaggatctggcggcggaggctctcaagttcagcttcaacagcctggcgctgagctggtcaaacctggcgcttctgtgaagatgagctgcaaagccagcggctacgccttcaacagctactggatcaactggatgaagcagaaacccggccagggactcgaatggatcggccaaatctatcccggcgacggcgacaccaactacaacggcaagttcaagggcagagccacactgaccgccgatacctctagcagcacagcctacatgcagctgagcagcctgaccagcgaagatagcgccgtgtacttctgtgcccggtccatcacaacagtcgtgggctgcgctatggactattggggccagggaacaagcgtgaccgtgtctagtacgcgtagaccagaagatcgctacaggctcgagggaggcagctggagccaccctcagtttgaaaaagactacaaagacgatgacgataagggatcagattacaaggatgatgatgacaaggggtcagattataaagacgacgatgataaagggagcgactacaaggacgacgatgacaaggcctggtcccatccccagttcgagaaacaccatcaccaccaccatcatcacactagtggctccggcgagggcagaggaagtctactaacctgcggagatgtggaagaaaatcctggcccacatatgaccgagtacaagcccacggtgcgcctcgccacccgcgacgacgtccccagggccgtacgcaccctcgccgccgcgttcgccgactaccccgccacgcgccacaccgtcgatccggaccgccacatcgagcgggtcaccgagctgcaagaactcttcctcacgcgcgtcgggctcgacatcggcaaggtgtgggtcgcggacgacggcgccgcggtggcggtctggaccacgccggagagcgtcgaagcgggggcggtgttcgccgagatcggcccgcgcatggccgagttgagcggttcccggctggccgcgcagcaacagatggaaggcctcctggcgccgcaccggcccaaggagcccgcgtggttcctggccaccgtcggcgtctcgcccgaccaccagggcaagggtctgggcagcgccgtcgtgctccccggagtggaggcggccgagcgcgccggggtgcccgccttcctggagacctccgcgccccgcaacctccccttctacgagcggctcggcttcaccgtcaccgccgacgtcgaggtgcccgaaggaccgcgcacctggtgcatgacccgcaagcccggtgcctga

SEQ ID NO: 5448 - DNA, 1698 bp, synthetic construct
  source 1..1698: mol_type = other DNA
atggccttaccagtgaccgccttgctcctgccgctggccttgctgctccacgccgccaggccggacatccagatgacacagagccctagcagcctgtctgccagcgtgggagacagagtgaccatcacatgcaaggccagcgaccacatcaacaactggctggcctggtatcagcagaagcctggacaggcccctaagctgctgatctacggcgctaccacactggaaacaggcgtgcccagcagattttctggcagcggctctggcaccgactacaccctgacaatatccagcctccagcctgaggacttcgccacctactactgtcagcagagctggaacaccccttggacattcggccagggcaccaagctggaaatcaagagaggcggaggcggaagtggaggcggaggatctggcggcggaggctctcaagttcagcttcaacagcctggcgctgagctggtcaaacctggcgcttctgtgaagatgagctgcaaagccagcggctacgccttcaacagctactggatcaactggatgaagcagaaacccggccagggactcgaatggatcggccaaatctatcccggcgacggcgacaccaactacaacggcaagttcaagggcagagccacactgaccgccgatacctctagcagcacagcctacatgcagctgagcagcctgaccagcgaagatagcgccgtgtacttctgtgcccggtccatcacaacagtcgtgggctgcgctatggactattggggccagggaacaagcgtgaccgtgtctagtacgcgtagattggaagatcgctacaggctcgagggaggcagctggagccaccctcagtttgaaaaagactacaaagacgatgacgataagggatcagattacaaggatgatgatgacaaggggtcagattataaagacgacgatgataaagggagcgactacaaggacgacgatgacaaggcctggtcccatccccagttcgagaaacaccatcaccaccaccatcatcacactagtggctccggcgagggcagaggaagtctactaacctgcggagatgtggaagaaaatcctggcccacatatgaccgagtacaagcccacggtgcgcctcgccacccgcgacgacgtccccagggccgtacgcaccctcgccgccgcgttcgccgactaccccgccacgcgccacaccgtcgatccggaccgccacatcgagcgggtcaccgagctgcaagaactcttcctcacgcgcgtcgggctcgacatcggcaaggtgtgggtcgcggacgacggcgccgcggtggcggtctggaccacgccggagagcgtcgaagcgggggcggtgttcgccgagatcggcccgcgcatggccgagttgagcggttcccggctggccgcgcagcaacagatggaaggcctcctggcgccgcaccggcccaaggagcccgcgtggttcctggccaccgtcggcgtctcgcccgaccaccagggcaagggtctgggcagcgccgtcgtgctccccggagtggaggcggccgagcgcgccggggtgcccgccttcctggagacctccgcgccccgcaacctccccttctacgagcggctcggcttcaccgtcaccgccgacgtcgaggtgcccgaaggaccgcgcacctggtgcatgacccgcaagcccggtgcctga

SEQ ID NO: 5449 - DNA, 1698 bp, synthetic construct; identical to SEQ ID NO: 5347
  source 1..1698: mol_type = other DNA

SEQ ID NO: 5450 - DNA, 1698 bp, synthetic construct; identical to SEQ ID NO: 5347
  source 1..1698: mol_type = other DNA

SEQ ID NO: 5451 - DNA, 1698 bp, synthetic construct
  source 1..1698: mol_type = other DNA
atggccttaccagtgaccgccttgctcctgccgctggccttgctgctccacgccgccaggccggacatccagatgacacagagccctagcagcctgtctgccagcgtgggagacagagtgaccatcacatgcaaggccagcgaccacatcaacaactggctggcctggtatcagcagaagcctggacaggcccctaagctgctgatctacggcgctaccacactggaaacaggcgtgcccagcagattttctggcagcggctctggcaccgactacaccctgacaatatccagcctccagcctgaggacttcgccacctactactgtcagcagagctggaacaccccttggacattcggccagggcaccaagctggaaatcaagagaggcggaggcggaagtggaggcggaggatctggcggcggaggctctcaagttcagcttcaacagcctggcgctgagctggtcaaacctggcgcttctgtgaagatgagctgcaaagccagcggctacgccttcaacagctactggatcaactggatgaagcagaaacccggccagggactcgaatggatcggccaaatctatcccggcgacggcgacaccaactacaacggcaagttcaagggcagagccacactgaccgccgatacctctagcagcacagcctacatgcagctgagcagcctgaccagcgaagatagcgccgtgtacttctgtgcccggtccatcacaacagtcgtgggctgcgctatggactattggggccagggaacaagcgtgaccgtgtctagtacgcgtagatcagaagatcgctacaggctcgagggaggcagctggagccaccctcagtttgaaaaagactacaaagacgatgacgataagggatcagattacaaggatgatgatgacaaggggtcagattataaagacgacgatgataaagggagcgactacaaggacgacgatgacaaggcctggtcccatccccagttcgagaaacaccatcaccaccaccatcatcacactagtggctccggcgagggcagaggaagtctactaacctgcggagatgtggaagaaaatcctggcccacatatgaccgagtacaagcccacggtgcgcctcgccacccgcgacgacgtccccagggccgtacgcaccctcgccgccgcgttcgccgactaccccgccacgcgccacaccgtcgatccggaccgccacatcgagcgggtcaccgagctgcaagaactcttcctcacgcgcgtcgggctcgacatcggcaaggtgtgggtcgcggacgacggcgccgcggtggcggtctggaccacgccggagagcgtcgaagcgggggcggtgttcgccgagatcggcccgcgcatggccgagttgagcggttcccggctggccgcgcagcaacagatggaaggcctcctggcgccgcaccggcccaaggagcccgcgtggttcctggccaccgtcggcgtctcgcccgaccaccagggcaagggtctgggcagcgccgtcgtgctccccggagtggaggcggccgagcgcgccggggtgcccgccttcctggagacctccgcgccccgcaacctccccttctacgagcggctcggcttcaccgtcaccgccgacgtcgaggtgcccgaaggaccgcgcacctggtgcatgacccgcaagcccggtgcctga

SEQ ID NO: 5452 - DNA, 1698 bp, synthetic construct; identical to SEQ ID NO: 5227
  source 1..1698: mol_type = other DNA

SEQ ID NO: 5453 - DNA, 1698 bp, synthetic construct
  source 1..1698: mol_type = other DNA
atggccttaccagtgaccgccttgctcctgccgctggccttgctgctccacgccgccaggccggacatccagatgacacagagccctagcagcctgtctgccagcgtgggagacagagtgaccatcacatgcaaggccagcgaccacatcaacaactggctggcctggtatcagcagaagcctggacaggcccctaagctgctgatctacggcgctaccacactggaaacaggcgtgcccagcagattttctggcagcggctctggcaccgactacaccctgacaatatccagcctccagcctgaggacttcgccacctactactgtcagcagagctggaacaccccttggacattcggccagggcaccaagctggaaatcaagagaggcggaggcggaagtggaggcggaggatctggcggcggaggctctcaagttcagcttcaacagcctggcgctgagctggtcaaacctggcgcttctgtgaagatgagctgcaaagccagcggctacgccttcaacagctactggatcaactggatgaagcagaaacccggccagggactcgaatggatcggccaaatctatcccggcgacggcgacaccaactacaacggcaagttcaagggcagagccacactgaccgccgatacctctagcagcacagcctacatgcagctgagcagcctgaccagcgaagatagcgccgtgtacttctgtgcccggtccatcacaacagtcgtgggctgcgctatggactattggggccagggaacaagcgtgaccgtgtctagtacgcgtagactggaagatcgctacaggctcgagggaggcagctggagccaccctcagtttgaaaaagactacaaagacgatgacgataagggatcagattacaaggatgatgatgacaaggggtcagattataaagacgacgatgataaagggagcgactacaaggacgacgatgacaaggcctggtcccatccccagttcgagaaacaccatcaccaccaccatcatcacactagtggctccggcgagggcagaggaagtctactaacctgcggagatgtggaagaaaatcctggcccacatatgaccgagtacaagcccacggtgcgcctcgccacccgcgacgacgtccccagggccgtacgcaccctcgccgccgcgttcgccgactaccccgccacgcgccacaccgtcgatccggaccgccacatcgagcgggtcaccgagctgcaagaactcttcctcacgcgcgtcgggctcgacatcggcaaggtgtgggtcgcggacgacggcgccgcggtggcggtctggaccacgccggagagcgtcgaagcgggggcggtgttcgccgagatcggcccgcgcatggccgagttgagcggttcccggctggccgcgcagcaacagatggaaggcctcctggcgccgcaccggcccaaggagcccgcgtggttcctggccaccgtcggcgtctcgcccgaccaccagggcaagggtctgggcagcgccgtcgtgctccccggagtggaggcggccgagcgcgccggggtgcccgccttcctggagacctccgcgccccgcaacctccccttctacgagcggctcggcttcaccgtcaccgccgacgtcgaggtgcccgaaggaccgcgcacctggtgcatgacccgcaagcccggtgcctga

SEQ ID NO: 5454 - DNA, 1698 bp, synthetic construct
  source 1..1698: mol_type = other DNA
atggccttaccagtgaccgccttgctcctgccgctggccttgctgctccacgccgccaggccggacatccagatgacacagagccctagcagcctgtctgccagcgtgggagacagagtgaccatcacatgcaaggccagcgaccacatcaacaactggctggcctggtatcagcagaagcctggacaggcccctaagctgctgatctacggcgctaccacactggaaacaggcgtgcccagcagattttctggcagcggctctggcaccgactacaccctgacaatatccagcctccagcctgaggacttcgccacctactactgtcagcagagctggaacaccccttggacattcggccagggcaccaagctggaaatcaagagaggcggaggcggaagtggaggcggaggatctggcggcggaggctctcaagttcagcttcaacagcctggcgctgagctggtcaaacctggcgcttctgtgaagatgagctgcaaagccagcggctacgccttcaacagctactggatcaactggatgaagcagaaacccggccagggactcgaatggatcggccaaatctatcccggcgacggcgacaccaactacaacggcaagttcaagggcagagccacactgaccgccgatacctctagcagcacagcctacatgcagctgagcagcctgaccagcgaagatagcgccgtgtacttctgtgcccggtccatcacaacagtcgtgggctgcgctatggactattggggccagggaacaagcgtgaccgtgtctagtacgcgtagagaagaagatcgctacaggctcgagggaggcagctggagccaccctcagtttgaaaaagactacaaagacgatgacgataagggatcagattacaaggatgatgatgacaaggggtcagattataaagacgacgatgataaagggagcgactacaaggacgacgatgacaaggcctggtcccatccccagttcgagaaacaccatcaccaccaccatcatcacactagtggctccggcgagggcagaggaagtctactaacctgcggagatgtggaagaaaatcctggcccacatatgaccgagtacaagcccacggtgcgcctcgccacccgcgacgacgtccccagggccgtacgcaccctcgccgccgcgttcgccgactaccccgccacgcgccacaccgtcgatccggaccgccacatcgagcgggtcaccgagctgcaagaactcttcctcacgcgcgtcgggctcgacatcggcaaggtgtgggtcgcggacgacggcgccgcggtggcggtctggaccacgccggagagcgtcgaagcgggggcggtgttcgccgagatcggcccgcgcatggccgagttgagcggttcccggctggccgcgcagcaacagatggaaggcctcctggcgccgcaccggcccaaggagcccgcgtggttcctggccaccgtcggcgtctcgcccgaccaccagggcaagggtctgggcagcgccgtcgtgctccccggagtggaggcggccgagcgcgccggggtgcccgccttcctggagacctccgcgccccgcaacctccccttctacgagcggctcggcttcaccgtcaccgccgacgtcgaggtgcccgaaggaccgcgcacctggtgcatgacccgcaagcccggtgcctga

SEQ ID NO: 5455 - DNA, 1698 bp, synthetic construct; identical to SEQ ID NO: 5227
  source 1..1698: mol_type = other DNA

SEQ ID NO: 5456 - DNA, 1698 bp, synthetic construct; identical to SEQ ID NO: 5446
  source 1..1698: mol_type = other DNA

SEQ ID NO: 5457 - DNA, 1698 bp, synthetic construct
  source 1..1698: mol_type = other DNA
atggccttaccagtgaccgccttgctcctgccgctggccttgctgctccacgccgccaggccggacatccagatgacacagagccctagcagcctgtctgccagcgtgggagacagagtgaccatcacatgcaaggccagcgaccacatcaacaactggctggcctggtatcagcagaagcctggacaggcccctaagctgctgatctacggcgctaccacactggaaacaggcgtgcccagcagattttctggcagcggctctggcaccgactacaccctgacaatatccagcctccagcctgaggacttcgccacctactactgtcagcagagctggaacaccccttggacattcggccagggcaccaagctggaaatcaagagaggcggaggcggaagtggaggcggaggatctggcggcggaggctctcaagttcagcttcaacagcctggcgctgagctggtcaaacctggcgcttctgtgaagatgagctgcaaagccagcggctacgccttcaacagctactggatcaactggatgaagcagaaacccggccagggactcgaatggatcggccaaatctatcccggcgacggcgacaccaactacaacggcaagttcaagggcagagccacactgaccgccgatacctctagcagcacagcctacatgcagctgagcagcctgaccagcgaagatagcgccgtgtacttctgtgcccggtccatcacaacagtcgtgggctgcgctatggactattggggccagggaacaagcgtgaccgtgtctagtacgcgtagatacgaagatcgctacaggctcgagggaggcagctggagccaccctcagtttgaaaaagactacaaagacgatgacgataagggatcagattacaaggatgatgatgacaaggggtcagattataaagacgacgatgataaagggagcgactacaaggacgacgatgacaaggcctggtcccatccccagttcgagaaacaccatcaccaccaccatcatcacactagtggctccggcgagggcagaggaagtctactaacctgcggagatgtggaagaaaatcctggcccacatatgaccgagtacaagcccacggtgcgcctcgccacccgcgacgacgtccccagggccgtacgcaccctcgccgccgcgttcgccgactaccccgccacgcgccacaccgtcgatccggaccgccacatcgagcgggtcaccgagctgcaagaactcttcctcacgcgcgtcgggctcgacatcggcaaggtgtgggtcgcggacgacggcgccgcggtggcggtctggaccacgccggagagcgtcgaagcgggggcggtgttcgccgagatcggcccgcgcatggccgagttgagcggttcccggctggccgcgcagcaacagatggaaggcctcctggcgccgcaccggcccaaggagcccgcgtggttcctggccaccgtcggcgtctcgcccgaccaccagggcaagggtctgggcagcgccgtcgtgctccccggagtggaggcggccgagcgcgccggggtgcccgccttcctggagacctccgcgccccgcaacctccccttctacgagcggctcggcttcaccgtcaccgccgacgtcgaggtgcccgaaggaccgcgcacctggtgcatgacccgcaagcccggtgcctga

SEQ ID NO: 5458 - DNA, 22 bp, synthetic construct
  source 1..22: mol_type = other DNA
gggggggggggggggggggggg

SEQ ID NO: 5459 - DNA, 22 bp, synthetic construct
  source 1..22: mol_type = other DNA
gggggggggggggggggggggg

SEQ ID NO: 5460 - DNA, 22 bp, synthetic construct
  source 1..22: mol_type = other DNA
gggggggggggggggggggggg

SEQ ID NO: 5461 - DNA, 22 bp, synthetic construct
  source 1..22: mol_type = other DNA
gggggggggggggggggggggg

SEQ ID NO: 5462 - DNA, 22 bp, synthetic construct
  source 1..22: mol_type = other DNA
gggggggggggggggggggggg

SEQ ID NO: 5463 - DNA, 22 bp, synthetic construct
  source 1..22: mol_type = other DNA
gggggggggggggggggggggg

SEQ ID NO: 5464 - DNA, 22 bp, synthetic construct
  source 1..22: mol_type = other DNA
gggggggggggggggggggggg

SEQ ID NO: 5465 - DNA, 22 bp, synthetic construct
  source 1..22: mol_type = other DNA
gggggggggggggggggggggg

SEQ ID NO: 5466 - DNA, 22 bp, synthetic construct
  source 1..22: mol_type = other DNA
gggggggggggggggggggggg

SEQ ID NO: 5467 - DNA, 22 bp, synthetic construct
  source 1..22: mol_type = other DNA
gggggggggggggggggggggg

SEQ ID NO: 5468 - DNA, 22 bp, synthetic construct
  source 1..22: mol_type = other DNA
gggggggggggggggggggggg

SEQ ID NO: 5469 - DNA, 22 bp, synthetic construct
  source 1..22: mol_type = other DNA
gggggggggggggggggggggg

SEQ ID NO: 5470 - DNA, 22 bp, synthetic construct
  source 1..22: mol_type = other DNA
gggggggggggggggggggggg

SEQ ID NO: 5471 - DNA, 22 bp, synthetic construct
  source 1..22: mol_type = other DNA
gggggggggggggggggggggg

SEQ ID NO: 5472 - DNA, 22 bp, synthetic construct
  source 1..22: mol_type = other DNA
gggggggggggggggggggggg

SEQ ID NO: 5473 - DNA, 22 bp, synthetic construct
  source 1..22: mol_type = other DNA
gggggggggggggggggggggg

SEQ ID NO: 5474 - DNA, 22 bp, synthetic construct
  source 1..22: mol_type = other DNA
gggggggggggggggggggggg

SEQ ID NO: 5475 - DNA, 22 bp, synthetic construct
  source 1..22: mol_type = other DNA
gggggggggggggggggggggg

SEQ ID NO: 5476 - DNA, 22 bp, synthetic construct
  source 1..22: mol_type = other DNA
gggggggggggggggggggggg

SEQ ID NO: 5477 - DNA, 22 bp, synthetic construct
  source 1..22: mol_type = other DNA
gggggggggggggggggggggg

SEQ ID NO: 5478 - DNA, 22 bp, synthetic construct
  source 1..22: mol_type = other DNA
gggggggggggggggggggggg

SEQ ID NO: 5479 - DNA, 22 bp, synthetic construct
  source 1..22: mol_type = other DNA
gggggggggggggggggggggg

SEQ ID NO: 5480 - DNA, 22 bp, synthetic construct
  source 1..22: mol_type = other DNA
gggggggggggggggggggggg

SEQ ID NO: 5481 - DNA, 22 bp, synthetic construct
  source 1..22: mol_type = other DNA
gggggggggggggggggggggg

SEQ ID NO: 5482 - DNA, 22 bp, synthetic construct
  source 1..22: mol_type = other DNA
gggggggggggggggggggggg

SEQ ID NO: 5483 - DNA, 22 bp, synthetic construct
  source 1..22: mol_type = other DNA
gggggggggggggggggggggg

SEQ ID NO: 5484 - DNA, 22 bp, synthetic construct
  source 1..22: mol_type = other DNA
gggggggggggggggggggggg

SEQ ID NO: 5485 - DNA, 22 bp, synthetic construct
  source 1..22: mol_type = other DNA
gggggggggggggggggggggg

SEQ ID NO: 5486 - DNA, 22 bp, synthetic construct
  source 1..22: mol_type = other DNA
gggggggggggggggggggggg

SEQ ID NO: 5487 - DNA, 22 bp, synthetic construct
  source 1..22: mol_type = other DNA
gggggggggggggggggggggg

SEQ ID NO: 5488 - DNA, 22 bp, synthetic construct
  source 1..22: mol_type = other DNA
gggggggggggggggggggggg

SEQ ID NO: 5489 - DNA, 22 bp, synthetic construct
  source 1..22: mol_type = other DNA
gggggggggggggggggggggg

SEQ ID NO: 5490 - DNA, 22 bp, synthetic construct
  source 1..22: mol_type = other DNA
gggggggggggggggggggggg

SEQ ID NO: 5491 - DNA, 22 bp, synthetic construct
  source 1..22: mol_type = other DNA
gggggggggggggggggggggg

SEQ ID NO: 5492 - DNA, 22 bp, synthetic construct
  source 1..22: mol_type = other DNA
gggggggggggggggggggggg

SEQ ID NO: 5493 - DNA, 22 bp, synthetic construct
  source 1..22: mol_type = other DNA
gggggggggggggggggggggg

SEQ ID NO: 5494 - DNA, 22 bp, synthetic construct
  source 1..22: mol_type = other DNA
gggggggggggggggggggggg

SEQ ID NO: 5495 - DNA, 22 bp, synthetic construct
  source 1..22: mol_type = other DNA
gggggggggggggggggggggg

SEQ ID NO: 5496 - DNA, 22 bp, synthetic construct
  source 1..22: mol_type = other DNA
gggggggggggggggggggggg

SEQ ID NO: 5497 - DNA, 22 bp, synthetic construct
  source 1..22: mol_type = other DNA
gggggggggggggggggggggg

SEQ ID NO: 5498 - DNA, 22 bp, synthetic construct
  source 1..22: mol_type = other DNA
gggggggggggggggggggggg

SEQ ID NO: 5499 - DNA, 22 bp, synthetic construct
  source 1..22: mol_type = other DNA
gggggggggggggggggggggg

SEQ ID NO: 5500 - DNA, 22 bp, synthetic construct
  source 1..22: mol_type = other DNA
gggggggggggggggggggggg

SEQ ID NO: 5501 - DNA, 22 bp, synthetic construct
  source 1..22: mol_type = other DNA
gggggggggggggggggggggg

SEQ ID NO: 5502 - DNA, 22 bp, synthetic construct
  source 1..22: mol_type = other DNA
gggggggggggggggggggggg

SEQ ID NO: 5503 - DNA, 22 bp, synthetic construct
  source 1..22: mol_type = other DNA
gggggggggggggggggggggg

SEQ ID NO: 5504 - DNA, 22 bp, synthetic construct
  source 1..22: mol_type = other DNA
gggggggggggggggggggggg

SEQ ID NO: 5505 - DNA, 22 bp, synthetic construct
  source 1..22: mol_type = other DNA
gggggggggggggggggggggg

SEQ ID NO: 5506 - DNA, 22 bp, synthetic construct
  source 1..22: mol_type = other DNA
gggggggggggggggggggggg

SEQ ID NO: 5507 - DNA, 22 bp, synthetic construct
  source 1..22: mol_type = other DNA
gggggggggggggggggggggg

SEQ ID NO: 5508 - DNA, 22 bp, synthetic construct
  source 1..22: mol_type = other DNA
gggggggggggggggggggggg

SEQ ID NO: 5509 - DNA, 22 bp, synthetic construct
  source 1..22: mol_type = other DNA
gggggggggggggggggggggg

SEQ ID NO: 5510 - DNA, 22 bp, synthetic construct
  source 1..22: mol_type = other DNA
gggggggggggggggggggggg

SEQ ID NO: 5511 - DNA, 22 bp, synthetic construct
  source 1..22: mol_type = other DNA
gggggggggggggggggggggg

SEQ ID NO: 5512 - DNA, 22 bp, synthetic construct
  source 1..22: mol_type = other DNA
gggggggggggggggggggggg

SEQ ID NO: 5513 - DNA, 22 bp, synthetic construct
  source 1..22: mol_type = other DNA
gggggggggggggggggggggg

SEQ ID NO: 5514 - DNA, 22 bp, synthetic construct
  source 1..22: mol_type = other DNA
gggggggggggggggggggggg

SEQ ID NO: 5515 - DNA, 22 bp, synthetic construct
  source 1..22: mol_type = other DNA
gggggggggggggggggggggg

SEQ ID NO: 5516 - DNA, 22 bp, synthetic construct
  source 1..22: mol_type = other DNA
gggggggggggggggggggggg

SEQ ID NO: 5517 - DNA, 22 bp, synthetic construct
  source 1..22: mol_type = other DNA
gggggggggggggggggggggg

SEQ ID NO: 5518 - DNA, 22 bp, synthetic construct
  source 1..22: mol_type = other DNA
gggggggggggggggggggggg

SEQ ID NO: 5519 - DNA, 22 bp, synthetic construct
  source 1..22: mol_type = other DNA
gggggggggggggggggggggg

SEQ ID NO: 5520 - DNA, 22 bp, synthetic construct
  source 1..22: mol_type = other DNA
gggggggggggggggggggggg

SEQ ID NO: 5521 - DNA, 22 bp, synthetic construct
  source 1..22: mol_type = other DNA
gggggggggggggggggggggg

SEQ ID NO: 5522 - DNA, 22 bp, synthetic construct
  source 1..22: mol_type = other DNA
gggggggggggggggggggggg

SEQ ID NO: 5523 - DNA, 22 bp, synthetic construct
  source 1..22: mol_type = other DNA
gggggggggggggggggggggg

SEQ ID NO: 5524 - DNA, 22 bp, synthetic construct
  source 1..22: mol_type = other DNA
gggggggggggggggggggggg

SEQ ID NO: 5525 - DNA, 22 bp, synthetic construct
  source 1..22: mol_type = other DNA
gggggggggggggggggggggg

SEQ ID NO: 5526 - DNA, 1587 bp, synthetic construct
  source 1..1587: mol_type = other DNA
atggccttaccagtgaccgccttgctcctgccgctggccttgctgctccacgccgccaggccggacatccagttgacccagtcccccagctcactcagcgccagtgtgggggaccgggtgaccattacctgtaaagccagtcagagtgtggactatgagggggatagcttcctgaattggtatcagcagaagcctggcaaagccccaaagctgctgatctacgctgcatctaatctggagtcaggcgtgccttctaggttctccggtagtgggtctgggaccgatttcacattgaccatttcatccctccaacccgaggatttcgctacatattactgtcagcagtccaatgaggaccctctcacctttggccagggcaccaaagttgaaattaagagactcgagacagtggccgccccatctgtattcatctttcctccatctgatgaacagcttaagtccggcactgcttctgttgtttgcctgcttaacaatttttacccgcgggaagccaaggtgcaatggaaagtggacaacgccctgcagtctggtaacagtcaggaaagcgtgactgaacaggacagcaaagactccacatactccttgagttccaccttgacgctcagtaaggcagactacgagaagcacaaggtttatgcctgtgaagtgactcaccagggcctctctagcccagtgactaagtccttcaaccgcggggagtgtaggaagcgacgggggtcaggcgccactaacttctctctgctgaaacaagccggggacgtggaggagaatccaggtcccactagtatggactggatttggcgcatccttttccttgtcggcgctgctaccggcgcgcattccttcgaagaagtccaacttgtggagtctggagggggcctggtgcagcccggcggctctctcagactgtcttgtgcggcaagcggctacaccttcagctcttactggatagaatgggtgaggcaggcacctggaaagggactggagtggattggagagattctgccaggagggggagatacaaattacaatgaaatcttcaaggggcgggccaccttttcagcggataccagcaagaatacagcttacctgcagatgaatagcctccgggcagaagataccgctgtttattattgcacgagacgggtgccaataagactggactattgggggcaagggactcttgtcaccgtcagttcaacgcgtgcctctacaaagggaccctccgtgtttcctctggctccctgtagcagaagcaccagcgaatctacagccgctctgggctgcctggtcaaggactactttcctgagcctgtgaccgtgtcctggaacagcggagcactgacatctggcgtgcacacctttccagccgtgctccaaagcagcggcctgtactctctgagcagcgtggtcacagtgcctagctctagcctgggcaccaagacctacacctgtaatgtggaccacaagcctagcaacaccaaggtggacaagcgcgtggaatctaagtacggccctccttgtcctccatgtcctgctagaagcgaagatcggtatcggaactag

SEQ ID NO: 5527 - DNA, 2244 bp, synthetic construct
  source 1..2244: mol_type = other DNA
atggccttaccagtgaccgccttgctcctgccgctggccttgctgctccacgccgccaggccggacatccagttgacccagtcccccagctcactcagcgccagtgtgggggaccgggtgaccattacctgtaaagccagtcagagtgtggactatgagggggatagcttcctgaattggtatcagcagaagcctggcaaagccccaaagctgctgatctacgctgcatctaatctggagtcaggcgtgccttctaggttctccggtagtgggtctgggaccgatttcacattgaccatttcatccctccaacccgaggatttcgctacatattactgtcagcagtccaatgaggaccctctcacctttggccagggcaccaaagttgaaattaagagactcgagacagtggccgccccatctgtattcatctttcctccatctgatgaacagcttaagtccggcactgcttctgttgtttgcctgcttaacaatttttacccgcgggaagccaaggtgcaatggaaagtggacaacgccctgcagtctggtaacagtcaggaaagcgtgactgaacaggacagcaaagactccacatactccttgagttccaccttgacgctcagtaaggcagactacgagaagcacaaggtttatgcctgtgaagtgactcaccagggcctctctagcccagtgactaagtccttcaaccgcggggagtgtaggaagcgacgggggtcaggcgccactaacttctctctgctgaaacaagccggggacgtggaggagaatccaggtcccactagtatggactggatttggcgcatccttttccttgtcggcgctgctaccggcgcgcattccttcgaagaagtccaacttgtggagtctggagggggcctggtgcagcccggcggctctctcagactgtcttgtgcggcaagcggctacaccttcagctcttactggatagaatgggtgaggcaggcacctggaaagggactggagtggattggagagattctgccaggagggggagatacaaattacaatgaaatcttcaaggggcgggccaccttttcagcggataccagcaagaatacagcttacctgcagatgaatagcctccgggcagaagataccgctgtttattattgcacgagacgggtgccaataagactggactattgggggcaagggactcttgtcaccgtcagttcaacgcgtgcctctacaaagggaccctccgtgtttcctctggctccctgtagcagaagcaccagcgaatctacagccgctctgggctgcctggtcaaggactactttcctgagcctgtgaccgtgtcctggaacagcggagcactgacatctggcgtgcacacctttccagccgtgctccaaagcagcggcctgtactctctgagcagcgtggtcacagtgcctagctctagcctgggcaccaagacctacacctgtaatgtggaccacaagcctagcaacaccaaggtggacaagcgcgtggaatctaagtacggccctccttgtcctccatgtcctgctccagagtttctcggcggaccttctgtgttcctgtttcctccaaagcctaaggacaccctgatgatctccagaacacccgaagtgacctgcgtggtggtggacgtttcacaagaggaccccgaggtgcagtttaattggtacgtggacggcgtggaagtgcacaacgccaagaccaagcctagagaggaacagttcaacagcacctacagagtggtgtccgtgctgaccgtgctgcaccaggattggctgaacggcaaagagtacaagtgcaaggtgtccaacaagggcctgcctagcagcatcgagaaaaccatcagcaaggccaagggccagccaagggaaccccaggtttacacactgcctccaagccaagaggaaatgaccaagaaccaggtgtccctgacctgccttgtgaagggcttctaccccagcgacattgccgtggaatgggagtctaacggccagcctgagaacaactacaagacaacccctcctgtgctggacagcgacggctcattcttcctgtacagcagactgaccgtggacaagagcagatggcaagagggcaacgtgttcagctgctccgtgatgcacgaagccctgcataaccactacacccagaagtctctgagcctgagtccgggtaaagccagaagcgaggacagatacagaaaccccaaatag

SEQ ID NO: 5528 - DNA, 1575 bp, synthetic construct
  source 1..1575: mol_type = other DNA
atggccttaccagtgaccgccttgctcctgccgctggccttgctgctccacgccgccaggccggacgtggtcatgacacagagcccttctagcctgtctgccagcgtgggcgacagagtgaccatcacctgtatggcctccgaggacatctacatccggctggcctggtatcagcagaagcctggaaacgcccctaagctgctgatctacgccgccacctctctggaaacaggcgtgccaagcagattttccggcagcggctctggcaccgatttcaccctgacaatatccagcctccagcctgaggacttcgccacctactactgccagcagtattggagcagcccctggacatttggcggaggcaccaaggtggaaatcaaactcgagacagtggccgccccatctgtattcatctttcctccatctgatgaacagcttaagtccggcactgcttctgttgtttgcctgcttaacaatttttacccgcgggaagccaaggtgcaatggaaagtggacaacgccctgcagtctggtaacagtcaggaaagcgtgactgaacaggacagcaaagactccacatactccttgagttccaccttgacgctcagtaaggcagactacgagaagcacaaggtttatgcctgtgaagtgactcaccagggcctctctagcccagtgactaagtccttcaaccgcggggagtgtaggaagcgacgggggtcaggcgccactaacttctctctgctgaaacaagccggggacgtggaggagaatccaggtcccactagtatggactggatttggcgcatccttttccttgtcggcgctgctaccggcgcgcattccttcgaacaggttcagctgcaagagtctggccccggactggtcaagcctagccaaacactgagcctgacctgtaccgtgtccggctacagcatcaccagcgactacacctggaactggatcagacagcctcctggcaacggactggaatggatcggctacatcacctacagcggcagcaccagctacaaccccagcctgaaaagccgggtgctgatctccgtggacaccagcaagaatcaggtgtccctgaagctgagcagcgtgacagccgctgataccgccgtgtactactgtgccagactggggagaagatacacaatggactactggggccagggcaccaccgtgacagtttcttctacgcgtgcctctacaaagggaccctccgtgtttcctctggctccctgtagcagaagcaccagcgaatctacagccgctctgggctgcctggtcaaggactactttcctgagcctgtgaccgtgtcctggaacagcggagcactgacatctggcgtgcacacctttccagccgtgctccaaagcagcggcctgtactctctgagcagcgtggtcacagtgcctagctctagcctgggcaccaagacctacacctgtaatgtggaccacaagcctagcaacaccaaggtggacaagcgcgtggaatctaagtacggccctccttgtcctccatgtcctgctagaagcgaagatcggtatcggaactag

SEQ ID NO: 5529 - DNA, 2340 bp, synthetic construct
  source 1..2340: mol_type = other DNA
atggccttaccagtgaccgccttgctcctgccgctggccttgctgctccacgccgccaggccggcatgcgctagaagcgaagatcggtatcggaaccccaagggtaccggcggaggcggatctggcggcggaggtagcggtggcggaggatctgaattcgacatccagatgacacagagccctagcagcctgtctgccagcgtgggagacagagtgaccatcacatgcaaggccagcgaccacatcaacaactggctggcctggtatcagcagaagcctggacaggcccctaagctgctgatctacggcgctaccacactggaaacaggcgtgcccagcagattttctggcagcggctctggcaccgactacaccctgacaatatccagcctccagcctgaggacttcgccacctactactgtcagcagagctggaacaccccttggacattcggccagggcaccaagctggaaatcaagagactcgagacagtggccgccccatctgtattcatctttcctccatctgatgaacagcttaagtccggcactgcttctgttgtttgcctgcttaacaatttttacccgcgggaagccaaggtgcaatggaaagtggacaacgccctgcagtctggtaacagtcaggaaagcgtgactgaacaggacagcaaagactccacatactccttgagttccaccttgacgctcagtaaggcagactacgagaagcacaaggtttatgcctgtgaagtgactcaccagggcctctctagcccagtgactaagtccttcaaccgcggggagtgtaggaagcgacgggggtcaggcgccactaacttctctctgctgaaacaagccggggacgtggaggagaatccaggtcccactagtatggactggatttggcgcatccttttccttgtcggcgctgctaccggcgcgcattccttcgaacaagttcagcttcaacagcctggcgctgagctggtcaaacctggcgcttctgtgaagatgagctgcaaagccagcggctacgccttcagcagctactggatcaactggatgaagcagaaacccggccagggactcgaatggatcggccaaatctatcccggcgacggcgacaccaactacaacggcaagttcaagggcagagccacactgaccgccgatacctctagcagcacagcctacatgcagctgagcagcctgaccagcgaagatagcgccgtgtacttctgtgcccggtccatcacaacagtcgtgggctgcgctatggactattggggccagggaacaagcgtgaccgtgtctagtacgcgtgcctctacaaagggaccctccgtgtttcctctggctccctgtagcagaagcaccagcgaatctacagccgctctgggctgcctggtcaaggactactttcctgagcctgtgaccgtgtcctggaacagcggagcactgacatctggcgtgcacacctttccagccgtgctccaaagcagcggcctgtactctctgagcagcgtggtcacagtgcctagctctagcctgggcaccaagacctacacctgtaatgtggaccacaagcctagcaacaccaaggtggacaagcgcgtggaatctaagtacggccctccttgtcctccatgtcctgctccagagtttctcggcggaccttctgtgttcctgtttcctccaaagcctaaggacaccctgatgatctccagaacacccgaagtgacctgcgtggtggtggacgtttcacaagaggaccccgaggtgcagtttaattggtacgtggacggcgtggaagtgcacaacgccaagaccaagcctagagaggaacagttcaacagcacctacagagtggtgtccgtgctgaccgtgctgcaccaggattggctgaacggcaaagagtacaagtgcaaggtgtccaacaagggcctgcctagcagcatcgagaaaaccatcagcaaggccaagggccagccaagggaaccccaggtttacacactgcctccaagccaagaggaaatgaccaagaaccaggtgtccctgacctgccttgtgaagggcttctaccccagcgacattgccgtggaatgggagtctaacggccagcctgagaacaactacaagacaacccctcctgtgctggacagcgacggctcattcttcctgtacagcagactgaccgtggacaagagcagatggcaagagggcaacgtgttcagctgctccgtgatgcacgaagccctgcataaccactacacccagaagtctctgagcctgagtccgggtaaagccagaagcgaggacagatacagaaaccccaaatag

SEQ ID NO: 5530 - DNA, 2955 bp, synthetic construct
  source 1..2955: mol_type = other DNA
atggccttaccagtgaccgccttgctcctgccgctggccttgctgctccacgccgccaggccggacatccagatgacccagagccctagctcactgagcgccagcgtgggcgacagggtgaccattacctgctccgccagccaggacatcagcaactacctgaactggtaccagcagaagcccggcaaggcccccaagctgctgatctactacacctccaacctgcactccggcgtgcccagcaggttcagcggaagcggcagcggcaccgatttcaccctgaccatctccagcctgcagcccgaggacttcgccacctactactgccagcagtacaggaagctcccctggactttcggccagggcaccaaactggagatcaagcgtctcgagacagtggccgccccatctgtattcatctttcctccatctgatgaacagcttaagtccggcactgcttctgttgtttgcctgcttaacaatttttacccgcgggaagccaaggtgcaatggaaagtggacaacgccctgcagtctggtaacagtcaggaaagcgtgactgaacaggacagcaaagactccacatactccttgagttccaccttgacgctcagtaaggcagactacgagaagcacaaggtttatgcctgtgaagtgactcaccagggcctctctagcccagtgactaagtccttcaaccgcggggagtgttctggcggagctagaagcgaagatcggtatcggaaccccaagagggccaagcgatctggatctggagcaacaaacttctcactactcaaacaagcaggtgacgtggaggagaatcccgggcctactagtatggactggatttggcgcatccttttccttgtcggcgctgctaccggcgcgcattccttcgaacaggtgcagctggtccagagcggcgccgaagtgaagaagcccggcagctccgtgaaagtgagctgcaaggccagcggcggcaccttcagcaactactggatgcactgggtgaggcaggcccccggacagggcctggagtggatgggcgccacctacaggggccacagcgacacctactacaaccagaagttcaagggccgggtgaccatcaccgccgacaagagcaccagcaccgcctacatggaactgagcagcctcaggagcgaggacaccgctgtgtattactgcgccaggggcgccatctacgacggctacgacgtgctggacaactggggccagggcacactggtgaccgtgtccagcacgcgtgcctctacaaagggaccctccgtgtttcctctggctccctgtagcagaagcaccagcgaatctacagccgctctgggctgcctggtcaaggactactttcctgagcctgtgaccgtgtcctggaacagcggagcactgacatctggcgtgcacacctttccagccgtgctccaaagcagcggcctgtactctctgagcagcgtggtcacagtgcctagctctagcctgggcaccaagacctacacctgtaatgtggaccacaagcctagcaacaccaaggtggacaagcgcgtggaatctaagtacggccctccttgtcctccatgtcctgctccagagtttctcggcggaccttctgtgttcctgtttcctccaaagcctaaggacaccctgatgatctccagaacacccgaagtgacctgcgtggtggtggacgtttcacaagaggaccccgaggtgcagtttaattggtacgtggacggcgtggaagtgcacaacgccaagaccaagcctagagaggaacagttcaacagcacctacagagtggtgtccgtgctgaccgtgctgcaccaggattggctgaacggcaaagagtacaagtgcaaggtgtccaacaagggcctgcctagcagcatcgagaaaaccatcagcaaggccaagggccagccaagggaaccccaggtttacacactgcctccaagccaagaggaaatgaccaagaaccaggtgtccctgacctgccttgtgaagggcttctaccccagcgacattgccgtggaatgggagtctaacggccagcctgagaacaactacaagacaacccctcctgtgctggacagcgacggctcattcttcctgtacagcagactgaccgtggacaagagcagatggcaagagggcaacgtgttcagctgctccgtgatgcacgaagccctgcataaccactacacccagaagtctctgagcctgagtccgggtaaacgcgccaagagaagcggatctggcgtgaagcagaccctgaatttcgacctgctgaagctggctggcgacgtggaatccaacccaggcccttctagaggccatatgaccgagtacaagcccacggtgcgcctcgccacccgcgacgacgtccccagggccgtacgcaccctcgccgccgcgttcgccgactaccccgccacgcgccacaccgtcgatccggaccgccacatcgagcgggtcaccgagctgcaagaactcttcctcacgcgcgtcgggctcgacatcggcaaggtgtgggtcgcggacgacggcgccgcggtggcggtctggaccacgccggagagcgtcgaagcgggggcggtgttcgccgagatcggcccgcgcatggccgagttgagcggttcccggctggccgcgcagcaacagatggaaggcctcctggcgccgcaccggcccaaggagcccgcgtggttcctggccaccgtcggcgtctcgcccgaccaccagggcaagggtctgggcagcgccgtcgtgctccccggagtggaggcggccgagcgcgccggggtgcccgccttcctggagacctccgcgccccgcaacctccccttctacgagcggctcggcttcaccgtcaccgccgacgtcgaggtgcccgaaggaccgcgcacctggtgcatgacccgcaagcccggtgcctga

SEQ ID NO: 5531 - DNA, 2937 bp, synthetic construct
  source 1..2937: mol_type = other DNA
atggccttaccagtgaccgccttgctcctgccgctggccttgctgctccacgccgccaggccgcagatcgtgctgacacagagccctgccatcatgtccgcttctcccggcgagaaagtgaccatgacatgtagcgccagcagcagcgtgtccttcatgcactggtatcagcagaagtccggcacaagccccaagcggtggatctacgataccagcacactggcctctggcgtgccagccagatttggcggatctggcagcggcacatcttacagcctgaccatcagcagcatggaagccgaagatgccgccacctactactgccagcagtggtccagcaatcccctgacatttggagccggcaccaagctggaactgaagagactcgagacagtggccgccccatctgtattcatctttcctccatctgatgaacagcttaagtccggcactgcttctgttgtttgcctgcttaacaatttttacccgcgggaagccaaggtgcaatggaaagtggacaacgccctgcagtctggtaacagtcaggaaagcgtgactgaacaggacagcaaagactccacatactccttgagttccaccttgacgctcagtaaggcagactacgagaagcacaaggtttatgcctgtgaagtgactcaccagggcctctctagcccagtgactaagtccttcaaccgcggggagtgttctggcggagctagaagcgaagatcggtatcggaaccccaagagggccaagcgatctggatctggagcaacaaacttctcactactcaaacaagcaggtgacgtggaggagaatcccgggcctactagtatggactggatttggcgcatccttttccttgtcggcgctgctaccggcgcgcattccttcgaacaagttcagctgcaacagagcggccctgagctggttaagcctggcgcttctgtgcggatctcttgcaaggccagcggctacaccttcaccagctactacatccactgggtcaagcagcggcctggacagggactcgaatggatcggctggatctaccccggcaacctgaacaccaagtacaacgagaagttcaagggcaaagccacactgaccgccgacaagagcagcagcacagcctacatgcagctgagcagcctgacaagcgaggacagcgccgtgtacttctgcgccagatacgactggtacttcgacgtgtggggagccggaaccaccgtgacagtttcttctacgcgtgcctctacaaagggaccctccgtgtttcctctggctccctgtagcagaagcaccagcgaatctacagccgctctgggctgcctggtcaaggactactttcctgagcctgtgaccgtgtcctggaacagcggagcactgacatctggcgtgcacacctttccagccgtgctccaaagcagcggcctgtactctctgagcagcgtggtcacagtgcctagctctagcctgggcaccaagacctacacctgtaatgtggaccacaagcctagcaacaccaaggtggacaagcgcgtggaatctaagtacggccctccttgtcctccatgtcctgctccagagtttctcggcggaccttctgtgttcctgtttcctccaaagcctaaggacaccctgatgatctccagaacacccgaagtgacctgcgtggtggtggacgtttcacaagaggaccccgaggtgcagtttaattggtacgtggacggcgtggaagtgcacaacgccaagaccaagcctagagaggaacagttcaacagcacctacagagtggtgtccgtgctgaccgtgctgcaccaggattggctgaacggcaaagagtacaagtgcaaggtgtccaacaagggcctgcctagcagcatcgagaaaaccatcagcaaggccaagggccagccaagggaaccccaggtttacacactgcctccaagccaagaggaaatgaccaagaaccaggtgtccctgacctgccttgtgaagggcttctaccccagcgacattgccgtggaatgggagtctaacggccagcctgagaacaactacaagacaacccctcctgtgctggacagcgacggctcattcttcctgtacagcagactgaccgtggacaagagcagatggcaagagggcaacgtgttcagctgctccgtgatgcacgaagccctgcataaccactacacccagaagtctctgagcctgagtccgggtaaacgcgccaagagaagcggatctggcgtgaagcagaccctgaatttcgacctgctgaagctggctggcgacgtggaatccaacccaggcccttctagaggccatatgaccgagtacaagcccacggtgcgcctcgccacccgcgacgacgtccccagggccgtacgcaccctcgccgccgcgttcgccgactaccccgccacgcgccacaccgtcgatccggaccgccacatcgagcgggtcaccgagctgcaagaactcttcctcacgcgcgtcgggctcgacatcggcaaggtgtgggtcgcggacgacggcgccgcggtggcggtctggaccacgccggagagcgtcgaagcgggggcggtgttcgccgagatcggcccgcgcatggccgagttgagcggttcccggctggccgcgcagcaacagatggaaggcctcctggcgccgcaccggcccaaggagcccgcgtggttcctggccaccgtcggcgtctcgcccgaccaccagggcaagggtctgggcagcgccgtcgtgctccccggagtggaggcggccgagcgcgccggggtgcccgccttcctggagacctccgcgccccgcaacctccccttctacgagcggctcggcttcaccgtcaccgccgacgtcgaggtgcccgaaggaccgcgcacctggtgcatgacccgcaagcccggtgcctga

SEQ ID NO: 5532 - DNA, 1455 bp, synthetic construct
  source 1..1455: mol_type = other DNA
atggccttaccagtgaccgccttgctcctgccgctggccttgctgctccacgccgccaggccggacatccagatgacacagagccctagcagcctgtctgccagcgtgggagacagagtgaccatcacatgcaaggccagccaggatgtgggcacagccgtggattggtatcagcagaagcctggcaaggcccctaagctgctgatctactgggccagcacaagacacacaggcgtgcccagcagattttctggcagcggctctggcaccgacttcaccctgacaatatccagcctccagcctgaggacttcgccacctactactgccagcagtacaacagctaccctctgaccttcggccagggcaccaaggtggaaatcaaaagaggcggaggcggatctggcggcggaggtagcggtggcggaggatctgaagtgcagctggttgaatcaggtggcggcctggttcaacctggcggatctctgagactgagctgtgccgccagcggctacacctttaccgagtacacaatccactgggtccgacaggcccctggcaaaggacttgagtgggtcgccaacatcaaccccaacaatggcggcaccacctacaaccagaagttcgaggacagattcaccatcagccgggacaacagcaagaacaccctgtacctccagatgaactccctgagagccgaggacaccgccgtgtactattgtgccagaggctggaacttcgactactggggccagggaacactggtcaccgttagctctacgcgtaccacgacgccagcgccgcgaccaccaacaccggcgcccaccatcgcgtcgcagcccctgtccctgcgcccagaggcgtgccggccagcggcggggggcgcagtgcacacgagggggctggacttcgcctgtgacatctacatctgggcgcccttggccgggacttgtggggtccttctcctgtcactggttatcaccctttactgcaaacggggcagaaagaaactcctgtatatattcaaacaaccatttatgagaccagtacaaactactcaagaggaagatggctgtagctgccgatttccagaagaagaagaaggaggatgtgaactgagagtgaagttcagcaggagcgcagacgcccccgcgtaccagcagggccagaaccagctctataacgagctgaatctaggacgaagagaggagtacgatgttttggacaagagacgtggccgggaccctgagatggggggaaagccgagaaggaagaaccctcaggaaggcctgtacaatgaactgcagaaagataagatggcggaggcctacagtgagattgggatgaaaggcgagcgccggaggggcaaggggcacgatggcctttaccagggtctcagtacagccaccaaggacacctacgacgcccttcacatgcaggccctgccccctcgctga

SEQ ID NO: 5533 - DNA, 2391 bp, synthetic construct
  source 1..2391: mol_type = other DNA
atggccttaccagtgaccgccttgctcctgccgctggccttgctgctccacgccgccaggccggacatccagatgacacagagccctagcagcctgtctgccagcgtgggagacagagtgaccatcacatgcaaggccagccaggatgtgggcacagccgtggattggtatcagcagaagcctggcaaggcccctaagctgctgatctactgggccagcacaagacacacaggcgtgcccagcagattttctggcagcggctctggcaccgacttcaccctgacaatatccagcctccagcctgaggacttcgccacctactactgccagcagtacaacagctaccctctgaccttcggccagggcaccaaggtggaaatcaaaagactcgagggacagcctaaggccaatcctaccgtgacactgttccctccaagcagcgaagaactccaggccaacaaggccacacttgtgtgcctgatctccgacttctaccctggggctgtgacagtggcttggaaggccgatggatctcctgtgaaagccggcgtggaaaccaccaagccatccaagcagagcaacaacaaatacgccgccagctcctacctgagcctgacacctgagcagtggaagtcccacagatcctacagctgccaagtgacccacgaaggcagcaccgtggaaaagacagtggcccctacagagtgcagcggatcccagagcttcggcctgctggaccccaagctgtgctacctgctggatggcatcctgttcatctacggcgtgatcctgaccgccctgttcctgagagtgaagttcagcagaagcgccgacgcccctgcctaccagcagggacagaaccaactgtacaacgagctgaacctgggcagacgggaagagtacgacgtgctggacaagcggagaggcagggaccctgagatgggcggaaagccccagcggagaaagaacccccaggaaggactgtataacgaactccagaaagacaagatggccgaagcctacagcgagatcggcatgaagggcgagcggagaagaggcaagggccacgatggcctgtaccagggcctgagcaccgccaccaaggacacctatgacgccctgcacatgcaggccctgcctccaagaagggccaagcgatctggatctggagcaacaaacttctcactactcaaacaagcaggtgacgtggaggagaatcccgggcctactagtatggactggatttggcgcatccttttccttgtcggcgctgctaccggcgcgcattccttcgaagtgcagctggttgaatcaggtggcggcctggttcaacctggcggatctctgagactgagctgtgccgccagcggctacacctttaccgagtacacaatccactgggtccgacaggcccctggcaaaggacttgagtgggtcgccaacatcaaccccaacaatggcggcaccacctacaaccagaagttcgaggacagattcaccatcagccgggacaacagcaagaacaccctgtacctccagatgaactccctgagagccgaggacaccgccgtgtactattgtgccagaggctggaacttcgactactggggccagggaacactggtcaccgttagctctacgcgtgcctctacaaagggaccctccgtgtttcctctggctcccagcagcaagtctacaagcggaggaacagccgctctgggctgcctggtcaaggattactttcccgagcctgtgaccgtgtcctggaatagcggagcactgacaagcggcgtgcacacctttccagccgtgctgcaaagcagcggcctgtactctctgagcagcgtggtcacagtgcctagctctagcctgggcacccagacctacatctgcaatgtgaaccacaagcctagcaacaccaaggtggacaagagagtggaacccaagagctgtggtacccagagttttgggttgttggaccctaaattgtgctatctgttggacggaatcctgttcatttacggagtgatcctgaccgcattgttcctgcgggttaagttttccagatccgcagacgcacccgcttaccaacaagggcagaaccaactctacaatgaacttaatttggggcggagggaagagtacgacgttctggacaaaaggaggggacgagatcccgagatgggcggaaagcctcagcgaaggaagaatccgcaagaggggctttataacgaactccagaaagataaaatggcagaagcctatagtgagattgggatgaagggagaaaggaggaggggtaaaggtcacgatgggttgtaccaaggattgagcacagccactaaagatacctatgatgcgctccacatgcaggccctgccgccaagataa

SEQ ID NO: 5534 - DNA, 1848 bp, synthetic construct; identical to SEQ ID NO: 4903
  source 1..1848: mol_type = other DNA

SEQ ID NO: 5535 - DNA, 22 bp, synthetic construct
  source 1..22: mol_type = other DNA
gggggggggggggggggggggg

SEQ ID NO: 5536 - DNA, 1827 bp, synthetic construct
  source 1..1827: mol_type = other DNA
atggccttaccagtgaccgccttgctcctgccgctggccttgctgctccacgccgccaggccggacatccagatgacccagagccctagctcactgagcgccagcgtgggcgacagggtgaccattacctgctccgccagccaggacatcagcaactacctgaactggtaccagcagaagcccggcaaggcccccaagctgctgatctactacacctccaacctgcactccggcgtgcccagcaggttcagcggaagcggcagcggcaccgatttcaccctgaccatctccagcctgcagcccgaggacttcgccacctactactgccagcagtacaggaagctcccctggactttcggccagggcaccaaactggagatcaagcgtggcggaggcggaagtggaggcggaggatctggcggcggaggctctcaggtgcagctggtccagagcggcgccgaagtgaagaagcccggcagctccgtgaaagtgagctgcaaggccagcggcggcaccttcagcaactactggatgcactgggtgaggcaggcccccggacagggcctggagtggatgggcgccacctacaggggccacagcgacacctactacaaccagaagttcaagggccgggtgaccatcaccgccgacaagagcaccagcaccgcctacatggaactgagcagcctcaggagcgaggacaccgctgtgtattactgcgccaggggcgccatctacgacggctacgacgtgctggacaactggggccagggcacactggtgaccgtgtccagcacgcgtgccagacctgccaagagcgaggatctgtaccccaatcctaaagaacttcctacacagggcaccttcagcaacgtgtccaccaatgtgtccccagccaagcctaccaccaccgcctgcgccaagtctgaggacctgtatcctaatccaaaactcgagggaggcagctggagccaccctcagtttgaaaaagactacaaagacgatgacgataagggatcagattacaaggatgatgatgacaaggggtcagattataaagacgacgatgataaagggagcgactacaaggacgacgatgacaaggcctggtcccatccccagttcgagaaacaccatcaccaccaccatcatcacactagtggctccggcgagggcagaggaagtctactaacctgcggagatgtggaagaaaatcctggcccacatatgaccgagtacaagcccacggtgcgcctcgccacccgcgacgacgtccccagggccgtacgcaccctcgccgccgcgttcgccgactaccccgccacgcgccacaccgtcgatccggaccgccacatcgagcgggtcaccgagctgcaagaactcttcctcacgcgcgtcgggctcgacatcggcaaggtgtgggtcgcggacgacggcgccgcggtggcggtctggaccacgccggagagcgtcgaagcgggggcggtgttcgccgagatcggcccgcgcatggccgagttgagcggttcccggctggccgcgcagcaacagatggaaggcctcctggcgccgcaccggcccaaggagcccgcgtggttcctggccaccgtcggcgtctcgcccgaccaccagggcaagggtctgggcagcgccgtcgtgatccccggagtggaggcggccgagcgcgccggggtgcccgccttcctggagacctccgcgccccgcaacctccccttctacgagcggctcggcttcaccgtcaccgccgacgtcgaggtgcccgaaggaccgcgcacctggtgcatgacccgcaagcccggtgcctga

SEQ ID NO: 5537 - DNA, 1827 bp, synthetic construct; identical to SEQ ID NO: 5536
  source 1..1827: mol_type = other DNA

SEQ ID NO: 5538 - DNA, 2187 bp, synthetic construct
  source 1..2187: mol_type = other DNA
atggccttaccagtgaccgccttgctcctgccgctggccttgctgctccacgccgccaggccggacatcgtgatgacccagacccccctgaccctgagcgtgacaatcggacagcctgccagcatctcctgcaagagcagccagagcctgctggacagcgacggcaagacctacctgaactggctgctgcagaggccaggccagagccccgagagactgatctacctggtgtccaagctggactccggcgtgcccgatagattcacaggcagcggctccggcaccgacttcaccctgaagatcagccgggtggaagccgaggacctgggcgtgtactactgttggcagggcacccacttcccttacaccttcggcggagggaccaaggtggaaatcaagggcggaggcggaagtggaggcggaggatctggcggcggaggctctcaggtgcaactgcagcagcctggcgctgaacttgtgcggccaggcgcctctgtgaagctgagctgtaaagccagcggctacaccttcaccagctactggatgaactgggtcaagcagcgcccaggccagggcctggaatggatcggaatgatcgaccccagcgacagcgagacacactacaaccacatcttcaaggacaaggccaccctgaccgtggacaagtccagcagcacagcctacctgcaactgtccagcctgaccagcgaggacagcgccgtgtactactgcgcccggaacctgtatctgtggggccagggaacaagcgtgaccgtgtctagcacgcgtggaggcagtggtgtcttcacactcgaagatttcgttggggactggcgacagacagccggctacaacctggaccaagtccttgaacagggaggtgtgtccagtttgtttcagaatctcggggtgtccgtaactccgatccaaaggattgtcctgagcggtgaaaatgggctgaagatcgacatccatgtcatcatcccgtatgaaggtctgagcggcgaccaaatgggccagatcgaaaaaatttttaaggtggtgtaccctgtggatgatcatcactttaaggtgatcctgcactatggcacactggtaatcgacggggttacgccgaacatgatcgactatttcggacggccctatgaaggcatcgccgtgttcgacggcaaaaagatcactgtaacagggaccctgtggaacggcaacaaaattatcgacgagcgcctgatcaaccccgacggctccctgctgttccgagtaaccatcaacggagtgaccggctggcggctgtgcgaacgcattctggcgctcgagggaggcagctggagccaccctcagtttgaaaaagactacaaagacgatgacgataagggatcagattacaaggatgatgatgacaaggggtcagattataaagacgacgatgataaagggagcgactacaaggacgacgatgacaaggcctggtcccatccccagttcgagaaacaccatcaccaccaccatcatcacactagtggctccggcgagggcagaggaagtctactaacctgcggagatgtggaagaaaatcctggcccacatatgaccgagtacaagcccacggtgcgcctcgccacccgcgacgacgtccccagggccgtacgcaccctcgccgccgcgttcgccgactaccccgccacgcgccacaccgtcgatccggaccgccacatcgagcgggtcaccgagctgcaagaactcttcctcacgcgcgtcgggctcgacatcggcaaggtgtgggtcgcggacgacggcgccgcggtggcggtctggaccacgccggagagcgtcgaagcgggggcggtgttcgccgagatcggcccgcgcatggccgagttgagcggttcccggctggccgcgcagcaacagatggaaggcctcctggcgccgcaccggcccaaggagcccgcgtggttcctggccaccgtcggcgtctcgcccgaccaccagggcaagggtctgggcagcgccgtcgtgctccccggagtggaggcggccgagcgcgccggggtgcccgccttcctggagacctccgcgccccgcaacctccccttctacgagcggctcggcttcaccgtcaccgccgacgtcgaggtgcccgaaggaccgcgcacctggtgcatgacccgcaagcccggtgcctga

SEQ ID NO: 5539 - DNA, 2181 bp, synthetic construct
  source 1..2181: mol_type = other DNA
atggccttaccagtgaccgccttgctcctgccgctggccttgctgctccacgccgccaggccggacatcgtgctgacacagagccctccatctctggccgtgtctctgggacagagagccaccatcagctgtagagccagcgagagcgtggacagctacggcaagaccttcatgcactggcaccagcagaagccaggccagcctcctaagctgctgatctaccgggtgtccaacctggaaagcggcatccctgccagattttctggcagcggcagcagaaccgacttcaccctgaccatcaatcccgtggaagccgacgacgtggcaacctactactgccagcagagcaacgaggaccccttcacatttggcggaggcaccaagctggaaatcaagagaggcggcggaggaagcggaggcggatctggtggcggaggatctgaagttcagctgcaagagtctggccctggcctggtcaagcctagccaaagcctgagcctgacctgtaccgtgaccggctacagcatcaccagcgactacgcctggaactggatcagacagttccccggcaacaaactggaatggatgggcaacatctggtacagcggctccaccacctacaatcccagcctgaagtcccggatctccatcaccagagataccagcaagaaccagttcttcctgcaactgaacagcgtgaccagcgaggacaccgccacctactattgcagccggatggatttttggggccagggcaccacactgaccgtgtcatctacgcgtggaggcagtggtgtcttcacactcgaagatttcgttggggactggcgacagacagccggctacaacctggaccaagtccttgaacagggaggtgtgtccagtttgtttcagaatctcggggtgtccgtaactccgatccaaaggattgtcctgagcggtgaaaatgggctgaagatcgacatccatgtcatcatcccgtatgaaggtctgagcggcgaccaaatgggccagatcgaaaaaatttttaaggtggtgtaccctgtggatgatcatcactttaaggtgatcctgcactatggcacactggtaatcgacggggttacgccgaacatgatcgactatttcggacggccctatgaaggcatcgccgtgttcgacggcaaaaagatcactgtaacagggaccctgtggaacggcaacaaaattatcgacgagcgcctgatcaaccccgacggctccctgctgttccgagtaaccatcaacggagtgaccggctggcggctgtgcgaacgcattctggcgctcgagggaggcagctggagccaccctcagtttgaaaaagactacaaagacgatgacgataagggatcagattacaaggatgatgatgacaaggggtcagattataaagacgacgatgataaagggagcgactacaaggacgacgatgacaaggcctggtcccatccccagttcgagaaacaccatcaccaccaccatcatcacactagtggctccggcgagggcagaggaagtctactaacctgcggagatgtggaagaaaatcctggcccacatatgaccgagtacaagcccacggtgcgcctcgccacccgcgacgacgtccccagggccgtacgcaccctcgccgccgcgttcgccgactaccccgccacgcgccacaccgtcgatccggaccgccacatcgagcgggtcaccgagctgcaagaactcttcctcacgcgcgtcgggctcgacatcggcaaggtgtgggtcgcggacgacggcgccgcggtggcggtctggaccacgccggagagcgtcgaagcgggggcggtgttcgccgagatcggcccgcgcatggccgagttgagcggttcccggctggccgcgcagcaacagatggaaggcctcctggcgccgcaccggcccaaggagcccgcgtggttcctggccaccgtcggcgtctcgcccgaccaccagggcaagggtctgggcagcgccgtcgtgctccccggagtggaggcggccgagcgcgccggggtgcccgccttcctggagacctccgcgccccgcaacctccccttctacgagcggctcggcttcaccgtcaccgccgacgtcgaggtgcccgaaggaccgcgcacctggtgcatgacccgcaagcccggtgcctga

SEQ ID NO: 5540 - DNA, 2211 bp, synthetic construct
  source 1..2211: mol_type = other DNA
atggccttaccagtgaccgccttgctcctgccgctggccttgctgctccacgccgccgggccggacgacgtcgtgatgacacagacacctctgagcctgcctgtgacacctggcgaacctgccagcatcagctgtagaagcagccagagcatcgtgcacagcgacggcaacacctacttcgagtggtatctccagaagcctggacagagccctcagctgctgatctacaaggtgtccaacagattcagcggcgtgcccgacagattttctggcagcggctctggcaccgacttcaccctgaagattagcagagtggaagccgaggacgtgggcgtgtactactgcttccaaggcagccatgttccttggacctttggcggaggcaccaaggtggaaatcaagagaggcggaggcggaagtggaggcggaggatctggcggcggaggctctgaagttcagctggttcagagcggagccgaagtgaagaaacctggggcctctgtgaaggtgtcctgcaaggccagcggctacacctttaccagctacggcatcaactgggttaagcaggctccaggccagggcctcgaatggatcggcgaaatctatcccagaagcgggaacatctactacaacgagaagttcaagggcaaagccacactgaccgccgacaagagcacaagcaccgcctacatggaactgcggagcctgagatccgatgacaccgccgtgtactattgcgccagaggctccgactacgacggcgattttgcctattggggccagggcacactggtcaccgttagctctacgcgtggaggcagtggtgtcttcacactcgaagatttcgttggggactggcgacagacagccggctacaacctggaccaagtccttgaacagggaggtgtgtccagtttgtttcagaatctcggggtgtccgtaactccgatccaaaggattgtcctgagcggtgaaaatgggctgaagatcgacatccatgtcatcatcccgtatgaaggtctgagcggcgaccaaatgggccagatcgaaaaaatttttaaggtggtgtaccctgtggatgatcatcactttaaggtgatcctgcactatggcacactggtaatcgacggggttacgccgaacatgatcgactatttcggacggccctatgaaggcatcgccgtgttcgacggcaaaaagatcactgtaacagggaccctgtggaacggcaacaaaattatcgacgagcgcctgatcaaccccgacggctccctgctgttccgagtaaccatcaacggagtgaccggctggcggctgtgcgaacgcattctggcgctcgagggaggcagctggagccaccctcagtttgaaaaagactacaaagacgatgacgataagggatcagattacaaggatgatgatgacaaggggtcagattataaagacgacgatgataaagggagcgactacaaggacgacgatgacaaggcctggtcccatccccagttcgagaaacaccatcaccaccaccatcatcacactagtggctccggcgagggcagaggaagtctactaacctgcggagatgtggaagaaaatcctggcccacatatgaccgagtacaagcccacggtgcgcctcgccacccgcgacgacgtccccagggccgtacgcaccctcgccgccgcgttcgccgactaccccgccacgcgccacaccgtcgatccggaccgccacatcgagcgggtcaccgagctgcaagaactcttcctcacgcgcgtcgggctcgacatcggcaaggtgtgggtcgcggacgacggcgccgcggtggcggtctggaccacgccggagagcgtcgaagcgggggcggtgttcgccgagatcggcccgcgcatggccgagttgagcggttcccggctggccgcgcagcaacagatggaaggcctcctggcgccgcaccggcccaaggagcccgcgtggttcctggccaccgtcggcgtctcgcccgaccaccagggcaagggtctgggcagcgccgtcgtgctccccggagtggaggcggccgagcgcgccggggtgcccgccttcctggagacctccgcgccccgcaacctccccttctacgagcggctcggcttcaccgtcaccgccgacgtcgaggtgcccgaaggaccgcgcacctggtgcatgacccgcaagcccggtgcctga

SEQ ID NO: 5541 - DNA, 2202 bp, synthetic construct
  source 1..2202: mol_type = other DNA
atggccttaccagtgaccgccttgctcctgccgctggccttgctgctccacgccgccaggccggacgacttcgtgatgacccagacacctctgagcctgcctgtgacacctggcgaacctgccagcatcagctgtagaagcagccagagcatcgtgcaccacgacggcaacacctacctggaatggtatctccagaagcctggacagagccccaagctgctgatctacaaggtgtccaacagattcagcggcgtgcccgacagattttctggcagcggctctggcaccgacttcaccctgaagattagcagagtggaagccgaggacgtgggcgtgtactactgcttccaaggcagccatgttccttggacctttggcggaggcaccaaggtggaaatcaagagaggcggcggaggaagcggaggcggatctggtggcggaggatctgaagtgcagctggtgcagtctggggccgaagtgaagaaacctggcagcagcgtgaaggtgtcctgcaaagcctctggcggcagctttagcagctacggcatcaactgggtcaagcaggcccctggacaaggactggaatggatcggcgagattttccccagaagcggcaatacctactacaacgagaagttcgagggcagagccacactgaccgccgataagagcacaagcaccgcctacatggaactgcggagcctgagaagcgaggacaccgccgtgtactattgcgccaaaggcgacctgggcgacttcgattattggggccagggcaccaccgtgaccgtttcttctacgcgtggaggcagtggtgtcttcacactcgaagatttcgttggggactggcgacagacagccggctacaacctggaccaagtccttgaacagggaggtgtgtccagtttgtttcagaatctcggggtgtccgtaactccgatccaaaggattgtcctgagcggtgaaaatgggctgaagatcgacatccatgtcatcatcccgtatgaaggtctgagcggcgaccaaatgggccagatcgaaaaaatttttaaggtggtgtaccctgtggatgatcatcactttaaggtgatcctgcactatggcacactggtaatcgacggggttacgccgaacatgatcgactatttcggacggccctatgaaggcatcgccgtgttcgacggcaaaaagatcactgtaacagggaccctgtggaacggcaacaaaattatcgacgagcgcctgatcaaccccgacggctccctgctgttccgagtaaccatcaacggagtgaccggctggcggctgtgcgaacgcattctggcgctcgagggaggcagctggagccaccctcagtttgaaaaagactacaaagacgatgacgataagggatcagattacaaggatgatgatgacaaggggtcagattataaagacgacgatgataaagggagcgactacaaggacgacgatgacaaggcctggtcccatccccagttcgagaaacaccatcaccaccaccatcatcacactagtggctccggcgagggcagaggaagtctactaacctgcggagatgtggaagaaaatcctggcccacatatgaccgagtacaagcccacggtgcgcctcgccacccgcgacgacgtccccagggccgtacgcaccctcgccgccgcgttcgccgactaccccgccacgcgccacaccgtcgatccggaccgccacatcgagcgggtcaccgagctgcaagaactcttcctcacgcgcgtcgggctcgacatcggcaaggtgtgggtcgcggacgacggcgccgcggtggcggtctggaccacgccggagagcgtcgaagcgggggcggtgttcgccgagatcggcccgcgcatggccgagttgagcggttcccggctggccgcgcagcaacagatggaaggcctcctggcgccgcaccggcccaaggagcccgcgtggttcctggccaccgtcggcgtctcgcccgaccaccagggcaagggtctgggcagcgccgtcgtgctccccggagtggaggcggccgagcgcgccggggtgcccgccttcctggagacctccgcgccccgcaacctccccttctacgagcggctcggcttcaccgtcaccgccgacgtcgaggtgcccgaaggaccgcgcacctggtgcatgacccgcaagcccggtgcctga

SEQ ID NO: 5542 - DNA, 1431 bp, synthetic construct
  source 1..1431: mol_type = other DNA
atggccttaccagtgaccgccttgctcctgccgctggccttgctgctccacgccgccaggccggacgacatccagttgacccagtcccccagctcactcagcgccagtgtgggggaccgggtgaccattacctgtaaagccagtcagagtgtggactatgagggggatagcttcctgaattggtatcagcagaagcctggcaaagccccaaagctgctgatctacgctgcatctaatctggagtcaggcgtgccttctaggttctccggtagtgggtctgggaccgatttcacattgaccatttcatccctccaacccgaggatttcgctacatattactgtcagcagtccaatgaggaccctctcacctttggccagggcaccaaagttgaaattaagagaggcggaggcggaagtggaggcggaggatctggcggcggaggctctgaagtccaacttgtggagtctggagggggcctggtgcagcccggcggctctctcagactgtcttgtgcggcaagcggctacaccttcagctcttactggatagaatgggtgaggcaggcacctggaaagggactggagtggattggagagattctgccaggagggggagatacaaattacaatgaaatcttcaaggggcgggccaccttttcagcggataccagcaagaatacagcttacctgcagatgaatagcctccgggcagaagataccgctgtttattattgcacgagacgggtgccaataagactggactattgggggcaagggactcttgtcaccgtcagttcaacgcgtggaggcagtggtgtcttcacactcgaagatttcgttggggactggcgacagacagccggctacaacctggaccaagtccttgaacagggaggtgtgtccagtttgtttcagaatctcggggtgtccgtaactccgatccaaaggattgtcctgagcggtgaaaatgggctgaagatcgacatccatgtcatcatcccgtatgaaggtctgagcggcgaccaaatgggccagatcgaaaaaatttttaaggtggtgtaccctgtggatgatcatcactttaaggtgatcctgcactatggcacactggtaatcgacggggttacgccgaacatgatcgactatttcggacggccctatgaaggcatcgccgtgttcgacggcaaaaagatcactgtaacagggaccctgtggaacggcaacaaaattatcgacgagcgcctgatcaaccccgacggctccctgctgttccgagtaaccatcaacggagtgaccggctggcggctgtgcgaacgcattctggcgagttggaaggatgcctctggatggtcctcgagaccgatttctacgactacaaggacgacgatgacaagactagtggctccggcgagggcagaggaagtctactaa

SEQ ID NO: 5543 - DNA, 4641 bp, synthetic construct
  source 1..4641: mol_type = other DNA
atggacccccagtgcaccatgggcctgtctaatatcctgtttgtgatggccttcctgctgagcggagcagcaccactgaagatccaggcctactttaacgagacagccgacctgccctgtcagttcgccaactcccagaatcagtctctgagcgagctggtggtgttctggcaggatcaggagaacctggtgctgaatgaggtgtacctgggcaaggagaagtttgacagcgtgcactccaagtatatgggccggaccagcttcgactccgattcttggaccctgaggctgcacaatctgcagatcaaggataagggcctgtaccagtgcatcatccaccacaagaagcctaccggcatgatcagaatccaccagatgaacagcgagctgagcgtgctggccaacttttcccagcctgagatcgtgccaatctctaacatcacagagaacgtgtacatcaacctgacctgtagctccatccacggctatccagagcccaagaagatgagcgtgctgctgaggacaaagaacagcaccatcgagtacgacggcatcatgcagaagtcccaggataacgtgaccgagctgtatgacgtgagcatctccctgtctgtgagctttccagatgtgacatccaacatgaccatcttctgcatcctggagacagacaagacccgcctgctgtctagcccattttctatcgagctggaggacccccagccacctccagatcacatcccttggatcacagccgtgctgccaaccgtgatcatctgcgtgatggtgttctgtctgatcctgtggaagtggaagaagaagaagcggcctcgcaattcctacaagtgtggcacaaacaccatggagcgggaggagtctgagcagaccaagaagagagagaagatccacatcccagagcggagcgatgaggcccagagagtgtttaagtcctctaagacaagctcctgcgacaagtccgatacctgtttcggctctggagagggaaggggcagcctgctgacctgcggcgacgtggaggagaatcctggaccagccctgccagtgacagccctgctgctgcctctggccctgctgctgcacgccgcccgccctcaggtgcagctgctggagtccggagcagagctggcccggccaggagcctctgtgaagatgagctgtaaggcctccggctacaccttcaccaggtataccatgcactgggtgaagcagaggccaggacagggactggagtggatcggctacatcaaccccagccgcggctacacaaactataatcagaagttcaaggataaggccacactgaccacagacaagtctagctccaccgcctacatgcagctgtctagcctgacatccgaggattctgccgtgtactattgcgccggctactatgacgatcactactgtctggactattggggccagggcacactggtgaccgtgtcctctggaggaggaggctccggcggaggaggctctggcggcggcggcagcgatatcgtgatgacccagtccccagccatcatgtccgcctctccaggagagaaggtgacaatgacctgctccgccagctccagcgtgagctacatgaattggtatcagcagaagagcggcacctcccccaagagatggatctacgacacatctaagctggccagcggagtgcctgcacacttcaggggcagcggctccggcacatcttatagcctgaccatcagcggaatggaggcagaggatgcagcaacctactattgccagcagtggagctccaaccccttcaccttcggcagcggcaccaagctggagatcaagcgcgacccctctaccacaacccccgcccctaggccacctacaccagccccaaccatcgcctcccagccactgtctctgaggcccgaggcctgtcgccctgccgcagggggggcagtgcacaccaggggactggactttgcctgcgatatctacatctgggcacctctggccggaacctgtggcgtgctgctgctgagcctggtcatcaccctgtattgcaagcggggcagaaagaagggcagcggagagggaaggggctccctgctgacctgtggcgacgtggaggagaaccctggcccaatggagtacgcctctgacgccagcctggaccccgaggccccatggccacccgccccaagggcaagggcctgccgggtgctgccttgggccctggtggccggcctgttattactgctgctgctggccgccgcctgcgccgtgttcctggcctgtccctgggccgtgtccggcgccagagcctccccaggctctgccgccagcccaaggctgagagagggacctgagctgagcccagacgatcctgccggcctgctggatctgaggcagggaatgtttgcccagctggtggcccagaatgtgctgctgatcgatggccctctgtcctggtactctgacccaggcctggccggcgtgtctctgaccggaggactgagctataaggaggacacaaaggagctggtggtggccaaggccggcgtgtactacgtgttcttccagctggagctgaggagagtggtggccggcgagggctccggctctgtgagcctggccctgcacctgcagccactgcggagcgccgccggggccgccgccctggccctgaccgtggatctgcctccagcctctagcgaggcacggaacagcgcctttggcttccagggcagactgctgcacctgtccgccggacagaggctgggagtgcacctgcacaccgaggcaagggcccgccacgcatggcagctgacacagggagcaaccgtgctgggcctgttcagagtgacaccagagatccctgccggcctgccaagccctaggtccgagggctctggcgaaggcagaggctccctgctgacttgtggcgacgtggaagaaaatccaggccccggctttacgaccaagatcatcttcctgtacaacctggtgctggtgtacgccggcttcgacgatcctagaaaggccatcgagctggtgcagaagagatacggcagaccctgcgattgctctggcggccaagtttctgagcctcctagcgacagagtgtcccaagtgacctgtagcggcaagaccgcctacctgatgcctgaccagagatggaagtgcaagagcatccccaaggacacaagccctagcggccctctgcaagagtgcccctgtaatagctaccagagcagcgtgcacagctcctgctacacaagctaccagcagtgcagaagcggcaacaagacctactacaccgccacactgctgaaaacccagaccggcggcacatccgatgttcaggtgctgggcagcaccaacaagctgattcagagcccctgcaacggcatcaagggccagagcatctgctggtccacaacagcccctatccacgtgtcagatggcggcggacctctggacaccaccagaatcaagagcgtgcagcggaagctggaagagatccacaaggctctgtaccccgaactccagtatcaccctctggctatccccaaagtgcgggacaacctgatggtggacgcccagacactgaatatcctgaacgccacctacaatctgctgctgatgagcaacaccagcctggtggacgattgctggctgtgcctgaaactgggacctcctacacctctggcaattcccaacttcctgctgagctacgtgaccagaagcagcgacaacatcagctgcctgattatcccacctctgctcgtgcagcccatgcagttcagcaactcctcctgcctgttcagccccagctacaacagcaccgaggaaatcgacctgggacacgtggccttctccaactgcacctccatcaccaacgtgacaggccctatctgcgccgtgaatggcagcgtgttcctgtgtggcaacaacatggcctacacctacctgcctaccaactggaccggactgtgcgtgctggctacactgctgcctgacatcgacatcatccctggcgacgagcccgtgcctattcctgccatcgaccacttcatctacagacccaagcgggctatccagttcatcccactgctggccggactgggaatcaccgccgcttttacaacaggcgctacaggactgggcgtgtccgtgacacagtacaccaagctgagcaaccagctgatctccgacgtgcagatcctgagcagcaccatccaggacctccaggatcaggtggactctctggccgaagtggtgctccagaacagaagaggactggacctgctgacagccgagcaaggcggaatttgtctggccctgcaagagaagtgctgcttctacgtgaacaagagcggcatcgtgcgcgacaagatcaagacactgcaagaggaactggaacggcggagaaaggacctggcctccaatcctctgtggaccggcctgcaaggactgctcccttacctgctgcctttcctgggaccactgctgactctgctgctcctgctgaccatcggaccctgcatcttcaacagactgaccgccttcatcaacgacaagctgaacatcatccacgctatgggatccactagtccagtgtggtggaattctgcagatatccagcacagttaa

SEQ ID NO: 5544 - DNA, 4617 bp, synthetic construct
  source 1..4617: mol_type = other DNA
atggacccccagtgcaccatgggcctgtctaatatcctgtttgtgatggccttcctgctgagcggagcagcaccactgaagatccaggcctactttaacgagacagccgacctgccctgtcagttcgccaactcccagaatcagtctctgagcgagctggtggtgttctggcaggatcaggagaacctggtgctgaatgaggtgtacctgggcaaggagaagtttgacagcgtgcactccaagtatatgggccggaccagcttcgactccgattcttggaccctgaggctgcacaatctgcagatcaaggataagggcctgtaccagtgcatcatccaccacaagaagcctaccggcatgatcagaatccaccagatgaacagcgagctgagcgtgctggccaacttttcccagcctgagatcgtgccaatctctaacatcacagagaacgtgtacatcaacctgacctgtagctccatccacggctatccagagcccaagaagatgagcgtgctgctgaggacaaagaacagcaccatcgagtacgacggcatcatgcagaagtcccaggataacgtgaccgagctgtatgacgtgagcatctccctgtctgtgagctttccagatgtgacatccaacatgaccatcttctgcatcctggagacagacaagacccgcctgctgtctagcccattttctatcgagctggaggacccccagccacctccagatcacatcccttggatcacagccgtgctgccaaccgtgatcatctgcgtgatggtgttctgtctgatcctgtggaagtggaagaagaagaagcggcctcgcaattcctacaagtgtggcacaaacaccatggagcgggaggagtctgagcagaccaagaagagagagaagatccacatcccagagcggagcgatgaggcccagagagtgtttaagtcctctaagacaagctcctgcgacaagtccgatacctgtttcggctctggagagggaaggggcagcctgctgacctgcggcgacgtggaggagaatcctggaccagccctgccagtgacagccctgctgctgcctctggccctgctgctgcacgccgcccgccctcaggtgcagctgctggagtccggagcagagctggcccggccaggagcctctgtgaagatgagctgtaaggcctccggctacaccttcaccaggtataccatgcactgggtgaagcagaggccaggacagggactggagtggatcggctacatcaaccccagccgcggctacacaaactataatcagaagttcaaggataaggccacactgaccacagacaagtctagctccaccgcctacatgcagctgtctagcctgacatccgaggattctgccgtgtactattgcgccggctactatgacgatcactactgtctggactattggggccagggcacactggtgaccgtgtcctctggaggaggaggctccggcggaggaggctctggcggcggcggcagcgatatcgtgatgacccagtccccagccatcatgtccgcctctccaggagagaaggtgacaatgacctgctccgccagctccagcgtgagctacatgaattggtatcagcagaagagcggcacctcccccaagagatggatctacgacacatctaagctggccagcggagtgcctgcacacttcaggggcagcggctccggcacatcttatagcctgaccatcagcggaatggaggcagaggatgcagcaacctactattgccagcagtggagctccaaccccttcaccttcggcagcggcaccaagctggagatcaagcgcgacccctctaccacaacccccgcccctaggccacctacaccagccccaaccatcgcctcccagccactgtctctgaggcccgaggcctgtcgccctgccgcagggggggcagtgcacaccaggggactggactttgcctgcgatatctacatctgggcacctctggccggaacctgtggcgtgctgctgctgagcctggtcatcaccctgtattgcaagcggggcagaaagaagggcagcggagagggaaggggctccctgctgacctgtggcgacgtggaggagaaccctggcccaatggagtacgcctctgacgccagcctggaccccgaggccccatggccacccgccccaagggcaagggcctgccgggtgctgccttgggccctggtggccggcctgttattactgctgctgctggccgccgcctgcgccgtgttcctggcctgtccctgggccgtgtccggcgccagagcctccccaggctctgccgccagcccaaggctgagagagggacctgagctgagcccagacgatcctgccggcctgctggatctgaggcagggaatgtttgcccagctggtggcccagaatgtgctgctgatcgatggccctctgtcctggtactctgacccaggcctggccggcgtgtctctgaccggaggactgagctataaggaggacacaaaggagctggtggtggccaaggccggcgtgtactacgtgttcttccagctggagctgaggagagtggtggccggcgagggctccggctctgtgagcctggccctgcacctgcagccactgcggagcgccgccggggccgccgccctggccctgaccgtggatctgcctccagcctctagcgaggcacggaacagcgcctttggcttccagggcagactgctgcacctgtccgccggacagaggctgggagtgcacctgcacaccgaggcaagggcccgccacgcatggcagctgacacagggagcaaccgtgctgggcctgttcagagtgacaccagagatccctgccggcctgccaagccctaggtccgagggctctggcgaaggcagaggctccctgctgacttgtggcgacgtggaagaaaatccaggccccggctttacgaccaagatcatcttcctgtacaacctggtgctggtgtacgccggcttcgacgatcctagaaaggccatcgagctggtgcagaagagatacggcagaccctgcgattgctctggcggccaagtttctgagcctcctagcgacagagtgtcccaagtgacctgtagcggcaagaccgcctacctgatgcctgaccagagatggaagtgcaagagcatccccaaggacacaagccctagcggccctctgcaagagtgcccctgtaatagctaccagagcagcgtgcacagctcctgctacacaagctaccagcagtgcagaagcggcaacaagacctactacaccgccacactgctgaaaacccagaccggcggcacatccgatgttcaggtgctgggcagcaccaacaagctgattcagagcccctgcaacggcatcaagggccagagcatctgctggtccacaacagcccctatccacgtgtcagatggcggcggacctctggacaccaccagaatcaagagcgtgcagcggaagctggaagagatccacaaggctctgtaccccgaactccagtatcaccctctggctatccccaaagtgcgggacaacctgatggtggacgcccagacactgaatatcctgaacgccacctacaatctgctgctgatgagcaacaccagcctggtggacgattgctggctgtgcctgaaactgggacctcctacacctctggcaattcccaacttcctgctgagctacgtgaccagaagcagcgacaacatcagctgcctgattatcccacctctgctcgtgcagcccatgcagttcagcaactcctcctgcctgttcagccccagctacaacagcaccgaggaaatcgacctgggacacgtggccttctccaactgcacctccatcaccaacgtgacaggccctatctgcgccgtgaatggcagcgtgttcctgtgtggcaacaacatggcctacacctacctgcctaccaactggaccggactgtgcgtgctggctacactgctgcctgacatcgacatcatccctggcgacgagcccgtgcctattcctgccatcgaccacttcatctacagacccaagcgggctatccagttcatcccactgctggccggactgggaatcaccgccgcttttacaacaggcgctacaggactgggcgtgtccgtgacacagtacaccaagctgagcaaccagctgatctccgacgtgcagatcctgagcagcaccatccaggacctccaggatcaggtggactctctggccgaagtggtgctccagaacagaagaggactggacctgctgacagccgagcaaggcggaatttgtctggccctgcaagagaagtgctgcttctacgtgaacaagagcggcatcgtgcgcgacaagatcaagacactgcaagaggaactggaacggcggagaaaggacctggcctccaatcctctgtggaccggcctgcaaggactgctcccttacctgctgcctttcctgggaccactgctgactctgctgctcctgctgaccatcggaccctgcatcttcaacagactgaccgccttcatcaacgacaagctgaacatcatccacgctatggtgctgacacagcagtaccaggtgctg

SEQ ID NO: 5545 - DNA, 4716 bp, synthetic construct
  source 1..4716: mol_type = other DNA
atggaccctagatgcacaatgggcctggccatcctgatcttcgtgaccgtgctgctgatcagcgatgccgtgtccgtggagacccaggcctactttaacggcacagcctatctgccatgtcccttcacaaaggcccagaatatctccctgtctgagctggtggtgttttggcaggaccagcagaagctggtgctgtacgagcactatctgggcaccgagaagctggactccgtgaacgccaagtacctgggccggacctcttttgatagaaacaattggacactgaggctgcacaatgtgcagatcaaggatatgggctcttatgactgcttcatccagaagaagccccctaccggcagcatcatcctgcagcagacactgaccgagctgagcgtgatcgccaacttttccgagcccgagatcaagctggcccagaacgtgaccggcaattctggcatcaacctgacatgtaccagcaagcagggccaccctaagccaaagaagatgtacttcctgatcaccaacagcacaaatgagtatggcgacaatatgcagatctcccaggataacgtgaccgagctgtttagcatctccaactctctgagcctgtccttccctgacggcgtgtggcacatgaccgtggtgtgcgtgctggagacagagagcatgaagatcagctccaagcccctgaacttcacccaggagttcccctctcctcagacatactggaaggagatcaccgccagcgtgacagtggccctgctgctggtcatgctgctgatcatcgtgtgccacaagaagccaaatcagcccagccggccttccaacacagcctctaagctggagcgggatagcaatgccgacagagagaccatcaacctgaaggagctggagcctcagatcgcctccgccaagccaaacgcagagggctccggagagggaagaggctctctgctgacatgcggcgacgtggaggagaatccaggacccgccctgccagtgaccgccctgctgctgcctctggccctgctgctgcacgccgccaggccagaggtgcagctggtggagagcggaggaggactggtgcagcctggcaagtctctgaagctgagctgtgaggcctccggctttaccttctccggctacggcatgcactgggtgaggcaggcaccaggaaggggactggagtctgtggcctacatcacatctagctccatcaacatcaagtatgccgacgccgtgaagggccggtttaccgtgagcagagataacgccaagaatctgctgttcctgcagatgaacatcctgaagtccgaggacaccgccatgtactattgcgccagattcgactgggataagaattactggggccagggcaccatggtgacagtgtctagcggaggaggaggctccggaggaggaggctctggcggcggcggcagcgatatccagatgacacagtccccttcctctctgccagcctctctgggcgacagggtgaccatcaactgtcaggcctctcaggatatcagcaactacctgaattggtatcagcagaagcccggcaaggcccctaagctgctgatctactatacaaataagctggccgacggagtgccatcccggttttctggcagcggctccggcagagacagctccttcaccatctctagcctggagtccgaggatatcggctcttactattgccagcagtactataactacccttggaccttcggcccaggcacaaagctggagatcaagcgggaccccagcaccacaacccctgccccaaggccaccaacccccgcccctacaatcgcctcccagccactgtctctgaggcctgaggcctgtcgcccagccgcagggggggcagtgcacaccaggggactggattttgcctgcgacatctacatctgggcacccctggccggaacatgtggcgtgctgctgctgagcctggtcatcaccctgtattgcaagcggggcagaaagaagggcagcggagagggaaggggctccctgctgacctgtggcgacgtggaggagaacccaggccccatggatcagcacaccctggacgtggaggatacagcagacgcaaggcaccccgccggcacatcttgccctagcgatgccgccctgctgagagacaccggactgctggccgatgccgccctgctgtccgacaccgtgcgcccaacaaatgccgccctgccaaccgacgcagcataccctgcagtgaacgtgagggatagggaggcagcatggcctccagccctgaatttttgcagccggcaccctaagctgtatggactggtggccctggtgctgctgctgctgatcgcagcatgcgtgcccatcttcacaaggaccgagcctcgcccagccctgaccatcacaacctcccctaacctgggcacacgcgagaacaatgccgaccaggtgaccccagtgtcccacatcggctgccctaacacaacccagcagggctctccagtgttcgccaagctgctggccaagaatcaggccagcctgtgcaatacaaccctgaactggcactcccaggatggagcaggctcctcttacctgtctcagggcctgcggtatgaggaggacaagaaggagctggtggtggattcccccggcctgtactacgtgttcctggagctgaagctgtctcctacattcaccaatacaggccacaaggtgcagggatgggtgagcctggtgctgcaggccaagcctcaggtggacgattttgacaacctggccctgaccgtggagctgttcccatgctccatggagaataagctggtggatcggtcttggagccagctgctgctgctgaaggcaggacacaggctgagcgtgggactgcgcgcctacctgcacggcgcccaggatgcctacagagactgggagctgtcttatcccaacacaaccagctttggcctgttcctggtgaagccagacaatccatgggaaggctccggcgagggaaggggctctctgctgacctgtggcgatgtggaggagaatcccggccctggctttacgaccaagatcatcttcctgtacaacctggtgctggtgtacgccggcttcgacgatcctagaaaggccatcgagctggtgcagaagagatacggcagaccctgcgattgctctggcggccaagtttctgagcctcctagcgacagagtgtcccaagtgacctgtagcggcaagaccgcctacctgatgcctgaccagagatggaagtgcaagagcatccccaaggacacaagccctagcggccctctgcaagagtgcccctgtaatagctaccagagcagcgtgcacagctcctgctacacaagctaccagcagtgcagaagcggcaacaagacctactacaccgccacactgctgaaaacccagaccggcggcacatccgatgttcaggtgctgggcagcaccaacaagctgattcagagcccctgcaacggcatcaagggccagagcatctgctggtccacaacagcccctatccacgtgtcagatggcggcggacctctggacaccaccagaatcaagagcgtgcagcggaagctggaagagatccacaaggctctgtaccccgaactccagtatcaccctctggctatccccaaagtgcgggacaacctgatggtggacgcccagacactgaatatcctgaacgccacctacaatctgctgctgatgagcaacaccagcctggtggacgattgctggctgtgcctgaaactgggacctcctacacctctggcaattcccaacttcctgctgagctacgtgaccagaagcagcgacaacatcagctgcctgattatcccacctctgctcgtgcagcccatgcagttcagcaactcctcctgcctgttcagccccagctacaacagcaccgaggaaatcgacctgggacacgtggccttctccaactgcacctccatcaccaacgtgacaggccctatctgcgccgtgaatggcagcgtgttcctgtgtggcaacaacatggcctacacctacctgcctaccaactggaccggactgtgcgtgctggctacactgctgcctgacatcgacatcatccctggcgacgagcccgtgcctattcctgccatcgaccacttcatctacagacccaagcgggctatccagttcatcccactgctggccggactgggaatcaccgccgcttttacaacaggcgctacaggactgggcgtgtccgtgacacagtacaccaagctgagcaaccagctgatctccgacgtgcagatcctgagcagcaccatccaggacctccaggatcaggtggactctctggccgaagtggtgctccagaacagaagaggactggacctgctgacagccgagcaaggcggaatttgtctggccctgcaagagaagtgctgcttctacgtgaacaagagcggcatcgtgcgcgacaagatcaagacactgcaagaggaactggaacggcggagaaaggacctggcctccaatcctctgtggaccggcctgcaaggactgctcccttacctgctgcctttcctgggaccactgctgactctgctgctcctgctgaccatcggaccctgcatcttcaacagactgaccgccttcatcaacgacaagctgaacatcatccacgctatggtgctgacacagcagtaccaggtgctg

SEQ ID NO: 5546 - DNA, 4647 bp, synthetic construct
  source 1..4647: mol_type = other DNA
atgtacctgcgctgcaccatggagctgaacaatatcctgttcgtgatgacactgctgctgtacggcgccgcctctatgaagagccaggcctacttcaacaagaccggcgagctgccctgtcacttcacaaactcccagaatatctctctggacgagctggtggtgttttggcaggaccaggataagctggtgctgtacgagctgtatcgcggcaaggagaaccctcagaatgtgcacagaaagtacaagggcaggacctcctttgacaaggataactggacactgcggctgcacaatatccagatcaaggataagggcctgtatcagtgcttcgtgcaccacaagggcccaaagggcctggtgcccatgcaccagatgaactccgacctgtctgtgctggccaacttcagccagcccgagatcatggtgacctccaaccggacagagaacagcggcatcatcaacctgacctgtagctccatccagggctaccccgagcctaaggagatgtatttcctggtgaagacagagaacagcagcaccaagtacgatacagtgatgaagaagagccagaacaatgtgaccgagctgtataacgtgtctatcagcctgtccttttctgtgcctgaggccagcaacgtgagcatcttctgcgtgctgcagctggagtctatgaagctgcccagcctgccttacaacatcgacgcccacaccaagccaacacccgacggcgatcacatcctgtggatcgccgccctgctggtcatgctggtcatcctgtgcggcatggtgttctttctgaccctgagaaagcggaagaagaagcagcctggcccatcccacgagtgtgagacaaataaggtggagcgcaaggagtctgagcagaccaaggagcgcgtgcggtaccacgagacagagcggtccgatgaggcccagtgcgtgaacatcagcaagaccgcctccggcgacaattctaccacacagttcggcagcggagagggaagaggctccctgctgacctgtggcgatgtggaggagaacccaggacctgccctgccagtgacagccctgctgctgcctctggccctgctgctgcacgccgccaggccagaggtgcagctggtggagagcggaggaggactggtgcagcccaagggcagcctgaagctgtcctgcgccacctctggctttacattcaacatctacgccatgaattgggtgagacaggcaccaggcaagggactggagtgggtggccagaatcaggagcaagtccaagaattatgccacctactatgccggcagcgtgaaggaccgctttacaatctcccgggacgattctcagagcatgctgtacctgcagatgaacaatctgaagaccgaggatacagccatgtactattgcgtgcggagaggctatttcgacgtgtggggagcaggaaccacagtgaccgtgtcctctagcggaggaggaggctccggaggaggaggctctggcggcggcggcagcatcatcgtgatgacccagtccccaaagtccatgtctatgagcgtgggagagagggtgacactgagctgtcgggcctccgagaacgtggattcttttgtgagctggtaccagcagaagcctgaccagagcccacagctgctgatcttcggcgcctccaatagatctaccggcgtgcccgataggtttaccggctccggctctgccacagacttcacactgaccatcacaagcgtgcagtccgaggatctggcagcataccactgcggacagacctactcctatccttttaccttcggctctggcacaaacctggagatcaagcggagcgaccccaccacaaccccagccccaaggccacctacccctgccccaacaatcgcctctcagcctctgagcctgagaccagaggcctgtaggccagccgcagggggggcagtgcacacccgcggcctggacttcgcctgcgatatctacatctgggcacccctggccggaacctgtggcgtgctgctgctgagcctggtcatcaccctgtattgcaaccaccggaataggcgccgggtgtgcaagtgtccaagacctgtggtgggctctggagagggaaggggcagcctgctgacttgcggcgatgtggaagaaaacccaggaccaatgaggccacggagcgacgccgcccctgatccagaggcaccaaggccacccgcccctccaggcagagcctgcagcccactgccttgggcactgtccgccgcaatgctgctgctggtgggcacctgcgccgcctgtgccctgcgcgcctgggtggtgccaggaccaaggccccctgccctgcccgccctgcctgccccactgcccgatgccggcgccaggctgccagacagcccacaggccgtgttcgcacagctggtggccagagatgtgcagctgaaggagggaccactgaggtggtacagcgaccccggcctggccggcgtgtttctgggacccggcctgtcctatgaccagcacacaagagagctgatggtggtggagcctggcctgtactacgtgttcctgcacctgaagctgcagagagtgatgtcctctaccggcagcggctccgtgtctgccgccctgcacctgcagccactgggaaccgaggcagccgccctggacctgacactggatctgccaccccctagctccgaggccagagattctgccgcaggctttaggggcagcctgctgcacctggacgcaggacagagactgagggtgcacctgagggcagaggcaggagcacaccctgcatggcagctggcccagggagcaacaatcctgggactgttccgggtggcaaccaaggtgccaacaggactgccttctagctggccaatggataccggaccaggctccccaccactggacggagagggctccggcgagggcagaggctctctgctgacctgcggcgacgtggaggagaaccctggaccaggctttacgaccaagatcatcttcctgtacaacctggtgctggtgtacgccggcttcgacgatcctagaaaggccatcgagctggtgcagaagagatacggcagaccctgcgattgctctggcggccaagtttctgagcctcctagcgacagagtgtcccaagtgacctgtagcggcaagaccgcctacctgatgcctgaccagagatggaagtgcaagagcatccccaaggacacaagccctagcggccctctgcaagagtgcccctgtaatagctaccagagcagcgtgcacagctcctgctacacaagctaccagcagtgcagaagcggcaacaagacctactacaccgccacactgctgaaaacccagaccggcggcacatccgatgttcaggtgctgggcagcaccaacaagctgattcagagcccctgcaacggcatcaagggccagagcatctgctggtccacaacagcccctatccacgtgtcagatggcggcggacctctggacaccaccagaatcaagagcgtgcagcggaagctggaagagatccacaaggctctgtaccccgaactccagtatcaccctctggctatccccaaagtgcgggacaacctgatggtggacgcccagacactgaatatcctgaacgccacctacaatctgctgctgatgagcaacaccagcctggtggacgattgctggctgtgcctgaaactgggacctcctacacctctggcaattcccaacttcctgctgagctacgtgaccagaagcagcgacaacatcagctgcctgattatcccacctctgctcgtgcagcccatgcagttcagcaactcctcctgcctgttcagccccagctacaacagcaccgaggaaatcgacctgggacacgtggccttctccaactgcacctccatcaccaacgtgacaggccctatctgcgccgtgaatggcagcgtgttcctgtgtggcaacaacatggcctacacctacctgcctaccaactggaccggactgtgcgtgctggctacactgctgcctgacatcgacatcatccctggcgacgagcccgtgcctattcctgccatcgaccacttcatctacagacccaagcgggctatccagttcatcccactgctggccggactgggaatcaccgccgcttttacaacaggcgctacaggactgggcgtgtccgtgacacagtacaccaagctgagcaaccagctgatctccgacgtgcagatcctgagcagcaccatccaggacctccaggatcaggtggactctctggccgaagtggtgctccagaacagaagaggactggacctgctgacagccgagcaaggcggaatttgtctggccctgcaagagaagtgctgcttctacgtgaacaagagcggcatcgtgcgcgacaagatcaagacactgcaagaggaactggaacggcggagaaaggacctggcctccaatcctctgtggaccggcctgcaaggactgctcccttacctgctgcctttcctgggaccactgctgactctgctgctcctgctgaccatcggaccctgcatcttcaacagactgaccgccttcatcaacgacaagctgaacatcatccacgctatggtgctgacacagcagtaccaggtgctg

SEQ ID NO: 5547 - DNA, 4410 bp, synthetic construct
  source 1..4410: mol_type = other DNA
atggacccccagtgcaccatgggcctgtctaatatcctgtttgtgatggccttcctgctgagcggagcagcaccactgaagatccaggcctactttaacgagacagccgacctgccctgtcagttcgccaactcccagaatcagtctctgagcgagctggtggtgttctggcaggatcaggagaacctggtgctgaatgaggtgtacctgggcaaggagaagtttgacagcgtgcactccaagtatatgggccggaccagcttcgactccgattcttggaccctgaggctgcacaatctgcagatcaaggataagggcctgtaccagtgcatcatccaccacaagaagcctaccggcatgatcagaatccaccagatgaacagcgagctgagcgtgctggccaacttttcccagcctgagatcgtgccaatctctaacatcacagagaacgtgtacatcaacctgacctgtagctccatccacggctatccagagcccaagaagatgagcgtgctgctgaggacaaagaacagcaccatcgagtacgacggcatcatgcagaagtcccaggataacgtgaccgagctgtatgacgtgagcatctccctgtctgtgagctttccagatgtgacatccaacatgaccatcttctgcatcctggagacagacaagacccgcctgctgtctagcccattttctatcgagctggaggacccccagccacctccagatcacatcccttggatcacagccgtgctgccaaccgtgatcatctgcgtgatggtgttctgtctgatcctgtggaagtggaagaagaagaagcggcctcgcaattcctacaagtgtggcacaaacaccatggagcgggaggagtctgagcagaccaagaagagagagaagatccacatcccagagcggagcgatgaggcccagagagtgtttaagtcctctaagacaagctcctgcgacaagtccgatacctgtttcggctctggagagggaaggggcagcctgctgacctgcggcgacgtggaggagaatcctggaccagccctgccagtgacagccctgctgctgcctctggccctgctgctgcacgccgcccgccctcaggtgcagctgctggagtccggagcagagctggcccggccaggagcctctgtgaagatgagctgtaaggcctccggctacaccttcaccaggtataccatgcactgggtgaagcagaggccaggacagggactggagtggatcggctacatcaaccccagccgcggctacacaaactataatcagaagttcaaggataaggccacactgaccacagacaagtctagctccaccgcctacatgcagctgtctagcctgacatccgaggattctgccgtgtactattgcgccggctactatgacgatcactactgtctggactattggggccagggcacactggtgaccgtgtcctctggaggaggaggctccggcggaggaggctctggcggcggcggcagcgatatcgtgatgacccagtccccagccatcatgtccgcctctccaggagagaaggtgacaatgacctgctccgccagctccagcgtgagctacatgaattggtatcagcagaagagcggcacctcccccaagagatggatctacgacacatctaagctggccagcggagtgcctgcacacttcaggggcagcggctccggcacatcttatagcctgaccatcagcggaatggaggcagaggatgcagcaacctactattgccagcagtggagctccaaccccttcaccttcggcagcggcaccaagctggagatcaagcgcgacccctctaccacaacccccgcccctaggccacctacaccagccccaaccatcgcctcccagccactgtctctgaggcccgaggcctgtcgccctgccgcagggggggcagtgcacaccaggggactggactttgcctgcgatatctacatctgggcacctctggccggaacctgtggcgtgctgctgctgagcctggtcatcaccctgtattgcaagcggggcagaaagaagggcagcggagagggaaggggctccctgctgacctgtggcgacgtggaggagaaccctggcccaatggagtacgcctctgacgccagcctggaccccgaggccccatggccacccgccccaagggcaagggcctgccgggtgctgccttgggccctggtggccggcctgttattactgctgctgctggccgccgcctgcgccgtgttcctggcctgtccctgggccgtgtccggcgccagagcctccccaggctctgccgccagcccaaggctgagagagggacctgagctgagcccagacgatcctgccggcctgctggatctgaggcagggaatgtttgcccagctggtggcccagaatgtgctgctgatcgatggccctctgtcctggtactctgacccaggcctggccggcgtgtctctgaccggaggactgagctataaggaggacacaaaggagctggtggtggccaaggccggcgtgtactacgtgttcttccagctggagctgaggagagtggtggccggcgagggctccggctctgtgagcctggccctgcacctgcagccactgcggagcgccgccggggccgccgccctggccctgaccgtggatctgcctccagcctctagcgaggcacggaacagcgcctttggcttccagggcagactgctgcacctgtccgccggacagaggctgggagtgcacctgcacaccgaggcaagggcccgccacgcatggcagctgacacagggagcaaccgtgctgggcctgttcagagtgacaccagagatccctgccggcctgccaagccctaggtccgagggctctggcgaaggcagaggctccctgctgacttgtggcgacgtggaagaaaatccaggccccgagacagacacactcctgctatgggtactgctgctctgggttccaggttccactggtgacgcaccccctccatgccgctgtatgacaagcagcagcccctaccaagagttcctgtggcgaatgcagaggcccggcaacattgacgcccctagctacagaagcctgagcaagggcacccctaccttcacagcccacacacacatgccccggaactgctaccatagcgccacactgtgtatgcacgccaacacacactactggaccggcaagatgattaaccctagctgccctggcggcctgggcgtgacagtttgttggacctactttacccagaccggcatgtccgatggtggcggagttcaagaccaggccagagaaaagcacgtgaaagaagtgatctcccagctgaccagagtgcacggcacaagcagcccttacaaaggactggacctgtccaagctgcacgagacactgagaacccacacacggctggtgtccctgttcaacaccacactgaccggactgcacgaggtgtccgctcagaatcctaccaactgctggatctgcctgcctctgaacttcagaccctacgtgtcaatccccgtgcctgagcagtggaacaacttcagcaccgagatcaataccaccagcgtgctcgtgggacccctggtgtccaatctggaaatcacccacaccagcaacctgacctgcgtgaagttctccaacaccacctacaccaccaacagccagtgcatcagatgggtcacccctccaacacagatcgtgtgtctgcccagcggcatcttcttcgtgtgtggcacaagcgcctaccgctgcctgaatggcagcagcgagtctatgtgcttcctgagcttcctggtgcctcctatgaccatctacaccgagcaggacctgtacagctacgtgatctccaagcctcggaacaagcgggtgcccatcctgccttttgtgattggagctggcgtgctgggagccctcggaactggaatcggaggcatcaccacctctactcagttctactacaaactatctcaagaactaaatggggacatggaaagagtggccgacagcctggtcacactccaggaccagctcaattctctggctgccgtggtgctccagaatcggagagcactcgatctgctgacagccgagagaggcggcacctgtctgtttctgggcgaagagtgctgctactacgtgaaccagtccggaatcgtcactgagaaagttaaagaaattcgagatcgaatccagcggagagccgaggaactgagaaacacaggaccttggggcctgctgagccagtggatgccttggattctgcccttcctgggacctctggccgccatcattctgctgctgctgttcggcccctgtatctttaacctccttgttaactttgtctcttccagaatcgaagctgtaaaataa

SEQ ID NO: 5548 - DNA, 4509 bp, synthetic construct
  source 1..4509: mol_type = other DNA
atggaccctagatgcacaatgggcctggccatcctgatcttcgtgaccgtgctgctgatcagcgatgccgtgtccgtggagacccaggcctactttaacggcacagcctatctgccatgtcccttcacaaaggcccagaatatctccctgtctgagctggtggtgttttggcaggaccagcagaagctggtgctgtacgagcactatctgggcaccgagaagctggactccgtgaacgccaagtacctgggccggacctcttttgatagaaacaattggacactgaggctgcacaatgtgcagatcaaggatatgggctcttatgactgcttcatccagaagaagccccctaccggcagcatcatcctgcagcagacactgaccgagctgagcgtgatcgccaacttttccgagcccgagatcaagctggcccagaacgtgaccggcaattctggcatcaacctgacatgtaccagcaagcagggccaccctaagccaaagaagatgtacttcctgatcaccaacagcacaaatgagtatggcgacaatatgcagatctcccaggataacgtgaccgagctgtttagcatctccaactctctgagcctgtccttccctgacggcgtgtggcacatgaccgtggtgtgcgtgctggagacagagagcatgaagatcagctccaagcccctgaacttcacccaggagttcccctctcctcagacatactggaaggagatcaccgccagcgtgacagtggccctgctgctggtcatgctgctgatcatcgtgtgccacaagaagccaaatcagcccagccggccttccaacacagcctctaagctggagcgggatagcaatgccgacagagagaccatcaacctgaaggagctggagcctcagatcgcctccgccaagccaaacgcagagggctccggagagggaagaggctctctgctgacatgcggcgacgtggaggagaatccaggacccgccctgccagtgaccgccctgctgctgcctctggccctgctgctgcacgccgccaggccagaggtgcagctggtggagagcggaggaggactggtgcagcctggcaagtctctgaagctgagctgtgaggcctccggctttaccttctccggctacggcatgcactgggtgaggcaggcaccaggaaggggactggagtctgtggcctacatcacatctagctccatcaacatcaagtatgccgacgccgtgaagggccggtttaccgtgagcagagataacgccaagaatctgctgttcctgcagatgaacatcctgaagtccgaggacaccgccatgtactattgcgccagattcgactgggataagaattactggggccagggcaccatggtgacagtgtctagcggaggaggaggctccggaggaggaggctctggcggcggcggcagcgatatccagatgacacagtccccttcctctctgccagcctctctgggcgacagggtgaccatcaactgtcaggcctctcaggatatcagcaactacctgaattggtatcagcagaagcccggcaaggcccctaagctgctgatctactatacaaataagctggccgacggagtgccatcccggttttctggcagcggctccggcagagacagctccttcaccatctctagcctggagtccgaggatatcggctcttactattgccagcagtactataactacccttggaccttcggcccaggcacaaagctggagatcaagcgggaccccagcaccacaacccctgccccaaggccaccaacccccgcccctacaatcgcctcccagccactgtctctgaggcctgaggcctgtcgcccagccgcagggggggcagtgcacaccaggggactggattttgcctgcgacatctacatctgggcacccctggccggaacatgtggcgtgctgctgctgagcctggtcatcaccctgtattgcaagcggggcagaaagaagggcagcggagagggaaggggctccctgctgacctgtggcgacgtggaggagaacccaggccccatggatcagcacaccctggacgtggaggatacagcagacgcaaggcaccccgccggcacatcttgccctagcgatgccgccctgctgagagacaccggactgctggccgatgccgccctgctgtccgacaccgtgcgcccaacaaatgccgccctgccaaccgacgcagcataccctgcagtgaacgtgagggatagggaggcagcatggcctccagccctgaatttttgcagccggcaccctaagctgtatggactggtggccctggtgctgctgctgctgatcgcagcatgcgtgcccatcttcacaaggaccgagcctcgcccagccctgaccatcacaacctcccctaacctgggcacacgcgagaacaatgccgaccaggtgaccccagtgtcccacatcggctgccctaacacaacccagcagggctctccagtgttcgccaagctgctggccaagaatcaggccagcctgtgcaatacaaccctgaactggcactcccaggatggagcaggctcctcttacctgtctcagggcctgcggtatgaggaggacaagaaggagctggtggtggattcccccggcctgtactacgtgttcctggagctgaagctgtctcctacattcaccaatacaggccacaaggtgcagggatgggtgagcctggtgctgcaggccaagcctcaggtggacgattttgacaacctggccctgaccgtggagctgttcccatgctccatggagaataagctggtggatcggtcttggagccagctgctgctgctgaaggcaggacacaggctgagcgtgggactgcgcgcctacctgcacggcgcccaggatgcctacagagactgggagctgtcttatcccaacacaaccagctttggcctgttcctggtgaagccagacaatccatgggaaggctccggcgagggaaggggctctctgctgacctgtggcgatgtggaggagaatcccggccctgagacagacacactcctgctatgggtactgctgctctgggttccaggttccactggtgacgcaccccctccatgccgctgtatgacaagcagcagcccctaccaagagttcctgtggcgaatgcagaggcccggcaacattgacgcccctagctacagaagcctgagcaagggcacccctaccttcacagcccacacacacatgccccggaactgctaccatagcgccacactgtgtatgcacgccaacacacactactggaccggcaagatgattaaccctagctgccctggcggcctgggcgtgacagtttgttggacctactttacccagaccggcatgtccgatggtggcggagttcaagaccaggccagagaaaagcacgtgaaagaagtgatctcccagctgaccagagtgcacggcacaagcagcccttacaaaggactggacctgtccaagctgcacgagacactgagaacccacacacggctggtgtccctgttcaacaccacactgaccggactgcacgaggtgtccgctcagaatcctaccaactgctggatctgcctgcctctgaacttcagaccctacgtgtcaatccccgtgcctgagcagtggaacaacttcagcaccgagatcaataccaccagcgtgctcgtgggacccctggtgtccaatctggaaatcacccacaccagcaacctgacctgcgtgaagttctccaacaccacctacaccaccaacagccagtgcatcagatgggtcacccctccaacacagatcgtgtgtctgcccagcggcatcttcttcgtgtgtggcacaagcgcctaccgctgcctgaatggcagcagcgagtctatgtgcttcctgagcttcctggtgcctcctatgaccatctacaccgagcaggacctgtacagctacgtgatctccaagcctcggaacaagcgggtgcccatcctgccttttgtgattggagctggcgtgctgggagccctcggaactggaatcggaggcatcaccacctctactcagttctactacaaactatctcaagaactaaatggggacatggaaagagtggccgacagcctggtcacactccaggaccagctcaattctctggctgccgtggtgctccagaatcggagagcactcgatctgctgacagccgagagaggcggcacctgtctgtttctgggcgaagagtgctgctactacgtgaaccagtccggaatcgtcactgagaaagttaaagaaattcgagatcgaatccagcggagagccgaggaactgagaaacacaggaccttggggcctgctgagccagtggatgccttggattctgcccttcctgggacctctggccgccatcattctgctgctgctgttcggcccctgtatctttaacctccttgttaactttgtctcttccagaatcgaagctgtaaaataa

SEQ ID NO: 5549 - DNA, 4440 bp, synthetic construct
  source 1..4440: mol_type = other DNA
atgtacctgcgctgcaccatggagctgaacaatatcctgttcgtgatgacactgctgctgtacggcgccgcctctatgaagagccaggcctacttcaacaagaccggcgagctgccctgtcacttcacaaactcccagaatatctctctggacgagctggtggtgttttggcaggaccaggataagctggtgctgtacgagctgtatcgcggcaaggagaaccctcagaatgtgcacagaaagtacaagggcaggacctcctttgacaaggataactggacactgcggctgcacaatatccagatcaaggataagggcctgtatcagtgcttcgtgcaccacaagggcccaaagggcctggtgcccatgcaccagatgaactccgacctgtctgtgctggccaacttcagccagcccgagatcatggtgacctccaaccggacagagaacagcggcatcatcaacctgacctgtagctccatccagggctaccccgagcctaaggagatgtatttcctggtgaagacagagaacagcagcaccaagtacgatacagtgatgaagaagagccagaacaatgtgaccgagctgtataacgtgtctatcagcctgtccttttctgtgcctgaggccagcaacgtgagcatcttctgcgtgctgcagctggagtctatgaagctgcccagcctgccttacaacatcgacgcccacaccaagccaacacccgacggcgatcacatcctgtggatcgccgccctgctggtcatgctggtcatcctgtgcggcatggtgttctttctgaccctgagaaagcggaagaagaagcagcctggcccatcccacgagtgtgagacaaataaggtggagcgcaaggagtctgagcagaccaaggagcgcgtgcggtaccacgagacagagcggtccgatgaggcccagtgcgtgaacatcagcaagaccgcctccggcgacaattctaccacacagttcggcagcggagagggaagaggctccctgctgacctgtggcgatgtggaggagaacccaggacctgccctgccagtgacagccctgctgctgcctctggccctgctgctgcacgccgccaggccagaggtgcagctggtggagagcggaggaggactggtgcagcccaagggcagcctgaagctgtcctgcgccacctctggctttacattcaacatctacgccatgaattgggtgagacaggcaccaggcaagggactggagtgggtggccagaatcaggagcaagtccaagaattatgccacctactatgccggcagcgtgaaggaccgctttacaatctcccgggacgattctcagagcatgctgtacctgcagatgaacaatctgaagaccgaggatacagccatgtactattgcgtgcggagaggctatttcgacgtgtggggagcaggaaccacagtgaccgtgtcctctagcggaggaggaggctccggaggaggaggctctggcggcggcggcagcatcatcgtgatgacccagtccccaaagtccatgtctatgagcgtgggagagagggtgacactgagctgtcgggcctccgagaacgtggattcttttgtgagctggtaccagcagaagcctgaccagagcccacagctgctgatcttcggcgcctccaatagatctaccggcgtgcccgataggtttaccggctccggctctgccacagacttcacactgaccatcacaagcgtgcagtccgaggatctggcagcataccactgcggacagacctactcctatccttttaccttcggctctggcacaaacctggagatcaagcggagcgaccccaccacaaccccagccccaaggccacctacccctgccccaacaatcgcctctcagcctctgagcctgagaccagaggcctgtaggccagccgcagggggggcagtgcacacccgcggcctggacttcgcctgcgatatctacatctgggcacccctggccggaacctgtggcgtgctgctgctgagcctggtcatcaccctgtattgcaaccaccggaataggcgccgggtgtgcaagtgtccaagacctgtggtgggctctggagagggaaggggcagcctgctgacttgcggcgatgtggaagaaaacccaggaccaatgaggccacggagcgacgccgcccctgatccagaggcaccaaggccacccgcccctccaggcagagcctgcagcccactgccttgggcactgtccgccgcaatgctgctgctggtgggcacctgcgccgcctgtgccctgcgcgcctgggtggtgccaggaccaaggccccctgccctgcccgccctgcctgccccactgcccgatgccggcgccaggctgccagacagcccacaggccgtgttcgcacagctggtggccagagatgtgcagctgaaggagggaccactgaggtggtacagcgaccccggcctggccggcgtgtttctgggacccggcctgtcctatgaccagcacacaagagagctgatggtggtggagcctggcctgtactacgtgttcctgcacctgaagctgcagagagtgatgtcctctaccggcagcggctccgtgtctgccgccctgcacctgcagccactgggaaccgaggcagccgccctggacctgacactggatctgccaccccctagctccgaggccagagattctgccgcaggctttaggggcagcctgctgcacctggacgcaggacagagactgagggtgcacctgagggcagaggcaggagcacaccctgcatggcagctggcccagggagcaacaatcctgggactgttccgggtggcaaccaaggtgccaacaggactgccttctagctggccaatggataccggaccaggctccccaccactggacggagagggctccggcgagggcagaggctctctgctgacctgcggcgacgtggaggagaaccctggaccagagacagacacactcctgctatgggtactgctgctctgggttccaggttccactggtgacgcaccccctccatgccgctgtatgacaagcagcagcccctaccaagagttcctgtggcgaatgcagaggcccggcaacattgacgcccctagctacagaagcctgagcaagggcacccctaccttcacagcccacacacacatgccccggaactgctaccatagcgccacactgtgtatgcacgccaacacacactactggaccggcaagatgattaaccctagctgccctggcggcctgggcgtgacagtttgttggacctactttacccagaccggcatgtccgatggtggcggagttcaagaccaggccagagaaaagcacgtgaaagaagtgatctcccagctgaccagagtgcacggcacaagcagcccttacaaaggactggacctgtccaagctgcacgagacactgagaacccacacacggctggtgtccctgttcaacaccacactgaccggactgcacgaggtgtccgctcagaatcctaccaactgctggatctgcctgcctctgaacttcagaccctacgtgtcaatccccgtgcctgagcagtggaacaacttcagcaccgagatcaataccaccagcgtgctcgtgggacccctggtgtccaatctggaaatcacccacaccagcaacctgacctgcgtgaagttctccaacaccacctacaccaccaacagccagtgcatcagatgggtcacccctccaacacagatcgtgtgtctgcccagcggcatcttcttcgtgtgtggcacaagcgcctaccgctgcctgaatggcagcagcgagtctatgtgcttcctgagcttcctggtgcctcctatgaccatctacaccgagcaggacctgtacagctacgtgatctccaagcctcggaacaagcgggtgcccatcctgccttttgtgattggagctggcgtgctgggagccctcggaactggaatcggaggcatcaccacctctactcagttctactacaaactatctcaagaactaaatggggacatggaaagagtggccgacagcctggtcacactccaggaccagctcaattctctggctgccgtggtgctccagaatcggagagcactcgatctgctgacagccgagagaggcggcacctgtctgtttctgggcgaagagtgctgctactacgtgaaccagtccggaatcgtcactgagaaagttaaagaaattcgagatcgaatccagcggagagccgaggaactgagaaacacaggaccttggggcctgctgagccagtggatgccttggattctgcccttcctgggacctctggccgccatcattctgctgctgctgttcggcccctgtatctttaacctccttgttaactttgtctcttccagaatcgaagctgtaaaataa

SEQ ID NO: 5550 - DNA, 4527 bp, synthetic construct
  source 1..4527: mol_type = other DNA
atggacccccagtgcaccatgggcctgtctaatatcctgtttgtgatggccttcctgctgagcggagcagcaccactgaagatccaggcctactttaacgagacagccgacctgccctgtcagttcgccaactcccagaatcagtctctgagcgagctggtggtgttctggcaggatcaggagaacctggtgctgaatgaggtgtacctgggcaaggagaagtttgacagcgtgcactccaagtatatgggccggaccagcttcgactccgattcttggaccctgaggctgcacaatctgcagatcaaggataagggcctgtaccagtgcatcatccaccacaagaagcctaccggcatgatcagaatccaccagatgaacagcgagctgagcgtgctggccaacttttcccagcctgagatcgtgccaatctctaacatcacagagaacgtgtacatcaacctgacctgtagctccatccacggctatccagagcccaagaagatgagcgtgctgctgaggacaaagaacagcaccatcgagtacgacggcatcatgcagaagtcccaggataacgtgaccgagctgtatgacgtgagcatctccctgtctgtgagctttccagatgtgacatccaacatgaccatcttctgcatcctggagacagacaagacccgcctgctgtctagcccattttctatcgagctggaggacccccagccacctccagatcacatcccttggatcacagccgtgctgccaaccgtgatcatctgcgtgatggtgttctgtctgatcctgtggaagtggaagaagaagaagcggcctcgcaattcctacaagtgtggcacaaacaccatggagcgggaggagtctgagcagaccaagaagagagagaagatccacatcccagagcggagcgatgaggcccagagagtgtttaagtcctctaagacaagctcctgcgacaagtccgatacctgtttcggctctggagagggaaggggcagcctgctgacctgcggcgacgtggaggagaatcctggaccagccctgccagtgacagccctgctgctgcctctggccctgctgctgcacgccgcccgccctcaggtgcagctgctggagtccggagcagagctggcccggccaggagcctctgtgaagatgagctgtaaggcctccggctacaccttcaccaggtataccatgcactgggtgaagcagaggccaggacagggactggagtggatcggctacatcaaccccagccgcggctacacaaactataatcagaagttcaaggataaggccacactgaccacagacaagtctagctccaccgcctacatgcagctgtctagcctgacatccgaggattctgccgtgtactattgcgccggctactatgacgatcactactgtctggactattggggccagggcacactggtgaccgtgtcctctggaggaggaggctccggcggaggaggctctggcggcggcggcagcgatatcgtgatgacccagtccccagccatcatgtccgcctctccaggagagaaggtgacaatgacctgctccgccagctccagcgtgagctacatgaattggtatcagcagaagagcggcacctcccccaagagatggatctacgacacatctaagctggccagcggagtgcctgcacacttcaggggcagcggctccggcacatcttatagcctgaccatcagcggaatggaggcagaggatgcagcaacctactattgccagcagtggagctccaaccccttcaccttcggcagcggcaccaagctggagatcaagcgcgacccctctaccacaacccccgcccctaggccacctacaccagccccaaccatcgcctcccagccactgtctctgaggcccgaggcctgtcgccctgccgcagggggggcagtgcacaccaggggactggactttgcctgcgatatctacatctgggcacctctggccggaacctgtggcgtgctgctgctgagcctggtcatcaccctgtattgcaagcggggcagaaagaagggcagcggagagggaaggggctccctgctgacctgtggcgacgtggaggagaaccctggcccaatggagtacgcctctgacgccagcctggaccccgaggccccatggccacccgccccaagggcaagggcctgccgggtgctgccttgggccctggtggccggcctgttattactgctgctgctggccgccgcctgcgccgtgttcctggcctgtccctgggccgtgtccggcgccagagcctccccaggctctgccgccagcccaaggctgagagagggacctgagctgagcccagacgatcctgccggcctgctggatctgaggcagggaatgtttgcccagctggtggcccagaatgtgctgctgatcgatggccctctgtcctggtactctgacccaggcctggccggcgtgtctctgaccggaggactgagctataaggaggacacaaaggagctggtggtggccaaggccggcgtgtactacgtgttcttccagctggagctgaggagagtggtggccggcgagggctccggctctgtgagcctggccctgcacctgcagccactgcggagcgccgccggggccgccgccctggccctgaccgtggatctgcctccagcctctagcgaggcacggaacagcgcctttggcttccagggcagactgctgcacctgtccgccggacagaggctgggagtgcacctgcacaccgaggcaagggcccgccacgcatggcagctgacacagggagcaaccgtgctgggcctgttcagagtgacaccagagatccctgccggcctgccaagccctaggtccgagggctctggcgaaggcagaggctccctgctgacttgtggcgacgtggaagaaaatccaggccccgagacagacacactcctgctatgggtactgctgctctgggttccaggttccactggtgacgcaccccctccatgccgctgtatgacaagcagcagcccctaccaagagttcctgtggcgaatgcagaggcccggcaacattgacgcccctagctacagaagcctgagcaagggcacccctaccttcacagcccacacacacatgccccggaactgctaccatagcgccacactgtgtatgcacgccaacacacactactggaccggcaagatgattaaccctagctgccctggcggcctgggcgtgacagtttgttggacctactttacccagaccggcatgtccgatggtggcggagttcaagaccaggccagagaaaagcacgtgaaagaagtgatctcccagctgaccagagtgcacggcacaagcagcccttacaaaggactggacctgtccaagctgcacgagacactgagaacccacacacggctggtgtccctgttcaacaccacactgaccggactgcacgaggtgtccgctcagaatcctaccaactgctggatctgcctgcctctgaacttcagaccctacgtgtcaatccccgtgcctgagcagtggaacaacttcagcaccgagatcaataccaccagcgtgctcgtgggacccctggtgtccaatctggaaatcacccacaccagcaacctgacctgcgtgaagttctccaacaccacctacaccaccaacagccagtgcatcagatgggtcacccctccaacacagatcgtgtgtctgcccagcggcatcttcttcgtgtgtggcacaagcgcctaccgctgcctgaatggcagcagcgagtctatgtgcttcctgagcttcctggtgcctcctatgaccatctacaccgagcaggacctgtacagctacgtgatctccaagcctcggaacaagcgggtgcccatcctgccttttgtgattggagctggcgtgctgggagccctcggaactggaatcggaggcatcaccacctctactcagttctactacaaactatctcaagaactaaatggggacatggaaagagtggccgacagcctggtcacactccaggaccagctcaattctctggctgccgtggtgctccagaatcggagagcactcgatctgctgacagccgagagaggcggcacctgtctgtttctgggcgaagagtgctgctactacgtgaaccagtccggaatcgtcactgagaaagttaaagaaattcgagatcgaatccagcggagagccgaggaactgagaaacacaggaccttggggcctgctgagccagtggatgccttggattctgcccttcctgggacctctggccgccatcattctgctgctgctgttcggcccctgtatctttaacctccttgttaactttgtctcttccagaatcgaagctgtaaaactacaaatggagcccaagatgcagtccaagactaagatctaccgcagacccctggaccggcctgccagcccacgatctgatgttaatgacatcaaaggcacccctcctgaggaaatctca

SEQ ID NO: 5551 - DNA, 1461 bp, synthetic construct
  source 1..1461: mol_type = other DNA
atggccttaccagtgaccgccttgctcctgccgctggccttgctgctccacgccgccaggccggacatccagttgacccagtcccccagctcactcagcgccagtgtgggggaccgggtgaccattacctgtaaagccagtcagagtgtggactatgacggggatagcttcctgaattggtatcagcagaagcctggcaaagccccaaagctgctgatctacgctgcatctaatctggagtcaggcgtgccttccaggttctccggtagtgggtctgggaccgatttcacattgaccatttcatccctccaacccgaggatttcgctacatattactgtcagcagtccaatgaggaccctctcacctttggccagggcaccaaagttgaaattaagagaggcggaggcggaagtggaggcggaggatctggcggcggaggctctgaagtccaacttgtggagtctggagggggcctggtgcagcccggcggctctctcagactgtcttgtgcggcaagcggctacaccttcacctcttactggatagaatgggtgaggcaggcacctggaaagggactggagtggattggagagattctgccaggagggggagatacaaattacaatgaaatcttcaaggggcgggccaccttttcagcggataccagcaagaatacagcttacctgcagatgaatagcctccgggcagaagataccgctgtttattattgcacgagacgggtgccaataagactggactattgggggcaagggactcttgtcaccgtcagttcaacgcgtaaaattgaagttatgtatcctcctccttacctagacaatgagaagagcaatggaaccattatccatgtgaaagggaaacacctttgtccaagtcccctatttcccggaccttctaagcccttttgggtgctggtggtggttgggggagtcctggcttgctatagcttgctagtaacagtggcctttattattttctgggtgaggagtaagaggagcaggctcctgcacagtgactacatgaacatgactccacgccgccccggacccacccgcaagcattaccagccctatgccccaccacgcgacttcgcagcctatcgctccagagtgaagttcagcaggagcgcagacgcccccgcgtaccagcagggccagaaccagctctataacgagctcaatctaggacgaagagaggagtacgatgttttggacaagagacgtggccgggaccctgagatggggggaaagccgagaaggaagaaccctcaggaaggcctgtacaatgaactgcagaaagataagatggcggaggcctacagtgagattgggatgaaaggcgagcgccggaggggcaaggggcacgatggcctttaccagggtctcagtacagccaccaaggacacctacgacgcccttcacatgcaggccctgccccctcgc

SEQ ID NO: 5552 - DNA, 1479 bp, synthetic construct
  source 1..1479: mol_type = other DNA
atggccttaccagtgaccgccttgctcctgccgctggccttgctgctccacgccgccaggccggacatccagttgacccagtcccccagctcactcagcgccagtgtgggggaccgggtgaccattacctgtaaagccagtcagagtgtggactatgacggggatagcttcctgaattggtatcagcagaagcctggcaaagccccaaagctgctgatctacgctgcatctaatctggagtcaggcgtgccttccaggttctccggtagtgggtctgggaccgatttcacattgaccatttcatccctccaacccgaggatttcgctacatattactgtcagcagtccaatgaggaccctctcacctttggccagggcaccaaagttgaaattaagagaggcggaggcggaagtggaggcggaggatctggcggcggaggctctgaagtccaacttgtggagtctggagggggcctggtgcagcccggcggctctctcagactgtcttgtgcggcaagcggctacaccttcacctcttactggatagaatgggtgaggcaggcacctggaaagggactggagtggattggagagattctgccaggagggggagatacaaattacaatgaaatcttcaaggggcgggccaccttttcagcggataccagcaagaatacagcttacctgcagatgaatagcctccgggcagaagataccgctgtttattattgcacgagacgggtgccaataagactggactattgggggcaagggactcttgtcaccgtcagttcaacgcgtgcgaagcccaccacgacgccagcgccgcgaccaccaacaccggcgcccaccatcgcgtcgcagcccctgtccctgcgcccagaggcgtgccggccagcggcggggggcgcagtgcacacgagggggctggacttcgcctgtgacatctacatctgggcgcccttggccgggacttgtggggtccttctcctgtcactggttatcaccctttactgcaaacggggcagaaagaaactcctgtatatattcaaacaaccatttatgagaccagtacaaactactcaagaggaagatggctgtagctgccgatttccagaagaagaagaaggaggatgtgaactgagagtgaagttcagcaggagcgcagacgcccccgcgtaccagcagggccagaaccagctctataacgagctgaatctaggacgaagagaggagtacgatgttttggacaagagacgtggccgggaccctgagatggggggaaagccgagaaggaagaaccctcaggaaggcctgtacaatgaactgcagaaagataagatggcggaggcctacagtgagattgggatgaaaggcgagcgccggaggggcaaggggcacgatggcctttaccagggtctcagtacagccaccaaggacacctacgacgcccttcacatgcaggccctgccccctcgc

SEQ ID NO: 5553 - DNA, 1479 bp, synthetic construct
  source 1..1479: mol_type = other DNA
atggccttaccagtgaccgccttgctcctgccgctggccttgctgctccacgccgccaggccggaagtccaacttgtggagtctggagggggcctggtgcagcccggcggctctctcagactgtcttgtgcggcaagcggctacaccttcacctcttactggatagaatgggtgaggcaggcacctggaaagggactggagtggattggagagattctgccaggagggggagatacaaattacaatgaaatcttcaaggggcgggccaccttttcagcggataccagcaagaatacagcttacctgcagatgaatagcctccgggcagaagataccgctgtttattattgcacgagacgggtgccaataagactggactattgggggcaagggactcttgtcaccgtcagttcaggcggaggcggaagtggaggcggaggatctggcggcggaggctctgacatccagttgacccagtcccccagctcactcagcgccagtgtgggggaccgggtgaccattacctgtaaagccagtcagagtgtggactatgacggggatagcttcctgaattggtatcagcagaagcctggcaaagccccaaagctgctgatctacgctgcatctaatctggagtcaggcgtgccttccaggttctccggtagtgggtctgggaccgatttcacattgaccatttcatccctccaacccgaggatttcgctacatattactgtcagcagtccaatgaggaccctctcacctttggccagggcaccaaagttgaaattaagagaacgcgtgcgaagcccaccacgacgccagcgccgcgaccaccaacaccggcgcccaccatcgcgtcgcagcccctgtccctgcgcccagaggcgtgccggccagcggcggggggcgcagtgcacacgagggggctggacttcgcctgtgacatctacatctgggcgcccttggccgggacttgtggggtccttctcctgtcactggttatcaccctttactgcaaacggggcagaaagaaactcctgtatatattcaaacaaccatttatgagaccagtacaaactactcaagaggaagatggctgtagctgccgatttccagaagaagaagaaggaggatgtgaactgagagtgaagttcagcaggagcgcagacgcccccgcgtaccagcagggccagaaccagctctataacgagctgaatctaggacgaagagaggagtacgatgttttggacaagagacgtggccgggaccctgagatggggggaaagccgagaaggaagaaccctcaggaaggcctgtacaatgaactgcagaaagataagatggcggaggcctacagtgagattgggatgaaaggcgagcgccggaggggcaaggggcacgatggcctttaccagggtctcagtacagccaccaaggacacctacgacgcccttcacatgcaggccctgccccctcgc

SEQ ID NO: 5554 - DNA, 1875 bp, synthetic construct
  source 1..1875: mol_type = other DNA
atggccttaccagtgaccgccttgctcctgccgctggccttgctgctccacgccgccaggccggacatccagttgacccagtcccccagctcactcagcgccagtgtgggggaccgggtgaccattacctgtaaagccagtcagagtgtggactatgacggggatagcttcctgaattggtatcagcagaagcctggcaaagccccaaagctgctgatctacgctgcatctaatctggagtcaggcgtgccttccaggttctccggtagtgggtctgggaccgatttcacattgaccatttcatccctccaacccgaggatttcgctacatattactgtcagcagtccaatgaggaccctctcacctttggccagggcaccaaagttgaaattaagagactcgagatccagaaccctgatcctgccgtgtaccagctgcgggatagcaagagcagcgacaagagcgtgtgtctgttcaccgacttcgacagccagaccaacgtgtcccagagcaaggactccgacgtgtacatcaccgataagtgcgtgctggacatgcggagcatggacttcaagagcaactccgccgtggcctggtccaacaagtccgatttcgcctgcgccaacgccttcaacaacagcattatccccgaggacacattcttcccaagcagcgacgtgccctgcgacgtgaagctggtggaaaagagcttcgagacagacaccaacctgaacttccagaacctgagcgtgatcggcttcagaatcctgctgctgaaagtggccggctttaacctgctgatgaccctgcggctgtggtccagccgcgccaagagaagcggatctggcgtgaagcagaccctgaatttcgacctgctgaagctggctggcgacgtggaatccaacccaggccctactagtatggactggatttggcgcatccttttccttgtcggcgctgctaccggcgcgcattccttcgaagtccaacttgtggagtctggagggggcctggtgcagcccggcggctctctcagactgtcttgtgcggcaagcggctacaccttcacctcttactggatagaatgggtgaggcaggcacctggaaagggactggagtggattggagagattctgccaggagggggagatacaaattacaatgaaatcttcaaggggcgggccaccttttcagcggataccagcaagaatacagcttacctgcagatgaatagcctccgggcagaagataccgctgtttattattgcacgagacgggtgccaataagactggactattgggggcaagggactcttgtcaccgtcagttcaacgcgtgaggacctgaagaacgtgttcccacctgaggtggccgtgttcgagcctagcaaggccgagatcgcccacacccagaaagccaccctcgtgtgcctggctaccggcttctaccccgaccatgtggaactgtcttggtgggtcaacggcaaagaggtgcacagcggcgtgtgtaccgacccccagccactgaaagaacagcccgccctgaacgacagccggtactgcctgagcagcagactgagagtgtccgccaccttctggcagaacccccggaaccacttcagatgccaggtgcagttctacggcctgagcgagaacgacgagtggacccaggacagagccaagcccgtgacccagatcgtgtctgccgaagcctggggcagagccgattgcggcatcaccagcgccagctaccaccagggcgtgctgagcgccaccatcctgtacgagatcctgctgggcaaggccaccctgtacgccgtgctggtgtctgccctggtgctgatggctatggtcaagcggaaggacagccgggga

SEQ ID NO: 5555 - DNA, 1863 bp, synthetic construct
  source 1..1863: mol_type = other DNA
atggccttaccagtgaccgccttgctcctgccgctggccttgctgctccacgccgccaggccggacatccagttgacccagtcccccagctcactcagcgccagtgtgggggaccgggtgaccattacctgtaaagccagtcagagtgtggactatgacggggatagcttcctgaattggtatcagcagaagcctggcaaagccccaaagctgctgatctacgctgcatctaatctggagtcaggcgtgccttccaggttctccggtagtgggtctgggaccgatttcacattgaccatttcatccctccaacccgaggatttcgctacatattactgtcagcagtccaatgaggaccctctcacctttggccagggcaccaaagttgaaattaagagactcgaggacctgaagaacgtgttcccacctgaggtggccgtgttcgagcctagcaaggccgagatcgcccacacccagaaagccaccctcgtgtgcctggctaccggcttctaccccgaccatgtggaactgtcttggtgggtcaacggcaaagaggtgcacagcggcgtgtgtaccgacccccagccactgaaagaacagcccgccctgaacgacagccggtactgcctgagcagcagactgagagtgtccgccaccttctggcagaacccccggaaccacttcagatgccaggtgcagttctacggcctgagcgagaacgacgagtggacccaggacagagccaagcccgtgacccagatcgtgtctgccgaagcctggggcagagccgattgcggcatcaccagcgccagctaccaccagggcgtgctgagcgccaccatcctgtacgagatcctgctgggcaaggccaccctgtacgccgtgctggtgtctgccctggtgctgatggctatggtcaagcggaaggacagccggggaagggccaagcgatctggatctggagcaacaaacttctcactactcaaacaagcaggtgacgtggaggagaatcccgggcctactagtatggactggatttggcgcatccttttccttgtcggcgctgctaccggcgcgcattccttcgaagtccaacttgtggagtctggagggggcctggtgcagcccggcggctctctcagactgtcttgtgcggcaagcggctacaccttcacctcttactggatagaatgggtgaggcaggcacctggaaagggactggagtggattggagagattctgccaggagggggagatacaaattacaatgaaatcttcaaggggcgggccaccttttcagcggataccagcaagaatacagcttacctgcagatgaatagcctccgggcagaagataccgctgtttattattgcacgagacgggtgccaataagactggactattgggggcaagggactcttgtcaccgtcagttcaacgcgtatccagaaccctgatcctgccgtgtaccagctgcgggatagcaagagcagcgacaagagcgtgtgtctgttcaccgacttcgacagccagaccaacgtgtcccagagcaaggactccgacgtgtacatcaccgataagtgcgtgctggacatgcggagcatggacttcaagagcaactccgccgtggcctggtccaacaagtccgatttcgcctgcgccaacgccttcaacaacagcattatccccgaggacacattcttcccaagcagcgacgtgccctgcgacgtgaagctggtggaaaagagcttcgagacagacaccaacctgaacttccagaacctgagcgtgatcggcttcagaatcctgctgctgaaagtggccggctttaacctgctgatgaccctgcggctgtggtccagc

SEQ ID NO: 5556 - DNA, 1863 bp, synthetic construct; identical to SEQ ID NO: 4740
  source 1..1863: mol_type = other DNA

SEQ ID NO: 5557 - DNA, 1875 bp, synthetic construct
  source 1..1875: mol_type = other DNA
atggccttaccagtgaccgccttgctcctgccgctggccttgctgctccacgccgccaggccggacatccagttgacccagtcccccagctcactcagcgccagtgtgggggaccgggtgaccattacctgtaaagccagtcagagtgtggactatgacggggatagcttcctgaattggtatcagcagaagcctggcaaagccccaaagctgctgatctacgctgcatctaatctggagtcaggcgtgccttccaggttctccggtagtgggtctgggaccgatttcacattgaccatttcatccctccaacccgaggatttcgctacatattactgtcagcagtccaatgaggaccctctcacctttggccagggcaccaaagttgaaattaagagactcgagatccagaaccctgatcctgccgtgtaccagctgcgggatagcaagagcagcgacaagagcgtgtgtctgttcaccgacttcgacagccagaccaacgtgtcccagagcaaggactccgacgtgtacatcaccgataagtgcgtgctggacatgcggagcatggacttcaagagcaactccgccgtggcctggtccaacaagtccgatttcgcctgcgccaacgccttcaacaacagcattatccccgaggacacattcttcccaagccccgagagcagctgcgacgtgaagctggtggaaaagagcttcgagacagacaccaacctgaacttccagaacctgagcgtgatcggcttcagaatcctgctgctgaaagtggccggctttaacctgctgatgaccctgcggctgtggtccagccgcgccaagagaagcggatctggcgtgaagcagaccctgaatttcgacctgctgaagctggctggcgacgtggaatccaacccaggccctactagtatggactggatttggcgcatccttttccttgtcggcgctgctaccggcgcgcattccttcgaagtccaacttgtggagtctggagggggcctggtgcagcccggcggctctctcagactgtcttgtgcggcaagcggctacaccttcacctcttactggatagaatgggtgaggcaggcacctggaaagggactggagtggattggagagattctgccaggagggggagatacaaattacaatgaaatcttcaaggggcgggccaccttttcagcggataccagcaagaatacagcttacctgcagatgaatagcctccgggcagaagataccgctgtttattattgcacgagacgggtgccaataagactggactattgggggcaagggactcttgtcaccgtcagttcaacgcgtgaggacctgaagaacgtgttcccacctgaggtggccgtgttcgagcctagcgaggccgagatcagccacacccagaaagccaccctcgtgtgcctggctaccggcttctaccccgaccatgtggaactgtcttggtgggtcaacggcaaagaggtgcacagcggcgtgtgtaccgacccccagccactgaaagaacagcccgccctgaacgacagccggtactgcctgagcagcagactgagagtgtccgccaccttctggcagaacccccggaaccacttcagatgccaggtgcagttctacggcctgagcgagaacgacgagtggacccaggacagagccaagcccgtgacccagatcgtgtctgccgaagcctggggcagagccgattgcggctttaccagcgagagctaccagcagggcgtgctgagcgccaccatcctgtacgagatcctgctgggcaaggccaccctgtacgccgtgctggtgtctgccctggtgctgatggctatggtcaagcggaaggacagccgggga

SEQ ID NO: 5558 - DNA, 1914 bp, synthetic construct
  source 1..1914: mol_type = other DNA
atggccttaccagtgaccgccttgctcctgccgctggccttgctgctccacgccgccaggccgctcgaggaggacctgaagaacgtgttcccacctgaggtggccgtgttcgagcctagcaaggccgagatcgcccacacccagaaagccaccctcgtgtgcctggctaccggcttctaccccgaccatgtggaactgtcttggtgggtcaacggcaaagaggtgcacagcggcgtgtgtaccgacccccagccactgaaagaacagcccgccctgaacgacagccggtactgcctgagcagcagactgagagtgtccgccaccttctggcagaacccccggaaccacttcagatgccaggtgcagttctacggcctgagcgagaacgacgagtggacccaggacagagccaagcccgtgacccagatcgtgtctgccgaagcctggggcagagccgattgcggcatcaccagcgccagctaccaccagggcgtgctgagcgccaccatcctgtacgagatcctgctgggcaaggccaccctgtacgccgtgctggtgtctgccctggtgctgatggctatggtcaagcggaaggacagccggggaagggccaagcgatctggatctggagcaacaaacttctcactactcaaacaagcaggtgacgtggaggagaatcccgggcctactagcatggccttaccagtgaccgccttgctcctgccgctggccttgctgctccacgccgccaggccggacatccagttgacccagtcccccagctcactcagcgccagtgtgggggaccgggtgaccattacctgtaaagccagtcagagtgtggactatgacggggatagcttcctgaattggtatcagcagaagcctggcaaagccccaaagctgctgatctacgctgcatctaatctggagtcaggcgtgccttccaggttctccggtagtgggtctgggaccgatttcacattgaccatttcatccctccaacccgaggatttcgctacatattactgtcagcagtccaatgaggaccctctcacctttggccagggcaccaaagttgaaattaagagaggcggaggcggaagtggaggcggaggatctggcggcggaggctctgaagtccaacttgtggagtctggagggggcctggtgcagcccggcggctctctcagactgtcttgtgcggcaagcggctacaccttcacctcttactggatagaatgggtgaggcaggcacctggaaagggactggagtggattggagagattctgccaggagggggagatacaaattacaatgaaatcttcaaggggcgggccaccttttcagcggataccagcaagaatacagcttacctgcagatgaatagcctccgggcagaagataccgctgtttattattgcacgagacgggtgccaataagactggactattgggggcaagggactcttgtcaccgtcagttcaacgcgtatccagaaccctgatcctgccgtgtaccagctgcgggatagcaagagcagcgacaagagcgtgtgtctgttcaccgacttcgacagccagaccaacgtgtcccagagcaaggactccgacgtgtacatcaccgataagtgcgtgctggacatgcggagcatggacttcaagagcaactccgccgtggcctggtccaacaagtccgatttcgcctgcgccaacgccttcaacaacagcattatccccgaggacacattcttcccaagcagcgacgtgccctgcgacgtgaagctggtggaaaagagcttcgagacagacaccaacctgaacttccagaacctgagcgtgatcggcttcagaatcctgctgctgaaagtggccggctttaacctgctgatgaccctgcggctgtggtccagc

SEQ ID NO: 5559 - DNA, 1935 bp, synthetic construct
  source 1..1935: mol_type = other DNA
atggccttaccagtgaccgccttgctcctgccgctggccttgctgctccacgccgccaggccgctcgagggctccggcgatcgccctgatcctgccgtgtaccagctgcgggatagcaagagcagcgacaagagcgtgtgtctgttcaccgacttcgacagccagaccaacgtgtcccagagcaaggactccgacgtgtacatcaccgataagtgcgtgctggacatgcggagcatggacttcaagagcaactccgccgtggcctggtccaacaagtccgatttcgcctgcgccaacgccttcaacaacagcattatccccgaggacacattcttcccaagccccgagagcagctgcgacgtgaagctggtggaaaagagcttcgagacagacaccaacctgaacttccagaacctgagcgtgatcggcttcagaatcctgctgctgaaagtggccggctttaacctgctgatgaccctgcggctgtggtccagctctagtcgcgccaagagaagcggatctggcgtgaagcagaccctgaatttcgacctgctgaagctggctggcgacgtggaatccaacccaggccccactagcatggccttaccagtgaccgccttgctcctgccgctggccttgctgctccacgccgccaggccggacatccagttgacccagtcccccagctcactcagcgccagtgtgggggaccgggtgaccattacctgtaaagccagtcagagtgtggactatgacggggatagcttcctgaattggtatcagcagaagcctggcaaagccccaaagctgctgatctacgctgcatctaatctggagtcaggcgtgccttccaggttctccggtagtgggtctgggaccgatttcacattgaccatttcatccctccaacccgaggatttcgctacatattactgtcagcagtccaatgaggaccctctcacctttggccagggcaccaaagttgaaattaagagaggcggaggcggaagtggaggcggaggatctggcggcggaggctctgaagtccaacttgtggagtctggagggggcctggtgcagcccggcggctctctcagactgtcttgtgcggcaagcggctacaccttcacctcttactggatagaatgggtgaggcaggcacctggaaagggactggagtggattggagagattctgccaggagggggagatacaaattacaatgaaatcttcaaggggcgggccaccttttcagcggataccagcaagaatacagcttacctgcagatgaatagcctccgggcagaagataccgctgtttattattgcacgagacgggtgccaataagactggactattgggggcaagggactcttgtcaccgtcagttcaacgcgtgaggacctgaagaacgtgttcccacctgaggtggccgtgttcgagcctagcgaggccgagatcagccacacccagaaagccaccctcgtgtgcctggctaccggcttctaccccgaccatgtggaactgtcttggtgggtcaacggcaaagaggtgcacagcggcgtgtgtaccgacccccagccactgaaagaacagcccgccctgaacgacagccggtactgcctgagcagcagactgagagtgtccgccaccttctggcagaacccccggaaccacttcagatgccaggtgcagttctacggcctgagcgagaacgacgagtggacccaggacagagccaagcccgtgacccagatcgtgtctgccgaagcctggggcagagccgattgcggctttaccagcgagagctaccagcagggcgtgctgagcgccaccatcctgtacgagatcctgctgggcaaggccaccctgtacgccgtgctggtgtctgccctggtgctgatggctatggtcaagcggaaggacagccgggga

SEQ ID NO: 5560 - DNA, 1863 bp, synthetic construct
  source 1..1863: mol_type = other DNA
atggccttaccagtgaccgccttgctcctgccgctggccttgctgctccacgccgccaggccggacatccagttgacccagtcccccagctcactcagcgccagtgtgggggaccgggtgaccattacctgtaaagccagtcagagtgtggactatgacggggatagcttcctgaattggtatcagcagaagcctggcaaagccccaaagctgctgatctacgctgcatctaatctggagtcaggcgtgccttccaggttctccggtagtgggtctgggaccgatttcacattgaccatttcatccctccaacccgaggatttcgctacatattactgtcagcagtccaatgaggaccctctcacctttggccagggcaccaaagttgaaattaagagactcgaggacctgaagaacgtgttcccacctgaggtggccgtgttcgagcctagcgaggccgagatcagccacacccagaaagccaccctcgtgtgcctggctaccggcttctaccccgaccatgtggaactgtcttggtgggtcaacggcaaagaggtgcacagcggcgtgtctaccgacccccagccactgaaagaacagcccgccctgaacgacagccggtactgcctgagcagcagactgagagtgtccgccaccttctggcagaacccccggaaccacttcagatgccaggtgcagttctacggcctgagcgagaacgacgagtggacccaggacagagccaagcccgtgacccagatcgtgtctgccgaagcctggggcagagccgattgcggctttaccagcgagagctaccagcagggcgtgctgagcgccaccatcctgtacgagatcctgctgggcaaggccaccctgtacgccgtgctggtgtctgccctggtgctgatggctatggtcaagcggaaggacagccggggaagggccaagcgatctggatctggagcaacaaacttctcactactcaaacaagcaggtgacgtggaggagaatcccgggcctactagtatggactggatttggcgcatccttttccttgtcggcgctgctaccggcgcgcattccttcgaagtccaacttgtggagtctggagggggcctggtgcagcccggcggctctctcagactgtcttgtgcggcaagcggctacaccttcacctcttactggatagaatgggtgaggcaggcacctggaaagggactggagtggattggagagattctgccaggagggggagatacaaattacaatgaaatcttcaaggggcgggccaccttttcagcggataccagcaagaatacagcttacctgcagatgaatagcctccgggcagaagataccgctgtttattattgcacgagacgggtgccaataagactggactattgggggcaagggactcttgtcaccgtcagttcaacgcgtatccagaaccctgatcctgccgtgtaccagctgcgggatagcaagagcagcgacaagagcgtgtgtctgttcaccgacttcgacagccagaccaacgtgtcccagagcaaggactccgacgtgtacatcaccgataagaccgtgctggacatgcggagcatggacttcaagagcaactccgccgtggcctggtccaacaagtccgatttcgcctgcgccaacgccttcaacaacagcattatccccgaggacacattcttcccaagccccgagagcagctgcgacgtgaagctggtggaaaagagcttcgagacagacaccaacctgaacttccagaacctgagcgtgatcggcttcagaatcctgctgctgaaagtggccggctttaacctgctgatgaccctgcggctgtggtccagc

SEQ ID NO: 5561 - DNA, 1887 bp, synthetic construct
  source 1..1887: mol_type = other DNA
atggccttaccagtgaccgccttgctcctgccgctggccttgctgctccacgccgccaggccggacatccagttgacccagtcccccagctcactcagcgccagtgtgggggaccgggtgaccattacctgtaaagccagtcagagtgtggactatgacggggatagcttcctgaattggtatcagcagaagcctggcaaagccccaaagctgctgatctacgctgcatctaatctggagtcaggcgtgccttccaggttctccggtagtgggtctgggaccgatttcacattgaccatttcatccctccaacccgaggatttcgctacatattactgtcagcagtccaatgaggaccctctcacctttggccagggcaccaaagttgaaattaagagactcgaggacaagcagctggacgccgacgtgtcccccaagcctaccatcttcctgccctctatcgccgagacaaagctccagaaggccggcacctacctgtgcctgctggaaaagttcttcccagatgtgattaagatccactggcaggaaaagaagtccaacaccatcctgggcagccaggaaggcaacaccatgaagaccaacgacacctacatgaagttcagctggctgaccgtgcccgagaagtccctggacaaagaacacagatgcatcgtgcggcacgaaaacaacaagaacggcgtggaccaggaaatcatcttcccacccatcaagaccgatgtgattacaatggaccccaaggacaactgctccaaggacgccaacgataccctgctgctccagctgaccaacaccagcgcctactacatgtacttgttgctgctgctgaagtccgtggtgtacttcgccatcatcacatgctgcctgctgcggagaaccgccttctgctgcaacggcgagaagtctagggccaagcgatctggatctggagcaacaaacttctcactactcaaacaagcaggtgacgtggaggagaatcccgggcctactagtatggactggatttggcgcatccttttccttgtcggcgctgctaccggcgcgcattccttcgaagtccaacttgtggagtctggagggggcctggtgcagcccggcggctctctcagactgtcttgtgcggcaagcggctacaccttcacctcttactggatagaatgggtgaggcaggcacctggaaagggactggagtggattggagagattctgccaggagggggagatacaaattacaatgaaatcttcaaggggcgggccaccttttcagcggataccagcaagaatacagcttacctgcagatgaatagcctccgggcagaagataccgctgtttattattgcacgagacgggtgccaataagactggactattgggggcaagggactcttgtcaccgtcagttcaacgcgtagccagcctcacaccaagcccagcgtgttcgtgatgaagaacggcaccaacgtggcctgcctcgtgaaagagttctaccccaaggacatcaggatcaacctggtgtccagcaagaagatcaccgagttcgaccccgccatcgtgatctcccccagcggcaagtacaacgccgtgaagctggggaagtacgaggacagcaacagcgtgacctgctccgtgcagcacgacaacaagaccgtgcacagcaccgactttgaagtgaaaaccgactccaccgaccacgtgaagcccaaagagacagagaacaccaagcagcccagcaagagctgccacaagcccaaggccatcgtgcacaccgagaaagtgaacatgatgagcctgaccgtgctgggcctgcggatgctgttcgccaaaaccgtggccgtgaacttcctgctgaccgccaagctgttcttcctc

SEQ ID NO: 5562 - DNA, 1887 bp, synthetic construct
  source 1..1887: mol_type = other DNA
atggccttaccagtgaccgccttgctcctgccgctggccttgctgctccacgccgccaggccggacatccagttgacccagtcccccagctcactcagcgccagtgtgggggaccgggtgaccattacctgtaaagccagtcagagtgtggactatgacggggatagcttcctgaattggtatcagcagaagcctggcaaagccccaaagctgctgatctacgctgcatctaatctggagtcaggcgtgccttccaggttctccggtagtgggtctgggaccgatttcacattgaccatttcatccctccaacccgaggatttcgctacatattactgtcagcagtccaatgaggaccctctcacctttggccagggcaccaaagttgaaattaagagactcgagagccagcctcacaccaagcccagcgtgttcgtgatgaagaacggcaccaacgtggcctgcctcgtgaaagagttctaccccaaggacatcaggatcaacctggtgtccagcaagaagatcaccgagttcgaccccgccatcgtgatctcccccagcggcaagtacaacgccgtgaagctggggaagtacgaggacagcaacagcgtgacctgctccgtgcagcacgacaacaagaccgtgcacagcaccgactttgaagtgaaaaccgactccaccgaccacgtgaagcccaaagagacagagaacaccaagcagcccagcaagagctgccacaagcccaaggccatcgtgcacaccgagaaagtgaacatgatgagcctgaccgtgctgggcctgcggatgctgttcgccaaaaccgtggccgtgaacttcctgctgaccgccaagctgttcttcctcagggccaagcgatctggatctggagcaacaaacttctcactactcaaacaagcaggtgacgtggaggagaatcccgggcctactagtatggactggatttggcgcatccttttccttgtcggcgctgctaccggcgcgcattccttcgaagtccaacttgtggagtctggagggggcctggtgcagcccggcggctctctcagactgtcttgtgcggcaagcggctacaccttcacctcttactggatagaatgggtgaggcaggcacctggaaagggactggagtggattggagagattctgccaggagggggagatacaaattacaatgaaatcttcaaggggcgggccaccttttcagcggataccagcaagaatacagcttacctgcagatgaatagcctccgggcagaagataccgctgtttattattgcacgagacgggtgccaataagactggactattgggggcaagggactcttgtcaccgtcagttcaacgcgtgacaagcagctggacgccgacgtgtcccccaagcctaccatcttcctgccctctatcgccgagacaaagctccagaaggccggcacctacctgtgcctgctggaaaagttcttcccagatgtgattaagatccactggcaggaaaagaagtccaacaccatcctgggcagccaggaaggcaacaccatgaagaccaacgacacctacatgaagttcagctggctgaccgtgcccgagaagtccctggacaaagaacacagatgcatcgtgcggcacgaaaacaacaagaacggcgtggaccaggaaatcatcttcccacccatcaagaccgatgtgattacaatggaccccaaggacaactgctccaaggacgccaacgataccctgctgctccagctgaccaacaccagcgcctactacatgtacttgttgctgctgctgaagtccgtggtgtacttcgccatcatcacatgctgcctgctgcggagaaccgccttctgctgcaacggcgagaagtct

SEQ ID NO: 5563 - DNA, 1935 bp, synthetic construct
  source 1..1935: mol_type = other DNA
atggccttaccagtgaccgccttgctcctgccgctggccttgctgctccacgccgccaggccgctcgaggacaagcagctggacgccgacgtgtcccccaagcctaccatcttcctgccctctatcgccgagacaaagctccagaaggccggcacctacctgtgcctgctggaaaagttcttcccagatgtgattaagatccactggcaggaaaagaagtccaacaccatcctgggcagccaggaaggcaacaccatgaagaccaacgacacctacatgaagttcagctggctgaccgtgcccgagaagtccctggacaaagaacacagatgcatcgtgcggcacgaaaacaacaagaacggcgtggaccaggaaatcatcttcccacccatcaagaccgatgtgattacaatggaccccaaggacaactgctccaaggacgccaacgataccctgctgctccagctgaccaacaccagcgcctactacatgtacttgttgctgctgctgaagtccgtggtgtacttcgccatcatcacatgctgcctgctgcggagaaccgccttctgctgcaacggcgagaagtctagggccaagcgatctggatctggagcaacaaacttctcactactcaaacaagcaggtgacgtggaggagaatcccgggcctactagcatggccttaccagtgaccgccttgctcctgccgctggccttgctgctccacgccgccaggccggacatccagttgacccagtcccccagctcactcagcgccagtgtgggggaccgggtgaccattacctgtaaagccagtcagagtgtggactatgacggggatagcttcctgaattggtatcagcagaagcctggcaaagccccaaagctgctgatctacgctgcatctaatctggagtcaggcgtgccttccaggttctccggtagtgggtctgggaccgatttcacattgaccatttcatccctccaacccgaggatttcgctacatattactgtcagcagtccaatgaggaccctctcacctttggccagggcaccaaagttgaaattaagagaggcggaggcggaagtggaggcggaggatctggcggcggaggctctgaagtccaacttgtggagtctggagggggcctggtgcagcccggcggctctctcagactgtcttgtgcggcaagcggctacaccttcacctcttactggatagaatgggtgaggcaggcacctggaaagggactggagtggattggagagattctgccaggagggggagatacaaattacaatgaaatcttcaaggggcgggccaccttttcagcggataccagcaagaatacagcttacctgcagatgaatagcctccgggcagaagataccgctgtttattattgcacgagacgggtgccaataagactggactattgggggcaagggactcttgtcaccgtcagttcaacgcgtagccagcctcacaccaagcccagcgtgttcgtgatgaagaacggcaccaacgtggcctgcctcgtgaaagagttctaccccaaggacatcaggatcaacctggtgtccagcaagaagatcaccgagttcgaccccgccatcgtgatctcccccagcggcaagtacaacgccgtgaagctggggaagtacgaggacagcaacagcgtgacctgctccgtgcagcacgacaacaagaccgtgcacagcaccgactttgaagtgaaaaccgactccaccgaccacgtgaagcccaaagagacagagaacaccaagcagcccagcaagagctgccacaagcccaaggccatcgtgcacaccgagaaagtgaacatgatgagcctgaccgtgctgggcctgcggatgctgttcgccaaaaccgtggccgtgaacttcctgctgaccgccaagctgttcttcctc

SEQ ID NO: 5564 - DNA, 2394 bp, synthetic construct
  source 1..2394: mol_type = other DNA
atggccttaccagtgaccgccttgctcctgccgctggccttgctgctccacgccgccaggccggacatccagttgacccagtcccccagctcactcagcgccagtgtgggggaccgggtgaccattacctgtaaagccagtcagagtgtggactatgacggggatagcttcctgaattggtatcagcagaagcctggcaaagccccaaagctgctgatctacgctgcatctaatctggagtcaggcgtgccttccaggttctccggtagtgggtctgggaccgatttcacattgaccatttcatccctccaacccgaggatttcgctacatattactgtcagcagtccaatgaggaccctctcacctttggccagggcaccaaagttgaaattaagagaggacagcctaaggccaatcctaccgtgacactgttccctccaagcagcgaagaactccaggccaacaaggccacacttgtgtgcctgatctccgacttctaccctggggctgtgacagtggcttggaaggccgatggatctcctgtgaaagccggcgtggaaaccaccaagccatccaagcagagcaacaacaaatacgccgccagctcctacctgagcctgacacctgagcagtggaagtcccacagatcctacagctgccaagtgacccacgaaggcagcaccgtggaaaagacagtggcccctacagagtgcagcggatcccagagcttcggcctgctggaccccaagctgtgctacctgctggatggcatcctgttcatctacggcgtgatcctgaccgccctgttcctgagagtgaagttcagcagaagcgccgacgcccctgcctaccagcagggacagaaccaactgtacaacgagctgaacctgggcagacgggaagagtacgacgtgctggacaagcggagaggcagggaccctgagatgggcggaaagccccagcggagaaagaacccccaggaaggactgtataacgaactccagaaagacaagatggccgaagcctacagcgagatcggcatgaagggcgagcggagaagaggcaagggccacgatggcctgtaccagggcctgagcaccgccaccaaggacacctatgacgccctgcacatgcaggccctgcctccaagaagggccaagcgatctggatctggagcaacaaacttctcactactcaaacaagcaggtgacgtggaggagaatcccgggcctactagtatggactggatttggcgcatccttttccttgtcggcgctgctaccggcgcgcattccttcgaagtccaacttgtggagtctggagggggcctggtgcagcccggcggctctctcagactgtcttgtgcggcaagcggctacaccttcacctcttactggatagaatgggtgaggcaggcacctggaaagggactggagtggattggagagattctgccaggagggggagatacaaattacaatgaaatcttcaaggggcgggccaccttttcagcggataccagcaagaatacagcttacctgcagatgaatagcctccgggcagaagataccgctgtttattattgcacgagacgggtgccaataagactggactattgggggcaagggactcttgtcaccgtcagttcagcctctacaaagggaccctccgtgtttcctctggctcccagcagcaagtctacaagcggaggaacagccgctctgggctgcctggtcaaggattactttcccgagcctgtgaccgtgtcctggaatagcggagcactgacaagcggcgtgcacacctttccagccgtgctgcaaagcagcggcctgtactctctgagcagcgtggtcacagtgcctagctctagcctgggcacccagacctacatctgcaatgtgaaccacaagcctagcaacaccaaggtggacaagagagtggaacccaagagctgtggtacccagagttttgggttgttggaccctaaattgtgctatctgttggacggaatcctgttcatttacggagtgatcctgaccgcattgttcctgcgggttaagttttccagatccgcagacgcacccgcttaccaacaagggcagaaccaactctacaatgaacttaatttggggcggagggaagagtacgacgttctggacaaaaggaggggacgagatcccgagatgggcggaaagcctcagcgaaggaagaatccgcaagaggggctttataacgaactccagaaagataaaatggcagaagcctatagtgagattgggatgaagggagaaaggaggaggggtaaaggtcacgatgggttgtaccaaggattgagcacagccactaaagatacctatgatgcgctccacatgcaggccctgccgccaaga

SEQ ID NO: 5565 - DNA, 2451 bp, synthetic construct
  source 1..2451: mol_type = other DNA
atggccttaccagtgaccgccttgctcctgccgctggccttgctgctccacgccgccaggccggacatccagttgacccagtcccccagctcactcagcgccagtgtgggggaccgggtgaccattacctgtaaagccagtcagagtgtggactatgacggggatagcttcctgaattggtatcagcagaagcctggcaaagccccaaagctgctgatctacgctgcatctaatctggagtcaggcgtgccttccaggttctccggtagtgggtctgggaccgatttcacattgaccatttcatccctccaacccgaggatttcgctacatattactgtcagcagtccaatgaggaccctctcacctttggccagggcaccaaagttgaaattaagagactcgaggacctgaagaacgtgttcccacctgaggtggccgtgttcgagcctagcgaggccgagatcagccacacccagaaagccaccctcgtgtgcctggctaccggcttctaccccgaccatgtggaactgtcttggtgggtcaacggcaaagaggtgcacagcggcgtgtctaccgacccccagccactgaaagaacagcccgccctgaacgacagccggtactgcctgagcagcagactgagagtgtccgccaccttctggcagaacccccggaaccacttcagatgccaggtgcagttctacggcctgagcgagaacgacgagtggacccaggacagagccaagcccgtgacccagatcgtgtctgccgaagcctggggcagagccgattgcggatcccagagcttcggcctgctggaccccaagctgtgctacctgctggatggcatcctgttcatctacggcgtgatcctgaccgccctgttcctgagagtgaagttcagcagaagcgccgacgcccctgcctaccagcagggacagaaccaactgtacaacgagctgaacctgggcagacgggaagagtacgacgtgctggacaagcggagaggcagggaccctgagatgggcggaaagccccagcggagaaagaacccccaggaaggactgtataacgaactccagaaagacaagatggccgaagcctacagcgagatcggcatgaagggcgagcggagaagaggcaagggccacgatggcctgtaccagggcctgagcaccgccaccaaggacacctatgacgccctgcacatgcaggccctgcctccaagaagggccaagcgatctggatctggagcaacaaacttctcactactcaaacaagcaggtgacgtggaggagaatcccgggcctactagtatggactggatttggcgcatccttttccttgtcggcgctgctaccggcgcgcattccttcgaagtccaacttgtggagtctggagggggcctggtgcagcccggcggctctctcagactgtcttgtgcggcaagcggctacaccttcacctcttactggatagaatgggtgaggcaggcacctggaaagggactggagtggattggagagattctgccaggagggggagatacaaattacaatgaaatcttcaaggggcgggccaccttttcagcggataccagcaagaatacagcttacctgcagatgaatagcctccgggcagaagataccgctgtttattattgcacgagacgggtgccaataagactggactattgggggcaagggactcttgtcaccgtcagttcaacgcgtatccagaaccctgatcctgccgtgtaccagctgcgggatagcaagagcagcgacaagagcgtgtgtctgttcaccgacttcgacagccagaccaacgtgtcccagagcaaggactccgacgtgtacatcaccgataagaccgtgctggacatgcggagcatggacttcaagagcaactccgccgtggcctggtccaacaagtccgatttcgcctgcgccaacgccttcaacaacagcattatccccgaggacacattcttcccaagccccgagagcagctgcggtacccagagttttgggttgttggaccctaaattgtgctatctgttggacggaatcctgttcatttacggagtgatcctgaccgcattgttcctgcgggttaagttttccagatccgcagacgcacccgcttaccaacaagggcagaaccaactctacaatgaacttaatttggggcggagggaagagtacgacgttctggacaaaaggaggggacgagatcccgagatgggcggaaagcctcagcgaaggaagaatccgcaagaggggctttataacgaactccagaaagataaaatggcagaagcctatagtgagattgggatgaagggagaaaggaggaggggtaaaggtcacgatgggttgtaccaaggattgagcacagccactaaagatacctatgatgcgctccacatgcaggccctgccgccaaga

SEQ ID NO: 5566 - DNA, 2577 bp, synthetic construct
  source 1..2577: mol_type = other DNA
atggccttaccagtgaccgccttgctcctgccgctggccttgctgctccacgccgccaggccggacatccagttgacccagtcccccagctcactcagcgccagtgtgggggaccgggtgaccattacctgtaaagccagtcagagtgtggactatgacggggatagcttcctgaattggtatcagcagaagcctggcaaagccccaaagctgctgatctacgctgcatctaatctggagtcaggcgtgccttccaggttctccggtagtgggtctgggaccgatttcacattgaccatttcatccctccaacccgaggatttcgctacatattactgtcagcagtccaatgaggaccctctcacctttggccagggcaccaaagttgaaattaagagactcgaggaggacctgaagaacgtgttcccacctgaggtggccgtgttcgagcctagcgaggccgagatcagccacacccagaaagccaccctcgtgtgcctggctaccggcttctaccccgaccatgtggaactgtcttggtgggtcaacggcaaagaggtgcacagcggcgtgtctaccgacccccagccactgaaagaacagcccgccctgaacgacagccggtactgcctgagcagcagactgagagtgtccgccaccttctggcagaacccccggaaccacttcagatgccaggtgcagttctacggcctgagcgagaacgacgagtggacccaggacagagccaagcccgtgacccagatcgtgtctgccgaagcctggggcagagccgattgcggatcccagagcttcggcctgctggaccccaagctgtgctacctgctggatggcatcctgttcatctacggcgtgatcctgaccgccctgttcctgagagtgaagttcagcagaagcgccgacgcccctgcctaccagcagggacagaaccaactgtacaacgagctgaacctgggcagacgggaagagtacgacgtgctggacaagcggagaggcagggaccctgagatgggcggaaagccccagcggagaaagaacccccaggaaggactgtataacgaactccagaaagacaagatggccgaagcctacagcgagatcggcatgaagggcgagcggagaagaggcaagggccacgatggcctgtaccagggcctgagcaccgccaccaaggacacctatgacgccctgcacatgcaggccctgcctccaagaagggccaagcgatctggatctggagcaacaaacttctcactactcaaacaagcaggtgacgtggaggagaatcccgggcctactagtatggactggatttggcgcatccttttccttgtcggcgctgctaccggcgcgcattccttcgaagtccaacttgtggagtctggagggggcctggtgcagcccggcggctctctcagactgtcttgtgcggcaagcggctacaccttcacctcttactggatagaatgggtgaggcaggcacctggaaagggactggagtggattggagagattctgccaggagggggagatacaaattacaatgaaatcttcaaggggcgggccaccttttcagcggataccagcaagaatacagcttacctgcagatgaatagcctccgggcagaagataccgctgtttattattgcacgagacgggtgccaataagactggactattgggggcaagggactcttgtcaccgtcagttcaacgcgtatccagaaccctgatcctgccgtgtaccagctgcgggatagcaagagcagcgacaagagcgtgtgtctgttcaccgacttcgacagccagaccaacgtgtcccagagcaaggactccgacgtgtacatcaccgataagaccgtgctggacatgcggagcatggacttcaagagcaactccgccgtggcctggtccaacaagtccgatttcgcctgcgccaacgccttcaacaacagcattatccccgaggacacattcttcccaagccccgagagcagctgcggtacccagagttttgggttgttggaccctaaattgtgctatctgttggacggaatcctgttcatttacggagtgatcctgaccgcattgttcctgaggagcaagcggtcacggctgctccacagcgattacatgaatatgacaccacgaagaccgggtcctactcgcaaacactaccaaccctacgcacctccccgcgactttgcagcgtaccgatctcgggttaagttttccagatccgcagacgcacccgcttaccaacaagggcagaaccaactctacaatgaacttaatttggggcggagggaagagtacgacgttctggacaaaaggaggggacgagatcccgagatgggcggaaagcctcagcgaaggaagaatccgcaagaggggctttataacgaactccagaaagataaaatggcagaagcctatagtgagattgggatgaagggagaaaggaggaggggtaaaggtcacgatgggttgtaccaaggattgagcacagccactaaagatacctatgatgcgctccacatgcaggccctgccgccaaga

SEQ ID NO: 5567 - DNA, 2706 bp, synthetic construct
  source 1..2706: mol_type = other DNA
atggccttaccagtgaccgccttgctcctgccgctggccttgctgctccacgccgccaggccggacatccagttgacccagtcccccagctcactcagcgccagtgtgggggaccgggtgaccattacctgtaaagccagtcagagtgtggactatgacggggatagcttcctgaattggtatcagcagaagcctggcaaagccccaaagctgctgatctacgctgcatctaatctggagtcaggcgtgccttccaggttctccggtagtgggtctgggaccgatttcacattgaccatttcatccctccaacccgaggatttcgctacatattactgtcagcagtccaatgaggaccctctcacctttggccagggcaccaaagttgaaattaagagactcgaggaggacctgaagaacgtgttcccacctgaggtggccgtgttcgagcctagcgaggccgagatcagccacacccagaaagccaccctcgtgtgcctggctaccggcttctaccccgaccatgtggaactgtcttggtgggtcaacggcaaagaggtgcacagcggcgtgtctaccgacccccagccactgaaagaacagcccgccctgaacgacagccggtactgcctgagcagcagactgagagtgtccgccaccttctggcagaacccccggaaccacttcagatgccaggtgcagttctacggcctgagcgagaacgacgagtggacccaggacagagccaagcccgtgacccagatcgtgtctgccgaagcctggggcagagccgattgcggatcccagagcttcggcctgctggaccccaagctgtgctacctgctggatggcatcctgttcatctacggcgtgatcctgaccgccctgttcctgaaacggggcagaaagaaactcctgtatatattcaaacaaccatttatgagaccagtacaaactactcaagaggaagatggctgtagctgccgatttccagaagaagaagaaggaggatgtgaactgagagtgaagttcagcagaagcgccgacgcccctgcctaccagcagggacagaaccaactgtacaacgagctgaacctgggcagacgggaagagtacgacgtgctggacaagcggagaggcagggaccctgagatgggcggaaagccccagcggagaaagaacccccaggaaggactgtataacgaactccagaaagacaagatggccgaagcctacagcgagatcggcatgaagggcgagcggagaagaggcaagggccacgatggcctgtaccagggcctgagcaccgccaccaaggacacctatgacgccctgcacatgcaggccctgcctccaagaagggccaagcgatctggatctggagcaacaaacttctcactactcaaacaagcaggtgacgtggaggagaatcccgggcctactagtatggactggatttggcgcatccttttccttgtcggcgctgctaccggcgcgcattccttcgaagtccaacttgtggagtctggagggggcctggtgcagcccggcggctctctcagactgtcttgtgcggcaagcggctacaccttcacctcttactggatagaatgggtgaggcaggcacctggaaagggactggagtggattggagagattctgccaggagggggagatacaaattacaatgaaatcttcaaggggcgggccaccttttcagcggataccagcaagaatacagcttacctgcagatgaatagcctccgggcagaagataccgctgtttattattgcacgagacgggtgccaataagactggactattgggggcaagggactcttgtcaccgtcagttcaacgcgtatccagaaccctgatcctgccgtgtaccagctgcgggatagcaagagcagcgacaagagcgtgtgtctgttcaccgacttcgacagccagaccaacgtgtcccagagcaaggactccgacgtgtacatcaccgataagaccgtgctggacatgcggagcatggacttcaagagcaactccgccgtggcctggtccaacaagtccgatttcgcctgcgccaacgccttcaacaacagcattatccccgaggacacattcttcccaagccccgagagcagctgcggtacccagagttttgggttgttggaccctaaattgtgctatctgttggacggaatcctgttcatttacggagtgatcctgaccgcattgttcctgaagagaggccggaagaagctgctgtacatcttcaagcagcctttcatgcggcccgtgcagaccacccaggaagaggacggctgctcctgccggttccccgaggaagaagaaggcggctgcgagctgcgggttaagttttccagatccgcagacgcacccgcttaccaacaagggcagaaccaactctacaatgaacttaatttggggcggagggaagagtacgacgttctggacaaaaggaggggacgagatcccgagatgggcggaaagcctcagcgaaggaagaatccgcaagaggggctttataacgaactccagaaagataaaatggcagaagcctatagtgagattgggatgaagggagaaaggaggaggggtaaaggtcacgatgggttgtaccaaggattgagcacagccactaaagatacctatgatgcgctccacatgcaggccctgccgccaaga

SEQ ID NO: 5568 - DNA, 1767 bp, synthetic construct
  source 1..1767: mol_type = other DNA
atggccttaccagtgaccgccttgctcctgccgctggccttgctgctccacgccgccaggccggacatccagttgacccagtcccccagctcactcagcgccagtgtgggggaccgggtgaccattacctgtaaagccagtcagagtgtggactatgacggggatagcttcctgaattggtatcagcagaagcctggcaaagccccaaagctgctgatctacgctgcatctaatctggagtcaggcgtgccttccaggttctccggtagtgggtctgggaccgatttcacattgaccatttcatccctccaacccgaggatttcgctacatattactgtcagcagtccaatgaggaccctctcacctttggccagggcaccaaagttgaaattaagagactcgagcagagcttcggcctgctggaccccaagctgtgctacctgctggatggcatcctgttcatctacggcgtgatcctgaccgccctgttcctgagagtgaagttcagcagaagcgccgacgcccctgcctaccagcagggacagaaccaactgtacaacgagctgaacctgggcagacgggaagagtacgacgtgctggacaagcggagaggcagggaccctgagatgggcggaaagccccagcggagaaagaacccccaggaaggactgtataacgaactccagaaagacaagatggccgaagcctacagcgagatcggcatgaagggcgagcggagaagaggcaagggccacgatggcctgtaccagggcctgagcaccgccaccaaggacacctatgacgccctgcacatgcaggccctgcctccaagaagggccaagcgatctggatctggagcaacaaacttctcactactcaaacaagcaggtgacgtggaggagaatcccgggcctactagtatggactggatttggcgcatccttttccttgtcggcgctgctaccggcgcgcattccttcgaagtccaacttgtggagtctggagggggcctggtgcagcccggcggctctctcagactgtcttgtgcggcaagcggctacaccttcacctcttactggatagaatgggtgaggcaggcacctggaaagggactggagtggattggagagattctgccaggagggggagatacaaattacaatgaaatcttcaaggggcgggccaccttttcagcggataccagcaagaatacagcttacctgcagatgaatagcctccgggcagaagataccgctgtttattattgcacgagacgggtgccaataagactggactattgggggcaagggactcttgtcaccgtcagttcaacgcgtcagagttttgggttgttggaccctaaattgtgctatctgttggacggaatcctgttcatttacggagtgatcctgaccgcattgttcctgcgggttaagttttccagatccgcagacgcacccgcttaccaacaagggcagaaccaactctacaatgaacttaatttggggcggagggaagagtacgacgttctggacaaaaggaggggacgagatcccgagatgggcggaaagcctcagcgaaggaagaatccgcaagaggggctttataacgaactccagaaagataaaatggcagaagcctatagtgagattgggatgaagggagaaaggaggaggggtaaaggtcacgatgggttgtaccaaggattgagcacagccactaaagatacctatgatgcgctccacatgcaggccctgccgccaaga

SEQ ID NO: 5569 - DNA, 1941 bp, synthetic construct
  source 1..1941: mol_type = other DNA
atggccttaccagtgaccgccttgctcctgccgctggccttgctgctccacgccgccaggccggacatccagttgacccagtcccccagctcactcagcgccagtgtgggggaccgggtgaccattacctgtaaagccagtcagagtgtggactatgacggggatagcttcctgaattggtatcagcagaagcctggcaaagccccaaagctgctgatctacgctgcatctaatctggagtcaggcgtgccttccaggttctccggtagtgggtctgggaccgatttcacattgaccatttcatccctccaacccgaggatttcgctacatattactgtcagcagtccaatgaggaccctctcacctttggccagggcaccaaagttgaaattaagagactcgagggacagcctaaggccaatcctaccgtgacactgttccctccaagcagcgaagaactccaggccaacaaggccacacttgtgtgcctgatctccgacttctaccctggggctgtgacagtggcttggaaggccgatggatctcctgtgaaagccggcgtggaaaccaccaagccatccaagcagagcaacaacaaatacgccgccagctcctacctgagcctgacacctgagcagtggaagtcccacagatcctacagctgccaagtgacccacgaaggcagcaccgtggaaaagacagtggcccctacagagtgcagccccatcaagaccgatgtgattacaatggaccccaaggacaactgctccaaggacgccaacgataccctgctgctccagctgaccaacaccagcgcctactacatgtacttgttgctgctgctgaagtccgtggtgtacttcgccatcatcacatgctgcctgctgcggagaaccgccttctgctgcaacggcgagaagtctagggccaagcgatctggatctggagcaacaaacttctcactactcaaacaagcaggtgacgtggaggagaatcccgggcctactagtatggactggatttggcgcatccttttccttgtcggcgctgctaccggcgcgcattccttcgaagtccaacttgtggagtctggagggggcctggtgcagcccggcggctctctcagactgtcttgtgcggcaagcggctacaccttcacctcttactggatagaatgggtgaggcaggcacctggaaagggactggagtggattggagagattctgccaggagggggagatacaaattacaatgaaatcttcaaggggcgggccaccttttcagcggataccagcaagaatacagcttacctgcagatgaatagcctccgggcagaagataccgctgtttattattgcacgagacgggtgccaataagactggactattgggggcaagggactcttgtcaccgtcagttcaacgcgtgcctctacaaagggaccctccgtgtttcctctggctcccagcagcaagtctacaagcggaggaacagccgctctgggctgcctggtcaaggattactttcccgagcctgtgaccgtgtcctggaatagcggagcactgacaagcggcgtgcacacctttccagccgtgctgcaaagcagcggcctgtactctctgagcagcgtggtcacagtgcctagctctagcctgggcacccagacctacatctgcaatgtgaaccacaagcctagcaacaccaaggtggacaagagagtggaacccaagagctgtgaagtgaaaaccgactccaccgaccacgtgaagcccaaagagacagagaacaccaagcagcccagcaagagctgccacaagcccaaggccatcgtgcacaccgagaaagtgaacatgatgagcctgaccgtgctgggcctgcggatgctgttcgccaaaaccgtggccgtgaacttcctgctgaccgccaagctgttcttcctc

SEQ ID NO: 5570 - DNA, 1875 bp, synthetic construct
  source 1..1875: mol_type = other DNA
atggccttaccagtgaccgccttgctcctgccgctggccttgctgctccacgccgccaggccggacatccagttgacccagtcccccagctcactcagcgccagtgtgggggaccgggtgaccattacctgtaaagccagtcagagtgtggactatgacggggatagcttcctgaattggtatcagcagaagcctggcaaagccccaaagctgctgatctacgctgcatctaatctggagtcaggcgtgccttccaggttctccggtagtgggtctgggaccgatttcacattgaccatttcatccctccaacccgaggatttcgctacatattactgtcagcagtccaatgaggaccctctcacctttggccagggcaccaaagttgaaattaagagactcgagggacagcctaaggccaatcctaccgtgacactgttccctccaagcagcgaagaactccaggccaacaaggccacacttgtgtgcctgatctccgacttctaccctggggctgtgacagtggcttggaaggccgatggatctcctgtgaaagccggcgtggaaaccaccaagccatccaagcagagcaacaacaaatacgccgccagctcctacctgagcctgacacctgagcagtggaagtcccacagatcctacagctgccaagtgacccacgaaggcagcaccgtggaaaagacagtggcccctacagagtgcagcggcagagccgattgcggcatcaccagcgccagctaccaccagggcgtgctgagcgccaccatcctgtacgagatcctgctgggcaaggccaccctgtacgccgtgctggtgtctgccctggtgctgatggctatggtcaagcggaaggacagccggggaagggccaagcgatctggatctggagcaacaaacttctcactactcaaacaagcaggtgacgtggaggagaatcccgggcctactagtatggactggatttggcgcatccttttccttgtcggcgctgctaccggcgcgcattccttcgaagtccaacttgtggagtctggagggggcctggtgcagcccggcggctctctcagactgtcttgtgcggcaagcggctacaccttcacctcttactggatagaatgggtgaggcaggcacctggaaagggactggagtggattggagagattctgccaggagggggagatacaaattacaatgaaatcttcaaggggcgggccaccttttcagcggataccagcaagaatacagcttacctgcagatgaatagcctccgggcagaagataccgctgtttattattgcacgagacgggtgccaataagactggactattgggggcaagggactcttgtcaccgtcagttcaacgcgtgcctctacaaagggaccctccgtgtttcctctggctcccagcagcaagtctacaagcggaggaacagccgctctgggctgcctggtcaaggattactttcccgagcctgtgaccgtgtcctggaatagcggagcactgacaagcggcgtgcacacctttccagccgtgctgcaaagcagcggcctgtactctctgagcagcgtggtcacagtgcctagctctagcctgggcacccagacctacatctgcaatgtgaaccacaagcctagcaacaccaaggtggacaagagagtggaacccaagagctgtatccccgaggacacattcttcccaagcagcgacgtgccctgcgacgtgaagctggtggaaaagagcttcgagacagacaccaacctgaacttccagaacctgagcgtgatcggcttcagaatcctgctgctgaaagtggccggctttaacctgctgatgaccctgcggctgtggtccagc

SEQ ID NO: 5571 - DNA, 1875 bp, synthetic construct
  source 1..1875: mol_type = other DNA
atggccttaccagtgaccgccttgctcctgccgctggccttgctgctccacgccgccaggccggacatccagttgacccagtcccccagctcactcagcgccagtgtgggggaccgggtgaccattacctgtaaagccagtcagagtgtggactatgacggggatagcttcctgaattggtatcagcagaagcctggcaaagccccaaagctgctgatctacgctgcatctaatctggagtcaggcgtgccttccaggttctccggtagtgggtctgggaccgatttcacattgaccatttcatccctccaacccgaggatttcgctacatattactgtcagcagtccaatgaggaccctctcacctttggccagggcaccaaagttgaaattaagagactcgagggacagcctaaggccaatcctaccgtgacactgttccctccaagcagcgaagaactccaggccaacaaggccacacttgtgtgcctgatctccgacttctaccctggggctgtgacagtggcttggaaggccgatggatctcctgtgaaagccggcgtggaaaccaccaagccatccaagcagagcaacaacaaatacgccgccagctcctacctgagcctgacacctgagcagtggaagtcccacagatcctacagctgccaagtgacccacgaaggcagcaccgtggaaaagacagtggcccctacagagtgcagcggcagagccgattgcggctttaccagcgagagctaccagcagggcgtgctgagcgccaccatcctgtacgagatcctgctgggcaaggccaccctgtacgccgtgctggtgtctgccctggtgctgatggctatggtcaagcggaaggacagccggggaagggccaagcgatctggatctggagcaacaaacttctcactactcaaacaagcaggtgacgtggaggagaatcccgggcctactagtatggactggatttggcgcatccttttccttgtcggcgctgctaccggcgcgcattccttcgaagtccaacttgtggagtctggagggggcctggtgcagcccggcggctctctcagactgtcttgtgcggcaagcggctacaccttcacctcttactggatagaatgggtgaggcaggcacctggaaagggactggagtggattggagagattctgccaggagggggagatacaaattacaatgaaatcttcaaggggcgggccaccttttcagcggataccagcaagaatacagcttacctgcagatgaatagcctccgggcagaagataccgctgtttattattgcacgagacgggtgccaataagactggactattgggggcaagggactcttgtcaccgtcagttcaacgcgtgcctctacaaagggaccctccgtgtttcctctggctcccagcagcaagtctacaagcggaggaacagccgctctgggctgcctggtcaaggattactttcccgagcctgtgaccgtgtcctggaatagcggagcactgacaagcggcgtgcacacctttccagccgtgctgcaaagcagcggcctgtactctctgagcagcgtggtcacagtgcctagctctagcctgggcacccagacctacatctgcaatgtgaaccacaagcctagcaacaccaaggtggacaagagagtggaacccaagagctgtatccccgaggacacattcttcccaagccccgagagcagctgcgacgtgaagctggtggaaaagagcttcgagacagacaccaacctgaacttccagaacctgagcgtgatcggcttcagaatcctgctgctgaaagtggccggctttaacctgctgatgaccctgcggctgtggtccagc

SEQ ID NO: 5572 - DNA, 1356 bp, synthetic construct
  source 1..1356: mol_type = other DNA
atggccttaccagtgaccgccttgctcctgccgctggccttgctgctccacgccgccaggccggacatccagttgacccagtcccccagctcactcagcgccagtgtgggggaccgggtgaccattacctgtaaagccagtcagagtgtggactatgacggggatagcttcctgaattggtatcagcagaagcctggcaaagccccaaagctgctgatctacgctgcatctaatctggagtcaggcgtgccttccaggttctccggtagtgggtctgggaccgatttcacattgaccatttcatccctccaacccgaggatttcgctacatattactgtcagcagtccaatgaggaccctctcacctttggccagggcaccaaagttgaaattaagagaggcggaggcggaagtggaggcggaggatctggcggcggaggctctgaagtccaacttgtggagtctggagggggcctggtgcagcccggcggctctctcagactgtcttgtgcggcaagcggctacaccttcacctcttactggatagaatgggtgaggcaggcacctggaaagggactggagtggattggagagattctgccaggagggggagatacaaattacaatgaaatcttcaaggggcgggccaccttttcagcggataccagcaagaatacagcttacctgcagatgaatagcctccgggcagaagataccgctgtttattattgcacgagacgggtgccaataagactggactattgggggcaagggactcttgtcaccgtcagttcaacgcgtgacggtaacgaggagatgggaggaatcactcaaaccccttacaaagtctcaatttcaggaacaactgttatccttacatgtccccagtatcctggcagcgagatcctttggcagcataacgacaagaatatagggggagatgaagacgataagaatatcggatctgacgaggatcacttgagcctgaaagagttctccgagcttgaacaaagcggatattatgtgtgctatccgcgcgggtcaaagccggaagacgctaacttttacctttatctccgagccagagtgtgcgaaaattgcatggaaatggacgttatgtccgttgctacaatagttatcgtagatatatgcatcacgggtggactgcttctgctggtttattattggtccaagaatagaaaggccaaagctaaacccgtgaccagaggcgctggcgcaggcggaaggcaaaggggacaaaacaaagaacggccaccaccagtgccaaatccagattatgagcctattcggaaaggacagagggacctgtactctggcctgaatcagagaagaatc

SEQ ID NO: 5573 - DNA, 1251 bp, synthetic construct
  source 1..1251: mol_type = other DNA
atggccttaccagtgaccgccttgctcctgccgctggccttgctgctccacgccgccaggccggacatccagttgacccagtcccccagctcactcagcgccagtgtgggggaccgggtgaccattacctgtaaagccagtcagagtgtggactatgacggggatagcttcctgaattggtatcagcagaagcctggcaaagccccaaagctgctgatctacgctgcatctaatctggagtcaggcgtgccttccaggttctccggtagtgggtctgggaccgatttcacattgaccatttcatccctccaacccgaggatttcgctacatattactgtcagcagtccaatgaggaccctctcacctttggccagggcaccaaagttgaaattaagagaggcggaggcggaagtggaggcggaggatctggcggcggaggctctgaagtccaacttgtggagtctggagggggcctggtgcagcccggcggctctctcagactgtcttgtgcggcaagcggctacaccttcacctcttactggatagaatgggtgaggcaggcacctggaaagggactggagtggattggagagattctgccaggagggggagatacaaattacaatgaaatcttcaaggggcgggccaccttttcagcggataccagcaagaatacagcttacctgcagatgaatagcctccgggcagaagataccgctgtttattattgcacgagacgggtgccaataagactggactattgggggcaagggactcttgtcaccgtcagttcaacgcgtttcaagatccccatcgaggaactggaagatcgggtgttcgtgaactgcaacacctctatcacctgggtggaaggcaccgtgggaacactgctgagcgacatcaccagactggacctcggcaagcggattctggaccctcggggcatctacagatgcaacggcaccgacatctacaaggacaaagaaagcaccgtgcaggtccactacagaatgtgccagtcctgcgtggaactggaccctgctacagtggccggcatcatcgtgaccgatgtgatcgctactctgctgctggctctgggagtgttctgcttcgccggacacgaaacaggcagactgtctggcgctgccgatacacaggccctgctgagaaacgaccaagtgtatcagcccctgcgcgacagagatgatgcccagtattctcacctcggcggcaactgggctagaaacaag

SEQ ID NO: 5574 - DNA, 1281 bp, synthetic construct
  source 1..1281: mol_type = other DNA
atggccttaccagtgaccgccttgctcctgccgctggccttgctgctccacgccgccaggccggacatccagttgacccagtcccccagctcactcagcgccagtgtgggggaccgggtgaccattacctgtaaagccagtcagagtgtggactatgacggggatagcttcctgaattggtatcagcagaagcctggcaaagccccaaagctgctgatctacgctgcatctaatctggagtcaggcgtgccttccaggttctccggtagtgggtctgggaccgatttcacattgaccatttcatccctccaacccgaggatttcgctacatattactgtcagcagtccaatgaggaccctctcacctttggccagggcaccaaagttgaaattaagagaggcggaggcggaagtggaggcggaggatctggcggcggaggctctgaagtccaacttgtggagtctggagggggcctggtgcagcccggcggctctctcagactgtcttgtgcggcaagcggctacaccttcacctcttactggatagaatgggtgaggcaggcacctggaaagggactggagtggattggagagattctgccaggagggggagatacaaattacaatgaaatcttcaaggggcgggccaccttttcagcggataccagcaagaatacagcttacctgcagatgaatagcctccgggcagaagataccgctgtttattattgcacgagacgggtgccaataagactggactattgggggcaagggactcttgtcaccgtcagttcaacgcgtcagagcatcaagggcaaccacctggtcaaggtgtacgactaccaagaggacggcagcgtgctgctgacatgtgatgccgaggccaagaacatcacctggtttaaggacggcaagatgatcggcttcctgaccgaggacaagaagaagtggaacctgggcagcaacgctaaggaccccagaggcatgtatcagtgcaagggcagccagaacaagagcaagcccctccaggtgtactaccggatgtgccagaactgcatcgagctgaacgccgctaccatcagcggctttctgttcgccgagatcgtgtccatcttcgtgctggccgtgggcgtgtactttatcgctggacaggatggcgtgcggcagagcagagcttccgataagcaaaccctgctgcctaacgaccagctgtaccagcctctgaaggacagagaggacgaccagtacagccacctccagggcaatcagctgagaagaaac

SEQ ID NO: 5575 - DNA, 1230 bp, synthetic construct
  source 1..1230: mol_type = other DNA
atggccttaccagtgaccgccttgctcctgccgctggccttgctgctccacgccgccaggccggacatccagttgacccagtcccccagctcactcagcgccagtgtgggggaccgggtgaccattacctgtaaagccagtcagagtgtggactatgacggggatagcttcctgaattggtatcagcagaagcctggcaaagccccaaagctgctgatctacgctgcatctaatctggagtcaggcgtgccttccaggttctccggtagtgggtctgggaccgatttcacattgaccatttcatccctccaacccgaggatttcgctacatattactgtcagcagtccaatgaggaccctctcacctttggccagggcaccaaagttgaaattaagagaggcggaggcggaagtggaggcggaggatctggcggcggaggctctgaagtccaacttgtggagtctggagggggcctggtgcagcccggcggctctctcagactgtcttgtgcggcaagcggctacaccttcacctcttactggatagaatgggtgaggcaggcacctggaaagggactggagtggattggagagattctgccaggagggggagatacaaattacaatgaaatcttcaaggggcgggccaccttttcagcggataccagcaagaatacagcttacctgcagatgaatagcctccgggcagaagataccgctgtttattattgcacgagacgggtgccaataagactggactattgggggcaagggactcttgtcaccgtcagttcaacgcgtcagagttttgggttgttggaccctaaattgtgctatctgttggacggaatcctgttcatttacggagtgatcctgaccgcattgttcctgcgggttaagttttccagatccgcagacgcacccgcttaccaacaagggcagaaccaactctacaatgaacttaatttggggcggagggaagagtacgacgttctggacaaaaggaggggacgagatcccgagatgggcggaaagcctcagcgaaggaagaatccgcaagaggggctttataacgaactccagaaagataaaatggcagaagcctatagtgagattgggatgaagggagaaaggaggaggggtaaaggtcacgatgggttgtaccaaggattgagcacagccactaaagatacctatgatgcgctccacatgcaggccctgccgccaaga

SEQ ID NO: 5576 - DNA, 1515 bp, synthetic construct
  source 1..1515: mol_type = other DNA
atggccttaccagtgaccgccttgctcctgccgctggccttgctgctccacgccgccaggccggacatccagttgacccagtcccccagctcactcagcgccagtgtgggggaccgggtgaccattacctgtaaagccagtcagagtgtggactatgacggggatagcttcctgaattggtatcagcagaagcctggcaaagccccaaagctgctgatctacgctgcatctaatctggagtcaggcgtgccttccaggttctccggtagtgggtctgggaccgatttcacattgaccatttcatccctccaacccgaggatttcgctacatattactgtcagcagtccaatgaggaccctctcacctttggccagggcaccaaagttgaaattaagagaggcggaggcggaagtggaggcggaggatctggcggcggaggctctgaagtccaacttgtggagtctggagggggcctggtgcagcccggcggctctctcagactgtcttgtgcggcaagcggctacaccttcacctcttactggatagaatgggtgaggcaggcacctggaaagggactggagtggattggagagattctgccaggagggggagatacaaattacaatgaaatcttcaaggggcgggccaccttttcagcggataccagcaagaatacagcttacctgcagatgaatagcctccgggcagaagataccgctgtttattattgcacgagacgggtgccaataagactggactattgggggcaagggactcttgtcaccgtcagttcaacgcgtggaatgaggactgaggatcttcccaaagctgtcgtctttctcgaaccccaatggtatcgggtgctcgaaaaagactctgtgacactgaaatgccaaggggcctactctcccgaggacaactccacacagtggtttcataatgagtccctcatcagctctcaggccagctcttatttcattgatgccgctacagtggacgactccggcgagtatcggtgtcagaccaatctgtctacactgtctgaccccgtgcagcttgaggtccacattggatggttgctcttgcaagccccacgctgggttttcaaagaggaagatccaatccatctgcggtgccacagctggaaaaacaccgctctccacaaagtcacatacctgcaaaatggcaaaggacgcaaatacttccatcacaattccgatttttacattccgaaggctaccctgaaagacagcggcagctatttctgccggggactcgtcggctccaagaatgtgtcctccgaaaccgtgaatatcacgattacccaaggactggctgtgcctacaatctctagcttctttccgcctggataccaagtctccttctgtcttgtgatggtcctcctgtttgctgtggacacaggactgtacttttccgtgaaaacgaacatccgcagctccacacgcgattggaaagatcacaagtttaaatggcgcaaagatccccaggacaag

SEQ ID NO: 5577 - DNA, 1440 bp, synthetic construct
  source 1..1440: mol_type = other DNA
atggccttaccagtgaccgccttgctcctgccgctggccttgctgctccacgccgccaggccggacatccagttgacccagtcccccagctcactcagcgccagtgtgggggaccgggtgaccattacctgtaaagccagtcagagtgtggactatgacggggatagcttcctgaattggtatcagcagaagcctggcaaagccccaaagctgctgatctacgctgcatctaatctggagtcaggcgtgccttccaggttctccggtagtgggtctgggaccgatttcacattgaccatttcatccctccaacccgaggatttcgctacatattactgtcagcagtccaatgaggaccctctcacctttggccagggcaccaaagttgaaattaagagaggcggaggcggaagtggaggcggaggatctggcggcggaggctctgaagtccaacttgtggagtctggagggggcctggtgcagcccggcggctctctcagactgtcttgtgcggcaagcggctacaccttcacctcttactggatagaatgggtgaggcaggcacctggaaagggactggagtggattggagagattctgccaggagggggagatacaaattacaatgaaatcttcaaggggcgggccaccttttcagcggataccagcaagaatacagcttacctgcagatgaatagcctccgggcagaagataccgctgtttattattgcacgagacgggtgccaataagactggactattgggggcaagggactcttgtcaccgtcagttcaacgcgtggaatgaggactgaggatcttcccaaagctgtcgtctttctcgaaccccaatggtatcgggtgctcgaaaaagactctgtgacactgaaatgccaaggggcctactctcccgaggacaactccacacagtggtttcataatgagtccctcatcagctctcaggccagctcttatttcattgatgccgctacagtggacgactccggcgagtatcggtgtcagaccaatctgtctacactgtctgaccccgtgcagcttgaggtccacattggatggttgctcttgcaagccccacgctgggttttcaaagaggaagatccaatccatctgcggtgccacagctggaaaaacaccgctctccacaaagtcacatacctgcaaaatggcaaaggacgcaaatacttccatcacaattccgatttttacattccgaaggctaccctgaaagacagcggcagctatttctgccggggactcgtcggctccaagaatgtgtcctccgaaaccgtgaatatcacgattacccaaggactggctgtgcctacaatctctagcttctttccgcctggataccaagtctccttctgtcttgtgatggtcctcctgtttgctgtggacacaggactgtacttttccgtg

SEQ ID NO: 5578 - DNA, 1443 bp, synthetic construct
  source 1..1443: mol_type = other DNA
atggccttaccagtgaccgccttgctcctgccgctggccttgctgctccacgccgccaggccggacatccagttgacccagtcccccagctcactcagcgccagtgtgggggaccgggtgaccattacctgtaaagccagtcagagtgtggactatgacggggatagcttcctgaattggtatcagcagaagcctggcaaagccccaaagctgctgatctacgctgcatctaatctggagtcaggcgtgccttccaggttctccggtagtgggtctgggaccgatttcacattgaccatttcatccctccaacccgaggatttcgctacatattactgtcagcagtccaatgaggaccctctcacctttggccagggcaccaaagttgaaattaagagaggcggaggcggaagtggaggcggaggatctggcggcggaggctctgaagtccaacttgtggagtctggagggggcctggtgcagcccggcggctctctcagactgtcttgtgcggcaagcggctacaccttcacctcttactggatagaatgggtgaggcaggcacctggaaagggactggagtggattggagagattctgccaggagggggagatacaaattacaatgaaatcttcaaggggcgggccaccttttcagcggataccagcaagaatacagcttacctgcagatgaatagcctccgggcagaagataccgctgtttattattgcacgagacgggtgccaataagactggactattgggggcaagggactcttgtcaccgtcagttcaacgcgtggaatgaggactgaggatcttcccaaagctgtcgtctttctcgaaccccaatggtatcgggtgctcgaaaaagactctgtgacactgaaatgccaaggggcctactctcccgaggacaactccacacagtggtttcataatgagtccctcatcagctctcaggccagctcttatttcattgatgccgctacagtggacgactccggcgagtatcggtgtcagaccaatctgtctacactgtctgaccccgtgcagcttgaggtccacattggatggttgctcttgcaagccccacgctgggttttcaaagaggaagatccaatccatctgcggtgccacagctggaaaaacaccgctctccacaaagtcacatacctgcaaaatggcaaaggacgcaaatacttccatcacaattccgatttttacattccgaaggctaccctgaaagacagcggcagctatttctgccggggactcgtcggctccaagaatgtgtcctccgaaaccgtgaatatcacgattacccaaggactggctgtgcctacaatctctagcttctttccgcctggataccaagtctccttctgtcttgtgatggtcctcctgtttgctgtggacacaggactgtacttttccgtgaaa

SEQ ID NO: 5579 - DNA, 2172 bp, synthetic construct
  source 1..2172: mol_type = other DNA
atggccttaccagtgaccgccttgctcctgccgctggccttgctgctccacgccgccaggccggacatccagttgacccagtcccccagctcactcagcgccagtgtgggggaccgggtgaccattacctgtaaagccagtcagagtgtggactatgacggggatagcttcctgaattggtatcagcagaagcctggcaaagccccaaagctgctgatctacgctgcatctaatctggagtcaggcgtgccttccaggttctccggtagtgggtctgggaccgatttcacattgaccatttcatccctccaacccgaggatttcgctacatattactgtcagcagtccaatgaggaccctctcacctttggccagggcaccaaagttgaaattaagagactcgagggacagcctaaggccaatcctaccgtgacactgttccctccaagcagcgaagaactccaggccaacaaggccacacttgtgtgcctgatctccgacttctaccctggggctgtgacagtggcttggaaggccgatggatctcctgtgaaagccggcgtggaaaccaccaagccatccaagcagagcaacaacaaatacgccgccagctcctacctgagcctgacacctgagcagtggaagtcccacagatcctacagctgccaagtgacccacgaaggcagcaccgtggaaaagacagtggcccctacagagtgcagcggatcccagagcttcggcctgctggaccccaagctgtgctacctgctggatggcatcctgttcatctacggcgtgatcctgaccgccctgttcctgagagtgaagttcagcagaagcgccgacgcccctgcctaccagcagggacagaaccaactgtacaacgagctgaacctgggcagacgggaagagtacgacgtgctggacaagcggagaggcagggaccctgagatgggcggaaagccccagcggagaaagaacccccaggaaggactgtataacgaactccagaaagacaagatggccgaagcctacagcgagatcggcatgaagggcgagcggagaagaggcaagggccacgatggcctgtaccagggcctgagcaccgccaccaaggacacctatgacgccctgcacatgcaggccctgcctccaagaagggccaagcgatctggatctggagcaacaaacttctcactactcaaacaagcaggtgacgtggaggagaatcccgggcctactagtatggactggatttggcgcatccttttccttgtcggcgctgctaccggcgcgcattccttcgaagtccaacttgtggagtctggagggggcctggtgcagcccggcggctctctcagactgtcttgtgcggcaagcggctacaccttcacctcttactggatagaatgggtgaggcaggcacctggaaagggactggagtggattggagagattctgccaggagggggagatacaaattacaatgaaatcttcaaggggcgggccaccttttcagcggataccagcaagaatacagcttacctgcagatgaatagcctccgggcagaagataccgctgtttattattgcacgagacgggtgccaataagactggactattgggggcaagggactcttgtcaccgtcagttcaacgcgtgcctctacaaagggaccctccgtgtttcctctggctcccagcagcaagtctacaagcggaggaacagccgctctgggctgcctggtcaaggattactttcccgagcctgtgaccgtgtcctggaatagcggagcactgacaagcggcgtgcacacctttccagccgtgctgcaaagcagcggcctgtactctctgagcagcgtggtcacagtgcctagctctagcctgggcacccagacctacatctgcaatgtgaaccacaagcctagcaacaccaaggtggacaagagagtggaacccaagagctgtggtaccatcactcaaggtttggcagtgtcaaccatctcatcattctttccacctggctaccaagtgtccttctgcctggtcatggtgctgctgttcgccgtggataccggcctgtacttcagcgtcaagaccaacatccggtccagcaccagagactggaaggaccacaagttcaagtggcggaaggaccctcaggacaag

SEQ ID NO: 5580 - DNA, 2217 bp, synthetic construct; identical to SEQ ID NO: 4668
  source 1..2217: mol_type = other DNA

SEQ ID NO: 5581 - DNA, 2142 bp, synthetic construct
  source 1..2142: mol_type = other DNA
atggccttaccagtgaccgccttgctcctgccgctggccttgctgctccacgccgccaggccggacatccagttgacccagtcccccagctcactcagcgccagtgtgggggaccgggtgaccattacctgtaaagccagtcagagtgtggactatgacggggatagcttcctgaattggtatcagcagaagcctggcaaagccccaaagctgctgatctacgctgcatctaatctggagtcaggcgtgccttccaggttctccggtagtgggtctgggaccgatttcacattgaccatttcatccctccaacccgaggatttcgctacatattactgtcagcagtccaatgaggaccctctcacctttggccagggcaccaaagttgaaattaagagactcgaggacctgaagaacgtgttcccacctgaggtggccgtgttcgagcctagcgaggccgagatcagccacacccagaaagccaccctcgtgtgcctggctaccggcttctaccccgaccatgtggaactgtcttggtgggtcaacggcaaagaggtgcacagcggcgtgtctaccgacccccagccactgaaagaacagcccgccctgaacgacagccggtactgcctgagcagcagactgagagtgtccgccaccttctggcagaacccccggaaccacttcagatgccaggtgcagttctacggcctgagcgagaacgacgagtggacccaggacagagccaagcccgtgacccagatcgtgtctgccgaagcctggggcagagccgattgcggatcccagagcttcggcctgctggaccccaagctgtgctacctgctggatggcatcctgttcatctacggcgtgatcctgaccgccctgttcctgagagtgaagttcagcagaagcgccgacgcccctgcctaccagcagggacagaaccaactgtacaacgagctgaacctgggcagacgggaagagtacgacgtgctggacaagcggagaggcagggaccctgagatgggcggaaagccccagcggagaaagaacccccaggaaggactgtataacgaactccagaaagacaagatggccgaagcctacagcgagatcggcatgaagggcgagcggagaagaggcaagggccacgatggcctgtaccagggcctgagcaccgccaccaaggacacctatgacgccctgcacatgcaggccctgcctccaagaagggccaagcgatctggatctggagcaacaaacttctcactactcaaacaagcaggtgacgtggaggagaatcccgggcctactagtatggactggatttggcgcatccttttccttgtcggcgctgctaccggcgcgcattccttcgaagtccaacttgtggagtctggagggggcctggtgcagcccggcggctctctcagactgtcttgtgcggcaagcggctacaccttcacctcttactggatagaatgggtgaggcaggcacctggaaagggactggagtggattggagagattctgccaggagggggagatacaaattacaatgaaatcttcaaggggcgggccaccttttcagcggataccagcaagaatacagcttacctgcagatgaatagcctccgggcagaagataccgctgtttattattgcacgagacgggtgccaataagactggactattgggggcaagggactcttgtcaccgtcagttcaacgcgtatccagaaccctgatcctgccgtgtaccagctgcgggatagcaagagcagcgacaagagcgtgtgtctgttcaccgacttcgacagccagaccaacgtgtcccagagcaaggactccgacgtgtacatcaccgataagaccgtgctggacatgcggagcatggacttcaagagcaactccgccgtggcctggtccaacaagtccgatttcgcctgcgccaacgccttcaacaacagcattatccccgaggacacattcttcccaagccccgagagcagctgcggtaccatcactcaaggtttggcagtgtcaaccatctcatcattctttccacctggctaccaagtgtccttctgcctggtcatggtgctgctgttcgccgtggataccggcctgtacttcagcgtc

SEQ ID NO: 5582 - DNA, 2145 bp, synthetic construct
  source 1..2145: mol_type = other DNA
atggccttaccagtgaccgccttgctcctgccgctggccttgctgctccacgccgccaggccggacatccagttgacccagtcccccagctcactcagcgccagtgtgggggaccgggtgaccattacctgtaaagccagtcagagtgtggactatgacggggatagcttcctgaattggtatcagcagaagcctggcaaagccccaaagctgctgatctacgctgcatctaatctggagtcaggcgtgccttccaggttctccggtagtgggtctgggaccgatttcacattgaccatttcatccctccaacccgaggatttcgctacatattactgtcagcagtccaatgaggaccctctcacctttggccagggcaccaaagttgaaattaagagactcgaggacctgaagaacgtgttcccacctgaggtggccgtgttcgagcctagcgaggccgagatcagccacacccagaaagccaccctcgtgtgcctggctaccggcttctaccccgaccatgtggaactgtcttggtgggtcaacggcaaagaggtgcacagcggcgtgtctaccgacccccagccactgaaagaacagcccgccctgaacgacagccggtactgcctgagcagcagactgagagtgtccgccaccttctggcagaacccccggaaccacttcagatgccaggtgcagttctacggcctgagcgagaacgacgagtggacccaggacagagccaagcccgtgacccagatcgtgtctgccgaagcctggggcagagccgattgcggatcccagagcttcggcctgctggaccccaagctgtgctacctgctggatggcatcctgttcatctacggcgtgatcctgaccgccctgttcctgagagtgaagttcagcagaagcgccgacgcccctgcctaccagcagggacagaaccaactgtacaacgagctgaacctgggcagacgggaagagtacgacgtgctggacaagcggagaggcagggaccctgagatgggcggaaagccccagcggagaaagaacccccaggaaggactgtataacgaactccagaaagacaagatggccgaagcctacagcgagatcggcatgaagggcgagcggagaagaggcaagggccacgatggcctgtaccagggcctgagcaccgccaccaaggacacctatgacgccctgcacatgcaggccctgcctccaagaagggccaagcgatctggatctggagcaacaaacttctcactactcaaacaagcaggtgacgtggaggagaatcccgggcctactagtatggactggatttggcgcatccttttccttgtcggcgctgctaccggcgcgcattccttcgaagtccaacttgtggagtctggagggggcctggtgcagcccggcggctctctcagactgtcttgtgcggcaagcggctacaccttcacctcttactggatagaatgggtgaggcaggcacctggaaagggactggagtggattggagagattctgccaggagggggagatacaaattacaatgaaatcttcaaggggcgggccaccttttcagcggataccagcaagaatacagcttacctgcagatgaatagcctccgggcagaagataccgctgtttattattgcacgagacgggtgccaataagactggactattgggggcaagggactcttgtcaccgtcagttcaacgcgtatccagaaccctgatcctgccgtgtaccagctgcgggatagcaagagcagcgacaagagcgtgtgtctgttcaccgacttcgacagccagaccaacgtgtcccagagcaaggactccgacgtgtacatcaccgataagaccgtgctggacatgcggagcatggacttcaagagcaactccgccgtggcctggtccaacaagtccgatttcgcctgcgccaacgccttcaacaacagcattatccccgaggacacattcttcccaagccccgagagcagctgcggtaccatcactcaaggtttggcagtgtcaaccatctcatcattctttccacctggctaccaagtgtccttctgcctggtcatggtgctgctgttcgccgtggataccggcctgtacttcagcgtcaag

SEQ ID NO: 5583 - DNA, 2148 bp, synthetic construct
  source 1..2148: mol_type = other DNA
atggccttaccagtgaccgccttgctcctgccgctggccttgctgctccacgccgccaggccggacatccagttgacccagtcccccagctcactcagcgccagtgtgggggaccgggtgaccattacctgtaaagccagtcagagtgtggactatgacggggatagcttcctgaattggtatcagcagaagcctggcaaagccccaaagctgctgatctacgctgcatctaatctggagtcaggcgtgccttccaggttctccggtagtgggtctgggaccgatttcacattgaccatttcatccctccaacccgaggatttcgctacatattactgtcagcagtccaatgaggaccctctcacctttggccagggcaccaaagttgaaattaagagactcgaggacctgaagaacgtgttcccacctgaggtggccgtgttcgagcctagcgaggccgagatcagccacacccagaaagccaccctcgtgtgcctggctaccggcttctaccccgaccatgtggaactgtcttggtgggtcaacggcaaagaggtgcacagcggcgtgtctaccgacccccagccactgaaagaacagcccgccctgaacgacagccggtactgcctgagcagcagactgagagtgtccgccaccttctggcagaacccccggaaccacttcagatgccaggtgcagttctacggcctgagcgagaacgacgagtggacccaggacagagccaagcccgtgacccagatcgtgtctgccgaagcctggggcagagccgattgcggatcccagagcttcggcctgctggaccccaagctgtgctacctgctggatggcatcctgttcatctacggcgtgatcctgaccgccctgttcctgagagtgaagttcagcagaagcgccgacgcccctgcctaccagcagggacagaaccaactgtacaacgagctgaacctgggcagacgggaagagtacgacgtgctggacaagcggagaggcagggaccctgagatgggcggaaagccccagcggagaaagaacccccaggaaggactgtataacgaactccagaaagacaagatggccgaagcctacagcgagatcggcatgaagggcgagcggagaagaggcaagggccacgatggcctgtaccagggcctgagcaccgccaccaaggacacctatgacgccctgcacatgcaggccctgcctccaagaagggccaagcgatctggatctggagcaacaaacttctcactactcaaacaagcaggtgacgtggaggagaatcccgggcctactagtatggactggatttggcgcatccttttccttgtcggcgctgctaccggcgcgcattccttcgaagtccaacttgtggagtctggagggggcctggtgcagcccggcggctctctcagactgtcttgtgcggcaagcggctacaccttcacctcttactggatagaatgggtgaggcaggcacctggaaagggactggagtggattggagagattctgccaggagggggagatacaaattacaatgaaatcttcaaggggcgggccaccttttcagcggataccagcaagaatacagcttacctgcagatgaatagcctccgggcagaagataccgctgtttattattgcacgagacgggtgccaataagactggactattgggggcaagggactcttgtcaccgtcagttcaacgcgtatccagaaccctgatcctgccgtgtaccagctgcgggatagcaagagcagcgacaagagcgtgtgtctgttcaccgacttcgacagccagaccaacgtgtcccagagcaaggactccgacgtgtacatcaccgataagaccgtgctggacatgcggagcatggacttcaagagcaactccgccgtggcctggtccaacaagtccgatttcgcctgcgccaacgccttcaacaacagcattatccccgaggacacattcttcccaagccccgagagcagctgcggtaccatcactcaaggtttggcagtgtcaaccatctcatcattctttccacctggctaccaagtgtccttctgcctggtcatggtgctgctgttcgccgtggataccggcctgtacttcagcgtcaagacc

SEQ ID NO: 5584 - DNA, 1959 bp, synthetic construct
  source 1..1959: mol_type = other DNA
atggccttaccagtgaccgccttgctcctgccgctggccttgctgctccacgccgccaggccggacatccagttgacccagtcccccagctcactcagcgccagtgtgggggaccgggtgaccattacctgtaaagccagtcagagtgtggactatgacggggatagcttcctgaattggtatcagcagaagcctggcaaagccccaaagctgctgatctacgctgcatctaatctggagtcaggcgtgccttccaggttctccggtagtgggtctgggaccgatttcacattgaccatttcatccctccaacccgaggatttcgctacatattactgtcagcagtccaatgaggaccctctcacctttggccagggcaccaaagttgaaattaagagactcgagggacagcctaaggccaatcctaccgtgacactgttccctccaagcagcgaagaactccaggccaacaaggccacacttgtgtgcctgatctccgacttctaccctggggctgtgacagtggcttggaaggccgatggatctcctgtgaaagccggcgtggaaaccaccaagccatccaagcagagcaacaacaaatacgccgccagctcctacctgagcctgacacctgagcagtggaagtcccacagatcctacagctgccaagtgacccacgaaggcagcaccgtggaaaagacagtggcccctacagagtgcagcggatccctgggagagcctcagctgtgctatatcctggacgccatcctgtttctgtacggcatcgtgctgaccctgctgtactgccggctgaagatccaagtgcggaaggccgccatcaccagctacgagaaatccgacggcgtgtacaccggcctgagcaccagaaatcaagagacatacgagacactgaagcacgaaaagcctccacaaagggccaagcgatctggatctggagcaacaaacttctcactactcaaacaagcaggtgacgtggaggagaatcccgggcctactagtatggactggatttggcgcatccttttccttgtcggcgctgctaccggcgcgcattccttcgaagtccaacttgtggagtctggagggggcctggtgcagcccggcggctctctcagactgtcttgtgcggcaagcggctacaccttcacctcttactggatagaatgggtgaggcaggcacctggaaagggactggagtggattggagagattctgccaggagggggagatacaaattacaatgaaatcttcaaggggcgggccaccttttcagcggataccagcaagaatacagcttacctgcagatgaatagcctccgggcagaagataccgctgtttattattgcacgagacgggtgccaataagactggactattgggggcaagggactcttgtcaccgtcagttcaacgcgtgcctctacaaagggaccctccgtgtttcctctggctcccagcagcaagtctacaagcggaggaacagccgctctgggctgcctggtcaaggattactttcccgagcctgtgaccgtgtcctggaatagcggagcactgacaagcggcgtgcacacctttccagccgtgctgcaaagcagcggcctgtactctctgagcagcgtggtcacagtgcctagctctagcctgggcacccagacctacatctgcaatgtgaaccacaagcctagcaacaccaaggtggacaagagagtggaacccaagagctgtggtaccctcggagaaccacagctctgttacattctggatgctatcctgttcctctatgggatcgtcctgacactcctgtattgcagactcaaaattcaagttcgcaaagccgccattacctcttacgagaagagtgatggggtgtacacaggactgtctacccggaatcaagaaacctacgaaaccctcaaacatgagaagccacctcagtaa

SEQ ID NO: 5585 - DNA, 1866 bp, synthetic construct
  source 1..1866: mol_type = other DNA
atggccttaccagtgaccgccttgctcctgccgctggccttgctgctccacgccgccaggccggacatccagttgacccagtcccccagctcactcagcgccagtgtgggggaccgggtgaccattacctgtaaagccagtcagagtgtggactatgacggggatagcttcctgaattggtatcagcagaagcctggcaaagccccaaagctgctgatctacgctgcatctaatctggagtcaggcgtgccttccaggttctccggtagtgggtctgggaccgatttcacattgaccatttcatccctccaacccgaggatttcgctacatattactgtcagcagtccaatgaggaccctctcacctttggccagggcaccaaagttgaaattaagagactcgaggacctgaagaacgtgttcccacctgaggtggccgtgttcgagcctagcgaggccgagatcagccacacccagaaagccaccctcgtgtgcctggctaccggcttctaccccgaccatgtggaactgtcttggtgggtcaacggcaaagaggtgcacagcggcgtgtgtaccgacccccagccactgaaagaacagcccgccctgaacgacagccggtactgcctgagcagcagactgagagtgtccgccaccttctggcagaacccccggaaccacttcagatgccaggtgcagttctacggcctgagcgagaacgacgagtggacccaggacagagccaagcccgtgacccagatcgtgtctgccgaagcctggggcagagccgattgcggctttaccagcgagagctaccagcagggcgtgctgagcgcctactacatgtacttgttgctgctgctgaagtccgtggtgtacttcgccatcatcacatgctgcctgctgcggagaaccgccttctgctgcaacggcgagaagtctagggccaagcgatctggatctggagcaacaaacttctcactactcaaacaagcaggtgacgtggaggagaatcccgggcctactagtatggactggatttggcgcatccttttccttgtcggcgctgctaccggcgcgcattccttcgaagtccaacttgtggagtctggagggggcctggtgcagcccggcggctctctcagactgtcttgtgcggcaagcggctacaccttcacctcttactggatagaatgggtgaggcaggcacctggaaagggactggagtggattggagagattctgccaggagggggagatacaaattacaatgaaatcttcaaggggcgggccaccttttcagcggataccagcaagaatacagcttacctgcagatgaatagcctccgggcagaagataccgctgtttattattgcacgagacgggtgccaataagactggactattgggggcaagggactcttgtcaccgtcagttcaacgcgtatccagaaccctgatcctgccgtgtaccagctgcgggatagcaagagcagcgacaagagcgtgtgtctgttcaccgacttcgacagccagaccaacgtgtcccagagcaaggactccgacgtgtacatcaccgataagtgcgtgctggacatgcggagcatggacttcaagagcaactccgccgtggcctggtccaacaagtccgatttcgcctgcgccaacgccttcaacaacagcattatccccgaggacacattcttcccaagccccgagagcagctgcgacgtgaagctggtggaaaagagcttcgagacagacaccaacctgaacttccagaacctgagcgtgatcggcttcagaatcctgctgctgaaagtggccggctttaacctgctgatgaccctgcggctgtggtccagc

SEQ ID NO: 5586 - DNA, 1887 bp, synthetic construct
  source 1..1887: mol_type = other DNA
atggccttaccagtgaccgccttgctcctgccgctggccttgctgctccacgccgccaggccggacatccagttgacccagtcccccagctcactcagcgccagtgtgggggaccgggtgaccattacctgtaaagccagtcagagtgtggactatgacggggatagcttcctgaattggtatcagcagaagcctggcaaagccccaaagctgctgatctacgctgcatctaatctggagtcaggcgtgccttccaggttctccggtagtgggtctgggaccgatttcacattgaccatttcatccctccaacccgaggatttcgctacatattactgtcagcagtccaatgaggaccctctcacctttggccagggcaccaaagttgaaattaagagactcgaggacaagcagctggacgccgacgtgtcccccaagcctaccatcttcctgccctctatcgccgagacaaagctccagaaggccggcacctacctgtgcctgctggaaaagttcttcccagatgtgattaagatccactggcaggaaaagaagtccaacaccatcctgggcagccaggaaggcaacaccatgaagaccaacgacacctacatgaagttcagctggctgaccgtgcccgagaagtccctggacaaagaacacagatgcatcgtgcggcacgaaaacaacaagaacggcgtggaccaggaaatcatcttcccacccatcaagaccgatgtgattacaatggaccccaaggacaactgctccaaggacgccaacgataccctgctgctccagctgaccaacaccagcgcctactacatgtacgagatcctgctgggcaaggccaccctgtacgccgtgctggtgtctgccctggtgctgatggctatggtcaagcggaaggacagccggggaagggccaagcgatctggatctggagcaacaaacttctcactactcaaacaagcaggtgacgtggaggagaatcccgggcctactagtatggactggatttggcgcatccttttccttgtcggcgctgctaccggcgcgcattccttcgaagtccaacttgtggagtctggagggggcctggtgcagcccggcggctctctcagactgtcttgtgcggcaagcggctacaccttcacctcttactggatagaatgggtgaggcaggcacctggaaagggactggagtggattggagagattctgccaggagggggagatacaaattacaatgaaatcttcaaggggcgggccaccttttcagcggataccagcaagaatacagcttacctgcagatgaatagcctccgggcagaagataccgctgtttattattgcacgagacgggtgccaataagactggactattgggggcaagggactcttgtcaccgtcagttcaacgcgtagccagcctcacaccaagcccagcgtgttcgtgatgaagaacggcaccaacgtggcctgcctcgtgaaagagttctaccccaaggacatcaggatcaacctggtgtccagcaagaagatcaccgagttcgaccccgccatcgtgatctcccccagcggcaagtacaacgccgtgaagctggggaagtatgaggacagcaacagcgtgacctgctccgtgcagcacgacaacaagaccgtgcacagcaccgactttgaagtgaaaaccgactccaccgaccacgtgaagcccaaagagacagagaacaccaagcagcccagcaagagctgccacaagcccaaggccatcgtgcacaccgagaaagtgaacatgatgagcctgaccgtgatcggcttcagaatcctgctgctgaaagtggccggctttaacctgctgatgaccctgcggctgtggtccagctaa

SEQ ID NO: 5587 - DNA, 1887 bp, synthetic construct
  source 1..1887: mol_type = other DNA
atggccttaccagtgaccgccttgctcctgccgctggccttgctgctccacgccgccaggccggacatccagttgacccagtcccccagctcactcagcgccagtgtgggggaccgggtgaccattacctgtaaagccagtcagagtgtggactatgacggggatagcttcctgaattggtatcagcagaagcctggcaaagccccaaagctgctgatctacgctgcatctaatctggagtcaggcgtgccttccaggttctccggtagtgggtctgggaccgatttcacattgaccatttcatccctccaacccgaggatttcgctacatattactgtcagcagtccaatgaggaccctctcacctttggccagggcaccaaagttgaaattaagagactcgaggacaagcagctggacgccgacgtgtcccccaagcctaccatcttcctgccctctatcgccgagacaaagctccagaaggccggcacctacctgtgcctgctggaaaagttcttcccagatgtgattaagatccactggcaggaaaagaagtccaacaccatcctgggcagccaggaaggcaacaccatgaagaccaacgacacctacatgaagttcagctggctgaccgtgcccgagaagtccctggacaaagaacacagatgcatcgtgcggcacgaaaacaacaagaacggcgtggaccaggaaatcatcttcccacccatcaagaccgatgtgattacaatggaccccaaggacaactgctccaaggacgccaacgataccctgctgctccagctgaccaacaccagcgccaccatcctgtacgagatcctgctgggcaaggccaccctgtacgccgtgctggtgtctgccctggtgctgatggctatggtcaagcggaaggacagccggggaagggccaagcgatctggatctggagcaacaaacttctcactactcaaacaagcaggtgacgtggaggagaatcccgggcctactagtatggactggatttggcgcatccttttccttgtcggcgctgctaccggcgcgcattccttcgaagtccaacttgtggagtctggagggggcctggtgcagcccggcggctctctcagactgtcttgtgcggcaagcggctacaccttcacctcttactggatagaatgggtgaggcaggcacctggaaagggactggagtggattggagagattctgccaggagggggagatacaaattacaatgaaatcttcaaggggcgggccaccttttcagcggataccagcaagaatacagcttacctgcagatgaatagcctccgggcagaagataccgctgtttattattgcacgagacgggtgccaataagactggactattgggggcaagggactcttgtcaccgtcagttcaacgcgtagccagcctcacaccaagcccagcgtgttcgtgatgaagaacggcaccaacgtggcctgcctcgtgaaagagttctaccccaaggacatcaggatcaacctggtgtccagcaagaagatcaccgagttcgaccccgccatcgtgatctcccccagcggcaagtacaacgccgtgaagctggggaagtatgaggacagcaacagcgtgacctgctccgtgcagcacgacaacaagaccgtgcacagcaccgactttgaagtgaaaaccgactccaccgaccacgtgaagcccaaagagacagagaacaccaagcagcccagcaagagctgccacaagcccaaggccatcgtgcacaccgagaaagtgaacatgatgagcctgaccgtgatcggcttcagaatcctgctgctgaaagtggccggctttaacctgctgatgaccctgcggctgtggtccagctaa

SEQ ID NO: 5588 - DNA, 1887 bp, synthetic construct
  source 1..1887: mol_type = other DNA
atggccttaccagtgaccgccttgctcctgccgctggccttgctgctccacgccgccaggccggacatccagttgacccagtcccccagctcactcagcgccagtgtgggggaccgggtgaccattacctgtaaagccagtcagagtgtggactatgacggggatagcttcctgaattggtatcagcagaagcctggcaaagccccaaagctgctgatctacgctgcatctaatctggagtcaggcgtgccttccaggttctccggtagtgggtctgggaccgatttcacattgaccatttcatccctccaacccgaggatttcgctacatattactgtcagcagtccaatgaggaccctctcacctttggccagggcaccaaagttgaaattaagagactcgaggacaagcagctggacgccgacgtgtcccccaagcctaccatcttcctgccctctatcgccgagacaaagctccagaaggccggcacctacctgtgcctgctggaaaagttcttcccagatgtgattaagatccactggcaggaaaagaagtccaacaccatcctgggcagccaggaaggcaacaccatgaagaccaacgacacctacatgaagttcagctggctgaccgtgcccgagaagtccctggacaaagaacacagatgcatcgtgcggcacgaaaacaacaagaacggcgtggaccaggaaatcatcttcccacccatcaagaccgatgtgattacaatggaccccaaggacaactgctccaaggacgccaacgataccctgctgctccagctgaccaacaccagcgcctactacatgtacgagatcctgctgggcaaggccaccctgtacgccgtgctggtgtctgccctggtgctgatggctatggtcaagcggaaggacagccggggaagggccaagcgatctggatctggagcaacaaacttctcactactcaaacaagcaggtgacgtggaggagaatcccgggcctactagtatggactggatttggcgcatccttttccttgtcggcgctgctaccggcgcgcattccttcgaagtccaacttgtggagtctggagggggcctggtgcagcccggcggctctctcagactgtcttgtgcggcaagcggctacaccttcacctcttactggatagaatgggtgaggcaggcacctggaaagggactggagtggattggagagattctgccaggagggggagatacaaattacaatgaaatcttcaaggggcgggccaccttttcagcggataccagcaagaatacagcttacctgcagatgaatagcctccgggcagaagataccgctgtttattattgcacgagacgggtgccaataagactggactattgggggcaagggactcttgtcaccgtcagttcaacgcgtagccagcctcacaccaagcccagcgtgttcgtgatgaagaacggcaccaacgtggcctgcctcgtgaaagagttctaccccaaggacatcaggatcaacctggtgtccagcaagaagatcaccgagttcgaccccgccatcgtgatctcccccagcggcaagtacaacgccgtgaagctggggaagtacgaggacagcaacagcgtgacctgctccgtgcagcacgacaacaagaccgtgcacagcaccgactttgaagtgaaaaccgactccaccgaccacgtgaagcccaaagagacagagaacaccaagcagcccagcaagagctgccacaagcccaaggccatcgtgcacaccgagaaagtgaacatgatgagcctgaccgtgctgggcttcagaatcctgctgctgaaagtggccggctttaacctgctgatgaccctgcggctgtggtccagctaa

SEQ ID NO: 5589 - DNA, 1887 bp, synthetic construct
  source 1..1887: mol_type = other DNA
atggccttaccagtgaccgccttgctcctgccgctggccttgctgctccacgccgccaggccggacatccagttgacccagtcccccagctcactcagcgccagtgtgggggaccgggtgaccattacctgtaaagccagtcagagtgtggactatgacggggatagcttcctgaattggtatcagcagaagcctggcaaagccccaaagctgctgatctacgctgcatctaatctggagtcaggcgtgccttccaggttctccggtagtgggtctgggaccgatttcacattgaccatttcatccctccaacccgaggatttcgctacatattactgtcagcagtccaatgaggaccctctcacctttggccagggcaccaaagttgaaattaagagactcgaggacaagcagctggacgccgacgtgtcccccaagcctaccatcttcctgccctctatcgccgagacaaagctccagaaggccggcacctacctgtgcctgctggaaaagttcttcccagatgtgattaagatccactggcaggaaaagaagtccaacaccatcctgggcagccaggaaggcaacaccatgaagaccaacgacacctacatgaagttcagctggctgaccgtgcccgagaagtccctggacaaagaacacagatgcatcgtgcggcacgaaaacaacaagaacggcgtggaccaggaaatcatcttcccacccatcaagaccgatgtgattacaatggaccccaaggacaactgctccaaggacgccaacgataccctgctgctccagctgaccaacaccagcgccaccatcctgtacgagatcctgctgggcaaggccaccctgtacgccgtgctggtgtctgccctggtgctgatggctatggtcaagcggaaggacagccggggaagggccaagcgatctggatctggagcaacaaacttctcactactcaaacaagcaggtgacgtggaggagaatcccgggcctactagtatggactggatttggcgcatccttttccttgtcggcgctgctaccggcgcgcattccttcgaagtccaacttgtggagtctggagggggcctggtgcagcccggcggctctctcagactgtcttgtgcggcaagcggctacaccttcacctcttactggatagaatgggtgaggcaggcacctggaaagggactggagtggattggagagattctgccaggagggggagatacaaattacaatgaaatcttcaaggggcgggccaccttttcagcggataccagcaagaatacagcttacctgcagatgaatagcctccgggcagaagataccgctgtttattattgcacgagacgggtgccaataagactggactattgggggcaagggactcttgtcaccgtcagttcaacgcgtagccagcctcacaccaagcccagcgtgttcgtgatgaagaacggcaccaacgtggcctgcctcgtgaaagagttctaccccaaggacatcaggatcaacctggtgtccagcaagaagatcaccgagttcgaccccgccatcgtgatctcccccagcggcaagtacaacgccgtgaagctggggaagtacgaggacagcaacagcgtgacctgctccgtgcagcacgacaacaagaccgtgcacagcaccgactttgaagtgaaaaccgactccaccgaccacgtgaagcccaaagagacagagaacaccaagcagcccagcaagagctgccacaagcccaaggccatcgtgcacaccgagaaagtgaacatgatgagcctgaccgtgctgggcttcagaatcctgctgctgaaagtggccggctttaacctgctgatgaccctgcggctgtggtccagctaa

SEQ ID NO: 5590 - DNA, 1869 bp, synthetic construct
  source 1..1869: mol_type = other DNA
atggccttaccagtgaccgccttgctcctgccgctggccttgctgctccacgccgccaggccggacatccagttgacccagtcccccagctcactcagcgccagtgtgggggaccgggtgaccattacctgtaaagccagtcagagtgtggactatgacggggatagcttcctgaattggtatcagcagaagcctggcaaagccccaaagctgctgatctacgctgcatctaatctggagtcaggcgtgccttccaggttctccggtagtgggtctgggaccgatttcacattgaccatttcatccctccaacccgaggatttcgctacatattactgtcagcagtccaatgaggaccctctcacctttggccagggcaccaaagttgaaattaagagactcgaggacctgaagaacgtgttcccacctgaggtggccgtgttcgagcctagcgaggccgagatcagccacacccagaaagccaccctcgtgtgcctggctaccggcttctaccccgaccatgtggaactgtcttggtgggtcaacggcaaagaggtgcacagcggcgtgtgtaccgacccccagccactgaaagaacagcccgccctgaacgacagccggtactgcctgagcagcagactgagagtgtccgccaccttctggcagaacccccggaaccacttcagatgccaggtgcagttctacggcctgagcgagaacgacgagtggacccaggacagagccaagcccgtgacccagatcgtgtctgccgaagcctggggcagagccgattgcggctttaccagcgagagctaccagcagggcgtgctgagcgccaccatcctgtacttgttgctgctgctgaagtccgtggtgtacttcgccatcatcacatgctgcctgctgcggagaaccgccttctgctgcaacggcgagaagtctagggccaagcgatctggatctggagcaacaaacttctcactactcaaacaagcaggtgacgtggaggagaatcccgggcctactagtatggactggatttggcgcatccttttccttgtcggcgctgctaccggcgcgcattccttcgaagtccaacttgtggagtctggagggggcctggtgcagcccggcggctctctcagactgtcttgtgcggcaagcggctacaccttcacctcttactggatagaatgggtgaggcaggcacctggaaagggactggagtggattggagagattctgccaggagggggagatacaaattacaatgaaatcttcaaggggcgggccaccttttcagcggataccagcaagaatacagcttacctgcagatgaatagcctccgggcagaagataccgctgtttattattgcacgagacgggtgccaataagactggactattgggggcaagggactcttgtcaccgtcagttcaacgcgtatccagaaccctgatcctgccgtgtaccagctgcgggatagcaagagcagcgacaagagcgtgtgtctgttcaccgacttcgacagccagaccaacgtgtcccagagcaaggactccgacgtgtacatcaccgataagtgcgtgctggacatgcggagcatggacttcaagagcaactccgccgtggcctggtccaacaagtccgatttcgcctgcgccaacgccttcaacaacagcattatccccgaggacacattcttcccaagccccgagagcagctgcgacgtgaagctggtggaaaagagcttcgagacagacaccaacctgaacttccagaacctgagcgtgatcggcctgcggatgctgttcgccaaaaccgtggccgtgaacttcctgctgaccgccaagctgttcttcctctaa

SEQ ID NO: 5591 - DNA, 1956 bp, synthetic construct
  source 1..1956: mol_type = other DNA
atggccttaccagtgaccgccttgctcctgccgctggccttgctgctccacgccgccaggccggacatccagttgacccagtcccccagctcactcagcgccagtgtgggggaccgggtgaccattacctgtaaagccagtcagagtgtggactatgacggggatagcttcctgaattggtatcagcagaagcctggcaaagccccaaagctgctgatctacgctgcatctaatctggagtcaggcgtgccttccaggttctccggtagtgggtctgggaccgatttcacattgaccatttcatccctccaacccgaggatttcgctacatattactgtcagcagtccaatgaggaccctctcacctttggccagggcaccaaagttgaaattaagagactcgaggacctgaagaacgtgttcccacctgaggtggccgtgttcgagcctagcgaggccgagatcagccacacccagaaagccaccctcgtgtgcctggctaccggcttctaccccgaccatgtggaactgtcttggtgggtcaacggcaaagaggtgcacagcggcgtgtctaccgacccccagccactgaaagaacagcccgccctgaacgacagccggtactgcctgagcagcagactgagagtgtccgccaccttctggcagaacccccggaaccacttcagatgccaggtgcagttctacggcctgagcgagaacgacgagtggacccaggacagagccaagcccgtgacccagatcgtgtctgccgaagcctggggcagagccgattgcggatcctccaaggacgccaacgataccctgctgctccagctgaccaacaccagcgcctactacatgtacttgttgctgctgctgaagtccgtggtgtacttcgccatcatcacatgctgcctgctgcggagaaccgccttctgctgcaacggcgagaagtctagggccaagcgatctggatctggagcaacaaacttctcactactcaaacaagcaggtgacgtggaggagaatcccgggcctactagtatggactggatttggcgcatccttttccttgtcggcgctgctaccggcgcgcattccttcgaagtccaacttgtggagtctggagggggcctggtgcagcccggcggctctctcagactgtcttgtgcggcaagcggctacaccttcacctcttactggatagaatgggtgaggcaggcacctggaaagggactggagtggattggagagattctgccaggagggggagatacaaattacaatgaaatcttcaaggggcgggccaccttttcagcggataccagcaagaatacagcttacctgcagatgaatagcctccgggcagaagataccgctgtttattattgcacgagacgggtgccaataagactggactattgggggcaagggactcttgtcaccgtcagttcaacgcgtatccagaaccctgatcctgccgtgtaccagctgcgggatagcaagagcagcgacaagagcgtgtgtctgttcaccgacttcgacagccagaccaacgtgtcccagagcaaggactccgacgtgtacatcaccgataagaccgtgctggacatgcggagcatggacttcaagagcaactccgccgtggcctggtccaacaagtccgatttcgcctgcgccaacgccttcaacaacagcattatccccgaggacacattcttcccaagccccgagagcagctgcggtaccgaagtgaaaaccgactccaccgaccacgtgaagcccaaagagacagagaacaccaagcagcccagcaagagctgccacaagcccaaggccatcgtgcacaccgagaaagtgaacatgatgagcctgaccgtgctgggcctgcggatgctgttcgccaaaaccgtggccgtgaacttcctgctgaccgccaagctgttcttcctctaa

SEQ ID NO: 5592 - DNA, 1866 bp, synthetic construct
  source 1..1866: mol_type = other DNA
atggccttaccagtgaccgccttgctcctgccgctggccttgctgctccacgccgccaggccggacatccagttgacccagtcccccagctcactcagcgccagtgtgggggaccgggtgaccattacctgtaaagccagtcagagtgtggactatgacggggatagcttcctgaattggtatcagcagaagcctggcaaagccccaaagctgctgatctacgctgcatctaatctggagtcaggcgtgccttccaggttctccggtagtgggtctgggaccgatttcacattgaccatttcatccctccaacccgaggatttcgctacatattactgtcagcagtccaatgaggaccctctcacctttggccagggcaccaaagttgaaattaagagactcgaggacctgaagaacgtgttcccacctgaggtggccgtgttcgagcctagcgaggccgagatcagccacacccagaaagccaccctcgtgtgcctggctaccggcttctaccccgaccatgtggaactgtcttggtgggtcaacggcaaagaggtgcacagcggcgtgtgtaccgacccccagccactgaaagaacagcccgccctgaacgacagccggtactgcctgagcagcagactgagagtgtccgccaccttctggcagaacccccggaaccacttcagatgccaggtgcagttctacggcctgagcgagaacgacgagtggacccaggacagagccaagcccgtgacccagatcgtgtctgccgaagcctggggcagagccgattgcgacgtgaagctggtggaaaagagcttcgagacagacaccaacctgaacttccagaacctgagcgtgatcggcttcagaatcctgctgctgaaagtggccggctttaacctgctgatgaccctgcggctgtggtccagcagggccaagcgatctggatctggagcaacaaacttctcactactcaaacaagcaggtgacgtggaggagaatcccgggcctactagtatggactggatttggcgcatccttttccttgtcggcgctgctaccggcgcgcattccttcgaagtccaacttgtggagtctggagggggcctggtgcagcccggcggctctctcagactgtcttgtgcggcaagcggctacaccttcacctcttactggatagaatgggtgaggcaggcacctggaaagggactggagtggattggagagattctgccaggagggggagatacaaattacaatgaaatcttcaaggggcgggccaccttttcagcggataccagcaagaatacagcttacctgcagatgaatagcctccgggcagaagataccgctgtttattattgcacgagacgggtgccaataagactggactattgggggcaagggactcttgtcaccgtcagttcaacgcgtatccagaaccctgatcctgccgtgtaccagctgcgggatagcaagagcagcgacaagagcgtgtgtctgttcaccgacttcgacagccagaccaacgtgtcccagagcaaggactccgacgtgtacatcaccgataagtgcgtgctggacatgcggagcatggacttcaagagcaactccgccgtggcctggtccaacaagtccgatttcgcctgcgccaacgccttcaacaacagcattatccccgaggacacattcttcccaagccccgagagcagctgcggctttaccagcgagagctaccagcagggcgtgctgagcgccaccatcctgtacgagatcctgctgggcaaggccaccctgtacgccgtgctggtgtctgccctggtgctgatggctatggtcaagcggaaggacagccggggataa

SEQ ID NO: 5593 - DNA, 1866 bp, synthetic construct
  source 1..1866: mol_type = other DNA
atggccttaccagtgaccgccttgctcctgccgctggccttgctgctccacgccgccaggccggacatccagttgacccagtcccccagctcactcagcgccagtgtgggggaccgggtgaccattacctgtaaagccagtcagagtgtggactatgacggggatagcttcctgaattggtatcagcagaagcctggcaaagccccaaagctgctgatctacgctgcatctaatctggagtcaggcgtgccttccaggttctccggtagtgggtctgggaccgatttcacattgaccatttcatccctccaacccgaggatttcgctacatattactgtcagcagtccaatgaggaccctctcacctttggccagggcaccaaagttgaaattaagagactcgaggacctgaagaacgtgttcccacctgaggtggccgtgttcgagcctagcgaggccgagatcagccacacccagaaagccaccctcgtgtgcctggctaccggcttctaccccgaccatgtggaactgtcttggtgggtcaacggcaaagaggtgcacagcggcgtgtgtaccgacccccagccactgaaagaacagcccgccctgaacgacagccggtactgcctgagcagcagactgagagtgtccgccaccttctggcagaacccccggaaccacttcagatgccaggtgcagttctacggcctgagcgagaacgacgagtggacccaggacagagccaagcccgtgacccagatcgtgtctgccgaagcctggggcagagccgattgcggctttaccagcgagagctaccagcagggcgtgctgagcgccaccaacctgagcgtgatcggcttcagaatcctgctgctgaaagtggccggctttaacctgctgatgaccctgcggctgtggtccagcagggccaagcgatctggatctggagcaacaaacttctcactactcaaacaagcaggtgacgtggaggagaatcccgggcctactagtatggactggatttggcgcatccttttccttgtcggcgctgctaccggcgcgcattccttcgaagtccaacttgtggagtctggagggggcctggtgcagcccggcggctctctcagactgtcttgtgcggcaagcggctacaccttcacctcttactggatagaatgggtgaggcaggcacctggaaagggactggagtggattggagagattctgccaggagggggagatacaaattacaatgaaatcttcaaggggcgggccaccttttcagcggataccagcaagaatacagcttacctgcagatgaatagcctccgggcagaagataccgctgtttattattgcacgagacgggtgccaataagactggactattgggggcaagggactcttgtcaccgtcagttcaacgcgtatccagaaccctgatcctgccgtgtaccagctgcgggatagcaagagcagcgacaagagcgtgtgtctgttcaccgacttcgacagccagaccaacgtgtcccagagcaaggactccgacgtgtacatcaccgataagtgcgtgctggacatgcggagcatggacttcaagagcaactccgccgtggcctggtccaacaagtccgatttcgcctgcgccaacgccttcaacaacagcattatccccgaggacacattcttcccaagccccgagagcagctgcgacgtgaagctggtggaaaagagcttcgagacagacaccaacctgaacttccagatcctgtacgagatcctgctgggcaaggccaccctgtacgccgtgctggtgtctgccctggtgctgatggctatggtcaagcggaaggacagccggggataa

SEQ ID NO: 5594 - DNA, 1866 bp, synthetic construct; identical to SEQ ID NO: 5592
  source 1..1866: mol_type = other DNA

SEQ ID NO: 5595 - DNA, 1866 bp, synthetic construct; identical to SEQ ID NO: 5593
  source 1..1866: mol_type = other DNA

SEQ ID NO: 5596 - DNA, 1863 bp, synthetic construct
  source 1..1863: mol_type = other DNA
atggccttaccagtgaccgccttgctcctgccgctggccttgctgctccacgccgccaggccggacatccagttgacccagtcccccagctcactcagcgccagtgtgggggaccgggtgaccattacctgtaaagccagtcagagtgtggactatgacggggatagcttcctgaattggtatcagcagaagcctggcaaagccccaaagctgctgatctacgctgcatctaatctggagtcaggcgtgccttccaggttctccggtagtgggtctgggaccgatttcacattgaccatttcatccctccaacccgaggatttcgctacatattactgtcagcagtccaatgaggaccctctcacctttggccagggcaccaaagttgaaattaagagactcgaggacctgaagaacgtgttcccacctgaggtggccgtgttcgagcctagcgaggccgagatcagccacacccagaaagccaccctcgtgtgcctggctaccggcttctaccccgaccatgtggaactgtcttggtgggtcaacggcaaagaggtgcacagcggcgtgtgtaccgacccccagccactgaaagaacagcccgccctgaacgacagccggtactgcctgagcagcagactgagagtgtccgccaccttctggcagaacccccggaaccacttcagatgccaggtgcagttctacggcctgagcgagaacgacgagtggacccaggacagagccaagcccgtgacccagatcgtgtctgccgaagcctggggcagagccgattgcgacgtgaagctggtggaaaagagcttcgagacagacaccaacctgaacttccagaacctgagcgtgatcggcttcagaatcctgctgctgaaagtggccggctttaacctgctgatgaccctgcggctgtggtccagcagggccaagcgatctggatctggagcaacaaacttctcactactcaaacaagcaggtgacgtggaggagaatcccgggcctactagtatggactggatttggcgcatccttttccttgtcggcgctgctaccggcgcgcattccttcgaagtccaacttgtggagtctggagggggcctggtgcagcccggcggctctctcagactgtcttgtgcggcaagcggctacaccttcacctcttactggatagaatgggtgaggcaggcacctggaaagggactggagtggattggagagattctgccaggagggggagatacaaattacaatgaaatcttcaaggggcgggccaccttttcagcggataccagcaagaatacagcttacctgcagatgaatagcctccgggcagaagataccgctgtttattattgcacgagacgggtgccaataagactggactattgggggcaagggactcttgtcaccgtcagttcaacgcgtatccagaaccctgatcctgccgtgtaccagctgcgggatagcaagagcagcgacaagagcgtgtgtctgttcaccgacttcgacagccagaccaacgtgtcccagagcaaggactccgacgtgtacatcaccgataagtgcgtgctggacatgcggagcatggacttcaagagcaactccgccgtggcctggtccaacaagtccgatttcgcctgcgccaacgccttcaacaacagcattatccccgaggacacattcttcccaagccccgagagcagctgcggctttaccagcgagagctaccagcagggcgtgctgagcgccaccatcctgtacgagatcctgctgggcaaggccaccctgtacgccgtgctggtgtctgccctggtgctgatggctatggtcaagcggaaggacagccgggga

SEQ ID NO: 5597 - DNA, 1875 bp, synthetic construct
  source 1..1875: mol_type = other DNA
atggccttaccagtgaccgccttgctcctgccgctggccttgctgctccacgccgccaggccggacatccagttgacccagtcccccagctcactcagcgccagtgtgggggaccgggtgaccattacctgtaaagccagtcagagtgtggactatgacggggatagcttcctgaattggtatcagcagaagcctggcaaagccccaaagctgctgatctacgctgcatctaatctggagtcaggcgtgccttccaggttctccggtagtgggtctgggaccgatttcacattgaccatttcatccctccaacccgaggatttcgctacatattactgtcagcagtccaatgaggaccctctcacctttggccagggcaccaaagttgaaattaagagactcgaggccgacgtgtcccccaagcctaccatcttcctgccctctatcgccgagacaaagctccagaaggccggcacctacctgtgcctgctggaaaagttcttcccagatgtgattaagatccactggcaggaaaagaagtccaacaccatcctgggcagccaggaaggcaacaccatgaagaccaacgacacctacatgaagttcagctggctgaccgtgcccgagaagtccctggacaaagaacacagatgcatcgtgcggcacgaaaacaacaagaacggcgtggaccaggaaatcatcttcccacccatcaagaccgatgtgattacaatggaccccaaggacaactgctccaaggacgccaacgataccctgctgctccagctgaccaacaccagcgcctactacatgtacttgttgctgctgctgaagtccgtggtgtacttcgccatcatcacatgctgcctgctgcggagaaccgccttctgctgcaacggcgagaagtctagggccaagcgatctggatctggagcaacaaacttctcactactcaaacaagcaggtgacgtggaggagaatcccgggcctactagtatggactggatttggcgcatccttttccttgtcggcgctgctaccggcgcgcattccttcgaagtccaacttgtggagtctggagggggcctggtgcagcccggcggctctctcagactgtcttgtgcggcaagcggctacaccttcacctcttactggatagaatgggtgaggcaggcacctggaaagggactggagtggattggagagattctgccaggagggggagatacaaattacaatgaaatcttcaaggggcgggccaccttttcagcggataccagcaagaatacagcttacctgcagatgaatagcctccgggcagaagataccgctgtttattattgcacgagacgggtgccaataagactggactattgggggcaagggactcttgtcaccgtcagttcaacgcgtagccagcctcacaccaagcccagcgtgttcgtgatgaagaacggcaccaacgtggcctgcctcgtgaaagagttctaccccaaggacatcaggatcaacctggtgtccagcaagaagatcaccgagttcgaccccgccatcgtgatctcccccagcggcaagtacaacgccgtgaagctggggaagtatgaggacagcaacagcgtgacctgctccgtgcagcacgacaacaagaccgtgcacagcaccgactttgaagtgaaaaccgactccaccgaccacgtgaagcccaaagagacagagaacaccaagcagcccagcaagagctgccacaagcccaaggccatcgtgcacaccgagaaagtgaacatgatgagcctgaccgtgatcggcttcagaatcctgctgctgaaagtggccggctttaacctgctgatgaccctgcggctgtggtccagctaa

SEQ ID NO: 5598 - DNA, 1875 bp, synthetic construct
  source 1..1875: mol_type = other DNA
atggccttaccagtgaccgccttgctcctgccgctggccttgctgctccacgccgccaggccggacatccagttgacccagtcccccagctcactcagcgccagtgtgggggaccgggtgaccattacctgtaaagccagtcagagtgtggactatgacggggatagcttcctgaattggtatcagcagaagcctggcaaagccccaaagctgctgatctacgctgcatctaatctggagtcaggcgtgccttccaggttctccggtagtgggtctgggaccgatttcacattgaccatttcatccctccaacccgaggatttcgctacatattactgtcagcagtccaatgaggaccctctcacctttggccagggcaccaaagttgaaattaagagactcgaggccgacgtgtcccccaagcctaccatcttcctgccctctatcgccgagacaaagctccagaaggccggcacctacctgtgcctgctggaaaagttcttcccagatgtgattaagatccactggcaggaaaagaagtccaacaccatcctgggcagccaggaaggcaacaccatgaagaccaacgacacctacatgaagttcagctggctgaccgtgcccgagaagtccctggacaaagaacacagatgcatcgtgcggcacgaaaacaacaagaacggcgtggaccaggaaatcatcttcccacccatcaagaccgatgtgattacaatggaccccaaggacaactgctccaaggacgccaacgataccctgctgctccagctgaccaacaccagcgcctactacatgtacttgttgctgctgctgaagtccgtggtgtacttcgccatcatcacatgctgcctgctgcggagaaccgccttctgctgcaacggcgagaagtctagggccaagcgatctggatctggagcaacaaacttctcactactcaaacaagcaggtgacgtggaggagaatcccgggcctactagtatggactggatttggcgcatccttttccttgtcggcgctgctaccggcgcgcattccttcgaagtccaacttgtggagtctggagggggcctggtgcagcccggcggctctctcagactgtcttgtgcggcaagcggctacaccttcacctcttactggatagaatgggtgaggcaggcacctggaaagggactggagtggattggagagattctgccaggagggggagatacaaattacaatgaaatcttcaaggggcgggccaccttttcagcggataccagcaagaatacagcttacctgcagatgaatagcctccgggcagaagataccgctgtttattattgcacgagacgggtgccaataagactggactattgggggcaagggactcttgtcaccgtcagttcaacgcgtagccagcctcacaccaagcccagcgtgttcgtgatgaagaacggcaccaacgtggcctgcctcgtgaaagagttctaccccaaggacatcaggatcaacctggtgtccagcaagaagatcaccgagttcgaccccgccatcgtgatctcccccagcggcaagtacaacgccgtgaagctggggaagtacgaggacagcaacagcgtgacctgctccgtgcagcacgacaacaagaccgtgcacagcaccgactttgaagtgaaaaccgactccaccgaccacgtgaagcccaaagagacagagaacaccaagcagcccagcaagagctgccacaagcccaaggccatcgtgcacaccgagaaagtgaacatgatgagcctgaccgtgctgggcttcagaatcctgctgctgaaagtggccggctttaacctgctgatgaccctgcggctgtggtccagctaa

SEQ ID NO: 5599 - DNA, 1863 bp, synthetic construct; identical to SEQ ID NO: 5596
  source 1..1863: mol_type = other DNA

SEQ ID NO: 5600 - DNA, 1875 bp, synthetic construct
  source 1..1875: mol_type = other DNA
atggccttaccagtgaccgccttgctcctgccgctggccttgctgctccacgccgccaggccggacatccagttgacccagtcccccagctcactcagcgccagtgtgggggaccgggtgaccattacctgtaaagccagtcagagtgtggactatgacggggatagcttcctgaattggtatcagcagaagcctggcaaagccccaaagctgctgatctacgctgcatctaatctggagtcaggcgtgccttccaggttctccggtagtgggtctgggaccgatttcacattgaccatttcatccctccaacccgaggatttcgctacatattactgtcagcagtccaatgaggaccctctcacctttggccagggcaccaaagttgaaattaagagactcgagatccagaaccctgatcctgccgtgtaccagctgcgggatagcaagagcagcgacaagagcgtgtgtctgttcaccgacttcgacagccagaccaacgtgtcccagagcaaggactccgacgtgtacatcaccgataagtgcgtgctggacatgcggagcatggacttcaagagcaactccgccgtggcctggtccaacaagtccgatttcgcctgcgccaacgccttcaacaacagcattatccccgaggacacattcttcccaagccccgagagcagctgcggctttaccagcgagagctaccagcagggcgtgctgagcgccaccatcctgtacgagatcctgctgggcaaggccaccctgtacgccgtgctggtgtctgccctggtgctgatggctatggtcaagcggaaggacagccggggacgcgccaagagaagcggatctggcgtgaagcagaccctgaatttcgacctgctgaagctggctggcgacgtggaatccaacccaggccctactagtatggactggatttggcgcatccttttccttgtcggcgctgctaccggcgcgcattccttcgaagtccaacttgtggagtctggagggggcctggtgcagcccggcggctctctcagactgtcttgtgcggcaagcggctacaccttcacctcttactggatagaatgggtgaggcaggcacctggaaagggactggagtggattggagagattctgccaggagggggagatacaaattacaatgaaatcttcaaggggcgggccaccttttcagcggataccagcaagaatacagcttacctgcagatgaatagcctccgggcagaagataccgctgtttattattgcacgagacgggtgccaataagactggactattgggggcaagggactcttgtcaccgtcagttcaacgcgtgaggacctgaagaacgtgttcccacctgaggtggccgtgttcgagcctagcgaggccgagatcagccacacccagaaagccaccctcgtgtgcctggctaccggcttctaccccgaccatgtggaactgtcttggtgggtcaacggcaaagaggtgcacagcggcgtgtgtaccgacccccagccactgaaagaacagcccgccctgaacgacagccggtactgcctgagcagcagactgagagtgtccgccaccttctggcagaacccccggaaccacttcagatgccaggtgcagttctacggcctgagcgagaacgacgagtggacccaggacagagccaagcccgtgacccagatcgtgtctgccgaagcctggggcagagccgattgcgacgtgaagctggtggaaaagagcttcgagacagacaccaacctgaacttccagaacctgagcgtgatcggcttcagaatcctgctgctgaaagtggccggctttaacctgctgatgaccctgcggctgtggtccagc

SEQ ID NO: 5601 - DNA, 2268 bp, synthetic construct
  source 1..2268: mol_type = other DNA
atggccttaccagtgaccgccttgctcctgccgctggccttgctgctccacgccgccaggccggaagtgcagctggttgaatctggcggaggactggttcagcctggcggatctctgagactgtcttgtgccgccagcggcttcagcttcagcgacttttggatgagctgggtccgacaggcccctggcaaaggacttgaatgggtcgccacaatcagccaggccggcagcgagaaggactacgtggactctgtgaagggcagattcaccatcagccgggacaacgccaagaagtccctgtacctccagatgaacagcctgagagccgaggacaccgccgtgtactattgtgcctctggcgtgtacagcttcgactacagaggccagggcaccctggtcacagtctcttctggtaccggcggaggcggatctggcggcggaggtagcggtggcggaggatctgaattcgacatccagttgacccagtcccccagctcactcagcgccagtgtgggggaccgggtgaccattacctgtaaagccagtcagagtgtggactatgacggggatagcttcctgaattggtatcagcagaagcctggcaaagccccaaagctgctgatctacgctgcatctaatctggagtcaggcgtgccttccaggttctccggtagtgggtctgggaccgatttcacattgaccatttcatccctccaacccgaggatttcgctacatattactgtcagcagtccaatgaggaccctctcacctttggccagggcaccaaagttgaaattaagagactcgaggacctgaagaacgtgttcccacctgaggtggccgtgttcgagcctagcgaggccgagatcagccacacccagaaagccaccctcgtgtgcctggctaccggcttctaccccgaccatgtggaactgtcttggtgggtcaacggcaaagaggtgcacagcggcgtgtgtaccgacccccagccactgaaagaacagcccgccctgaacgacagccggtactgcctgagcagcagactgagagtgtccgccaccttctggcagaacccccggaaccacttcagatgccaggtgcagttctacggcctgagcgagaacgacgagtggacccaggacagagccaagcccgtgacccagatcgtgtctgccgaagcctggggcagagccgattgcgacgtgaagctggtggaaaagagcttcgagacagacaccaacctgaacttccagaacctgagcgtgatcggcttcagaatcctgctgctgaaagtggccggctttaacctgctgatgaccctgcggctgtggtccagcagggccaagcgatctggatctggagcaacaaacttctcactactcaaacaagcaggtgacgtggaggagaatcccgggcctactagtatggactggatttggcgcatccttttccttgtcggcgctgctaccggcgcgcattccttcgaagtccaacttgtggagtctggagggggcctggtgcagcccggcggctctctcagactgtcttgtgcggcaagcggctacaccttcacctcttactggatagaatgggtgaggcaggcacctggaaagggactggagtggattggagagattctgccaggagggggagatacaaattacaatgaaatcttcaaggggcgggccaccttttcagcggataccagcaagaatacagcttacctgcagatgaatagcctccgggcagaagataccgctgtttattattgcacgagacgggtgccaataagactggactattgggggcaagggactcttgtcaccgtcagttcaacgcgtatccagaaccctgatcctgccgtgtaccagctgcgggatagcaagagcagcgacaagagcgtgtgtctgttcaccgacttcgacagccagaccaacgtgtcccagagcaaggactccgacgtgtacatcaccgataagtgcgtgctggacatgcggagcatggacttcaagagcaactccgccgtggcctggtccaacaagtccgatttcgcctgcgccaacgccttcaacaacagcattatccccgaggacacattcttcccaagccccgagagcagctgcggctttaccagcgagagctaccagcagggcgtgctgagcgccaccatcctgtacgagatcctgctgggcaaggccaccctgtacgccgtgctggtgtctgccctggtgctgatggctatggtcaagcggaaggacagccgggga

SEQ ID NO: 5602 - DNA, 2280 bp, synthetic construct
  source 1..2280: mol_type = other DNA
atggccttaccagtgaccgccttgctcctgccgctggccttgctgctccacgccgccaggccggaagtgcagctggttgaatctggcggaggactggttcagcctggcggatctctgagactgtcttgtgccgccagcggcttcagcttcagcgacttttggatgagctgggtccgacaggcccctggcaaaggacttgaatgggtcgccacaatcagccaggccggcagcgagaaggactacgtggactctgtgaagggcagattcaccatcagccgggacaacgccaagaagtccctgtacctccagatgaacagcctgagagccgaggacaccgccgtgtactattgtgcctctggcgtgtacagcttcgactacagaggccagggcaccctggtcacagtctcttctggtaccggcggaggcggatctggcggcggaggtagcggtggcggaggatctgaattcgacatccagttgacccagtcccccagctcactcagcgccagtgtgggggaccgggtgaccattacctgtaaagccagtcagagtgtggactatgacggggatagcttcctgaattggtatcagcagaagcctggcaaagccccaaagctgctgatctacgctgcatctaatctggagtcaggcgtgccttccaggttctccggtagtgggtctgggaccgatttcacattgaccatttcatccctccaacccgaggatttcgctacatattactgtcagcagtccaatgaggaccctctcacctttggccagggcaccaaagttgaaattaagagactcgagatccagaaccctgatcctgccgtgtaccagctgcgggatagcaagagcagcgacaagagcgtgtgtctgttcaccgacttcgacagccagaccaacgtgtcccagagcaaggactccgacgtgtacatcaccgataagtgcgtgctggacatgcggagcatggacttcaagagcaactccgccgtggcctggtccaacaagtccgatttcgcctgcgccaacgccttcaacaacagcattatccccgaggacacattcttcccaagccccgagagcagctgcggctttaccagcgagagctaccagcagggcgtgctgagcgccaccatcctgtacgagatcctgctgggcaaggccaccctgtacgccgtgctggtgtctgccctggtgctgatggctatggtcaagcggaaggacagccggggacgcgccaagagaagcggatctggcgtgaagcagaccctgaatttcgacctgctgaagctggctggcgacgtggaatccaacccaggccctactagtatggactggatttggcgcatccttttccttgtcggcgctgctaccggcgcgcattccttcgaagtccaacttgtggagtctggagggggcctggtgcagcccggcggctctctcagactgtcttgtgcggcaagcggctacaccttcacctcttactggatagaatgggtgaggcaggcacctggaaagggactggagtggattggagagattctgccaggagggggagatacaaattacaatgaaatcttcaaggggcgggccaccttttcagcggataccagcaagaatacagcttacctgcagatgaatagcctccgggcagaagataccgctgtttattattgcacgagacgggtgccaataagactggactattgggggcaagggactcttgtcaccgtcagttcaacgcgtgaggacctgaagaacgtgttcccacctgaggtggccgtgttcgagcctagcgaggccgagatcagccacacccagaaagccaccctcgtgtgcctggctaccggcttctaccccgaccatgtggaactgtcttggtgggtcaacggcaaagaggtgcacagcggcgtgtgtaccgacccccagccactgaaagaacagcccgccctgaacgacagccggtactgcctgagcagcagactgagagtgtccgccaccttctggcagaacccccggaaccacttcagatgccaggtgcagttctacggcctgagcgagaacgacgagtggacccaggacagagccaagcccgtgacccagatcgtgtctgccgaagcctggggcagagccgattgcgacgtgaagctggtggaaaagagcttcgagacagacaccaacctgaacttccagaacctgagcgtgatcggcttcagaatcctgctgctgaaagtggccggctttaacctgctgatgaccctgcggctgtggtccagc

SEQ ID NO: 5603 - DNA, 2679 bp, synthetic construct
  source 1..2679: mol_type = other DNA
atggccttaccagtgaccgccttgctcctgccgctggccttgctgctccacgccgccaggccggaagtgcagctggttgaatctggcggaggactggttcagcctggcggatctctgagactgtcttgtgccgccagcggcttcagcttcagcgacttttggatgagctgggtccgacaggcccctggcaaaggacttgaatgggtcgccacaatcagccaggccggcagcgagaaggactacgtggactctgtgaagggcagattcaccatcagccgggacaacgccaagaagtccctgtacctccagatgaacagcctgagagccgaggacaccgccgtgtactattgtgcctctggcgtgtacagcttcgactacagaggccagggcaccctggtcacagtctcttctggtaccggcggaggcggatctggcggcggaggtagcggtggcggaggatctgaattcgacatccagttgacccagtcccccagctcactcagcgccagtgtgggggaccgggtgaccattacctgtaaagccagtcagagtgtggactatgacggggatagcttcctgaattggtatcagcagaagcctggcaaagccccaaagctgctgatctacgctgcatctaatctggagtcaggcgtgccttccaggttctccggtagtgggtctgggaccgatttcacattgaccatttcatccctccaacccgaggatttcgctacatattactgtcagcagtccaatgaggaccctctcacctttggccagggcaccaaagttgaaattaagagactcgaggacctgaagaacgtgttcccacctgaggtggccgtgttcgagcctagcgaggccgagatcagccacacccagaaagccaccctcgtgtgcctggctaccggcttctaccccgaccatgtggaactgtcttggtgggtcaacggcaaagaggtgcacagcggcgtgtgtaccgacccccagccactgaaagaacagcccgccctgaacgacagccggtactgcctgagcagcagactgagagtgtccgccaccttctggcagaacccccggaaccacttcagatgccaggtgcagttctacggcctgagcgagaacgacgagtggacccaggacagagccaagcccgtgacccagatcgtgtctgccgaagcctggggcagagccgattgcgacgtgaagctggtggaaaagagcttcgagacagacaccaacctgaacttccagaacctgagcgtgatcggcttcagaatcctgctgctgaaagtggccggctttaacctgctgatgaccctgcggctgtggtccagcagggccaagcgatctggatctggagcaacaaacttctcactactcaaacaagcaggtgacgtggaggagaatcccgggcctactagtatggactggatttggcgcatccttttccttgtcggcgctgctaccggcgcgcattccgggccccagctccagctgcaagagtctggacctggcctggtcaagcctagcgagacactgagcctgacctgtaccgtgtccggcgatagcatcagcagcggcgattactactggggctggatcagacagcctcctggcaaaggactggaatggatcggccacatctactacagcggcgtgacctactacaaccccagcctgaagtccagagtgaccatcagcgtggacaccagccggaaccagttctccctgaagctgtctagcgtgacagccgccgataccgccgtgtactactgcaccagagaggacagcagcaactggcggagtagaggccagggaacactggtcacagttagctctggatccggcggaggcggaagtggaggcggaggatctggcggcggaggctctttcgaagtccaacttgtggagtctggagggggcctggtgcagcccggcggctctctcagactgtcttgtgcggcaagcggctacaccttcacctcttactggatagaatgggtgaggcaggcacctggaaagggactggagtggattggagagattctgccaggagggggagatacaaattacaatgaaatcttcaaggggcgggccaccttttcagcggataccagcaagaatacagcttacctgcagatgaatagcctccgggcagaagataccgctgtttattattgcacgagacgggtgccaataagactggactattgggggcaagggactcttgtcaccgtcagttcaacgcgtatccagaaccctgatcctgccgtgtaccagctgcgggatagcaagagcagcgacaagagcgtgtgtctgttcaccgacttcgacagccagaccaacgtgtcccagagcaaggactccgacgtgtacatcaccgataagtgcgtgctggacatgcggagcatggacttcaagagcaactccgccgtggcctggtccaacaagtccgatttcgcctgcgccaacgccttcaacaacagcattatccccgaggacacattcttcccaagccccgagagcagctgcggctttaccagcgagagctaccagcagggcgtgctgagcgccaccatcctgtacgagatcctgctgggcaaggccaccctgtacgccgtgctggtgtctgccctggtgctgatggctatggtcaagcggaaggacagccgggga

SEQ ID NO: 5604 - DNA, 2691 bp, synthetic construct
  source 1..2691: mol_type = other DNA
atggccttaccagtgaccgccttgctcctgccgctggccttgctgctccacgccgccaggccggaagtgcagctggttgaatctggcggaggactggttcagcctggcggatctctgagactgtcttgtgccgccagcggcttcagcttcagcgacttttggatgagctgggtccgacaggcccctggcaaaggacttgaatgggtcgccacaatcagccaggccggcagcgagaaggactacgtggactctgtgaagggcagattcaccatcagccgggacaacgccaagaagtccctgtacctccagatgaacagcctgagagccgaggacaccgccgtgtactattgtgcctctggcgtgtacagcttcgactacagaggccagggcaccctggtcacagtctcttctggtaccggcggaggcggatctggcggcggaggtagcggtggcggaggatctgaattcgacatccagttgacccagtcccccagctcactcagcgccagtgtgggggaccgggtgaccattacctgtaaagccagtcagagtgtggactatgacggggatagcttcctgaattggtatcagcagaagcctggcaaagccccaaagctgctgatctacgctgcatctaatctggagtcaggcgtgccttccaggttctccggtagtgggtctgggaccgatttcacattgaccatttcatccctccaacccgaggatttcgctacatattactgtcagcagtccaatgaggaccctctcacctttggccagggcaccaaagttgaaattaagagactcgagatccagaaccctgatcctgccgtgtaccagctgcgggatagcaagagcagcgacaagagcgtgtgtctgttcaccgacttcgacagccagaccaacgtgtcccagagcaaggactccgacgtgtacatcaccgataagtgcgtgctggacatgcggagcatggacttcaagagcaactccgccgtggcctggtccaacaagtccgatttcgcctgcgccaacgccttcaacaacagcattatccccgaggacacattcttcccaagccccgagagcagctgcggctttaccagcgagagctaccagcagggcgtgctgagcgccaccatcctgtacgagatcctgctgggcaaggccaccctgtacgccgtgctggtgtctgccctggtgctgatggctatggtcaagcggaaggacagccggggacgcgccaagagaagcggatctggcgtgaagcagaccctgaatttcgacctgctgaagctggctggcgacgtggaatccaacccaggccctactagtatggactggatttggcgcatccttttccttgtcggcgctgctaccggcgcgcattccgggccccagctccagctgcaagagtctggacctggcctggtcaagcctagcgagacactgagcctgacctgtaccgtgtccggcgatagcatcagcagcggcgattactactggggctggatcagacagcctcctggcaaaggactggaatggatcggccacatctactacagcggcgtgacctactacaaccccagcctgaagtccagagtgaccatcagcgtggacaccagccggaaccagttctccctgaagctgtctagcgtgacagccgccgataccgccgtgtactactgcaccagagaggacagcagcaactggcggagtagaggccagggaacactggtcacagttagctctggatccggcggaggcggaagtggaggcggaggatctggcggcggaggctctttcgaagtccaacttgtggagtctggagggggcctggtgcagcccggcggctctctcagactgtcttgtgcggcaagcggctacaccttcacctcttactggatagaatgggtgaggcaggcacctggaaagggactggagtggattggagagattctgccaggagggggagatacaaattacaatgaaatcttcaaggggcgggccaccttttcagcggataccagcaagaatacagcttacctgcagatgaatagcctccgggcagaagataccgctgtttattattgcacgagacgggtgccaataagactggactattgggggcaagggactcttgtcaccgtcagttcaacgcgtgaggacctgaagaacgtgttcccacctgaggtggccgtgttcgagcctagcgaggccgagatcagccacacccagaaagccaccctcgtgtgcctggctaccggcttctaccccgaccatgtggaactgtcttggtgggtcaacggcaaagaggtgcacagcggcgtgtgtaccgacccccagccactgaaagaacagcccgccctgaacgacagccggtactgcctgagcagcagactgagagtgtccgccaccttctggcagaacccccggaaccacttcagatgccaggtgcagttctacggcctgagcgagaacgacgagtggacccaggacagagccaagcccgtgacccagatcgtgtctgccgaagcctggggcagagccgattgcgacgtgaagctggtggaaaagagcttcgagacagacaccaacctgaacttccagaacctgagcgtgatcggcttcagaatcctgctgctgaaagtggccggctttaacctgctgatgaccctgcggctgtggtccagc

SEQ ID NO: 5605 - DNA, 2073 bp, synthetic construct
  source 1..2073: mol_type = other DNA
atggccttaccagtgaccgccttgctcctgccgctggccttgctgctccacgccgccaggccggacatccagttgacccagtcccccagctcactcagcgccagtgtgggggaccgggtgaccattacctgtaaagccagtcagagtgtggactatgacggggatagcttcctgaattggtatcagcagaagcctggcaaagccccaaagctgctgatctacgctgcatctaatctggagtcaggcgtgccttccaggttctccggtagtgggtctgggaccgatttcacattgaccatttcatccctccaacccgaggatttcgctacatattactgtcagcagtccaatgaggaccctctcacctttggccagggcaccaaagttgaaattaagagactcgaggacctgaagaacgtgttcccacctgaggtggccgtgttcgagcctagcgaggccgagatcagccacacccagaaagccaccctcgtgtgcctggctaccggcttctaccccgaccatgtggaactgtcttggtgggtcaacggcaaagaggtgcacagcggcgtgtgtaccgacccccagccactgaaagaacagcccgccctgaacgacagccggtactgcctgagcagcagactgagagtgtccgccaccttctggcagaacccccggaaccacttcagatgccaggtgcagttctacggcctgagcgagaacgacgagtggacccaggacagagccaagcccgtgacccagatcgtgtctgccgaagcctggggcagagccgattgcgacgtgaagctggtggaaaagagcttcgagacagacaccaacctgaacttccagaacctgagcgtgatcggcttcagaatcctgctgctgaaagtggccggctttaacctgctgatgaccctgcggctgtggtccagcagggccaagcgatctggatctggagcaacaaacttctcactactcaaacaagcaggtgacgtggaggagaatcccgggcctactagtatggactggatttggcgcatccttttccttgtcggcgctgctaccggcgcccattccgggcccatggaccccgacctggaaatcagagccgccttcctgcggcagagaaacacagccctgagaacagaggtggccgagctggaacaagaggtgcagcggctggaaaacgaggtgtcccagtacgagacaagatacggccctctcggaggcggaaaaggatccggcggcggaggatctggcggaggcggatctgggggcggaggctctttcgaagtccaacttgtggagtctggagggggcctggtgcagcccggcggctctctcagactgtcttgtgcggcaagcggctacaccttcacctcttactggatagaatgggtgaggcaggcacctggaaagggactggagtggattggagagattctgccaggagggggagatacaaattacaatgaaatcttcaaggggcgggccaccttttcagcggataccagcaagaatacagcttacctgcagatgaatagcctccgggcagaagataccgctgtttattattgcacgagacgggtgccaataagactggactattgggggcaagggactcttgtcaccgtcagttcaacgcgtatccagaaccctgatcctgccgtgtaccagctgcgggatagcaagagcagcgacaagagcgtgtgtctgttcaccgacttcgacagccagaccaacgtgtcccagagcaaggactccgacgtgtacatcaccgataagtgcgtgctggacatgcggagcatggacttcaagagcaactccgccgtggcctggtccaacaagtccgatttcgcctgcgccaacgccttcaacaacagcattatccccgaggacacattcttcccaagccccgagagcagctgcggctttaccagcgagagctaccagcagggcgtgctgagcgccaccatcctgtacgagatcctgctgggcaaggccaccctgtacgccgtgctggtgtctgccctggtgctgatggctatggtcaagcggaaggacagccgggga

SEQ ID NO: 5606 - DNA, 2085 bp, synthetic construct
  source 1..2085: mol_type = other DNA
atggccttaccagtgaccgccttgctcctgccgctggccttgctgctccacgccgccaggccggacatccagttgacccagtcccccagctcactcagcgccagtgtgggggaccgggtgaccattacctgtaaagccagtcagagtgtggactatgacggggatagcttcctgaattggtatcagcagaagcctggcaaagccccaaagctgctgatctacgctgcatctaatctggagtcaggcgtgccttccaggttctccggtagtgggtctgggaccgatttcacattgaccatttcatccctccaacccgaggatttcgctacatattactgtcagcagtccaatgaggaccctctcacctttggccagggcaccaaagttgaaattaagagactcgagatccagaaccctgatcctgccgtgtaccagctgcgggatagcaagagcagcgacaagagcgtgtgtctgttcaccgacttcgacagccagaccaacgtgtcccagagcaaggactccgacgtgtacatcaccgataagtgcgtgctggacatgcggagcatggacttcaagagcaactccgccgtggcctggtccaacaagtccgatttcgcctgcgccaacgccttcaacaacagcattatccccgaggacacattcttcccaagccccgagagcagctgcggctttaccagcgagagctaccagcagggcgtgctgagcgccaccatcctgtacgagatcctgctgggcaaggccaccctgtacgccgtgctggtgtctgccctggtgctgatggctatggtcaagcggaaggacagccggggacgcgccaagagaagcggatctggcgtgaagcagaccctgaatttcgacctgctgaagctggctggcgacgtggaatccaacccaggccctactagtatggactggatttggcgcatccttttccttgtcggcgctgctaccggcgcccattccgggcccatggaccccgacctggaaatcagagccgccttcctgcggcagagaaacacagccctgagaacagaggtggccgagctggaacaagaggtgcagcggctggaaaacgaggtgtcccagtacgagacaagatacggccctctcggaggcggaaaaggatccggcggcggaggatctggcggaggcggatctgggggcggaggctctttcgaagtccaacttgtggagtctggagggggcctggtgcagcccggcggctctctcagactgtcttgtgcggcaagcggctacaccttcacctcttactggatagaatgggtgaggcaggcacctggaaagggactggagtggattggagagattctgccaggagggggagatacaaattacaatgaaatcttcaaggggcgggccaccttttcagcggataccagcaagaatacagcttacctgcagatgaatagcctccgggcagaagataccgctgtttattattgcacgagacgggtgccaataagactggactattgggggcaagggactcttgtcaccgtcagttcaacgcgtgaggacctgaagaacgtgttcccacctgaggtggccgtgttcgagcctagcgaggccgagatcagccacacccagaaagccaccctcgtgtgcctggctaccggcttctaccccgaccatgtggaactgtcttggtgggtcaacggcaaagaggtgcacagcggcgtgtgtaccgacccccagccactgaaagaacagcccgccctgaacgacagccggtactgcctgagcagcagactgagagtgtccgccaccttctggcagaacccccggaaccacttcagatgccaggtgcagttctacggcctgagcgagaacgacgagtggacccaggacagagccaagcccgtgacccagatcgtgtctgccgaagcctggggcagagccgattgcgacgtgaagctggtggaaaagagcttcgagacagacaccaacctgaacttccagaacctgagcgtgatcggcttcagaatcctgctgctgaaagtggccggctttaacctgctgatgaccctgcggctgtggtccagc

SEQ ID NO: 5607 - DNA, 2004 bp, synthetic construct
  source 1..2004: mol_type = other DNA
atggccttaccagtgaccgccttgctcctgccgctggccttgctgctccacgccgccaggccggacatccagttgacccagtcccccagctcactcagcgccagtgtgggggaccgggtgaccattacctgtaaagccagtcagagtgtggactatgacggggatagcttcctgaattggtatcagcagaagcctggcaaagccccaaagctgctgatctacgctgcatctaatctggagtcaggcgtgccttccaggttctccggtagtgggtctgggaccgatttcacattgaccatttcatccctccaacccgaggatttcgctacatattactgtcagcagtccaatgaggaccctctcacctttggccagggcaccaaagttgaaattaagagactcgaggacctgaagaacgtgttcccacctgaggtggccgtgttcgagcctagcgaggccgagatcagccacacccagaaagccaccctcgtgtgcctggctaccggcttctaccccgaccatgtggaactgtcttggtgggtcaacggcaaagaggtgcacagcggcgtgtgtaccgacccccagccactgaaagaacagcccgccctgaacgacagccggtactgcctgagcagcagactgagagtgtccgccaccttctggcagaacccccggaaccacttcagatgccaggtgcagttctacggcctgagcgagaacgacgagtggacccaggacagagccaagcccgtgacccagatcgtgtctgccgaagcctggggcagagccgattgcgacgtgaagctggtggaaaagagcttcgagacagacaccaacctgaacttccagaacctgagcgtgatcggcttcagaatcctgctgctgaaagtggccggctttaacctgctgatgaccctgcggctgtggtccagcagggccaagcgatctggatctggagcaacaaacttctcactactcaaacaagcaggtgacgtggaggagaatcccgggcctactagtatggactggatttggcgcatccttttccttgtcggcgctgctaccggcgcccattccgggcccgaagttgctgccctcgagaaggaggtagcagctttggaaaaagaagtcgcagcccttgagaaagaagttgcggctctggagaagggatccggcggcggaggatctggcggaggcggatctgggggcggaggctctttcgaagtccaacttgtggagtctggagggggcctggtgcagcccggcggctctctcagactgtcttgtgcggcaagcggctacaccttcacctcttactggatagaatgggtgaggcaggcacctggaaagggactggagtggattggagagattctgccaggagggggagatacaaattacaatgaaatcttcaaggggcgggccaccttttcagcggataccagcaagaatacagcttacctgcagatgaatagcctccgggcagaagataccgctgtttattattgcacgagacgggtgccaataagactggactattgggggcaagggactcttgtcaccgtcagttcaacgcgtatccagaaccctgatcctgccgtgtaccagctgcgggatagcaagagcagcgacaagagcgtgtgtctgttcaccgacttcgacagccagaccaacgtgtcccagagcaaggactccgacgtgtacatcaccgataagtgcgtgctggacatgcggagcatggacttcaagagcaactccgccgtggcctggtccaacaagtccgatttcgcctgcgccaacgccttcaacaacagcattatccccgaggacacattcttcccaagccccgagagcagctgcggctttaccagcgagagctaccagcagggcgtgctgagcgccaccatcctgtacgagatcctgctgggcaaggccaccctgtacgccgtgctggtgtctgccctggtgctgatggctatggtcaagcggaaggacagccgggga

SEQ ID NO: 5608 - DNA, 2016 bp, synthetic construct
  source 1..2016: mol_type = other DNA
atggccttaccagtgaccgccttgctcctgccgctggccttgctgctccacgccgccaggccggacatccagttgacccagtcccccagctcactcagcgccagtgtgggggaccgggtgaccattacctgtaaagccagtcagagtgtggactatgacggggatagcttcctgaattggtatcagcagaagcctggcaaagccccaaagctgctgatctacgctgcatctaatctggagtcaggcgtgccttccaggttctccggtagtgggtctgggaccgatttcacattgaccatttcatccctccaacccgaggatttcgctacatattactgtcagcagtccaatgaggaccctctcacctttggccagggcaccaaagttgaaattaagagactcgagatccagaaccctgatcctgccgtgtaccagctgcgggatagcaagagcagcgacaagagcgtgtgtctgttcaccgacttcgacagccagaccaacgtgtcccagagcaaggactccgacgtgtacatcaccgataagtgcgtgctggacatgcggagcatggacttcaagagcaactccgccgtggcctggtccaacaagtccgatttcgcctgcgccaacgccttcaacaacagcattatccccgaggacacattcttcccaagccccgagagcagctgcggctttaccagcgagagctaccagcagggcgtgctgagcgccaccatcctgtacgagatcctgctgggcaaggccaccctgtacgccgtgctggtgtctgccctggtgctgatggctatggtcaagcggaaggacagccggggacgcgccaagagaagcggatctggcgtgaagcagaccctgaatttcgacctgctgaagctggctggcgacgtggaatccaacccaggccctactagtatggactggatttggcgcatccttttccttgtcggcgctgctaccggcgcccattccgggcccgaagttgctgccctcgagaaggaggtagcagctttggaaaaagaagtcgcagcccttgagaaagaagttgcggctctggagaagggatccggcggcggaggatctggcggaggcggatctgggggcggaggctctttcgaagtccaacttgtggagtctggagggggcctggtgcagcccggcggctctctcagactgtcttgtgcggcaagcggctacaccttcacctcttactggatagaatgggtgaggcaggcacctggaaagggactggagtggattggagagattctgccaggagggggagatacaaattacaatgaaatcttcaaggggcgggccaccttttcagcggataccagcaagaatacagcttacctgcagatgaatagcctccgggcagaagataccgctgtttattattgcacgagacgggtgccaataagactggactattgggggcaagggactcttgtcaccgtcagttcaacgcgtgaggacctgaagaacgtgttcccacctgaggtggccgtgttcgagcctagcgaggccgagatcagccacacccagaaagccaccctcgtgtgcctggctaccggcttctaccccgaccatgtggaactgtcttggtgggtcaacggcaaagaggtgcacagcggcgtgtgtaccgacccccagccactgaaagaacagcccgccctgaacgacagccggtactgcctgagcagcagactgagagtgtccgccaccttctggcagaacccccggaaccacttcagatgccaggtgcagttctacggcctgagcgagaacgacgagtggacccaggacagagccaagcccgtgacccagatcgtgtctgccgaagcctggggcagagccgattgcgacgtgaagctggtggaaaagagcttcgagacagacaccaacctgaacttccagaacctgagcgtgatcggcttcagaatcctgctgctgaaagtggccggctttaacctgctgatgaccctgcggctgtggtccagc

SEQ ID NO: 5609 - DNA, 2274 bp, synthetic construct
  source 1..2274: mol_type = other DNA
atggccttaccagtgaccgccttgctcctgccgctggccttgctgctccacgccgccaggccggacatccagttgacccagtcccccagctcactcagcgccagtgtgggggaccgggtgaccattacctgtaaagccagtcagagtgtggactatgacggggatagcttcctgaattggtatcagcagaagcctggcaaagccccaaagctgctgatctacgctgcatctaatctggagtcaggcgtgccttccaggttctccggtagtgggtctgggaccgatttcacattgaccatttcatccctccaacccgaggatttcgctacatattactgtcagcagtccaatgaggaccctctcacctttggccagggcaccaaagttgaaattaagagactcgaggacctgaagaacgtgttcccacctgaggtggccgtgttcgagcctagcgaggccgagatcagccacacccagaaagccaccctcgtgtgcctggctaccggcttctaccccgaccatgtggaactgtcttggtgggtcaacggcaaagaggtgcacagcggcgtgtgtaccgacccccagccactgaaagaacagcccgccctgaacgacagccggtactgcctgagcagcagactgagagtgtccgccaccttctggcagaacccccggaaccacttcagatgccaggtgcagttctacggcctgagcgagaacgacgagtggacccaggacagagccaagcccgtgacccagatcgtgtctgccgaagcctggggcagagccgattgcgacgtgaagctggtggaaaagagcttcgagacagacaccaacctgaacttccagaacctgagcgtgatcggcttcagaatcctgctgctgaaagtggccggctttaacctgctgatgaccctgcggctgtggtccagcagggccaagcgatctggatctggagcaacaaacttctcactactcaaacaagcaggtgacgtggaggagaatcccgggcctactagtatggactggatttggcgcatccttttccttgtcggcgctgctaccggcgcccattccgggccccaggttcagctgcaagagtctggcggaggacttgctcaagctggcggaagcctgagactgtcttgtgccgcctctggcagaaccttcagcatgggctggtttagacaggcccctggcaaagagagagagttcgtcgccgccatcacatacagcggcggcagcccttactacgcctcttctgtcagaggccggttcaccatcagccgggacaacgccaagaacaccgtgtacctccagatgaacagcctgaagccagaggacaccgccgtgtactactgtgccgccaatccaacctacggcagcgactggaatgccgagaattggggccagggcacccaagtgacagtgtctagtggatccggcggcggaggatctggcggaggcggatctgggggcggaggctctttcgaagtccaacttgtggagtctggagggggcctggtgcagcccggcggctctctcagactgtcttgtgcggcaagcggctacaccttcacctcttactggatagaatgggtgaggcaggcacctggaaagggactggagtggattggagagattctgccaggagggggagatacaaattacaatgaaatcttcaaggggcgggccaccttttcagcggataccagcaagaatacagcttacctgcagatgaatagcctccgggcagaagataccgctgtttattattgcacgagacgggtgccaataagactggactattgggggcaagggactcttgtcaccgtcagttcaacgcgtatccagaaccctgatcctgccgtgtaccagctgcgggatagcaagagcagcgacaagagcgtgtgtctgttcaccgacttcgacagccagaccaacgtgtcccagagcaaggactccgacgtgtacatcaccgataagtgcgtgctggacatgcggagcatggacttcaagagcaactccgccgtggcctggtccaacaagtccgatttcgcctgcgccaacgccttcaacaacagcattatccccgaggacacattcttcccaagccccgagagcagctgcggctttaccagcgagagctaccagcagggcgtgctgagcgccaccatcctgtacgagatcctgctgggcaaggccaccctgtacgccgtgctggtgtctgccctggtgctgatggctatggtcaagcggaaggacagccgggga

SEQ ID NO: 5610 - DNA, 2286 bp, synthetic construct
  source 1..2286: mol_type = other DNA
atggccttaccagtgaccgccttgctcctgccgctggccttgctgctccacgccgccaggccggacatccagttgacccagtcccccagctcactcagcgccagtgtgggggaccgggtgaccattacctgtaaagccagtcagagtgtggactatgacggggatagcttcctgaattggtatcagcagaagcctggcaaagccccaaagctgctgatctacgctgcatctaatctggagtcaggcgtgccttccaggttctccggtagtgggtctgggaccgatttcacattgaccatttcatccctccaacccgaggatttcgctacatattactgtcagcagtccaatgaggaccctctcacctttggccagggcaccaaagttgaaattaagagactcgagatccagaaccctgatcctgccgtgtaccagctgcgggatagcaagagcagcgacaagagcgtgtgtctgttcaccgacttcgacagccagaccaacgtgtcccagagcaaggactccgacgtgtacatcaccgataagtgcgtgctggacatgcggagcatggacttcaagagcaactccgccgtggcctggtccaacaagtccgatttcgcctgcgccaacgccttcaacaacagcattatccccgaggacacattcttcccaagccccgagagcagctgcggctttaccagcgagagctaccagcagggcgtgctgagcgccaccatcctgtacgagatcctgctgggcaaggccaccctgtacgccgtgctggtgtctgccctggtgctgatggctatggtcaagcggaaggacagccggggacgcgccaagagaagcggatctggcgtgaagcagaccctgaatttcgacctgctgaagctggctggcgacgtggaatccaacccaggccctactagtatggactggatttggcgcatccttttccttgtcggcgctgctaccggcgcccattccgggccccaggttcagctgcaagagtctggcggaggacttgctcaagctggcggaagcctgagactgtcttgtgccgcctctggcagaaccttcagcatgggctggtttagacaggcccctggcaaagagagagagttcgtcgccgccatcacatacagcggcggcagcccttactacgcctcttctgtcagaggccggttcaccatcagccgggacaacgccaagaacaccgtgtacctccagatgaacagcctgaagccagaggacaccgccgtgtactactgtgccgccaatccaacctacggcagcgactggaatgccgagaattggggccagggcacccaagtgacagtgtctagtggatccggcggcggaggatctggcggaggcggatctgggggcggaggctctttcgaagtccaacttgtggagtctggagggggcctggtgcagcccggcggctctctcagactgtcttgtgcggcaagcggctacaccttcacctcttactggatagaatgggtgaggcaggcacctggaaagggactggagtggattggagagattctgccaggagggggagatacaaattacaatgaaatcttcaaggggcgggccaccttttcagcggataccagcaagaatacagcttacctgcagatgaatagcctccgggcagaagataccgctgtttattattgcacgagacgggtgccaataagactggactattgggggcaagggactcttgtcaccgtcagttcaacgcgtgaggacctgaagaacgtgttcccacctgaggtggccgtgttcgagcctagcgaggccgagatcagccacacccagaaagccaccctcgtgtgcctggctaccggcttctaccccgaccatgtggaactgtcttggtgggtcaacggcaaagaggtgcacagcggcgtgtgtaccgacccccagccactgaaagaacagcccgccctgaacgacagccggtactgcctgagcagcagactgagagtgtccgccaccttctggcagaacccccggaaccacttcagatgccaggtgcagttctacggcctgagcgagaacgacgagtggacccaggacagagccaagcccgtgacccagatcgtgtctgccgaagcctggggcagagccgattgcgacgtgaagctggtggaaaagagcttcgagacagacaccaacctgaacttccagaacctgagcgtgatcggcttcagaatcctgctgctgaaagtggccggctttaacctgctgatgaccctgcggctgtggtccagc

SEQ ID NO: 5611 - DNA, 2292 bp, synthetic construct
  source 1..2292: mol_type = other DNA
atggccttaccagtgaccgccttgctcctgccgctggccttgctgctccacgccgccaggccggaagtgcaactggtggaatctggaggctctctggtgcagccagggggaagcctgagactgtcttgtgccgcttccggcttcaccttcgacgactacgccatgagctgggtgcgccaggtgccaggcaaaggcctggaatgggtgtccagcatcaactggagcggcacccacaccgattacgccgactccgtgaaaggcagattcacaatcagcagaaacaacgccaacaataccctgtacctgcagatgaactccctgaagtctgaggatacagcagtgtattattgcgccaagaactggcgggacgccggcaccacttggtttgagaaaagcggctctgccggacagggaacccaagtgacagtgtcctccggtaccggcggaggcggatctggcggcggaggtagcggtggcggaggatctgaattcgacatccagttgacccagtcccccagctcactcagcgccagtgtgggggaccgggtgaccattacctgtaaagccagtcagagtgtggactatgacggggatagcttcctgaattggtatcagcagaagcctggcaaagccccaaagctgctgatctacgctgcatctaatctggagtcaggcgtgccttccaggttctccggtagtgggtctgggaccgatttcacattgaccatttcatccctccaacccgaggatttcgctacatattactgtcagcagtccaatgaggaccctctcacctttggccagggcaccaaagttgaaattaagagactcgaggacctgaagaacgtgttcccacctgaggtggccgtgttcgagcctagcgaggccgagatcagccacacccagaaagccaccctcgtgtgcctggctaccggcttctaccccgaccatgtggaactgtcttggtgggtcaacggcaaagaggtgcacagcggcgtgtgtaccgacccccagccactgaaagaacagcccgccctgaacgacagccggtactgcctgagcagcagactgagagtgtccgccaccttctggcagaacccccggaaccacttcagatgccaggtgcagttctacggcctgagcgagaacgacgagtggacccaggacagagccaagcccgtgacccagatcgtgtctgccgaagcctggggcagagccgattgcgacgtgaagctggtggaaaagagcttcgagacagacaccaacctgaacttccagaacctgagcgtgatcggcttcagaatcctgctgctgaaagtggccggctttaacctgctgatgaccctgcggctgtggtccagcagggccaagcgatctggatctggagcaacaaacttctcactactcaaacaagcaggtgacgtggaggagaatcccgggcctactagtatggactggatttggcgcatccttttccttgtcggcgctgctaccggcgcgcattccttcgaagtccaacttgtggagtctggagggggcctggtgcagcccggcggctctctcagactgtcttgtgcggcaagcggctacaccttcacctcttactggatagaatgggtgaggcaggcacctggaaagggactggagtggattggagagattctgccaggagggggagatacaaattacaatgaaatcttcaaggggcgggccaccttttcagcggataccagcaagaatacagcttacctgcagatgaatagcctccgggcagaagataccgctgtttattattgcacgagacgggtgccaataagactggactattgggggcaagggactcttgtcaccgtcagttcaacgcgtatccagaaccctgatcctgccgtgtaccagctgcgggatagcaagagcagcgacaagagcgtgtgtctgttcaccgacttcgacagccagaccaacgtgtcccagagcaaggactccgacgtgtacatcaccgataagtgcgtgctggacatgcggagcatggacttcaagagcaactccgccgtggcctggtccaacaagtccgatttcgcctgcgccaacgccttcaacaacagcattatccccgaggacacattcttcccaagccccgagagcagctgcggctttaccagcgagagctaccagcagggcgtgctgagcgccaccatcctgtacgagatcctgctgggcaaggccaccctgtacgccgtgctggtgtctgccctggtgctgatggctatggtcaagcggaaggacagccgggga

SEQ ID NO: 5612 - DNA, 2304 bp, synthetic construct
  source 1..2304: mol_type = other DNA
atggccttaccagtgaccgccttgctcctgccgctggccttgctgctccacgccgccaggccggaagtgcaactggtggaatctggaggctctctggtgcagccagggggaagcctgagactgtcttgtgccgcttccggcttcaccttcgacgactacgccatgagctgggtgcgccaggtgccaggcaaaggcctggaatgggtgtccagcatcaactggagcggcacccacaccgattacgccgactccgtgaaaggcagattcacaatcagcagaaacaacgccaacaataccctgtacctgcagatgaactccctgaagtctgaggatacagcagtgtattattgcgccaagaactggcgggacgccggcaccacttggtttgagaaaagcggctctgccggacagggaacccaagtgacagtgtcctccggtaccggcggaggcggatctggcggcggaggtagcggtggcggaggatctgaattcgacatccagttgacccagtcccccagctcactcagcgccagtgtgggggaccgggtgaccattacctgtaaagccagtcagagtgtggactatgacggggatagcttcctgaattggtatcagcagaagcctggcaaagccccaaagctgctgatctacgctgcatctaatctggagtcaggcgtgccttccaggttctccggtagtgggtctgggaccgatttcacattgaccatttcatccctccaacccgaggatttcgctacatattactgtcagcagtccaatgaggaccctctcacctttggccagggcaccaaagttgaaattaagagactcgagatccagaaccctgatcctgccgtgtaccagctgcgggatagcaagagcagcgacaagagcgtgtgtctgttcaccgacttcgacagccagaccaacgtgtcccagagcaaggactccgacgtgtacatcaccgataagtgcgtgctggacatgcggagcatggacttcaagagcaactccgccgtggcctggtccaacaagtccgatttcgcctgcgccaacgccttcaacaacagcattatccccgaggacacattcttcccaagccccgagagcagctgcggctttaccagcgagagctaccagcagggcgtgctgagcgccaccatcctgtacgagatcctgctgggcaaggccaccctgtacgccgtgctggtgtctgccctggtgctgatggctatggtcaagcggaaggacagccggggacgcgccaagagaagcggatctggcgtgaagcagaccctgaatttcgacctgctgaagctggctggcgacgtggaatccaacccaggccctactagtatggactggatttggcgcatccttttccttgtcggcgctgctaccggcgcgcattccttcgaagtccaacttgtggagtctggagggggcctggtgcagcccggcggctctctcagactgtcttgtgcggcaagcggctacaccttcacctcttactggatagaatgggtgaggcaggcacctggaaagggactggagtggattggagagattctgccaggagggggagatacaaattacaatgaaatcttcaaggggcgggccaccttttcagcggataccagcaagaatacagcttacctgcagatgaatagcctccgggcagaagataccgctgtttattattgcacgagacgggtgccaataagactggactattgggggcaagggactcttgtcaccgtcagttcaacgcgtgaggacctgaagaacgtgttcccacctgaggtggccgtgttcgagcctagcgaggccgagatcagccacacccagaaagccaccctcgtgtgcctggctaccggcttctaccccgaccatgtggaactgtcttggtgggtcaacggcaaagaggtgcacagcggcgtgtgtaccgacccccagccactgaaagaacagcccgccctgaacgacagccggtactgcctgagcagcagactgagagtgtccgccaccttctggcagaacccccggaaccacttcagatgccaggtgcagttctacggcctgagcgagaacgacgagtggacccaggacagagccaagcccgtgacccagatcgtgtctgccgaagcctggggcagagccgattgcgacgtgaagctggtggaaaagagcttcgagacagacaccaacctgaacttccagaacctgagcgtgatcggcttcagaatcctgctgctgaaagtggccggctttaacctgctgatgaccctgcggctgtggtccagc

SEQ ID NO: 5613 - DNA, 2286 bp, synthetic construct
  source 1..2286: mol_type = other DNA
atggccttaccagtgaccgccttgctcctgccgctggccttgctgctccacgccgccaggccggaagttcagctgcttgagtctggcggaggactggttcaacctggcggaagcctgagactgtcttgtgccgccagcggcttcatcttcagcagctacgccatgagctgggtccgacaggctcctggaaagggccaagaatgggtttccggcgttagcggcacaggcgtgaacacctactacgccgatagcgtgaagggcagattcaccatcagccgggacaacagcaagaacaccctgtacctccagatgaacagcctgagagccgaggacaccgccgtgtactattgtgcctctggcaaaggctgggacagcggctcttggtacgaggactatagaggccagggcaccctggtcacagtttcttcaggtaccggcggaggcggatctggcggcggaggtagcggtggcggaggatctgaattcgacatccagttgacccagtcccccagctcactcagcgccagtgtgggggaccgggtgaccattacctgtaaagccagtcagagtgtggactatgacggggatagcttcctgaattggtatcagcagaagcctggcaaagccccaaagctgctgatctacgctgcatctaatctggagtcaggcgtgccttccaggttctccggtagtgggtctgggaccgatttcacattgaccatttcatccctccaacccgaggatttcgctacatattactgtcagcagtccaatgaggaccctctcacctttggccagggcaccaaagttgaaattaagagactcgaggacctgaagaacgtgttcccacctgaggtggccgtgttcgagcctagcgaggccgagatcagccacacccagaaagccaccctcgtgtgcctggctaccggcttctaccccgaccatgtggaactgtcttggtgggtcaacggcaaagaggtgcacagcggcgtgtgtaccgacccccagccactgaaagaacagcccgccctgaacgacagccggtactgcctgagcagcagactgagagtgtccgccaccttctggcagaacccccggaaccacttcagatgccaggtgcagttctacggcctgagcgagaacgacgagtggacccaggacagagccaagcccgtgacccagatcgtgtctgccgaagcctggggcagagccgattgcgacgtgaagctggtggaaaagagcttcgagacagacaccaacctgaacttccagaacctgagcgtgatcggcttcagaatcctgctgctgaaagtggccggctttaacctgctgatgaccctgcggctgtggtccagcagggccaagcgatctggatctggagcaacaaacttctcactactcaaacaagcaggtgacgtggaggagaatcccgggcctactagtatggactggatttggcgcatccttttccttgtcggcgctgctaccggcgcgcattccttcgaagtccaacttgtggagtctggagggggcctggtgcagcccggcggctctctcagactgtcttgtgcggcaagcggctacaccttcacctcttactggatagaatgggtgaggcaggcacctggaaagggactggagtggattggagagattctgccaggagggggagatacaaattacaatgaaatcttcaaggggcgggccaccttttcagcggataccagcaagaatacagcttacctgcagatgaatagcctccgggcagaagataccgctgtttattattgcacgagacgggtgccaataagactggactattgggggcaagggactcttgtcaccgtcagttcaacgcgtatccagaaccctgatcctgccgtgtaccagctgcgggatagcaagagcagcgacaagagcgtgtgtctgttcaccgacttcgacagccagaccaacgtgtcccagagcaaggactccgacgtgtacatcaccgataagtgcgtgctggacatgcggagcatggacttcaagagcaactccgccgtggcctggtccaacaagtccgatttcgcctgcgccaacgccttcaacaacagcattatccccgaggacacattcttcccaagccccgagagcagctgcggctttaccagcgagagctaccagcagggcgtgctgagcgccaccatcctgtacgagatcctgctgggcaaggccaccctgtacgccgtgctggtgtctgccctggtgctgatggctatggtcaagcggaaggacagccgggga

SEQ ID NO: 5614 - DNA, 2298 bp, synthetic construct
  source 1..2298: mol_type = other DNA
atggccttaccagtgaccgccttgctcctgccgctggccttgctgctccacgccgccaggccggaagttcagctgcttgagtctggcggaggactggttcaacctggcggaagcctgagactgtcttgtgccgccagcggcttcatcttcagcagctacgccatgagctgggtccgacaggctcctggaaagggccaagaatgggtttccggcgttagcggcacaggcgtgaacacctactacgccgatagcgtgaagggcagattcaccatcagccgggacaacagcaagaacaccctgtacctccagatgaacagcctgagagccgaggacaccgccgtgtactattgtgcctctggcaaaggctgggacagcggctcttggtacgaggactatagaggccagggcaccctggtcacagtttcttcaggtaccggcggaggcggatctggcggcggaggtagcggtggcggaggatctgaattcgacatccagttgacccagtcccccagctcactcagcgccagtgtgggggaccgggtgaccattacctgtaaagccagtcagagtgtggactatgacggggatagcttcctgaattggtatcagcagaagcctggcaaagccccaaagctgctgatctacgctgcatctaatctggagtcaggcgtgccttccaggttctccggtagtgggtctgggaccgatttcacattgaccatttcatccctccaacccgaggatttcgctacatattactgtcagcagtccaatgaggaccctctcacctttggccagggcaccaaagttgaaattaagagactcgagatccagaaccctgatcctgccgtgtaccagctgcgggatagcaagagcagcgacaagagcgtgtgtctgttcaccgacttcgacagccagaccaacgtgtcccagagcaaggactccgacgtgtacatcaccgataagtgcgtgctggacatgcggagcatggacttcaagagcaactccgccgtggcctggtccaacaagtccgatttcgcctgcgccaacgccttcaacaacagcattatccccgaggacacattcttcccaagccccgagagcagctgcggctttaccagcgagagctaccagcagggcgtgctgagcgccaccatcctgtacgagatcctgctgggcaaggccaccctgtacgccgtgctggtgtctgccctggtgctgatggctatggtcaagcggaaggacagccggggacgcgccaagagaagcggatctggcgtgaagcagaccctgaatttcgacctgctgaagctggctggcgacgtggaatccaacccaggccctactagtatggactggatttggcgcatccttttccttgtcggcgctgctaccggcgcgcattccttcgaagtccaacttgtggagtctggagggggcctggtgcagcccggcggctctctcagactgtcttgtgcggcaagcggctacaccttcacctcttactggatagaatgggtgaggcaggcacctggaaagggactggagtggattggagagattctgccaggagggggagatacaaattacaatgaaatcttcaaggggcgggccaccttttcagcggataccagcaagaatacagcttacctgcagatgaatagcctccgggcagaagataccgctgtttattattgcacgagacgggtgccaataagactggactattgggggcaagggactcttgtcaccgtcagttcaacgcgtgaggacctgaagaacgtgttcccacctgaggtggccgtgttcgagcctagcgaggccgagatcagccacacccagaaagccaccctcgtgtgcctggctaccggcttctaccccgaccatgtggaactgtcttggtgggtcaacggcaaagaggtgcacagcggcgtgtgtaccgacccccagccactgaaagaacagcccgccctgaacgacagccggtactgcctgagcagcagactgagagtgtccgccaccttctggcagaacccccggaaccacttcagatgccaggtgcagttctacggcctgagcgagaacgacgagtggacccaggacagagccaagcccgtgacccagatcgtgtctgccgaagcctggggcagagccgattgcgacgtgaagctggtggaaaagagcttcgagacagacaccaacctgaacttccagaacctgagcgtgatcggcttcagaatcctgctgctgaaagtggccggctttaacctgctgatgaccctgcggctgtggtccagc

SEQ ID NO: 5615 - DNA, 2190 bp, synthetic construct
  source 1..2190: mol_type = other DNA
atggccttaccagtgaccgccttgctcctgccgctggccttgctgctccacgccgccaggccgatgctgcccgctcctaagaatctggtggtgtccagaatcaccgaggacagcgccagactgtcttggacagctcctgatgccgccttcgacagcttccccatccggtacatcgagacactgatctggggcgaagccatctggctggatgtgcctggaagcgagagaagctacgacctgaccggactgaagcctggcacagagtatgccgtggtcatcaccggcgtgaaaggcggcagattctctagccctctggtggcctctttcaccaccggtaccggcggaggcggatctggcggcggaggtagcggtggcggaggatctgaattcgacatccagttgacccagtcccccagctcactcagcgccagtgtgggggaccgggtgaccattacctgtaaagccagtcagagtgtggactatgacggggatagcttcctgaattggtatcagcagaagcctggcaaagccccaaagctgctgatctacgctgcatctaatctggagtcaggcgtgccttccaggttctccggtagtgggtctgggaccgatttcacattgaccatttcatccctccaacccgaggatttcgctacatattactgtcagcagtccaatgaggaccctctcacctttggccagggcaccaaagttgaaattaagagactcgaggacctgaagaacgtgttcccacctgaggtggccgtgttcgagcctagcgaggccgagatcagccacacccagaaagccaccctcgtgtgcctggctaccggcttctaccccgaccatgtggaactgtcttggtgggtcaacggcaaagaggtgcacagcggcgtgtgtaccgacccccagccactgaaagaacagcccgccctgaacgacagccggtactgcctgagcagcagactgagagtgtccgccaccttctggcagaacccccggaaccacttcagatgccaggtgcagttctacggcctgagcgagaacgacgagtggacccaggacagagccaagcccgtgacccagatcgtgtctgccgaagcctggggcagagccgattgcgacgtgaagctggtggaaaagagcttcgagacagacaccaacctgaacttccagaacctgagcgtgatcggcttcagaatcctgctgctgaaagtggccggctttaacctgctgatgaccctgcggctgtggtccagcagggccaagcgatctggatctggagcaacaaacttctcactactcaaacaagcaggtgacgtggaggagaatcccgggcctactagtatggactggatttggcgcatccttttccttgtcggcgctgctaccggcgcgcattccttcgaagtccaacttgtggagtctggagggggcctggtgcagcccggcggctctctcagactgtcttgtgcggcaagcggctacaccttcacctcttactggatagaatgggtgaggcaggcacctggaaagggactggagtggattggagagattctgccaggagggggagatacaaattacaatgaaatcttcaaggggcgggccaccttttcagcggataccagcaagaatacagcttacctgcagatgaatagcctccgggcagaagataccgctgtttattattgcacgagacgggtgccaataagactggactattgggggcaagggactcttgtcaccgtcagttcaacgcgtatccagaaccctgatcctgccgtgtaccagctgcgggatagcaagagcagcgacaagagcgtgtgtctgttcaccgacttcgacagccagaccaacgtgtcccagagcaaggactccgacgtgtacatcaccgataagtgcgtgctggacatgcggagcatggacttcaagagcaactccgccgtggcctggtccaacaagtccgatttcgcctgcgccaacgccttcaacaacagcattatccccgaggacacattcttcccaagccccgagagcagctgcggctttaccagcgagagctaccagcagggcgtgctgagcgccaccatcctgtacgagatcctgctgggcaaggccaccctgtacgccgtgctggtgtctgccctggtgctgatggctatggtcaagcggaaggacagccgggga

SEQ ID NO: 5616 - DNA, 2202 bp, synthetic construct
  source 1..2202: mol_type = other DNA
atggccttaccagtgaccgccttgctcctgccgctggccttgctgctccacgccgccaggccgatgctgcccgctcctaagaatctggtggtgtccagaatcaccgaggacagcgccagactgtcttggacagctcctgatgccgccttcgacagcttccccatccggtacatcgagacactgatctggggcgaagccatctggctggatgtgcctggaagcgagagaagctacgacctgaccggactgaagcctggcacagagtatgccgtggtcatcaccggcgtgaaaggcggcagattctctagccctctggtggcctctttcaccaccggtaccggcggaggcggatctggcggcggaggtagcggtggcggaggatctgaattcgacatccagttgacccagtcccccagctcactcagcgccagtgtgggggaccgggtgaccattacctgtaaagccagtcagagtgtggactatgacggggatagcttcctgaattggtatcagcagaagcctggcaaagccccaaagctgctgatctacgctgcatctaatctggagtcaggcgtgccttccaggttctccggtagtgggtctgggaccgatttcacattgaccatttcatccctccaacccgaggatttcgctacatattactgtcagcagtccaatgaggaccctctcacctttggccagggcaccaaagttgaaattaagagactcgagatccagaaccctgatcctgccgtgtaccagctgcgggatagcaagagcagcgacaagagcgtgtgtctgttcaccgacttcgacagccagaccaacgtgtcccagagcaaggactccgacgtgtacatcaccgataagtgcgtgctggacatgcggagcatggacttcaagagcaactccgccgtggcctggtccaacaagtccgatttcgcctgcgccaacgccttcaacaacagcattatccccgaggacacattcttcccaagccccgagagcagctgcggctttaccagcgagagctaccagcagggcgtgctgagcgccaccatcctgtacgagatcctgctgggcaaggccaccctgtacgccgtgctggtgtctgccctggtgctgatggctatggtcaagcggaaggacagccggggacgcgccaagagaagcggatctggcgtgaagcagaccctgaatttcgacctgctgaagctggctggcgacgtggaatccaacccaggccctactagtatggactggatttggcgcatccttttccttgtcggcgctgctaccggcgcgcattccttcgaagtccaacttgtggagtctggagggggcctggtgcagcccggcggctctctcagactgtcttgtgcggcaagcggctacaccttcacctcttactggatagaatgggtgaggcaggcacctggaaagggactggagtggattggagagattctgccaggagggggagatacaaattacaatgaaatcttcaaggggcgggccaccttttcagcggataccagcaagaatacagcttacctgcagatgaatagcctccgggcagaagataccgctgtttattattgcacgagacgggtgccaataagactggactattgggggcaagggactcttgtcaccgtcagttcaacgcgtgaggacctgaagaacgtgttcccacctgaggtggccgtgttcgagcctagcgaggccgagatcagccacacccagaaagccaccctcgtgtgcctggctaccggcttctaccccgaccatgtggaactgtcttggtgggtcaacggcaaagaggtgcacagcggcgtgtgtaccgacccccagccactgaaagaacagcccgccctgaacgacagccggtactgcctgagcagcagactgagagtgtccgccaccttctggcagaacccccggaaccacttcagatgccaggtgcagttctacggcctgagcgagaacgacgagtggacccaggacagagccaagcccgtgacccagatcgtgtctgccgaagcctggggcagagccgattgcgacgtgaagctggtggaaaagagcttcgagacagacaccaacctgaacttccagaacctgagcgtgatcggcttcagaatcctgctgctgaaagtggccggctttaacctgctgatgaccctgcggctgtggtccagc

SEQ ID NO: 5617 - DNA, 2277 bp, synthetic construct
  source 1..2277: mol_type = other DNA
atggccttaccagtgaccgccttgctcctgccgctggccttgctgctccacgccgccaggccggaggtgcagctggttgaatctggcggaggactggttcagcctggcggatctctgagactgtcttgtgccgccagcggcttcaacatcaaggatacctgtatcggctgggttcgcagagcccctggcaaagaggaagaactggtcgccaaaatctgcaagtacagcggccacaccagatacgccgacagcgtgaagggcagattcaccatcagcgccgacaccagcaagaacaccgcctacctccagatgaacagcctgagagccgaggacaccgccgtgtactattgtgccgctgtgtccgtcagagatgggcactacaattactggggccagggcaccaccgtgaccgtttcttcaggtaccggcggaggcggatctggcggcggaggtagcggtggcggaggatctgaattcgacatccagttgacccagtcccccagctcactcagcgccagtgtgggggaccgggtgaccattacctgtaaagccagtcagagtgtggactatgacggggatagcttcctgaattggtatcagcagaagcctggcaaagccccaaagctgctgatctacgctgcatctaatctggagtcaggcgtgccttccaggttctccggtagtgggtctgggaccgatttcacattgaccatttcatccctccaacccgaggatttcgctacatattactgtcagcagtccaatgaggaccctctcacctttggccagggcaccaaagttgaaattaagagactcgaggacctgaagaacgtgttcccacctgaggtggccgtgttcgagcctagcgaggccgagatcagccacacccagaaagccaccctcgtgtgcctggctaccggcttctaccccgaccatgtggaactgtcttggtgggtcaacggcaaagaggtgcacagcggcgtgtgtaccgacccccagccactgaaagaacagcccgccctgaacgacagccggtactgcctgagcagcagactgagagtgtccgccaccttctggcagaacccccggaaccacttcagatgccaggtgcagttctacggcctgagcgagaacgacgagtggacccaggacagagccaagcccgtgacccagatcgtgtctgccgaagcctggggcagagccgattgcgacgtgaagctggtggaaaagagcttcgagacagacaccaacctgaacttccagaacctgagcgtgatcggcttcagaatcctgctgctgaaagtggccggctttaacctgctgatgaccctgcggctgtggtccagcagggccaagcgatctggatctggagcaacaaacttctcactactcaaacaagcaggtgacgtggaggagaatcccgggcctactagtatggactggatttggcgcatccttttccttgtcggcgctgctaccggcgcgcattccttcgaagtccaacttgtggagtctggagggggcctggtgcagcccggcggctctctcagactgtcttgtgcggcaagcggctacaccttcacctcttactggatagaatgggtgaggcaggcacctggaaagggactggagtggattggagagattctgccaggagggggagatacaaattacaatgaaatcttcaaggggcgggccaccttttcagcggataccagcaagaatacagcttacctgcagatgaatagcctccgggcagaagataccgctgtttattattgcacgagacgggtgccaataagactggactattgggggcaagggactcttgtcaccgtcagttcaacgcgtatccagaaccctgatcctgccgtgtaccagctgcgggatagcaagagcagcgacaagagcgtgtgtctgttcaccgacttcgacagccagaccaacgtgtcccagagcaaggactccgacgtgtacatcaccgataagtgcgtgctggacatgcggagcatggacttcaagagcaactccgccgtggcctggtccaacaagtccgatttcgcctgcgccaacgccttcaacaacagcattatccccgaggacacattcttcccaagccccgagagcagctgcggctttaccagcgagagctaccagcagggcgtgctgagcgccaccatcctgtacgagatcctgctgggcaaggccaccctgtacgccgtgctggtgtctgccctggtgctgatggctatggtcaagcggaaggacagccgggga

SEQ ID NO: 5618 - DNA, 2289 bp, synthetic construct
  source 1..2289: mol_type = other DNA
atggccttaccagtgaccgccttgctcctgccgctggccttgctgctccacgccgccaggccggaggtgcagctggttgaatctggcggaggactggttcagcctggcggatctctgagactgtcttgtgccgccagcggcttcaacatcaaggatacctgtatcggctgggttcgcagagcccctggcaaagaggaagaactggtcgccaaaatctgcaagtacagcggccacaccagatacgccgacagcgtgaagggcagattcaccatcagcgccgacaccagcaagaacaccgcctacctccagatgaacagcctgagagccgaggacaccgccgtgtactattgtgccgctgtgtccgtcagagatgggcactacaattactggggccagggcaccaccgtgaccgtttcttcaggtaccggcggaggcggatctggcggcggaggtagcggtggcggaggatctgaattcgacatccagttgacccagtcccccagctcactcagcgccagtgtgggggaccgggtgaccattacctgtaaagccagtcagagtgtggactatgacggggatagcttcctgaattggtatcagcagaagcctggcaaagccccaaagctgctgatctacgctgcatctaatctggagtcaggcgtgccttccaggttctccggtagtgggtctgggaccgatttcacattgaccatttcatccctccaacccgaggatttcgctacatattactgtcagcagtccaatgaggaccctctcacctttggccagggcaccaaagttgaaattaagagactcgagatccagaaccctgatcctgccgtgtaccagctgcgggatagcaagagcagcgacaagagcgtgtgtctgttcaccgacttcgacagccagaccaacgtgtcccagagcaaggactccgacgtgtacatcaccgataagtgcgtgctggacatgcggagcatggacttcaagagcaactccgccgtggcctggtccaacaagtccgatttcgcctgcgccaacgccttcaacaacagcattatccccgaggacacattcttcccaagccccgagagcagctgcggctttaccagcgagagctaccagcagggcgtgctgagcgccaccatcctgtacgagatcctgctgggcaaggccaccctgtacgccgtgctggtgtctgccctggtgctgatggctatggtcaagcggaaggacagccggggacgcgccaagagaagcggatctggcgtgaagcagaccctgaatttcgacctgctgaagctggctggcgacgtggaatccaacccaggccctactagtatggactggatttggcgcatccttttccttgtcggcgctgctaccggcgcgcattccttcgaagtccaacttgtggagtctggagggggcctggtgcagcccggcggctctctcagactgtcttgtgcggcaagcggctacaccttcacctcttactggatagaatgggtgaggcaggcacctggaaagggactggagtggattggagagattctgccaggagggggagatacaaattacaatgaaatcttcaaggggcgggccaccttttcagcggataccagcaagaatacagcttacctgcagatgaatagcctccgggcagaagataccgctgtttattattgcacgagacgggtgccaataagactggactattgggggcaagggactcttgtcaccgtcagttcaacgcgtgaggacctgaagaacgtgttcccacctgaggtggccgtgttcgagcctagcgaggccgagatcagccacacccagaaagccaccctcgtgtgcctggctaccggcttctaccccgaccatgtggaactgtcttggtgggtcaacggcaaagaggtgcacagcggcgtgtgtaccgacccccagccactgaaagaacagcccgccctgaacgacagccggtactgcctgagcagcagactgagagtgtccgccaccttctggcagaacccccggaaccacttcagatgccaggtgcagttctacggcctgagcgagaacgacgagtggacccaggacagagccaagcccgtgacccagatcgtgtctgccgaagcctggggcagagccgattgcgacgtgaagctggtggaaaagagcttcgagacagacaccaacctgaacttccagaacctgagcgtgatcggcttcagaatcctgctgctgaaagtggccggctttaacctgctgatgaccctgcggctgtggtccagc

SEQ ID NO: 5619 - DNA, 3393 bp, synthetic construct
  source 1..3393: mol_type = other DNA
atggccttaccagtgaccgccttgctcctgccgctggccttgctgctccacgccgccaggccggaagtgcagctggttgaatctggcggaggactggttcaggctggcggatctctgagactgtcttgtgccgccagcggcagaacctttagcatgggctggtttagacaggcccctggcaaagagagagagttcgtcgccgccatcacatactctggcggcagcccttactacgccgactctgtgaagggcagattcaccatcagccgggacaacgccaagaacaccgtgtacctccagatgaacagcctgaagcctgaggacaccgccgtgtactactgcgccgccaatccaacatacggcagcgactggaacgccgagaattggggccagggaacccaagtgacagtgtctagcggtaccggcggaggcggatctggcggcggaggtagcggtggcggaggatctgaattcgacatccagttgacccagtcccccagctcactcagcgccagtgtgggggaccgggtgaccattacctgtaaagccagtcagagtgtggactatgacggggatagcttcctgaattggtatcagcagaagcctggcaaagccccaaagctgctgatctacgctgcatctaatctggagtcaggcgtgccttccaggttctccggtagtgggtctgggaccgatttcacattgaccatttcatccctccaacccgaggatttcgctacatattactgtcagcagtccaatgaggaccctctcacctttggccagggcaccaaagttgaaattaagagactcgaggacctgaagaacgtgttcccacctgaggtggccgtgttcgagcctagcgaggccgagatcagccacacccagaaagccaccctcgtgtgcctggctaccggcttctaccccgaccatgtggaactgtcttggtgggtcaacggcaaagaggtgcacagcggcgtgtgtaccgacccccagccactgaaagaacagcccgccctgaacgacagccggtactgcctgagcagcagactgagagtgtccgccaccttctggcagaacccccggaaccacttcagatgccaggtgcagttctacggcctgagcgagaacgacgagtggacccaggacagagccaagcccgtgacccagatcgtgtctgccgaagcctggggcagagccgattgcgacgtgaagctggtggaaaagagcttcgagacagacaccaacctgaacttccagaacctgagcgtgatcggcttcagaatcctgctgctgaaagtggccggctttaacctgctgatgaccctgcggctgtggtccagcagggccaagcgatctggatctggagcaacaaacttctcactactcaaacaagcaggtgacgtggaggagaatcccgggcctactagtgccaccatggactggatttggcgcatccttttccttgtcggcgctgctaccggcgcccattccgggcccgaagtgcaactggttgaatccggtggcggcctggtgcaagcaggcggatctctcagacttagctgtgccgcctccggcagaaccttcacaatgggatggtttaggcaggctccagggaaagagagagagttcgtcgccgccatctctctgtctcccacactggcctactacgccgactctgtgaaaggccggttcaccatctccagagataatgccaagaacaccgtggtgctgcaaatgaactctctgaaacccgaggatacagccctgtactattgtgccgctgaccggaagtccgtgatgagcatcagacccgattactggggacagggcacacaagtcacagtgtcctctggatccggcggcggaggatctggcggaggcggatctgggggcggaggctctttcgaagtccaacttgtggagtctggagggggcctggtgcagcccggcggctctctcagactgtcttgtgcggcaagcggctacaccttcacctcttactggatagaatgggtgaggcaggcacctggaaagggactggagtggattggagagattctgccaggagggggagatacaaattacaatgaaatcttcaaggggcgggccaccttttcagcggataccagcaagaatacagcttacctgcagatgaatagcctccgggcagaagataccgctgtttattattgcacgagacgggtgccaataagactggactattgggggcaagggactcttgtcaccgtcagttcaacgcgtatccagaaccctgatcctgccgtgtaccagctgcgggatagcaagagcagcgacaagagcgtgtgtctgttcaccgacttcgacagccagaccaacgtgtcccagagcaaggactccgacgtgtacatcaccgataagtgcgtgctggacatgcggagcatggacttcaagagcaactccgccgtggcctggtccaacaagtccgatttcgcctgcgccaacgccttcaacaacagcattatccccgaggacacattcttcccaagccccgagagcagctgcggctttaccagcgagagctaccagcagggcgtgctgagcgccaccatcctgtacgagatcctgctgggcaaggccaccctgtacgccgtgctggtgtctgccctggtgctgatggctatggtcaagcggaaggacagccggggacgcgccaagagaagcggatctggcgtgaagcagaccctgaatttcgacctgctgaagctggctggcgacgtggaatccaacccaggcccttctagaggccatatgaccgagtacaagcccacggtgcgcctcgccacccgcgacgacgtccccagggccgtacgcaccctcgccgccgcgttcgccgactaccccgccacgcgccacaccgtcgatccggaccgccacatcgagcgggtcaccgagctgcaagaactcttcctcacgcgcgtcgggctcgacatcggcaaggtgtgggtcgcggacgacggcgccgcggtggcggtctggaccacgccggagagcgtcgaagcgggggcggtgttcgccgagatcggcccgcgcatggccgagttgagcggttcccggctggccgcgcagcaacagatggaaggcctcctggcgccgcaccggcccaaggagcccgcgtggttcctggccaccgtcggcgtctcgcccgaccaccagggcaagggtctgggcagcgccgtcgtgctccccggagtggaggcggccgagcgcgccggggtgcccgccttcctggagacctccgcgccccgcaacctccccttctacgagcggctcggcttcaccgtcaccgccgacgtcgaggtgcccgaaggaccgcgcacctggtgcatgacccgcaagcccggtgcctga

SEQ ID NO: 5620 - DNA, 2307 bp, synthetic construct
  source 1..2307: mol_type = other DNA
atggccttaccagtgaccgccttgctcctgccgctggccttgctgctccacgccgccaggccggaagtgcagctggttgaatctggcggaggactggttcagcctggcggatctctgagactgtcttgtgccgcctctggcttcgccagcgactactatatcatcggctggttcagacaggcccctggcaaagagagagagggcgtcagctgtatcagcagcagatacgccaacaccaactacgccgacagcgtgaagggcagattcaccatcagccgggacaacgccaagaacaccgtgtacctccagatgaacagcctgaagcctgaggacaccgccgtgtactactgtgccgccgacaccagaagatacacctgtcctgacattgccaccatgcaccggaacttcgattcttggggccagggcacactggtcaccgtttcttctggtaccggcggaggcggatctggcggcggaggtagcggtggcggaggatctgaattcgacatccagttgacccagtcccccagctcactcagcgccagtgtgggggaccgggtgaccattacctgtaaagccagtcagagtgtggactatgacggggatagcttcctgaattggtatcagcagaagcctggcaaagccccaaagctgctgatctacgctgcatctaatctggagtcaggcgtgccttccaggttctccggtagtgggtctgggaccgatttcacattgaccatttcatccctccaacccgaggatttcgctacatattactgtcagcagtccaatgaggaccctctcacctttggccagggcaccaaagttgaaattaagagactcgaggacctgaagaacgtgttcccacctgaggtggccgtgttcgagcctagcgaggccgagatcagccacacccagaaagccaccctcgtgtgcctggctaccggcttctaccccgaccatgtggaactgtcttggtgggtcaacggcaaagaggtgcacagcggcgtgtgtaccgacccccagccactgaaagaacagcccgccctgaacgacagccggtactgcctgagcagcagactgagagtgtccgccaccttctggcagaacccccggaaccacttcagatgccaggtgcagttctacggcctgagcgagaacgacgagtggacccaggacagagccaagcccgtgacccagatcgtgtctgccgaagcctggggcagagccgattgcgacgtgaagctggtggaaaagagcttcgagacagacaccaacctgaacttccagaacctgagcgtgatcggcttcagaatcctgctgctgaaagtggccggctttaacctgctgatgaccctgcggctgtggtccagcagggccaagcgatctggatctggagcaacaaacttctcactactcaaacaagcaggtgacgtggaggagaatcccgggcctactagtatggactggatttggcgcatccttttccttgtcggcgctgctaccggcgcgcattccttcgaagtccaacttgtggagtctggagggggcctggtgcagcccggcggctctctcagactgtcttgtgcggcaagcggctacaccttcacctcttactggatagaatgggtgaggcaggcacctggaaagggactggagtggattggagagattctgccaggagggggagatacaaattacaatgaaatcttcaaggggcgggccaccttttcagcggataccagcaagaatacagcttacctgcagatgaatagcctccgggcagaagataccgctgtttattattgcacgagacgggtgccaataagactggactattgggggcaagggactcttgtcaccgtcagttcaacgcgtatccagaaccctgatcctgccgtgtaccagctgcgggatagcaagagcagcgacaagagcgtgtgtctgttcaccgacttcgacagccagaccaacgtgtcccagagcaaggactccgacgtgtacatcaccgataagtgcgtgctggacatgcggagcatggacttcaagagcaactccgccgtggcctggtccaacaagtccgatttcgcctgcgccaacgccttcaacaacagcattatccccgaggacacattcttcccaagccccgagagcagctgcggctttaccagcgagagctaccagcagggcgtgctgagcgccaccatcctgtacgagatcctgctgggcaaggccaccctgtacgccgtgctggtgtctgccctggtgctgatggctatggtcaagcggaaggacagccggggataa

SEQ ID NO: 5621 - DNA, 2307 bp, synthetic construct
  source 1..2307: mol_type = other DNA
atggccttaccagtgaccgccttgctcctgccgctggccttgctgctccacgccgccaggccggaagtgcagctggttgaatctggcggaggactggttcagcctggcggatctctgagactgagctgtgaagccagcggcttcgccagcgacgattacatcatcggctggttcagacaggcccctggcaaagagagagagggcgtcagctgcatcagctctaagtacgccaacaccgtgtacaccgacagcgtgaagggcagattcagactgagcagaggcaccgccaagaataccgtgtacctccagatgagcgccctgaagcctgaggataccgccgtgtactactgcgctatggacagccgcagagtgacatgccctgagatcagcaccatgcaccggaacttcgattcttggggccagggcacactggtcacagtgtcatctggtaccggcggaggcggatctggcggcggaggtagcggtggcggaggatctgaattcgacatccagttgacccagtcccccagctcactcagcgccagtgtgggggaccgggtgaccattacctgtaaagccagtcagagtgtggactatgacggggatagcttcctgaattggtatcagcagaagcctggcaaagccccaaagctgctgatctacgctgcatctaatctggagtcaggcgtgccttccaggttctccggtagtgggtctgggaccgatttcacattgaccatttcatccctccaacccgaggatttcgctacatattactgtcagcagtccaatgaggaccctctcacctttggccagggcaccaaagttgaaattaagagactcgaggacctgaagaacgtgttcccacctgaggtggccgtgttcgagcctagcgaggccgagatcagccacacccagaaagccaccctcgtgtgcctggctaccggcttctaccccgaccatgtggaactgtcttggtgggtcaacggcaaagaggtgcacagcggcgtgtgtaccgacccccagccactgaaagaacagcccgccctgaacgacagccggtactgcctgagcagcagactgagagtgtccgccaccttctggcagaacccccggaaccacttcagatgccaggtgcagttctacggcctgagcgagaacgacgagtggacccaggacagagccaagcccgtgacccagatcgtgtctgccgaagcctggggcagagccgattgcgacgtgaagctggtggaaaagagcttcgagacagacaccaacctgaacttccagaacctgagcgtgatcggcttcagaatcctgctgctgaaagtggccggctttaacctgctgatgaccctgcggctgtggtccagcagggccaagcgatctggatctggagcaacaaacttctcactactcaaacaagcaggtgacgtggaggagaatcccgggcctactagtatggactggatttggcgcatccttttccttgtcggcgctgctaccggcgcgcattccttcgaagtccaacttgtggagtctggagggggcctggtgcagcccggcggctctctcagactgtcttgtgcggcaagcggctacaccttcacctcttactggatagaatgggtgaggcaggcacctggaaagggactggagtggattggagagattctgccaggagggggagatacaaattacaatgaaatcttcaaggggcgggccaccttttcagcggataccagcaagaatacagcttacctgcagatgaatagcctccgggcagaagataccgctgtttattattgcacgagacgggtgccaataagactggactattgggggcaagggactcttgtcaccgtcagttcaacgcgtatccagaaccctgatcctgccgtgtaccagctgcgggatagcaagagcagcgacaagagcgtgtgtctgttcaccgacttcgacagccagaccaacgtgtcccagagcaaggactccgacgtgtacatcaccgataagtgcgtgctggacatgcggagcatggacttcaagagcaactccgccgtggcctggtccaacaagtccgatttcgcctgcgccaacgccttcaacaacagcattatccccgaggacacattcttcccaagccccgagagcagctgcggctttaccagcgagagctaccagcagggcgtgctgagcgccaccatcctgtacgagatcctgctgggcaaggccaccctgtacgccgtgctggtgtctgccctggtgctgatggctatggtcaagcggaaggacagccggggataa

SEQ ID NO: 5622 - DNA, 2304 bp, synthetic construct
  source 1..2304: mol_type = other DNA
atggccttaccagtgaccgccttgctcctgccgctggccttgctgctccacgccgccaggccggaagtgcagctggttgaatctggcggaggactggttcagcctggcggatctctgagactgtcttgtgccgcctctggcttcgccagcgactactatatcatcggctggttcagacaggcccctggcaaagagagagagggcgtcagctgtatcagcagcagatacgccaacaccaactacgccgacagcgtgaagggcagattcaccatcagccgggacaacgccaagaacaccgtgtacctccagatgaacagcctgaagcctgaggacaccgccgtgtactactgtgccgccgacaccagaagatacacctgtcctgacattgccaccatgcaccggaacttcgattcttggggccagggcacactggtcaccgtttcttctggtaccggcggaggcggatctggcggcggaggtagcggtggcggaggatctgaattcgacatccagttgacccagtcccccagctcactcagcgccagtgtgggggaccgggtgaccattacctgtaaagccagtcagagtgtggactatgacggggatagcttcctgaattggtatcagcagaagcctggcaaagccccaaagctgctgatctacgctgcatctaatctggagtcaggcgtgccttccaggttctccggtagtgggtctgggaccgatttcacattgaccatttcatccctccaacccgaggatttcgctacatattactgtcagcagtccaatgaggaccctctcacctttggccagggcaccaaagttgaaattaagagactcgagatccagaaccctgatcctgccgtgtaccagctgcgggatagcaagagcagcgacaagagcgtgtgtctgttcaccgacttcgacagccagaccaacgtgtcccagagcaaggactccgacgtgtacatcaccgataagtgcgtgctggacatgcggagcatggacttcaagagcaactccgccgtggcctggtccaacaagtccgatttcgcctgcgccaacgccttcaacaacagcattatccccgaggacacattcttcccaagccccgagagcagctgcggctttaccagcgagagctaccagcagggcgtgctgagcgccaccatcctgtacgagatcctgctgggcaaggccaccctgtacgccgtgctggtgtctgccctggtgctgatggctatggtcaagcggaaggacagccggggaagggccaagcgatctggatctggagcaacaaacttctcactactcaaacaagcaggtgacgtggaggagaatcccgggcctactagtatggactggatttggcgcatccttttccttgtcggcgctgctaccggcgcgcattccttcgaagtccaacttgtggagtctggagggggcctggtgcagcccggcggctctctcagactgtcttgtgcggcaagcggctacaccttcacctcttactggatagaatgggtgaggcaggcacctggaaagggactggagtggattggagagattctgccaggagggggagatacaaattacaatgaaatcttcaaggggcgggccaccttttcagcggataccagcaagaatacagcttacctgcagatgaatagcctccgggcagaagataccgctgtttattattgcacgagacgggtgccaataagactggactattgggggcaagggactcttgtcaccgtcagttcaacgcgtgacctgaagaacgtgttcccacctgaggtggccgtgttcgagcctagcgaggccgagatcagccacacccagaaagccaccctcgtgtgcctggctaccggcttctaccccgaccatgtggaactgtcttggtgggtcaacggcaaagaggtgcacagcggcgtgtgtaccgacccccagccactgaaagaacagcccgccctgaacgacagccggtactgcctgagcagcagactgagagtgtccgccaccttctggcagaacccccggaaccacttcagatgccaggtgcagttctacggcctgagcgagaacgacgagtggacccaggacagagccaagcccgtgacccagatcgtgtctgccgaagcctggggcagagccgattgcgacgtgaagctggtggaaaagagcttcgagacagacaccaacctgaacttccagaacctgagcgtgatcggcttcagaatcctgctgctgaaagtggccggctttaacctgctgatgaccctgcggctgtggtccagc

SEQ ID NO: 5623 - DNA, 2304 bp, synthetic construct
  source 1..2304: mol_type = other DNA
atggccttaccagtgaccgccttgctcctgccgctggccttgctgctccacgccgccaggccggaagtgcagctggttgaatctggcggaggactggttcagcctggcggatctctgagactgagctgtgaagccagcggcttcgccagcgacgattacatcatcggctggttcagacaggcccctggcaaagagagagagggcgtcagctgcatcagctctaagtacgccaacaccgtgtacaccgacagcgtgaagggcagattcagactgagcagaggcaccgccaagaataccgtgtacctccagatgagcgccctgaagcctgaggataccgccgtgtactactgcgctatggacagccgcagagtgacatgccctgagatcagcaccatgcaccggaacttcgattcttggggccagggcacactggtcacagtgtcatctggtaccggcggaggcggatctggcggcggaggtagcggtggcggaggatctgaattcgacatccagttgacccagtcccccagctcactcagcgccagtgtgggggaccgggtgaccattacctgtaaagccagtcagagtgtggactatgacggggatagcttcctgaattggtatcagcagaagcctggcaaagccccaaagctgctgatctacgctgcatctaatctggagtcaggcgtgccttccaggttctccggtagtgggtctgggaccgatttcacattgaccatttcatccctccaacccgaggatttcgctacatattactgtcagcagtccaatgaggaccctctcacctttggccagggcaccaaagttgaaattaagagactcgagatccagaaccctgatcctgccgtgtaccagctgcgggatagcaagagcagcgacaagagcgtgtgtctgttcaccgacttcgacagccagaccaacgtgtcccagagcaaggactccgacgtgtacatcaccgataagtgcgtgctggacatgcggagcatggacttcaagagcaactccgccgtggcctggtccaacaagtccgatttcgcctgcgccaacgccttcaacaacagcattatccccgaggacacattcttcccaagccccgagagcagctgcggctttaccagcgagagctaccagcagggcgtgctgagcgccaccatcctgtacgagatcctgctgggcaaggccaccctgtacgccgtgctggtgtctgccctggtgctgatggctatggtcaagcggaaggacagccggggaagggccaagcgatctggatctggagcaacaaacttctcactactcaaacaagcaggtgacgtggaggagaatcccgggcctactagtatggactggatttggcgcatccttttccttgtcggcgctgctaccggcgcgcattccttcgaagtccaacttgtggagtctggagggggcctggtgcagcccggcggctctctcagactgtcttgtgcggcaagcggctacaccttcacctcttactggatagaatgggtgaggcaggcacctggaaagggactggagtggattggagagattctgccaggagggggagatacaaattacaatgaaatcttcaaggggcgggccaccttttcagcggataccagcaagaatacagcttacctgcagatgaatagcctccgggcagaagataccgctgtttattattgcacgagacgggtgccaataagactggactattgggggcaagggactcttgtcaccgtcagttcaacgcgtgacctgaagaacgtgttcccacctgaggtggccgtgttcgagcctagcgaggccgagatcagccacacccagaaagccaccctcgtgtgcctggctaccggcttctaccccgaccatgtggaactgtcttggtgggtcaacggcaaagaggtgcacagcggcgtgtgtaccgacccccagccactgaaagaacagcccgccctgaacgacagccggtactgcctgagcagcagactgagagtgtccgccaccttctggcagaacccccggaaccacttcagatgccaggtgcagttctacggcctgagcgagaacgacgagtggacccaggacagagccaagcccgtgacccagatcgtgtctgccgaagcctggggcagagccgattgcgacgtgaagctggtggaaaagagcttcgagacagacaccaacctgaacttccagaacctgagcgtgatcggcttcagaatcctgctgctgaaagtggccggctttaacctgctgatgaccctgcggctgtggtccagc

SEQ ID NO: 5624 - DNA, 2277 bp, synthetic construct
  source 1..2277: mol_type = other DNA
atggccttaccagtgaccgccttgctcctgccgctggccttgctgctccacgccgccaggccgcaagtcaaactggaagaaagcggtggcggcctggtgcaacctggcgaatctctgagactgagctgtagcgccagcggctccatcttcaaggtgttcagagtgttcgccatgagctggtacaggcaaggccctggcaagcagagagagctggtcgcctctatcagcagcggcgagacaaccacatacgccgaatctgtgaaaggccggttcaccatcagccgggataatgccaagaataccgcctatctccagatggactccctgaagcctgaagatacagctgtgtactactgcaacgccgaccataccttcaccggcgatttttggggccagggaacccaagtgaccgtgtctagtggtaccggcggaggcggatctggcggcggaggtagcggtggcggaggatctgaattcgacatccagttgacccagtcccccagctcactcagcgccagtgtgggggaccgggtgaccattacctgtaaagccagtcagagtgtggactatgacggggatagcttcctgaattggtatcagcagaagcctggcaaagccccaaagctgctgatctacgctgcatctaatctggagtcaggcgtgccttccaggttctccggtagtgggtctgggaccgatttcacattgaccatttcatccctccaacccgaggatttcgctacatattactgtcagcagtccaatgaggaccctctcacctttggccagggcaccaaagttgaaattaagagactcgagatccagaaccctgatcctgccgtgtaccagctgcgggatagcaagagcagcgacaagagcgtgtgtctgttcaccgacttcgacagccagaccaacgtgtcccagagcaaggactccgacgtgtacatcaccgataagtgcgtgctggacatgcggagcatggacttcaagagcaactccgccgtggcctggtccaacaagtccgatttcgcctgcgccaacgccttcaacaacagcattatccccgaggacacattcttcccaagccccgagagcagctgcggctttaccagcgagagctaccagcagggcgtgctgagcgccaccatcctgtacgagatcctgctgggcaaggccaccctgtacgccgtgctggtgtctgccctggtgctgatggctatggtcaagcggaaggacagccggggaagggccaagcgatctggatctggagcaacaaacttctcactactcaaacaagcaggtgacgtggaggagaatcccgggcctactagtatggactggatttggcgcatccttttccttgtcggcgctgctaccggcgcgcattccttcgaagtccaacttgtggagtctggagggggcctggtgcagcccggcggctctctcagactgtcttgtgcggcaagcggctacaccttcacctcttactggatagaatgggtgaggcaggcacctggaaagggactggagtggattggagagattctgccaggagggggagatacaaattacaatgaaatcttcaaggggcgggccaccttttcagcggataccagcaagaatacagcttacctgcagatgaatagcctccgggcagaagataccgctgtttattattgcacgagacgggtgccaataagactggactattgggggcaagggactcttgtcaccgtcagttcaacgcgtgacctgaagaacgtgttcccacctgaggtggccgtgttcgagcctagcgaggccgagatcagccacacccagaaagccaccctcgtgtgcctggctaccggcttctaccccgaccatgtggaactgtcttggtgggtcaacggcaaagaggtgcacagcggcgtgtgtaccgacccccagccactgaaagaacagcccgccctgaacgacagccggtactgcctgagcagcagactgagagtgtccgccaccttctggcagaacccccggaaccacttcagatgccaggtgcagttctacggcctgagcgagaacgacgagtggacccaggacagagccaagcccgtgacccagatcgtgtctgccgaagcctggggcagagccgattgcgacgtgaagctggtggaaaagagcttcgagacagacaccaacctgaacttccagaacctgagcgtgatcggcttcagaatcctgctgctgaaagtggccggctttaacctgctgatgaccctgcggctgtggtccagc

SEQ ID NO: 5625 - DNA, 2283 bp, synthetic construct
  source 1..2283: mol_type = other DNA
atggccttaccagtgaccgccttgctcctgccgctggccttgctgctccacgccgccaggccggacatccagttgacccagtcccccagctcactcagcgccagtgtgggggaccgggtgaccattacctgtaaagccagtcagagtgtggactatgacggggatagcttcctgaattggtatcagcagaagcctggcaaagccccaaagctgctgatctacgctgcatctaatctggagtcaggcgtgccttccaggttctccggtagtgggtctgggaccgatttcacattgaccatttcatccctccaacccgaggatttcgctacatattactgtcagcagtccaatgaggaccctctcacctttggccagggcaccaaagttgaaattaagagactcgaggacctgaagaacgtgttcccacctgaggtggccgtgttcgagcctagcgaggccgagatcagccacacccagaaagccaccctcgtgtgcctggctaccggcttctaccccgaccatgtggaactgtcttggtgggtcaacggcaaagaggtgcacagcggcgtgtgtaccgacccccagccactgaaagaacagcccgccctgaacgacagccggtactgcctgagcagcagactgagagtgtccgccaccttctggcagaacccccggaaccacttcagatgccaggtgcagttctacggcctgagcgagaacgacgagtggacccaggacagagccaagcccgtgacccagatcgtgtctgccgaagcctggggcagagccgattgcgacgtgaagctggtggaaaagagcttcgagacagacaccaacctgaacttccagaacctgagcgtgatcggcttcagaatcctgctgctgaaagtggccggctttaacctgctgatgaccctgcggctgtggtccagcagggccaagcgatctggatctggagcaacaaacttctcactactcaaacaagcaggtgacgtggaggagaatcccgggcctactagtgccaccatggactggatttggcgcatccttttccttgtcggcgctgctaccggcgcccattccgggcccgaagtgcagctggttgaatctggcggaggactggttcaggctggcggatctctgagactgtcttgtgccgccagcggcagaacctttagcatgggctggtttagacaggcccctggcaaagagagagagttcgtcgccgccatcacatactctggcggcagcccttactacgccgactctgtgaagggcagattcaccatcagccgggacaacgccaagaacaccgtgtacctccagatgaacagcctgaagcctgaggacaccgccgtgtactactgcgccgccaatccaacatacggcagcgactggaacgccgagaattggggccagggaacccaagtgacagtgtctagcggatccggcggcggaggatctggcggaggcggatctgggggcggaggctctttcgaagtccaacttgtggagtctggagggggcctggtgcagcccggcggctctctcagactgtcttgtgcggcaagcggctacaccttcacctcttactggatagaatgggtgaggcaggcacctggaaagggactggagtggattggagagattctgccaggagggggagatacaaattacaatgaaatcttcaaggggcgggccaccttttcagcggataccagcaagaatacagcttacctgcagatgaatagcctccgggcagaagataccgctgtttattattgcacgagacgggtgccaataagactggactattgggggcaagggactcttgtcaccgtcagttcaacgcgtatccagaaccctgatcctgccgtgtaccagctgcgggatagcaagagcagcgacaagagcgtgtgtctgttcaccgacttcgacagccagaccaacgtgtcccagagcaaggactccgacgtgtacatcaccgataagtgcgtgctggacatgcggagcatggacttcaagagcaactccgccgtggcctggtccaacaagtccgatttcgcctgcgccaacgccttcaacaacagcattatccccgaggacacattcttcccaagccccgagagcagctgcggctttaccagcgagagctaccagcagggcgtgctgagcgccaccatcctgtacgagatcctgctgggcaaggccaccctgtacgccgtgctggtgtctgccctggtgctgatggctatggtcaagcggaaggacagccggggataa

SEQ ID NO: 5626 - DNA, 2286 bp, synthetic construct
  source 1..2286: mol_type = other DNA
atggccttaccagtgaccgccttgctcctgccgctggccttgctgctccacgccgccaggccggacatccagttgacccagtcccccagctcactcagcgccagtgtgggggaccgggtgaccattacctgtaaagccagtcagagtgtggactatgacggggatagcttcctgaattggtatcagcagaagcctggcaaagccccaaagctgctgatctacgctgcatctaatctggagtcaggcgtgccttccaggttctccggtagtgggtctgggaccgatttcacattgaccatttcatccctccaacccgaggatttcgctacatattactgtcagcagtccaatgaggaccctctcacctttggccagggcaccaaagttgaaattaagagactcgaggacctgaagaacgtgttcccacctgaggtggccgtgttcgagcctagcgaggccgagatcagccacacccagaaagccaccctcgtgtgcctggctaccggcttctaccccgaccatgtggaactgtcttggtgggtcaacggcaaagaggtgcacagcggcgtgtgtaccgacccccagccactgaaagaacagcccgccctgaacgacagccggtactgcctgagcagcagactgagagtgtccgccaccttctggcagaacccccggaaccacttcagatgccaggtgcagttctacggcctgagcgagaacgacgagtggacccaggacagagccaagcccgtgacccagatcgtgtctgccgaagcctggggcagagccgattgcgacgtgaagctggtggaaaagagcttcgagacagacaccaacctgaacttccagaacctgagcgtgatcggcttcagaatcctgctgctgaaagtggccggctttaacctgctgatgaccctgcggctgtggtccagcagggccaagcgatctggatctggagcaacaaacttctcactactcaaacaagcaggtgacgtggaggagaatcccgggcctactagtgccaccatggactggatttggcgcatccttttccttgtcggcgctgctaccggcgcccattccgggcccgaagtgcaactggtggaatctgggggcggactggtgcagccaggcggaagtctgaggctgtcttgtgccgcctccggcagcatcttcggcttcaacgacatggcctggtatcggcaggctcccggaaaacagcgcgagctggtggctctgattagcagagtgggcgtgaccagcagcgccgactctgtgaagggcagattcacaatctccagagtgaacgccaaggatacagtgtacctccagatgaactctctgaaacctgaggatacagcagtgtactattgctacatggaccagcggctggacggcagcacactggcctactggggacagggaactcaagtgacagtgtctagcggatccggcggcggaggatctggcggaggcggatctgggggcggaggctctttcgaagtccaacttgtggagtctggagggggcctggtgcagcccggcggctctctcagactgtcttgtgcggcaagcggctacaccttcacctcttactggatagaatgggtgaggcaggcacctggaaagggactggagtggattggagagattctgccaggagggggagatacaaattacaatgaaatcttcaaggggcgggccaccttttcagcggataccagcaagaatacagcttacctgcagatgaatagcctccgggcagaagataccgctgtttattattgcacgagacgggtgccaataagactggactattgggggcaagggactcttgtcaccgtcagttcaacgcgtatccagaaccctgatcctgccgtgtaccagctgcgggatagcaagagcagcgacaagagcgtgtgtctgttcaccgacttcgacagccagaccaacgtgtcccagagcaaggactccgacgtgtacatcaccgataagtgcgtgctggacatgcggagcatggacttcaagagcaactccgccgtggcctggtccaacaagtccgatttcgcctgcgccaacgccttcaacaacagcattatccccgaggacacattcttcccaagccccgagagcagctgcggctttaccagcgagagctaccagcagggcgtgctgagcgccaccatcctgtacgagatcctgctgggcaaggccaccctgtacgccgtgctggtgtctgccctggtgctgatggctatggtcaagcggaaggacagccggggataa

SEQ ID NO: 5627 - DNA, 2274 bp, synthetic construct
  source 1..2274: mol_type = other DNA
atggccttaccagtgaccgccttgctcctgccgctggccttgctgctccacgccgccaggccggacatccagttgacccagtcccccagctcactcagcgccagtgtgggggaccgggtgaccattacctgtaaagccagtcagagtgtggactatgacggggatagcttcctgaattggtatcagcagaagcctggcaaagccccaaagctgctgatctacgctgcatctaatctggagtcaggcgtgccttccaggttctccggtagtgggtctgggaccgatttcacattgaccatttcatccctccaacccgaggatttcgctacatattactgtcagcagtccaatgaggaccctctcacctttggccagggcaccaaagttgaaattaagagactcgaggacctgaagaacgtgttcccacctgaggtggccgtgttcgagcctagcgaggccgagatcagccacacccagaaagccaccctcgtgtgcctggctaccggcttctaccccgaccatgtggaactgtcttggtgggtcaacggcaaagaggtgcacagcggcgtgtgtaccgacccccagccactgaaagaacagcccgccctgaacgacagccggtactgcctgagcagcagactgagagtgtccgccaccttctggcagaacccccggaaccacttcagatgccaggtgcagttctacggcctgagcgagaacgacgagtggacccaggacagagccaagcccgtgacccagatcgtgtctgccgaagcctggggcagagccgattgcgacgtgaagctggtggaaaagagcttcgagacagacaccaacctgaacttccagaacctgagcgtgatcggcttcagaatcctgctgctgaaagtggccggctttaacctgctgatgaccctgcggctgtggtccagcagggccaagcgatctggatctggagcaacaaacttctcactactcaaacaagcaggtgacgtggaggagaatcccgggcctactagtgccaccatggactggatttggcgcatccttttccttgtcggcgctgctaccggcgcccattccgggcccgaggtgcagctggttgaatctggcggaggactggttcaggctggcggatctctgagactgtcttgtgccgccagcggctctgtgttcagcggcaatgtgatgggctggtacagacaggcccctggcaaagaaagagagtgggttgccgccattgccagcggcggcagcatctactacagagactctgtgaagggcagattcaccatcagccgggacaacgccaagaacaccgtgtacctccagatgaacagcctgaagcctgaggacaccgccgtgtactactgcaactctcaccctcctacactgccctattggggcctgggaacccaagtgacagtgtcctctggatccggcggcggaggatctggcggaggcggatctgggggcggaggctctttcgaagtccaacttgtggagtctggagggggcctggtgcagcccggcggctctctcagactgtcttgtgcggcaagcggctacaccttcacctcttactggatagaatgggtgaggcaggcacctggaaagggactggagtggattggagagattctgccaggagggggagatacaaattacaatgaaatcttcaaggggcgggccaccttttcagcggataccagcaagaatacagcttacctgcagatgaatagcctccgggcagaagataccgctgtttattattgcacgagacgggtgccaataagactggactattgggggcaagggactcttgtcaccgtcagttcaacgcgtatccagaaccctgatcctgccgtgtaccagctgcgggatagcaagagcagcgacaagagcgtgtgtctgttcaccgacttcgacagccagaccaacgtgtcccagagcaaggactccgacgtgtacatcaccgataagtgcgtgctggacatgcggagcatggacttcaagagcaactccgccgtggcctggtccaacaagtccgatttcgcctgcgccaacgccttcaacaacagcattatccccgaggacacattcttcccaagccccgagagcagctgcggctttaccagcgagagctaccagcagggcgtgctgagcgccaccatcctgtacgagatcctgctgggcaaggccaccctgtacgccgtgctggtgtctgccctggtgctgatggctatggtcaagcggaaggacagccggggataa

SEQ ID NO: 5628 - DNA, 2268 bp, synthetic construct
  source 1..2268: mol_type = other DNA
atggccttaccagtgaccgccttgctcctgccgctggccttgctgctccacgccgccaggccggacatccagttgacccagtcccccagctcactcagcgccagtgtgggggaccgggtgaccattacctgtaaagccagtcagagtgtggactatgacggggatagcttcctgaattggtatcagcagaagcctggcaaagccccaaagctgctgatctacgctgcatctaatctggagtcaggcgtgccttccaggttctccggtagtgggtctgggaccgatttcacattgaccatttcatccctccaacccgaggatttcgctacatattactgtcagcagtccaatgaggaccctctcacctttggccagggcaccaaagttgaaattaagagactcgaggacctgaagaacgtgttcccacctgaggtggccgtgttcgagcctagcgaggccgagatcagccacacccagaaagccaccctcgtgtgcctggctaccggcttctaccccgaccatgtggaactgtcttggtgggtcaacggcaaagaggtgcacagcggcgtgtgtaccgacccccagccactgaaagaacagcccgccctgaacgacagccggtactgcctgagcagcagactgagagtgtccgccaccttctggcagaacccccggaaccacttcagatgccaggtgcagttctacggcctgagcgagaacgacgagtggacccaggacagagccaagcccgtgacccagatcgtgtctgccgaagcctggggcagagccgattgcgacgtgaagctggtggaaaagagcttcgagacagacaccaacctgaacttccagaacctgagcgtgatcggcttcagaatcctgctgctgaaagtggccggctttaacctgctgatgaccctgcggctgtggtccagcagggccaagcgatctggatctggagcaacaaacttctcactactcaaacaagcaggtgacgtggaggagaatcccgggcctactagtgccaccatggactggatttggcgcatccttttccttgtcggcgctgctaccggcgcccattccgggcccgaagttcagctgctggaatctggcggaggactcgttcaacctggcggctctctgagactgagctgtgccgcttctggcttcagcttctctagctacgccctgagctgggttcgacaagctcccggaaagggccttgaatgggtgtccagcatcggcgagaatgacggcaccacagactatgccgatgccgtgaaaggccggtttaccatcagcagagacaattccaagaacacgctctatctgcaaatgaactccctgcgcgtggaagatacagccgtgtattattgcgtgaaggacggcatccactggggacagggaaccctggttacagtgtctagcggatccggcggcggaggatctggcggaggcggatctgggggcggaggctctttcgaagtccaacttgtggagtctggagggggcctggtgcagcccggcggctctctcagactgtcttgtgcggcaagcggctacaccttcacctcttactggatagaatgggtgaggcaggcacctggaaagggactggagtggattggagagattctgccaggagggggagatacaaattacaatgaaatcttcaaggggcgggccaccttttcagcggataccagcaagaatacagcttacctgcagatgaatagcctccgggcagaagataccgctgtttattattgcacgagacgggtgccaataagactggactattgggggcaagggactcttgtcaccgtcagttcaacgcgtatccagaaccctgatcctgccgtgtaccagctgcgggatagcaagagcagcgacaagagcgtgtgtctgttcaccgacttcgacagccagaccaacgtgtcccagagcaaggactccgacgtgtacatcaccgataagtgcgtgctggacatgcggagcatggacttcaagagcaactccgccgtggcctggtccaacaagtccgatttcgcctgcgccaacgccttcaacaacagcattatccccgaggacacattcttcccaagccccgagagcagctgcggctttaccagcgagagctaccagcagggcgtgctgagcgccaccatcctgtacgagatcctgctgggcaaggccaccctgtacgccgtgctggtgtctgccctggtgctgatggctatggtcaagcggaaggacagccggggataa

SEQ ID NO: 5629 - DNA, 3375 bp, synthetic construct
  source 1..3375: mol_type = other DNA
atgggacccagactgctgttttgggctctgctgtgtctgctcggcacaggacctgttgaagctggcgtgacacagagccccacacacctgattaagaccagaggccagcaggccacactgagatgcagccctatcagcggccacaccagcgtgtactggtatcagcaggctctcggactgggcctccagttcctgctttggtacgacgagggcgaagagagaaaccggggcaacttccctcctcggttttccggcagacagttccccaactacagcagcgagctgaacgtgaacgccctggaactggaagatagcgccctgtacctgtgtgcctcttctcttggtggacctcgcggactggctggactgagaggggatgagcagtttttcggccctggcaccagactgaccgtgctggaaggtaccggcggaggcggatctggcggcggagaattcgacatccagttgacccagtcccccagctcactcagcgccagtgtgggggaccgggtgaccattacctgtaaagccagtcagagtgtggactatgacggggatagcttcctgaattggtatcagcagaagcctggcaaagccccaaagctgctgatctacgctgcatctaatctggagtcaggcgtgccttccaggttctccggtagtgggtctgggaccgatttcacattgaccatttcatccctccaacccgaggatttcgctacatattactgtcagcagtccaatgaggaccctctcacctttggccagggcaccaaagttgaaattaagagactcgaggacctgaagaacgtgttcccacctgaggtggccgtgttcgagcctagcgaggccgagatcagccacacccagaaagccaccctcgtgtgcctggctaccggcttctaccccgaccatgtggaactgtcttggtgggtcaacggcaaagaggtgcacagcggcgtgtgtaccgacccccagccactgaaagaacagcccgccctgaacgacagccggtactgcctgagcagcagactgagagtgtccgccaccttctggcagaacccccggaaccacttcagatgccaggtgcagttctacggcctgagcgagaacgacgagtggacccaggacagagccaagcccgtgacccagatcgtgtctgccgaagcctggggcagagccgattgcgacgtgaagctggtggaaaagagcttcgagacagacaccaacctgaacttccagaacctgagcgtgatcggcttcagaatcctgctgctgaaagtggccggctttaacctgctgatgaccctgcggctgtggtccagcagggccaagcgatctggatctggagcaacaaacttctcactactcaaacaagcaggtgacgtggaggagaatcccgggcctactagtgccaccatggactggatttggcgcatccttttccttgtcggcgctgctaccggcgcccattccgggcccgaagtgcagctggttgaatctggcggaggactggttcaggctggcggatctctgagactgtcttgtgccgccagcggcagaacctttagcatgggctggtttagacaggcccctggcaaagagagagagttcgtcgccgccatcacatactctggcggcagcccttactacgccgactctgtgaagggcagattcaccatcagccgggacaacgccaagaacaccgtgtacctccagatgaacagcctgaagcctgaggacaccgccgtgtactactgcgccgccaatccaacatacggcagcgactggaacgccgagaattggggccagggaacccaagtgacagtgtctagcggatccggcggcggaggatctggcggaggcggatctgggggcggaggctctttcgaagtccaacttgtggagtctggagggggcctggtgcagcccggcggctctctcagactgtcttgtgcggcaagcggctacaccttcacctcttactggatagaatgggtgaggcaggcacctggaaagggactggagtggattggagagattctgccaggagggggagatacaaattacaatgaaatcttcaaggggcgggccaccttttcagcggataccagcaagaatacagcttacctgcagatgaatagcctccgggcagaagataccgctgtttattattgcacgagacgggtgccaataagactggactattgggggcaagggactcttgtcaccgtcagttcaacgcgtatccagaaccctgatcctgccgtgtaccagctgcgggatagcaagagcagcgacaagagcgtgtgtctgttcaccgacttcgacagccagaccaacgtgtcccagagcaaggactccgacgtgtacatcaccgataagtgcgtgctggacatgcggagcatggacttcaagagcaactccgccgtggcctggtccaacaagtccgatttcgcctgcgccaacgccttcaacaacagcattatccccgaggacacattcttcccaagccccgagagcagctgcggctttaccagcgagagctaccagcagggcgtgctgagcgccaccatcctgtacgagatcctgctgggcaaggccaccctgtacgccgtgctggtgtctgccctggtgctgatggctatggtcaagcggaaggacagccggggacgcgccaagagaagcggatctggcgtgaagcagaccctgaatttcgacctgctgaagctggctggcgacgtggaatccaacccaggcccttctagaggccatatgaccgagtacaagcccacggtgcgcctcgccacccgcgacgacgtccccagggccgtacgcaccctcgccgccgcgttcgccgactaccccgccacgcgccacaccgtcgatccggaccgccacatcgagcgggtcaccgagctgcaagaactcttcctcacgcgcgtcgggctcgacatcggcaaggtgtgggtcgcggacgacggcgccgcggtggcggtctggaccacgccggagagcgtcgaagcgggggcggtgttcgccgagatcggcccgcgcatggccgagttgagcggttcccggctggccgcgcagcaacagatggaaggcctcctggcgccgcaccggcccaaggagcccgcgtggttcctggccaccgtcggcgtctcgcccgaccaccagggcaagggtctgggcagcgccgtcgtgctccccggagtggaggcggccgagcgcgccggggtgcccgccttcctggagacctccgcgccccgcaacctccccttctacgagcggctcggcttcaccgtcaccgccgacgtcgaggtgcccgaaggaccgcgcacctggtgcatgacccgcaagcccggtgcctga

SEQ ID NO: 5630 - DNA, 3372 bp, synthetic construct
  source 1..3372: mol_type = other DNA
atgggacccagactgctgttttgggctctgctgtgtctgctcggcacaggacctgttgaagctggcgtgacacagagccccacacacctgattaagaccagaggccagcaggccacactgagatgcagccctatcagcggccacaccagcgtgtactggtatcagcaggctctcggactgggcctccagttcctgctttggtacgacgagggcgaagagagaaaccggggcaacttccctcctcggttttccggcagacagttccccaactacagcagcgagctgaacgtgaacgccctggaactggaagatagcgccctgtacctgtgtgccagctctctcggcggagatgaactgggagccgatggcaacgagcagttctttggccctggcaccagactgaccgtgctggaaggtaccggcggaggcggatctggcggcggaagcgaattcgacatccagttgacccagtcccccagctcactcagcgccagtgtgggggaccgggtgaccattacctgtaaagccagtcagagtgtggactatgacggggatagcttcctgaattggtatcagcagaagcctggcaaagccccaaagctgctgatctacgctgcatctaatctggagtcaggcgtgccttccaggttctccggtagtgggtctgggaccgatttcacattgaccatttcatccctccaacccgaggatttcgctacatattactgtcagcagtccaatgaggaccctctcacctttggccagggcaccaaagttgaaattaagagactcgaggacctgaagaacgtgttcccacctgaggtggccgtgttcgagcctagcgaggccgagatcagccacacccagaaagccaccctcgtgtgcctggctaccggcttctaccccgaccatgtggaactgtcttggtgggtcaacggcaaagaggtgcacagcggcgtgtgtaccgacccccagccactgaaagaacagcccgccctgaacgacagccggtactgcctgagcagcagactgagagtgtccgccaccttctggcagaacccccggaaccacttcagatgccaggtgcagttctacggcctgagcgagaacgacgagtggacccaggacagagccaagcccgtgacccagatcgtgtctgccgaagcctggggcagagccgattgcgacgtgaagctggtggaaaagagcttcgagacagacaccaacctgaacttccagaacctgagcgtgatcggcttcagaatcctgctgctgaaagtggccggctttaacctgctgatgaccctgcggctgtggtccagcagggccaagcgatctggatctggagcaacaaacttctcactactcaaacaagcaggtgacgtggaggagaatcccgggcctactagtgccaccatggactggatttggcgcatccttttccttgtcggcgctgctaccggcgcccattccgggcccgaagtgcagctggttgaatctggcggaggactggttcaggctggcggatctctgagactgtcttgtgccgccagcggcagaacctttagcatgggctggtttagacaggcccctggcaaagagagagagttcgtcgccgccatcacatactctggcggcagcccttactacgccgactctgtgaagggcagattcaccatcagccgggacaacgccaagaacaccgtgtacctccagatgaacagcctgaagcctgaggacaccgccgtgtactactgcgccgccaatccaacatacggcagcgactggaacgccgagaattggggccagggaacccaagtgacagtgtctagcggatccggcggcggaggatctggcggaggcggatctgggggcggaggctctttcgaagtccaacttgtggagtctggagggggcctggtgcagcccggcggctctctcagactgtcttgtgcggcaagcggctacaccttcacctcttactggatagaatgggtgaggcaggcacctggaaagggactggagtggattggagagattctgccaggagggggagatacaaattacaatgaaatcttcaaggggcgggccaccttttcagcggataccagcaagaatacagcttacctgcagatgaatagcctccgggcagaagataccgctgtttattattgcacgagacgggtgccaataagactggactattgggggcaagggactcttgtcaccgtcagttcaacgcgtatccagaaccctgatcctgccgtgtaccagctgcgggatagcaagagcagcgacaagagcgtgtgtctgttcaccgacttcgacagccagaccaacgtgtcccagagcaaggactccgacgtgtacatcaccgataagtgcgtgctggacatgcggagcatggacttcaagagcaactccgccgtggcctggtccaacaagtccgatttcgcctgcgccaacgccttcaacaacagcattatccccgaggacacattcttcccaagccccgagagcagctgcggctttaccagcgagagctaccagcagggcgtgctgagcgccaccatcctgtacgagatcctgctgggcaaggccaccctgtacgccgtgctggtgtctgccctggtgctgatggctatggtcaagcggaaggacagccggggacgcgccaagagaagcggatctggcgtgaagcagaccctgaatttcgacctgctgaagctggctggcgacgtggaatccaacccaggcccttctagaggccatatgaccgagtacaagcccacggtgcgcctcgccacccgcgacgacgtccccagggccgtacgcaccctcgccgccgcgttcgccgactaccccgccacgcgccacaccgtcgatccggaccgccacatcgagcgggtcaccgagctgcaagaactcttcctcacgcgcgtcgggctcgacatcggcaaggtgtgggtcgcggacgacggcgccgcggtggcggtctggaccacgccggagagcgtcgaagcgggggcggtgttcgccgagatcggcccgcgcatggccgagttgagcggttcccggctggccgcgcagcaacagatggaaggcctcctggcgccgcaccggcccaaggagcccgcgtggttcctggccaccgtcggcgtctcgcccgaccaccagggcaagggtctgggcagcgccgtcgtgctccccggagtggaggcggccgagcgcgccggggtgcccgccttcctggagacctccgcgccccgcaacctccccttctacgagcggctcggcttcaccgtcaccgccgacgtcgaggtgcccgaaggaccgcgcacctggtgcatgacccgcaagcccggtgcctga

SEQ ID NO: 5631 - DNA, 2847 bp, synthetic construct
  source 1..2847: mol_type = other DNA
atggccttaccagtgaccgccttgctcctgccgctggccttgctgctccacgccgccaggccggacatccagttgacccagtcccccagctcactcagcgccagtgtgggggaccgggtgaccattacctgtaaagccagtcagagtgtggactatgacggggatagcttcctgaattggtatcagcagaagcctggcaaagccccaaagctgctgatctacgctgcatctaatctggagtcaggcgtgccttccaggttctccggtagtgggtctgggaccgatttcacattgaccatttcatccctccaacccgaggatttcgctacatattactgtcagcagtccaatgaggaccctctcacctttggccagggcaccaaagttgaaattaagagactcgaggacctgaagaacgtgttcccacctgaggtggccgtgttcgagcctagcgaggccgagatcagccacacccagaaagccaccctcgtgtgcctggctaccggcttctaccccgaccatgtggaactgtcttggtgggtcaacggcaaagaggtgcacagcggcgtgtgtaccgacccccagccactgaaagaacagcccgccctgaacgacagccggtactgcctgagcagcagactgagagtgtccgccaccttctggcagaacccccggaaccacttcagatgccaggtgcagttctacggcctgagcgagaacgacgagtggacccaggacagagccaagcccgtgacccagatcgtgtctgccgaagcctggggcagagccgattgcgacgtgaagctggtggaaaagagcttcgagacagacaccaacctgaacttccagaacctgagcgtgatcggcttcagaatcctgctgctgaaagtggccggctttaacctgctgatgaccctgcggctgtggtccagcagggccaagcgatctggatctggagcaacaaacttctcactactcaaacaagcaggtgacgtggaggagaatcccgggcctactagtgccaccatggactggatttggcgcatccttttccttgtcggcgctgctaccggcgcccattccgggcccatgggaagctggcttgagttctaccacagactcaacgccattgacagcaggctgtgggcacttggcggaagcgaagctgaactcgccgcttttgaaaaagaaattgccgctttcgagtccgagcttcaggcttacaaaggcaaagggaatcctgaggtcgagagcctgagagatcacgctgcccacattagagagtggttgcaggcataccggcacaatggatccggcggcggaggatctggcggaggcggatctgggggcggaggctctttcgaagtccaacttgtggagtctggagggggcctggtgcagcccggcggctctctcagactgtcttgtgcggcaagcggctacaccttcacctcttactggatagaatgggtgaggcaggcacctggaaagggactggagtggattggagagattctgccaggagggggagatacaaattacaatgaaatcttcaaggggcgggccaccttttcagcggataccagcaagaatacagcttacctgcagatgaatagcctccgggcagaagataccgctgtttattattgcacgagacgggtgccaataagactggactattgggggcaagggactcttgtcaccgtcagttcaacgcgtatccagaaccctgatcctgccgtgtaccagctgcgggatagcaagagcagcgacaagagcgtgtgtctgttcaccgacttcgacagccagaccaacgtgtcccagagcaaggactccgacgtgtacatcaccgataagtgcgtgctggacatgcggagcatggacttcaagagcaactccgccgtggcctggtccaacaagtccgatttcgcctgcgccaacgccttcaacaacagcattatccccgaggacacattcttcccaagccccgagagcagctgcggctttaccagcgagagctaccagcagggcgtgctgagcgccaccatcctgtacgagatcctgctgggcaaggccaccctgtacgccgtgctggtgtctgccctggtgctgatggctatggtcaagcggaaggacagccggggacgcgccaagagaagcggatctggcgtgaagcagaccctgaatttcgacctgctgaagctggctggcgacgtggaatccaacccaggcccttctagaggccatatgaccgagtacaagcccacggtgcgcctcgccacccgcgacgacgtccccagggccgtacgcaccctcgccgccgcgttcgccgactaccccgccacgcgccacaccgtcgatccggaccgccacatcgagcgggtcaccgagctgcaagaactcttcctcacgcgcgtcgggctcgacatcggcaaggtgtgggtcgcggacgacggcgccgcggtggcggtctggaccacgccggagagcgtcgaagcgggggcggtgttcgccgagatcggcccgcgcatggccgagttgagcggttcccggctggccgcgcagcaacagatggaaggcctcctggcgccgcaccggcccaaggagcccgcgtggttcctggccaccgtcggcgtctcgcccgaccaccagggcaagggtctgggcagcgccgtcgtgctccccggagtggaggcggccgagcgcgccggggtgcccgccttcctggagacctccgcgccccgcaacctccccttctacgagcggctcggcttcaccgtcaccgccgacgtcgaggtgcccgaaggaccgcgcacctggtgcatgacccgcaagcccggtgcctga

SEQ ID NO: 5632 - DNA, 2847 bp, synthetic construct
  source 1..2847: mol_type = other DNA
atggccttaccagtgaccgccttgctcctgccgctggccttgctgctccacgccgccaggccggcatgcatgggcagttggttcgagttctacgaccggctgaatgccatcgacgccagactgtgggctctcggaggatctgaagctgagctggccgccttcgagaaagagatcgccgcctttgagagcgagctgcaagcctacaaaggcaagggcaaccccgaggtggaaaacctgagagtgcacgccgctgccatcagagaatggctccaggcttacagacacaacggtaccggcggaggcggatctggcggcggaggtagcggtggcggaggatctgaattcgacatccagttgacccagtcccccagctcactcagcgccagtgtgggggaccgggtgaccattacctgtaaagccagtcagagtgtggactatgacggggatagcttcctgaattggtatcagcagaagcctggcaaagccccaaagctgctgatctacgctgcatctaatctggagtcaggcgtgccttccaggttctccggtagtgggtctgggaccgatttcacattgaccatttcatccctccaacccgaggatttcgctacatattactgtcagcagtccaatgaggaccctctcacctttggccagggcaccaaagttgaaattaagagactcgaggacctgaagaacgtgttcccacctgaggtggccgtgttcgagcctagcgaggccgagatcagccacacccagaaagccaccctcgtgtgcctggctaccggcttctaccccgaccatgtggaactgtcttggtgggtcaacggcaaagaggtgcacagcggcgtgtgtaccgacccccagccactgaaagaacagcccgccctgaacgacagccggtactgcctgagcagcagactgagagtgtccgccaccttctggcagaacccccggaaccacttcagatgccaggtgcagttctacggcctgagcgagaacgacgagtggacccaggacagagccaagcccgtgacccagatcgtgtctgccgaagcctggggcagagccgattgcgacgtgaagctggtggaaaagagcttcgagacagacaccaacctgaacttccagaacctgagcgtgatcggcttcagaatcctgctgctgaaagtggccggctttaacctgctgatgaccctgcggctgtggtccagcagggccaagcgatctggatctggagcaacaaacttctcactactcaaacaagcaggtgacgtggaggagaatcccgggcctactagtatggactggatttggcgcatccttttccttgtcggcgctgctaccggcgcgcattccttcgaagtccaacttgtggagtctggagggggcctggtgcagcccggcggctctctcagactgtcttgtgcggcaagcggctacaccttcacctcttactggatagaatgggtgaggcaggcacctggaaagggactggagtggattggagagattctgccaggagggggagatacaaattacaatgaaatcttcaaggggcgggccaccttttcagcggataccagcaagaatacagcttacctgcagatgaatagcctccgggcagaagataccgctgtttattattgcacgagacgggtgccaataagactggactattgggggcaagggactcttgtcaccgtcagttcaacgcgtatccagaaccctgatcctgccgtgtaccagctgcgggatagcaagagcagcgacaagagcgtgtgtctgttcaccgacttcgacagccagaccaacgtgtcccagagcaaggactccgacgtgtacatcaccgataagtgcgtgctggacatgcggagcatggacttcaagagcaactccgccgtggcctggtccaacaagtccgatttcgcctgcgccaacgccttcaacaacagcattatccccgaggacacattcttcccaagccccgagagcagctgcggctttaccagcgagagctaccagcagggcgtgctgagcgccaccatcctgtacgagatcctgctgggcaaggccaccctgtacgccgtgctggtgtctgccctggtgctgatggctatggtcaagcggaaggacagccggggacgcgccaagagaagcggatctggcgtgaagcagaccctgaatttcgacctgctgaagctggctggcgacgtggaatccaacccaggcccttctagaggccatatgaccgagtacaagcccacggtgcgcctcgccacccgcgacgacgtccccagggccgtacgcaccctcgccgccgcgttcgccgactaccccgccacgcgccacaccgtcgatccggaccgccacatcgagcgggtcaccgagctgcaagaactcttcctcacgcgcgtcgggctcgacatcggcaaggtgtgggtcgcggacgacggcgccgcggtggcggtctggaccacgccggagagcgtcgaagcgggggcggtgttcgccgagatcggcccgcgcatggccgagttgagcggttcccggctggccgcgcagcaacagatggaaggcctcctggcgccgcaccggcccaaggagcccgcgtggttcctggccaccgtcggcgtctcgcccgaccaccagggcaagggtctgggcagcgccgtcgtgctccccggagtggaggcggccgagcgcgccggggtgcccgccttcctggagacctccgcgccccgcaacctccccttctacgagcggctcggcttcaccgtcaccgccgacgtcgaggtgcccgaaggaccgcgcacctggtgcatgacccgcaagcccggtgcctga

SEQ ID NO: 5633 - DNA, 3198 bp, synthetic construct
  source 1..3198: mol_type = other DNA
atggccttaccagtgaccgccttgctcctgccgctggccttgctgctccacgccgccaggccggcatgcatggaccccgacctggaaatcagagccgccttcctgcggcagagaaacacagccctgagaacagaggtggccgagctggaacaagaggtgcagcggctggaaaacgaggtgtcccagtacgagacaagatacggccctctcggaggcggaaaaggtaccggcggaggcggatctggcggcggaggtagcggtggcggaggatctgaattcgacatccagttgacccagtcccccagctcactcagcgccagtgtgggggaccgggtgaccattacctgtaaagccagtcagagtgtggactatgacggggatagcttcctgaattggtatcagcagaagcctggcaaagccccaaagctgctgatctacgctgcatctaatctggagtcaggcgtgccttccaggttctccggtagtgggtctgggaccgatttcacattgaccatttcatccctccaacccgaggatttcgctacatattactgtcagcagtccaatgaggaccctctcacctttggccagggcaccaaagttgaaattaagagactcgaggacctgaagaacgtgttcccacctgaggtggccgtgttcgagcctagcgaggccgagatcagccacacccagaaagccaccctcgtgtgcctggctaccggcttctaccccgaccatgtggaactgtcttggtgggtcaacggcaaagaggtgcacagcggcgtgtgtaccgacccccagccactgaaagaacagcccgccctgaacgacagccggtactgcctgagcagcagactgagagtgtccgccaccttctggcagaacccccggaaccacttcagatgccaggtgcagttctacggcctgagcgagaacgacgagtggacccaggacagagccaagcccgtgacccagatcgtgtctgccgaagcctggggcagagccgattgcgacgtgaagctggtggaaaagagcttcgagacagacaccaacctgaacttccagaacctgagcgtgatcggcttcagaatcctgctgctgaaagtggccggctttaacctgctgatgaccctgcggctgtggtccagcagggccaagcgatctggatctggagcaacaaacttctcactactcaaacaagcaggtgacgtggaggagaatcccgggcctactagtgccaccatggactggatttggcgcatccttttccttgtcggcgctgctaccggcgcccattccgggcccgaagtgcagctggttgaatctggcggaggactggttcaggctggcggatctctgagactgtcttgtgccgccagcggcagaacctttagcatgggctggtttagacaggcccctggcaaagagagagagttcgtcgccgccatcacatactctggcggcagcccttactacgccgactctgtgaagggcagattcaccatcagccgggacaacgccaagaacaccgtgtacctccagatgaacagcctgaagcctgaggacaccgccgtgtactactgcgccgccaatccaacatacggcagcgactggaacgccgagaattggggccagggaacccaagtgacagtgtctagcggatccggcggcggaggatctggcggaggcggatctgggggcggaggctctttcgaagtccaacttgtggagtctggagggggcctggtgcagcccggcggctctctcagactgtcttgtgcggcaagcggctacaccttcacctcttactggatagaatgggtgaggcaggcacctggaaagggactggagtggattggagagattctgccaggagggggagatacaaattacaatgaaatcttcaaggggcgggccaccttttcagcggataccagcaagaatacagcttacctgcagatgaatagcctccgggcagaagataccgctgtttattattgcacgagacgggtgccaataagactggactattgggggcaagggactcttgtcaccgtcagttcaacgcgtatccagaaccctgatcctgccgtgtaccagctgcgggatagcaagagcagcgacaagagcgtgtgtctgttcaccgacttcgacagccagaccaacgtgtcccagagcaaggactccgacgtgtacatcaccgataagtgcgtgctggacatgcggagcatggacttcaagagcaactccgccgtggcctggtccaacaagtccgatttcgcctgcgccaacgccttcaacaacagcattatccccgaggacacattcttcccaagccccgagagcagctgcggctttaccagcgagagctaccagcagggcgtgctgagcgccaccatcctgtacgagatcctgctgggcaaggccaccctgtacgccgtgctggtgtctgccctggtgctgatggctatggtcaagcggaaggacagccggggacgcgccaagagaagcggatctggcgtgaagcagaccctgaatttcgacctgctgaagctggctggcgacgtggaatccaacccaggcccttctagaggccatatgaccgagtacaagcccacggtgcgcctcgccacccgcgacgacgtccccagggccgtacgcaccctcgccgccgcgttcgccgactaccccgccacgcgccacaccgtcgatccggaccgccacatcgagcgggtcaccgagctgcaagaactcttcctcacgcgcgtcgggctcgacatcggcaaggtgtgggtcgcggacgacggcgccgcggtggcggtctggaccacgccggagagcgtcgaagcgggggcggtgttcgccgagatcggcccgcgcatggccgagttgagcggttcccggctggccgcgcagcaacagatggaaggcctcctggcgccgcaccggcccaaggagcccgcgtggttcctggccaccgtcggcgtctcgcccgaccaccagggcaagggtctgggcagcgccgtcgtgctccccggagtggaggcggccgagcgcgccggggtgcccgccttcctggagacctccgcgccccgcaacctccccttctacgagcggctcggcttcaccgtcaccgccgacgtcgaggtgcccgaaggaccgcgcacctggtgcatgacccgcaagcccggtgcctga

SEQ ID NO: 5634 - DNA, 2847 bp, synthetic construct
  source 1..2847: mol_type = other DNA
atggccttaccagtgaccgccttgctcctgccgctggccttgctgctccacgccgccaggccggacatccagttgacccagtcccccagctcactcagcgccagtgtgggggaccgggtgaccattacctgtaaagccagtcagagtgtggactatgacggggatagcttcctgaattggtatcagcagaagcctggcaaagccccaaagctgctgatctacgctgcatctaatctggagtcaggcgtgccttccaggttctccggtagtgggtctgggaccgatttcacattgaccatttcatccctccaacccgaggatttcgctacatattactgtcagcagtccaatgaggaccctctcacctttggccagggcaccaaagttgaaattaagagactcgaggacctgaagaacgtgttcccacctgaggtggccgtgttcgagcctagcgaggccgagatcagccacacccagaaagccaccctcgtgtgcctggctaccggcttctaccccgaccatgtggaactgtcttggtgggtcaacggcaaagaggtgcacagcggcgtgtgtaccgacccccagccactgaaagaacagcccgccctgaacgacagccggtactgcctgagcagcagactgagagtgtccgccaccttctggcagaacccccggaaccacttcagatgccaggtgcagttctacggcctgagcgagaacgacgagtggacccaggacagagccaagcccgtgacccagatcgtgtctgccgaagcctggggcagagccgattgcgacgtgaagctggtggaaaagagcttcgagacagacaccaacctgaacttccagaacctgagcgtgatcggcttcagaatcctgctgctgaaagtggccggctttaacctgctgatgaccctgcggctgtggtccagcagggccaagcgatctggatctggagcaacaaacttctcactactcaaacaagcaggtgacgtggaggagaatcccgggcctactagtgccaccatggactggatttggcgcatccttttccttgtcggcgctgctaccggcgcccattccgggcccatgggatcttggagcgagttttacgatcggctgcacgccattcaccaccggctgtatgctctcggaggaagcgaagctgagctggccgcttttgaaaaagaaattgccgctttcgagtccgagcttcaggcttacaaaggcaaagggaatcctgaggtcgaggccctgagagataccgccgccttcatcagaacccggttgcaggcataccggcacaacggatccggcggcggaggatctggcggaggcggatctgggggcggaggctctttcgaagtccaacttgtggagtctggagggggcctggtgcagcccggcggctctctcagactgtcttgtgcggcaagcggctacaccttcacctcttactggatagaatgggtgaggcaggcacctggaaagggactggagtggattggagagattctgccaggagggggagatacaaattacaatgaaatcttcaaggggcgggccaccttttcagcggataccagcaagaatacagcttacctgcagatgaatagcctccgggcagaagataccgctgtttattattgcacgagacgggtgccaataagactggactattgggggcaagggactcttgtcaccgtcagttcaacgcgtatccagaaccctgatcctgccgtgtaccagctgcgggatagcaagagcagcgacaagagcgtgtgtctgttcaccgacttcgacagccagaccaacgtgtcccagagcaaggactccgacgtgtacatcaccgataagtgcgtgctggacatgcggagcatggacttcaagagcaactccgccgtggcctggtccaacaagtccgatttcgcctgcgccaacgccttcaacaacagcattatccccgaggacacattcttcccaagccccgagagcagctgcggctttaccagcgagagctaccagcagggcgtgctgagcgccaccatcctgtacgagatcctgctgggcaaggccaccctgtacgccgtgctggtgtctgccctggtgctgatggctatggtcaagcggaaggacagccggggacgcgccaagagaagcggatctggcgtgaagcagaccctgaatttcgacctgctgaagctggctggcgacgtggaatccaacccaggcccttctagaggccatatgaccgagtacaagcccacggtgcgcctcgccacccgcgacgacgtccccagggccgtacgcaccctcgccgccgcgttcgccgactaccccgccacgcgccacaccgtcgatccggaccgccacatcgagcgggtcaccgagctgcaagaactcttcctcacgcgcgtcgggctcgacatcggcaaggtgtgggtcgcggacgacggcgccgcggtggcggtctggaccacgccggagagcgtcgaagcgggggcggtgttcgccgagatcggcccgcgcatggccgagttgagcggttcccggctggccgcgcagcaacagatggaaggcctcctggcgccgcaccggcccaaggagcccgcgtggttcctggccaccgtcggcgtctcgcccgaccaccagggcaagggtctgggcagcgccgtcgtgctccccggagtggaggcggccgagcgcgccggggtgcccgccttcctggagacctccgcgccccgcaacctccccttctacgagcggctcggcttcaccgtcaccgccgacgtcgaggtgcccgaaggaccgcgcacctggtgcatgacccgcaagcccggtgcctga

SEQ ID NO: 5635 - DNA, 3477 bp, synthetic construct
  source 1..3477: mol_type = other DNA
atggccttaccagtgaccgccttgctcctgccgctggccttgctgctccacgccgccaggccggacatccagttgacccagtcccccagctcactcagcgccagtgtgggggaccgggtgaccattacctgtaaagccagtcagagtgtggactatgacggggatagcttcctgaattggtatcagcagaagcctggcaaagccccaaagctgctgatctacgctgcatctaatctggagtcaggcgtgccttccaggttctccggtagtgggtctgggaccgatttcacattgaccatttcatccctccaacccgaggatttcgctacatattactgtcagcagtccaatgaggaccctctcacctttggccagggcaccaaagttgaaattaagagactcgaggacctgaagaacgtgttcccacctgaggtggccgtgttcgagcctagcgaggccgagatcagccacacccagaaagccaccctcgtgtgcctggctaccggcttctaccccgaccatgtggaactgtcttggtgggtcaacggcaaagaggtgcacagcggcgtgtgtaccgacccccagccactgaaagaacagcccgccctgaacgacagccggtactgcctgagcagcagactgagagtgtccgccaccttctggcagaacccccggaaccacttcagatgccaggtgcagttctacggcctgagcgagaacgacgagtggacccaggacagagccaagcccgtgacccagatcgtgtctgccgaagcctggggcagagccgattgcgacgtgaagctggtggaaaagagcttcgagacagacaccaacctgaacttccagaacctgagcgtgatcggcttcagaatcctgctgctgaaagtggccggctttaacctgctgatgaccctgcggctgtggtccagcagggccaagcgatctggatctggagcaacaaacttctcactactcaaacaagcaggtgacgtggaggagaatcccgggcctactagtaccatggactggatttggcgcatccttttccttgtcggcgctgctaccggcgcccattccctgttcaatcaagaggtgcagatccctctgaccgagagctactgtggcccctgtcctaagaactggatctgctacaagaacaactgctaccagttcttcgacgagagcaagaattggtacgagagccaggccagctgcatgagccagaatgccagcctgctgaaggtgtacagcaaagaggaccaggacctgctgaaactggtcaagagcgcccactggatgggccttgtgcacatccccaccaatggctcttggcagtgggaggacggcagcattctgagccctaacctgctgaccatcatcgagatgcagaagggcgactgcgccctgtacgccagcagctttaagggctacatcgagaattgcagcaccccgaacacctacatctgtatgcagagaaccgtttctggcggaggcggctctggaggaggcggaagtggcggcggaggcgacctctttaatcaagaagtccagattccactcaccgaatcctactgcggaccttgtccaaaaaattggatttgttataagaacaactgttatcaattctttgatgagtctaaaaattggtatgagtcccaggcttcctgcatgtctcagaacgcttctctgctgaaagtctactctaaagaagatcaggatctcctgaagctcgtcaagtctgcccattggatggggctcgtccacattcctaccaacggaagctggcaatgggaagatggctccatcctgtctccaaatctgctcacgattattgaaatgcagaaaggggattgtgctctctacgccagctccttcaagggatatattgagaactgtagcacgcccaatacttatatctgtatgcaacggaccgtgggatccggcggcggaggatctggcggaggcggatctgggggcggaggctctttcgaagtccaacttgtggagtctggagggggcctggtgcagcccggcggctctctcagactgtcttgtgcggcaagcggctacaccttcacctcttactggatagaatgggtgaggcaggcacctggaaagggactggagtggattggagagattctgccaggagggggagatacaaattacaatgaaatcttcaaggggcgggccaccttttcagcggataccagcaagaatacagcttacctgcagatgaatagcctccgggcagaagataccgctgtttattattgcacgagacgggtgccaataagactggactattgggggcaagggactcttgtcaccgtcagttcaacgcgtatccagaaccctgatcctgccgtgtaccagctgcgggatagcaagagcagcgacaagagcgtgtgtctgttcaccgacttcgacagccagaccaacgtgtcccagagcaaggactccgacgtgtacatcaccgataagtgcgtgctggacatgcggagcatggacttcaagagcaactccgccgtggcctggtccaacaagtccgatttcgcctgcgccaacgccttcaacaacagcattatccccgaggacacattcttcccaagccccgagagcagctgcggctttaccagcgagagctaccagcagggcgtgctgagcgccaccatcctgtacgagatcctgctgggcaaggccaccctgtacgccgtgctggtgtctgccctggtgctgatggctatggtcaagcggaaggacagccggggacgcgccaagagaagcggatctggcgtgaagcagaccctgaatttcgacctgctgaagctggctggcgacgtggaatccaacccaggcccttctagaggccatatgaccgagtacaagcccacggtgcgcctcgccacccgcgacgacgtccccagggccgtacgcaccctcgccgccgcgttcgccgactaccccgccacgcgccacaccgtcgatccggaccgccacatcgagcgggtcaccgagctgcaagaactcttcctcacgcgcgtcgggctcgacatcggcaaggtgtgggtcgcggacgacggcgccgcggtggcggtctggaccacgccggagagcgtcgaagcgggggcggtgttcgccgagatcggcccgcgcatggccgagttgagcggttcccggctggccgcgcagcaacagatggaaggcctcctggcgccgcaccggcccaaggagcccgcgtggttcctggccaccgtcggcgtctcgcccgaccaccagggcaagggtctgggcagcgccgtcgtgctccccggagtggaggcggccgagcgcgccggggtgcccgccttcctggagacctccgcgccccgcaacctccccttctacgagcggctcggcttcaccgtcaccgccgacgtcgaggtgcccgaaggaccgcgcacctggtgcatgacccgcaagcccggtgcctga

SEQ ID NO: 5636 - DNA, 1863 bp, synthetic construct
  source 1..1863: mol_type = other DNA
atggccttaccagtgaccgccttgctcctgccgctggccttgctgctccacgccgccaggccggacatccagttgacccagtcccccagctcactcagcgccagtgtgggggaccgggtgaccattacctgtaaagccagtcagagtgtggactatgacggggatagcttcctgaattggtatcagcagaagcctggcaaagccccaaagctgctgatctacgctgcatctaatctggagtcaggcgtgccttccaggttctccggtagtgggtctgggaccgatttcacattgaccatttcatccctccaacccgaggatttcgctacatattactgtcagcagtccaatgaggaccctctcacctttggccagggcaccaaagttgaaattaagagactcgaggacctgaagaacgtgttcccacctgaggtggccgtgttcgagcctagcgaggccgagatcagccacacccagaaagccaccctcgtgtgcctggctaccggcttctaccccgaccatgtggaactgtcttggtgggtcaacggcaaagaggtgcacagcggcgtgtgtaccgacccccagccactgaaagaacagcccgccctgaacgacagccggtactgcctgagcagcagactgagagtgtccgccaccttctggcagaacccccggaaccacttcagatgccaggtgcagttctacggcctgagcgagaacgacgagtggacccaggacagagccaagcccgtgacccagatcgtgtctgccgaagcctggggcagagccgattgcggctttaccagcgagagctaccagcagggcgtgctgagcgccaccaacctgagcgtgatcggcttcagaatcctgctgctgaaagtggccggctttaacctgctgatgaccctgcggctgtggtccagcagggccaagcgatctggatctggagcaacaaacttctcactactcaaacaagcaggtgacgtggaggagaatcccgggcctactagtatggactggatttggcgcatccttttccttgtcggcgctgctaccggcgcgcattccttcgaagtccaacttgtggagtctggagggggcctggtgcagcccggcggctctctcagactgtcttgtgcggcaagcggctacaccttcacctcttactggatagaatgggtgaggcaggcacctggaaagggactggagtggattggagagattctgccaggagggggagatacaaattacaatgaaatcttcaaggggcgggccaccttttcagcggataccagcaagaatacagcttacctgcagatgaatagcctccgggcagaagataccgctgtttattattgcacgagacgggtgccaataagactggactattgggggcaagggactcttgtcaccgtcagttcaacgcgtatccagaaccctgatcctgccgtgtaccagctgcgggatagcaagagcagcgacaagagcgtgtgtctgttcaccgacttcgacagccagaccaacgtgtcccagagcaaggactccgacgtgtacatcaccgataagtgcgtgctggacatgcggagcatggacttcaagagcaactccgccgtggcctggtccaacaagtccgatttcgcctgcgccaacgccttcaacaacagcattatccccgaggacacattcttcccaagccccgagagcagctgcgacgtgaagctggtggaaaagagcttcgagacagacaccaacctgaacttccagatcctgtacgagatcctgctgggcaaggccaccctgtacgccgtgctggtgtctgccctggtgctgatggctatggtcaagcggaaggacagccgggga

SEQ ID NO: 5637 - DNA, 1875 bp, synthetic construct
  source 1..1875: mol_type = other DNA
atggccttaccagtgaccgccttgctcctgccgctggccttgctgctccacgccgccaggccggacatccagttgacccagtcccccagctcactcagcgccagtgtgggggaccgggtgaccattacctgtaaagccagtcagagtgtggactatgacggggatagcttcctgaattggtatcagcagaagcctggcaaagccccaaagctgctgatctacgctgcatctaatctggagtcaggcgtgccttccaggttctccggtagtgggtctgggaccgatttcacattgaccatttcatccctccaacccgaggatttcgctacatattactgtcagcagtccaatgaggaccctctcacctttggccagggcaccaaagttgaaattaagagactcgagatccagaaccctgatcctgccgtgtaccagctgcgggatagcaagagcagcgacaagagcgtgtgtctgttcaccgacttcgacagccagaccaacgtgtcccagagcaaggactccgacgtgtacatcaccgataagtgcgtgctggacatgcggagcatggacttcaagagcaactccgccgtggcctggtccaacaagtccgatttcgcctgcgccaacgccttcaacaacagcattatccccgaggacacattcttcccaagccccgagagcagctgcgacgtgaagctggtggaaaagagcttcgagacagacaccaacctgaacttccagatcctgtacgagatcctgctgggcaaggccaccctgtacgccgtgctggtgtctgccctggtgctgatggctatggtcaagcggaaggacagccggggacgcgccaagagaagcggatctggcgtgaagcagaccctgaatttcgacctgctgaagctggctggcgacgtggaatccaacccaggccctactagtatggactggatttggcgcatccttttccttgtcggcgctgctaccggcgcgcattccttcgaagtccaacttgtggagtctggagggggcctggtgcagcccggcggctctctcagactgtcttgtgcggcaagcggctacaccttcacctcttactggatagaatgggtgaggcaggcacctggaaagggactggagtggattggagagattctgccaggagggggagatacaaattacaatgaaatcttcaaggggcgggccaccttttcagcggataccagcaagaatacagcttacctgcagatgaatagcctccgggcagaagataccgctgtttattattgcacgagacgggtgccaataagactggactattgggggcaagggactcttgtcaccgtcagttcaacgcgtgaggacctgaagaacgtgttcccacctgaggtggccgtgttcgagcctagcgaggccgagatcagccacacccagaaagccaccctcgtgtgcctggctaccggcttctaccccgaccatgtggaactgtcttggtgggtcaacggcaaagaggtgcacagcggcgtgtgtaccgacccccagccactgaaagaacagcccgccctgaacgacagccggtactgcctgagcagcagactgagagtgtccgccaccttctggcagaacccccggaaccacttcagatgccaggtgcagttctacggcctgagcgagaacgacgagtggacccaggacagagccaagcccgtgacccagatcgtgtctgccgaagcctggggcagagccgattgcggctttaccagcgagagctaccagcagggcgtgctgagcgccaccaacctgagcgtgatcggcttcagaatcctgctgctgaaagtggccggctttaacctgctgatgaccctgcggctgtggtccagc

SEQ ID NO: 5638 - DNA, 2268 bp, synthetic construct
  source 1..2268: mol_type = other DNA
atggccttaccagtgaccgccttgctcctgccgctggccttgctgctccacgccgccaggccggaagtgcagctggttgaatctggcggaggactggttcagcctggcggatctctgagactgtcttgtgccgccagcggcttcagcttcagcgacttttggatgagctgggtccgacaggcccctggcaaaggacttgaatgggtcgccacaatcagccaggccggcagcgagaaggactacgtggactctgtgaagggcagattcaccatcagccgggacaacgccaagaagtccctgtacctccagatgaacagcctgagagccgaggacaccgccgtgtactattgtgcctctggcgtgtacagcttcgactacagaggccagggcaccctggtcacagtctcttctggtaccggcggaggcggatctggcggcggaggtagcggtggcggaggatctgaattcgacatccagttgacccagtcccccagctcactcagcgccagtgtgggggaccgggtgaccattacctgtaaagccagtcagagtgtggactatgacggggatagcttcctgaattggtatcagcagaagcctggcaaagccccaaagctgctgatctacgctgcatctaatctggagtcaggcgtgccttccaggttctccggtagtgggtctgggaccgatttcacattgaccatttcatccctccaacccgaggatttcgctacatattactgtcagcagtccaatgaggaccctctcacctttggccagggcaccaaagttgaaattaagagactcgaggacctgaagaacgtgttcccacctgaggtggccgtgttcgagcctagcgaggccgagatcagccacacccagaaagccaccctcgtgtgcctggctaccggcttctaccccgaccatgtggaactgtcttggtgggtcaacggcaaagaggtgcacagcggcgtgtgtaccgacccccagccactgaaagaacagcccgccctgaacgacagccggtactgcctgagcagcagactgagagtgtccgccaccttctggcagaacccccggaaccacttcagatgccaggtgcagttctacggcctgagcgagaacgacgagtggacccaggacagagccaagcccgtgacccagatcgtgtctgccgaagcctggggcagagccgattgcggctttaccagcgagagctaccagcagggcgtgctgagcgccaccaacctgagcgtgatcggcttcagaatcctgctgctgaaagtggccggctttaacctgctgatgaccctgcggctgtggtccagcagggccaagcgatctggatctggagcaacaaacttctcactactcaaacaagcaggtgacgtggaggagaatcccgggcctactagtatggactggatttggcgcatccttttccttgtcggcgctgctaccggcgcgcattccttcgaagtccaacttgtggagtctggagggggcctggtgcagcccggcggctctctcagactgtcttgtgcggcaagcggctacaccttcacctcttactggatagaatgggtgaggcaggcacctggaaagggactggagtggattggagagattctgccaggagggggagatacaaattacaatgaaatcttcaaggggcgggccaccttttcagcggataccagcaagaatacagcttacctgcagatgaatagcctccgggcagaagataccgctgtttattattgcacgagacgggtgccaataagactggactattgggggcaagggactcttgtcaccgtcagttcaacgcgtatccagaaccctgatcctgccgtgtaccagctgcgggatagcaagagcagcgacaagagcgtgtgtctgttcaccgacttcgacagccagaccaacgtgtcccagagcaaggactccgacgtgtacatcaccgataagtgcgtgctggacatgcggagcatggacttcaagagcaactccgccgtggcctggtccaacaagtccgatttcgcctgcgccaacgccttcaacaacagcattatccccgaggacacattcttcccaagccccgagagcagctgcgacgtgaagctggtggaaaagagcttcgagacagacaccaacctgaacttccagatcctgtacgagatcctgctgggcaaggccaccctgtacgccgtgctggtgtctgccctggtgctgatggctatggtcaagcggaaggacagccgggga

SEQ ID NO: 5639 - DNA, 2280 bp, synthetic construct
  source 1..2280: mol_type = other DNA
atggccttaccagtgaccgccttgctcctgccgctggccttgctgctccacgccgccaggccggaagtgcagctggttgaatctggcggaggactggttcagcctggcggatctctgagactgtcttgtgccgccagcggcttcagcttcagcgacttttggatgagctgggtccgacaggcccctggcaaaggacttgaatgggtcgccacaatcagccaggccggcagcgagaaggactacgtggactctgtgaagggcagattcaccatcagccgggacaacgccaagaagtccctgtacctccagatgaacagcctgagagccgaggacaccgccgtgtactattgtgcctctggcgtgtacagcttcgactacagaggccagggcaccctggtcacagtctcttctggtaccggcggaggcggatctggcggcggaggtagcggtggcggaggatctgaattcgacatccagttgacccagtcccccagctcactcagcgccagtgtgggggaccgggtgaccattacctgtaaagccagtcagagtgtggactatgacggggatagcttcctgaattggtatcagcagaagcctggcaaagccccaaagctgctgatctacgctgcatctaatctggagtcaggcgtgccttccaggttctccggtagtgggtctgggaccgatttcacattgaccatttcatccctccaacccgaggatttcgctacatattactgtcagcagtccaatgaggaccctctcacctttggccagggcaccaaagttgaaattaagagactcgagatccagaaccctgatcctgccgtgtaccagctgcgggatagcaagagcagcgacaagagcgtgtgtctgttcaccgacttcgacagccagaccaacgtgtcccagagcaaggactccgacgtgtacatcaccgataagtgcgtgctggacatgcggagcatggacttcaagagcaactccgccgtggcctggtccaacaagtccgatttcgcctgcgccaacgccttcaacaacagcattatccccgaggacacattcttcccaagccccgagagcagctgcgacgtgaagctggtggaaaagagcttcgagacagacaccaacctgaacttccagatcctgtacgagatcctgctgggcaaggccaccctgtacgccgtgctggtgtctgccctggtgctgatggctatggtcaagcggaaggacagccggggacgcgccaagagaagcggatctggcgtgaagcagaccctgaatttcgacctgctgaagctggctggcgacgtggaatccaacccaggccctactagtatggactggatttggcgcatccttttccttgtcggcgctgctaccggcgcgcattccttcgaagtccaacttgtggagtctggagggggcctggtgcagcccggcggctctctcagactgtcttgtgcggcaagcggctacaccttcacctcttactggatagaatgggtgaggcaggcacctggaaagggactggagtggattggagagattctgccaggagggggagatacaaattacaatgaaatcttcaaggggcgggccaccttttcagcggataccagcaagaatacagcttacctgcagatgaatagcctccgggcagaagataccgctgtttattattgcacgagacgggtgccaataagactggactattgggggcaagggactcttgtcaccgtcagttcaacgcgtgaggacctgaagaacgtgttcccacctgaggtggccgtgttcgagcctagcgaggccgagatcagccacacccagaaagccaccctcgtgtgcctggctaccggcttctaccccgaccatgtggaactgtcttggtgggtcaacggcaaagaggtgcacagcggcgtgtgtaccgacccccagccactgaaagaacagcccgccctgaacgacagccggtactgcctgagcagcagactgagagtgtccgccaccttctggcagaacccccggaaccacttcagatgccaggtgcagttctacggcctgagcgagaacgacgagtggacccaggacagagccaagcccgtgacccagatcgtgtctgccgaagcctggggcagagccgattgcggctttaccagcgagagctaccagcagggcgtgctgagcgccaccaacctgagcgtgatcggcttcagaatcctgctgctgaaagtggccggctttaacctgctgatgaccctgcggctgtggtccagc

SEQ ID NO: 5640 - DNA, 2679 bp, synthetic construct
  source 1..2679: mol_type = other DNA
atggccttaccagtgaccgccttgctcctgccgctggccttgctgctccacgccgccaggccggaagtgcagctggttgaatctggcggaggactggttcagcctggcggatctctgagactgtcttgtgccgccagcggcttcagcttcagcgacttttggatgagctgggtccgacaggcccctggcaaaggacttgaatgggtcgccacaatcagccaggccggcagcgagaaggactacgtggactctgtgaagggcagattcaccatcagccgggacaacgccaagaagtccctgtacctccagatgaacagcctgagagccgaggacaccgccgtgtactattgtgcctctggcgtgtacagcttcgactacagaggccagggcaccctggtcacagtctcttctggtaccggcggaggcggatctggcggcggaggtagcggtggcggaggatctgaattcgacatccagttgacccagtcccccagctcactcagcgccagtgtgggggaccgggtgaccattacctgtaaagccagtcagagtgtggactatgacggggatagcttcctgaattggtatcagcagaagcctggcaaagccccaaagctgctgatctacgctgcatctaatctggagtcaggcgtgccttccaggttctccggtagtgggtctgggaccgatttcacattgaccatttcatccctccaacccgaggatttcgctacatattactgtcagcagtccaatgaggaccctctcacctttggccagggcaccaaagttgaaattaagagactcgaggacctgaagaacgtgttcccacctgaggtggccgtgttcgagcctagcgaggccgagatcagccacacccagaaagccaccctcgtgtgcctggctaccggcttctaccccgaccatgtggaactgtcttggtgggtcaacggcaaagaggtgcacagcggcgtgtgtaccgacccccagccactgaaagaacagcccgccctgaacgacagccggtactgcctgagcagcagactgagagtgtccgccaccttctggcagaacccccggaaccacttcagatgccaggtgcagttctacggcctgagcgagaacgacgagtggacccaggacagagccaagcccgtgacccagatcgtgtctgccgaagcctggggcagagccgattgcggctttaccagcgagagctaccagcagggcgtgctgagcgccaccaacctgagcgtgatcggcttcagaatcctgctgctgaaagtggccggctttaacctgctgatgaccctgcggctgtggtccagcagggccaagcgatctggatctggagcaacaaacttctcactactcaaacaagcaggtgacgtggaggagaatcccgggcctactagtatggactggatttggcgcatccttttccttgtcggcgctgctaccggcgcgcattccgggccccagctccagctgcaagagtctggacctggcctggtcaagcctagcgagacactgagcctgacctgtaccgtgtccggcgatagcatcagcagcggcgattactactggggctggatcagacagcctcctggcaaaggactggaatggatcggccacatctactacagcggcgtgacctactacaaccccagcctgaagtccagagtgaccatcagcgtggacaccagccggaaccagttctccctgaagctgtctagcgtgacagccgccgataccgccgtgtactactgcaccagagaggacagcagcaactggcggagtagaggccagggaacactggtcacagttagctctggatccggcggaggcggaagtggaggcggaggatctggcggcggaggctctttcgaagtccaacttgtggagtctggagggggcctggtgcagcccggcggctctctcagactgtcttgtgcggcaagcggctacaccttcacctcttactggatagaatgggtgaggcaggcacctggaaagggactggagtggattggagagattctgccaggagggggagatacaaattacaatgaaatcttcaaggggcgggccaccttttcagcggataccagcaagaatacagcttacctgcagatgaatagcctccgggcagaagataccgctgtttattattgcacgagacgggtgccaataagactggactattgggggcaagggactcttgtcaccgtcagttcaacgcgtatccagaaccctgatcctgccgtgtaccagctgcgggatagcaagagcagcgacaagagcgtgtgtctgttcaccgacttcgacagccagaccaacgtgtcccagagcaaggactccgacgtgtacatcaccgataagtgcgtgctggacatgcggagcatggacttcaagagcaactccgccgtggcctggtccaacaagtccgatttcgcctgcgccaacgccttcaacaacagcattatccccgaggacacattcttcccaagccccgagagcagctgcgacgtgaagctggtggaaaagagcttcgagacagacaccaacctgaacttccagatcctgtacgagatcctgctgggcaaggccaccctgtacgccgtgctggtgtctgccctggtgctgatggctatggtcaagcggaaggacagccgggga

SEQ ID NO: 5641 - DNA, 2691 bp, synthetic construct
  source 1..2691: mol_type = other DNA
atggccttaccagtgaccgccttgctcctgccgctggccttgctgctccacgccgccaggccggaagtgcagctggttgaatctggcggaggactggttcagcctggcggatctctgagactgtcttgtgccgccagcggcttcagcttcagcgacttttggatgagctgggtccgacaggcccctggcaaaggacttgaatgggtcgccacaatcagccaggccggcagcgagaaggactacgtggactctgtgaagggcagattcaccatcagccgggacaacgccaagaagtccctgtacctccagatgaacagcctgagagccgaggacaccgccgtgtactattgtgcctctggcgtgtacagcttcgactacagaggccagggcaccctggtcacagtctcttctggtaccggcggaggcggatctggcggcggaggtagcggtggcggaggatctgaattcgacatccagttgacccagtcccccagctcactcagcgccagtgtgggggaccgggtgaccattacctgtaaagccagtcagagtgtggactatgacggggatagcttcctgaattggtatcagcagaagcctggcaaagccccaaagctgctgatctacgctgcatctaatctggagtcaggcgtgccttccaggttctccggtagtgggtctgggaccgatttcacattgaccatttcatccctccaacccgaggatttcgctacatattactgtcagcagtccaatgaggaccctctcacctttggccagggcaccaaagttgaaattaagagactcgagatccagaaccctgatcctgccgtgtaccagctgcgggatagcaagagcagcgacaagagcgtgtgtctgttcaccgacttcgacagccagaccaacgtgtcccagagcaaggactccgacgtgtacatcaccgataagtgcgtgctggacatgcggagcatggacttcaagagcaactccgccgtggcctggtccaacaagtccgatttcgcctgcgccaacgccttcaacaacagcattatccccgaggacacattcttcccaagccccgagagcagctgcgacgtgaagctggtggaaaagagcttcgagacagacaccaacctgaacttccagatcctgtacgagatcctgctgggcaaggccaccctgtacgccgtgctggtgtctgccctggtgctgatggctatggtcaagcggaaggacagccggggacgcgccaagagaagcggatctggcgtgaagcagaccctgaatttcgacctgctgaagctggctggcgacgtggaatccaacccaggccctactagtatggactggatttggcgcatccttttccttgtcggcgctgctaccggcgcgcattccgggccccagctccagctgcaagagtctggacctggcctggtcaagcctagcgagacactgagcctgacctgtaccgtgtccggcgatagcatcagcagcggcgattactactggggctggatcagacagcctcctggcaaaggactggaatggatcggccacatctactacagcggcgtgacctactacaaccccagcctgaagtccagagtgaccatcagcgtggacaccagccggaaccagttctccctgaagctgtctagcgtgacagccgccgataccgccgtgtactactgcaccagagaggacagcagcaactggcggagtagaggccagggaacactggtcacagttagctctggatccggcggaggcggaagtggaggcggaggatctggcggcggaggctctttcgaagtccaacttgtggagtctggagggggcctggtgcagcccggcggctctctcagactgtcttgtgcggcaagcggctacaccttcacctcttactggatagaatgggtgaggcaggcacctggaaagggactggagtggattggagagattctgccaggagggggagatacaaattacaatgaaatcttcaaggggcgggccaccttttcagcggataccagcaagaatacagcttacctgcagatgaatagcctccgggcagaagataccgctgtttattattgcacgagacgggtgccaataagactggactattgggggcaagggactcttgtcaccgtcagttcaacgcgtgaggacctgaagaacgtgttcccacctgaggtggccgtgttcgagcctagcgaggccgagatcagccacacccagaaagccaccctcgtgtgcctggctaccggcttctaccccgaccatgtggaactgtcttggtgggtcaacggcaaagaggtgcacagcggcgtgtgtaccgacccccagccactgaaagaacagcccgccctgaacgacagccggtactgcctgagcagcagactgagagtgtccgccaccttctggcagaacccccggaaccacttcagatgccaggtgcagttctacggcctgagcgagaacgacgagtggacccaggacagagccaagcccgtgacccagatcgtgtctgccgaagcctggggcagagccgattgcggctttaccagcgagagctaccagcagggcgtgctgagcgccaccaacctgagcgtgatcggcttcagaatcctgctgctgaaagtggccggctttaacctgctgatgaccctgcggctgtggtccagc

SEQ ID NO: 5642 - DNA, 2175 bp, synthetic construct
  source 1..2175: mol_type = other DNA
atggccttaccagtgaccgccttgctcctgccgctggccttgctgctccacgccgccaggccggacatccagttgacccagtcccccagctcactcagcgccagtgtgggggaccgggtgaccattacctgtaaagccagtcagagtgtggactatgacggggatagcttcctgaattggtatcagcagaagcctggcaaagccccaaagctgctgatctacgctgcatctaatctggagtcaggcgtgccttccaggttctccggtagtgggtctgggaccgatttcacattgaccatttcatccctccaacccgaggatttcgctacatattactgtcagcagtccaatgaggaccctctcacctttggccagggcaccaaagttgaaattaagagactcgaggacctgaagaacgtgttcccacctgaggtggccgtgttcgagcctagcgaggccgagatcagccacacccagaaagccaccctcgtgtgcctggctaccggcttctaccccgaccatgtggaactgtcttggtgggtcaacggcaaagaggtgcacagcggcgtgtgtaccgacccccagccactgaaagaacagcccgccctgaacgacagccggtactgcctgagcagcagactgagagtgtccgccaccttctggcagaacccccggaaccacttcagatgccaggtgcagttctacggcctgagcgagaacgacgagtggacccaggacagagccaagcccgtgacccagatcgtgtctgccgaagcctggggcagagccgatgatgtgattaagatccactggcaggaaaagaagtccaacaccatcctgggcagccaggaaggcaacaccatgaagaccaacgacacctacatgaagttcagctggctgaccgtgcccgagaagtccctggacaaagaacacagatgcatcgtgcggcacgaaaacaacaagaacggcgtggaccaggaaatcatcttcccacccatcaagaccgatgtgattacaatggaccccaaggacaactgctccaaggacgccaacgataccctgctgctccagctgaccaacaccagcgcctactacatgtacttgttgctgctgctgaagtccgtggtgtacttcgccatcatcacatgctgcctgctgatggctatggtcaagcggaaggacagccggggaagggccaagcgatctggatctggagcaacaaacttctcactactcaaacaagcaggtgacgtggaggagaatcccgggcctactagtatggactggatttggcgcatccttttccttgtcggcgctgctaccggcgcgcattccttcgaagtccaacttgtggagtctggagggggcctggtgcagcccggcggctctctcagactgtcttgtgcggcaagcggctacaccttcacctcttactggatagaatgggtgaggcaggcacctggaaagggactggagtggattggagagattctgccaggagggggagatacaaattacaatgaaatcttcaaggggcgggccaccttttcagcggataccagcaagaatacagcttacctgcagatgaatagcctccgggcagaagataccgctgtttattattgcacgagacgggtgccaataagactggactattgggggcaagggactcttgtcaccgtcagttcaacgcgtatccagaaccctgatcctgccgtgtaccagctgcgggatagcaagagcagcgacaagagcgtgtgtctgttcaccgacttcgacagccagaccaacgtgtcccagagcaaggactccgacgtgtacatcaccgataagtgcgtgctggacatgcggagcatggacttcaagagcaactccgccgtggcctggtccaacaagtccgatttcgcctgcgccaacgccttcaacaacagcattatccccgaggacacattcttcccaagccccgagagcagcgactccaccgaccacgtgaagcccaaagagacagagaacaccaagcagcccagcaagagctgccacaagcccaaggccatcgtgcacaccgagaaagtgaacatgatgagcctgaccgtgctgggcctgcggatgctgttcgccaaaaccgtggccgtgaacttcctgctgaccgccaagctgttcttcctcctcaccgcc

SEQ ID NO: 5643 - DNA, 2187 bp, synthetic construct
  source 1..2187: mol_type = other DNA
atggccttaccagtgaccgccttgctcctgccgctggccttgctgctccacgccgccaggccggacatccagttgacccagtcccccagctcactcagcgccagtgtgggggaccgggtgaccattacctgtaaagccagtcagagtgtggactatgacggggatagcttcctgaattggtatcagcagaagcctggcaaagccccaaagctgctgatctacgctgcatctaatctggagtcaggcgtgccttccaggttctccggtagtgggtctgggaccgatttcacattgaccatttcatccctccaacccgaggatttcgctacatattactgtcagcagtccaatgaggaccctctcacctttggccagggcaccaaagttgaaattaagagactcgagatccagaaccctgatcctgccgtgtaccagctgcgggatagcaagagcagcgacaagagcgtgtgtctgttcaccgacttcgacagccagaccaacgtgtcccagagcaaggactccgacgtgtacatcaccgataagtgcgtgctggacatgcggagcatggacttcaagagcaactccgccgtggcctggtccaacaagtccgatttcgcctgcgccaacgccttcaacaacagcattatccccgaggacacattcttcccaagccccgagagcagcgactccaccgaccacgtgaagcccaaagagacagagaacaccaagcagcccagcaagagctgccacaagcccaaggccatcgtgcacaccgagaaagtgaacatgatgagcctgaccgtgctgggcctgcggatgctgttcgccaaaaccgtggccgtgaacttcctgctgaccgccaagctgttcttcctcctcaccgcccgcgccaagagaagcggatctggcgtgaagcagaccctgaatttcgacctgctgaagctggctggcgacgtggaatccaacccaggccctactagtatggactggatttggcgcatccttttccttgtcggcgctgctaccggcgcgcattccttcgaagtccaacttgtggagtctggagggggcctggtgcagcccggcggctctctcagactgtcttgtgcggcaagcggctacaccttcacctcttactggatagaatgggtgaggcaggcacctggaaagggactggagtggattggagagattctgccaggagggggagatacaaattacaatgaaatcttcaaggggcgggccaccttttcagcggataccagcaagaatacagcttacctgcagatgaatagcctccgggcagaagataccgctgtttattattgcacgagacgggtgccaataagactggactattgggggcaagggactcttgtcaccgtcagttcaacgcgtgaggacctgaagaacgtgttcccacctgaggtggccgtgttcgagcctagcgaggccgagatcagccacacccagaaagccaccctcgtgtgcctggctaccggcttctaccccgaccatgtggaactgtcttggtgggtcaacggcaaagaggtgcacagcggcgtgtgtaccgacccccagccactgaaagaacagcccgccctgaacgacagccggtactgcctgagcagcagactgagagtgtccgccaccttctggcagaacccccggaaccacttcagatgccaggtgcagttctacggcctgagcgagaacgacgagtggacccaggacagagccaagcccgtgacccagatcgtgtctgccgaagcctggggcagagccgatgatgtgattaagatccactggcaggaaaagaagtccaacaccatcctgggcagccaggaaggcaacaccatgaagaccaacgacacctacatgaagttcagctggctgaccgtgcccgagaagtccctggacaaagaacacagatgcatcgtgcggcacgaaaacaacaagaacggcgtggaccaggaaatcatcttcccacccatcaagaccgatgtgattacaatggaccccaaggacaactgctccaaggacgccaacgataccctgctgctccagctgaccaacaccagcgcctactacatgtacttgttgctgctgctgaagtccgtggtgtacttcgccatcatcacatgctgcctgctgatggctatggtcaagcggaaggacagccgggga

SEQ ID NO: 5644 - DNA, 2580 bp, synthetic construct
  source 1..2580: mol_type = other DNA
atggccttaccagtgaccgccttgctcctgccgctggccttgctgctccacgccgccaggccggaagtgcagctggttgaatctggcggaggactggttcagcctggcggatctctgagactgtcttgtgccgccagcggcttcagcttcagcgacttttggatgagctgggtccgacaggcccctggcaaaggacttgaatgggtcgccacaatcagccaggccggcagcgagaaggactacgtggactctgtgaagggcagattcaccatcagccgggacaacgccaagaagtccctgtacctccagatgaacagcctgagagccgaggacaccgccgtgtactattgtgcctctggcgtgtacagcttcgactacagaggccagggcaccctggtcacagtctcttctggtaccggcggaggcggatctggcggcggaggtagcggtggcggaggatctgaattcgacatccagttgacccagtcccccagctcactcagcgccagtgtgggggaccgggtgaccattacctgtaaagccagtcagagtgtggactatgacggggatagcttcctgaattggtatcagcagaagcctggcaaagccccaaagctgctgatctacgctgcatctaatctggagtcaggcgtgccttccaggttctccggtagtgggtctgggaccgatttcacattgaccatttcatccctccaacccgaggatttcgctacatattactgtcagcagtccaatgaggaccctctcacctttggccagggcaccaaagttgaaattaagagactcgaggacctgaagaacgtgttcccacctgaggtggccgtgttcgagcctagcgaggccgagatcagccacacccagaaagccaccctcgtgtgcctggctaccggcttctaccccgaccatgtggaactgtcttggtgggtcaacggcaaagaggtgcacagcggcgtgtgtaccgacccccagccactgaaagaacagcccgccctgaacgacagccggtactgcctgagcagcagactgagagtgtccgccaccttctggcagaacccccggaaccacttcagatgccaggtgcagttctacggcctgagcgagaacgacgagtggacccaggacagagccaagcccgtgacccagatcgtgtctgccgaagcctggggcagagccgatgatgtgattaagatccactggcaggaaaagaagtccaacaccatcctgggcagccaggaaggcaacaccatgaagaccaacgacacctacatgaagttcagctggctgaccgtgcccgagaagtccctggacaaagaacacagatgcatcgtgcggcacgaaaacaacaagaacggcgtggaccaggaaatcatcttcccacccatcaagaccgatgtgattacaatggaccccaaggacaactgctccaaggacgccaacgataccctgctgctccagctgaccaacaccagcgcctactacatgtacttgttgctgctgctgaagtccgtggtgtacttcgccatcatcacatgctgcctgctgatggctatggtcaagcggaaggacagccggggaagggccaagcgatctggatctggagcaacaaacttctcactactcaaacaagcaggtgacgtggaggagaatcccgggcctactagtatggactggatttggcgcatccttttccttgtcggcgctgctaccggcgcgcattccttcgaagtccaacttgtggagtctggagggggcctggtgcagcccggcggctctctcagactgtcttgtgcggcaagcggctacaccttcacctcttactggatagaatgggtgaggcaggcacctggaaagggactggagtggattggagagattctgccaggagggggagatacaaattacaatgaaatcttcaaggggcgggccaccttttcagcggataccagcaagaatacagcttacctgcagatgaatagcctccgggcagaagataccgctgtttattattgcacgagacgggtgccaataagactggactattgggggcaagggactcttgtcaccgtcagttcaacgcgtatccagaaccctgatcctgccgtgtaccagctgcgggatagcaagagcagcgacaagagcgtgtgtctgttcaccgacttcgacagccagaccaacgtgtcccagagcaaggactccgacgtgtacatcaccgataagtgcgtgctggacatgcggagcatggacttcaagagcaactccgccgtggcctggtccaacaagtccgatttcgcctgcgccaacgccttcaacaacagcattatccccgaggacacattcttcccaagccccgagagcagcgactccaccgaccacgtgaagcccaaagagacagagaacaccaagcagcccagcaagagctgccacaagcccaaggccatcgtgcacaccgagaaagtgaacatgatgagcctgaccgtgctgggcctgcggatgctgttcgccaaaaccgtggccgtgaacttcctgctgaccgccaagctgttcttcctcctcaccgcc

SEQ ID NO: 5645 - DNA, 2592 bp, synthetic construct
  source 1..2592: mol_type = other DNA
atggccttaccagtgaccgccttgctcctgccgctggccttgctgctccacgccgccaggccggaagtgcagctggttgaatctggcggaggactggttcagcctggcggatctctgagactgtcttgtgccgccagcggcttcagcttcagcgacttttggatgagctgggtccgacaggcccctggcaaaggacttgaatgggtcgccacaatcagccaggccggcagcgagaaggactacgtggactctgtgaagggcagattcaccatcagccgggacaacgccaagaagtccctgtacctccagatgaacagcctgagagccgaggacaccgccgtgtactattgtgcctctggcgtgtacagcttcgactacagaggccagggcaccctggtcacagtctcttctggtaccggcggaggcggatctggcggcggaggtagcggtggcggaggatctgaattcgacatccagttgacccagtcccccagctcactcagcgccagtgtgggggaccgggtgaccattacctgtaaagccagtcagagtgtggactatgacggggatagcttcctgaattggtatcagcagaagcctggcaaagccccaaagctgctgatctacgctgcatctaatctggagtcaggcgtgccttccaggttctccggtagtgggtctgggaccgatttcacattgaccatttcatccctccaacccgaggatttcgctacatattactgtcagcagtccaatgaggaccctctcacctttggccagggcaccaaagttgaaattaagagactcgagatccagaaccctgatcctgccgtgtaccagctgcgggatagcaagagcagcgacaagagcgtgtgtctgttcaccgacttcgacagccagaccaacgtgtcccagagcaaggactccgacgtgtacatcaccgataagtgcgtgctggacatgcggagcatggacttcaagagcaactccgccgtggcctggtccaacaagtccgatttcgcctgcgccaacgccttcaacaacagcattatccccgaggacacattcttcccaagccccgagagcagcgactccaccgaccacgtgaagcccaaagagacagagaacaccaagcagcccagcaagagctgccacaagcccaaggccatcgtgcacaccgagaaagtgaacatgatgagcctgaccgtgctgggcctgcggatgctgttcgccaaaaccgtggccgtgaacttcctgctgaccgccaagctgttcttcctcctcaccgcccgcgccaagagaagcggatctggcgtgaagcagaccctgaatttcgacctgctgaagctggctggcgacgtggaatccaacccaggccctactagtatggactggatttggcgcatccttttccttgtcggcgctgctaccggcgcgcattccttcgaagtccaacttgtggagtctggagggggcctggtgcagcccggcggctctctcagactgtcttgtgcggcaagcggctacaccttcacctcttactggatagaatgggtgaggcaggcacctggaaagggactggagtggattggagagattctgccaggagggggagatacaaattacaatgaaatcttcaaggggcgggccaccttttcagcggataccagcaagaatacagcttacctgcagatgaatagcctccgggcagaagataccgctgtttattattgcacgagacgggtgccaataagactggactattgggggcaagggactcttgtcaccgtcagttcaacgcgtgaggacctgaagaacgtgttcccacctgaggtggccgtgttcgagcctagcgaggccgagatcagccacacccagaaagccaccctcgtgtgcctggctaccggcttctaccccgaccatgtggaactgtcttggtgggtcaacggcaaagaggtgcacagcggcgtgtgtaccgacccccagccactgaaagaacagcccgccctgaacgacagccggtactgcctgagcagcagactgagagtgtccgccaccttctggcagaacccccggaaccacttcagatgccaggtgcagttctacggcctgagcgagaacgacgagtggacccaggacagagccaagcccgtgacccagatcgtgtctgccgaagcctggggcagagccgatgatgtgattaagatccactggcaggaaaagaagtccaacaccatcctgggcagccaggaaggcaacaccatgaagaccaacgacacctacatgaagttcagctggctgaccgtgcccgagaagtccctggacaaagaacacagatgcatcgtgcggcacgaaaacaacaagaacggcgtggaccaggaaatcatcttcccacccatcaagaccgatgtgattacaatggaccccaaggacaactgctccaaggacgccaacgataccctgctgctccagctgaccaacaccagcgcctactacatgtacttgttgctgctgctgaagtccgtggtgtacttcgccatcatcacatgctgcctgctgatggctatggtcaagcggaaggacagccgggga

SEQ ID NO: 5646 - DNA, 2991 bp, synthetic construct
  source 1..2991: mol_type = other DNA
atggccttaccagtgaccgccttgctcctgccgctggccttgctgctccacgccgccaggccggaagtgcagctggttgaatctggcggaggactggttcagcctggcggatctctgagactgtcttgtgccgccagcggcttcagcttcagcgacttttggatgagctgggtccgacaggcccctggcaaaggacttgaatgggtcgccacaatcagccaggccggcagcgagaaggactacgtggactctgtgaagggcagattcaccatcagccgggacaacgccaagaagtccctgtacctccagatgaacagcctgagagccgaggacaccgccgtgtactattgtgcctctggcgtgtacagcttcgactacagaggccagggcaccctggtcacagtctcttctggtaccggcggaggcggatctggcggcggaggtagcggtggcggaggatctgaattcgacatccagttgacccagtcccccagctcactcagcgccagtgtgggggaccgggtgaccattacctgtaaagccagtcagagtgtggactatgacggggatagcttcctgaattggtatcagcagaagcctggcaaagccccaaagctgctgatctacgctgcatctaatctggagtcaggcgtgccttccaggttctccggtagtgggtctgggaccgatttcacattgaccatttcatccctccaacccgaggatttcgctacatattactgtcagcagtccaatgaggaccctctcacctttggccagggcaccaaagttgaaattaagagactcgaggacctgaagaacgtgttcccacctgaggtggccgtgttcgagcctagcgaggccgagatcagccacacccagaaagccaccctcgtgtgcctggctaccggcttctaccccgaccatgtggaactgtcttggtgggtcaacggcaaagaggtgcacagcggcgtgtgtaccgacccccagccactgaaagaacagcccgccctgaacgacagccggtactgcctgagcagcagactgagagtgtccgccaccttctggcagaacccccggaaccacttcagatgccaggtgcagttctacggcctgagcgagaacgacgagtggacccaggacagagccaagcccgtgacccagatcgtgtctgccgaagcctggggcagagccgatgatgtgattaagatccactggcaggaaaagaagtccaacaccatcctgggcagccaggaaggcaacaccatgaagaccaacgacacctacatgaagttcagctggctgaccgtgcccgagaagtccctggacaaagaacacagatgcatcgtgcggcacgaaaacaacaagaacggcgtggaccaggaaatcatcttcccacccatcaagaccgatgtgattacaatggaccccaaggacaactgctccaaggacgccaacgataccctgctgctccagctgaccaacaccagcgcctactacatgtacttgttgctgctgctgaagtccgtggtgtacttcgccatcatcacatgctgcctgctgatggctatggtcaagcggaaggacagccggggaagggccaagcgatctggatctggagcaacaaacttctcactactcaaacaagcaggtgacgtggaggagaatcccgggcctactagtatggactggatttggcgcatccttttccttgtcggcgctgctaccggcgcgcattccgggccccagctccagctgcaagagtctggacctggcctggtcaagcctagcgagacactgagcctgacctgtaccgtgtccggcgatagcatcagcagcggcgattactactggggctggatcagacagcctcctggcaaaggactggaatggatcggccacatctactacagcggcgtgacctactacaaccccagcctgaagtccagagtgaccatcagcgtggacaccagccggaaccagttctccctgaagctgtctagcgtgacagccgccgataccgccgtgtactactgcaccagagaggacagcagcaactggcggagtagaggccagggaacactggtcacagttagctctggatccggcggaggcggaagtggaggcggaggatctggcggcggaggctctttcgaagtccaacttgtggagtctggagggggcctggtgcagcccggcggctctctcagactgtcttgtgcggcaagcggctacaccttcacctcttactggatagaatgggtgaggcaggcacctggaaagggactggagtggattggagagattctgccaggagggggagatacaaattacaatgaaatcttcaaggggcgggccaccttttcagcggataccagcaagaatacagcttacctgcagatgaatagcctccgggcagaagataccgctgtttattattgcacgagacgggtgccaataagactggactattgggggcaagggactcttgtcaccgtcagttcaacgcgtatccagaaccctgatcctgccgtgtaccagctgcgggatagcaagagcagcgacaagagcgtgtgtctgttcaccgacttcgacagccagaccaacgtgtcccagagcaaggactccgacgtgtacatcaccgataagtgcgtgctggacatgcggagcatggacttcaagagcaactccgccgtggcctggtccaacaagtccgatttcgcctgcgccaacgccttcaacaacagcattatccccgaggacacattcttcccaagccccgagagcagcgactccaccgaccacgtgaagcccaaagagacagagaacaccaagcagcccagcaagagctgccacaagcccaaggccatcgtgcacaccgagaaagtgaacatgatgagcctgaccgtgctgggcctgcggatgctgttcgccaaaaccgtggccgtgaacttcctgctgaccgccaagctgttcttcctcctcaccgcc

SEQ ID NO: 5647 - DNA, 3003 bp, synthetic construct
  source 1..3003: mol_type = other DNA
atggccttaccagtgaccgccttgctcctgccgctggccttgctgctccacgccgccaggccggaagtgcagctggttgaatctggcggaggactggttcagcctggcggatctctgagactgtcttgtgccgccagcggcttcagcttcagcgacttttggatgagctgggtccgacaggcccctggcaaaggacttgaatgggtcgccacaatcagccaggccggcagcgagaaggactacgtggactctgtgaagggcagattcaccatcagccgggacaacgccaagaagtccctgtacctccagatgaacagcctgagagccgaggacaccgccgtgtactattgtgcctctggcgtgtacagcttcgactacagaggccagggcaccctggtcacagtctcttctggtaccggcggaggcggatctggcggcggaggtagcggtggcggaggatctgaattcgacatccagttgacccagtcccccagctcactcagcgccagtgtgggggaccgggtgaccattacctgtaaagccagtcagagtgtggactatgacggggatagcttcctgaattggtatcagcagaagcctggcaaagccccaaagctgctgatctacgctgcatctaatctggagtcaggcgtgccttccaggttctccggtagtgggtctgggaccgatttcacattgaccatttcatccctccaacccgaggatttcgctacatattactgtcagcagtccaatgaggaccctctcacctttggccagggcaccaaagttgaaattaagagactcgagatccagaaccctgatcctgccgtgtaccagctgcgggatagcaagagcagcgacaagagcgtgtgtctgttcaccgacttcgacagccagaccaacgtgtcccagagcaaggactccgacgtgtacatcaccgataagtgcgtgctggacatgcggagcatggacttcaagagcaactccgccgtggcctggtccaacaagtccgatttcgcctgcgccaacgccttcaacaacagcattatccccgaggacacattcttcccaagccccgagagcagcgactccaccgaccacgtgaagcccaaagagacagagaacaccaagcagcccagcaagagctgccacaagcccaaggccatcgtgcacaccgagaaagtgaacatgatgagcctgaccgtgctgggcctgcggatgctgttcgccaaaaccgtggccgtgaacttcctgctgaccgccaagctgttcttcctcctcaccgcccgcgccaagagaagcggatctggcgtgaagcagaccctgaatttcgacctgctgaagctggctggcgacgtggaatccaacccaggccctactagtatggactggatttggcgcatccttttccttgtcggcgctgctaccggcgcgcattccgggccccagctccagctgcaagagtctggacctggcctggtcaagcctagcgagacactgagcctgacctgtaccgtgtccggcgatagcatcagcagcggcgattactactggggctggatcagacagcctcctggcaaaggactggaatggatcggccacatctactacagcggcgtgacctactacaaccccagcctgaagtccagagtgaccatcagcgtggacaccagccggaaccagttctccctgaagctgtctagcgtgacagccgccgataccgccgtgtactactgcaccagagaggacagcagcaactggcggagtagaggccagggaacactggtcacagttagctctggatccggcggaggcggaagtggaggcggaggatctggcggcggaggctctttcgaagtccaacttgtggagtctggagggggcctggtgcagcccggcggctctctcagactgtcttgtgcggcaagcggctacaccttcacctcttactggatagaatgggtgaggcaggcacctggaaagggactggagtggattggagagattctgccaggagggggagatacaaattacaatgaaatcttcaaggggcgggccaccttttcagcggataccagcaagaatacagcttacctgcagatgaatagcctccgggcagaagataccgctgtttattattgcacgagacgggtgccaataagactggactattgggggcaagggactcttgtcaccgtcagttcaacgcgtgaggacctgaagaacgtgttcccacctgaggtggccgtgttcgagcctagcgaggccgagatcagccacacccagaaagccaccctcgtgtgcctggctaccggcttctaccccgaccatgtggaactgtcttggtgggtcaacggcaaagaggtgcacagcggcgtgtgtaccgacccccagccactgaaagaacagcccgccctgaacgacagccggtactgcctgagcagcagactgagagtgtccgccaccttctggcagaacccccggaaccacttcagatgccaggtgcagttctacggcctgagcgagaacgacgagtggacccaggacagagccaagcccgtgacccagatcgtgtctgccgaagcctggggcagagccgatgatgtgattaagatccactggcaggaaaagaagtccaacaccatcctgggcagccaggaaggcaacaccatgaagaccaacgacacctacatgaagttcagctggctgaccgtgcccgagaagtccctggacaaagaacacagatgcatcgtgcggcacgaaaacaacaagaacggcgtggaccaggaaatcatcttcccacccatcaagaccgatgtgattacaatggaccccaaggacaactgctccaaggacgccaacgataccctgctgctccagctgaccaacaccagcgcctactacatgtacttgttgctgctgctgaagtccgtggtgtacttcgccatcatcacatgctgcctgctgatggctatggtcaagcggaaggacagccgggga

SEQ ID NO: 5648 - DNA, 2169 bp, synthetic construct
  source 1..2169: mol_type = other DNA
atggccttaccagtgaccgccttgctcctgccgctggccttgctgctccacgccgccaggccggacatccagttgacccagtcccccagctcactcagcgccagtgtgggggaccgggtgaccattacctgtaaagccagtcagagtgtggactatgacggggatagcttcctgaattggtatcagcagaagcctggcaaagccccaaagctgctgatctacgctgcatctaatctggagtcaggcgtgccttccaggttctccggtagtgggtctgggaccgatttcacattgaccatttcatccctccaacccgaggatttcgctacatattactgtcagcagtccaatgaggaccctctcacctttggccagggcaccaaagttgaaattaagagactcgaggacctgaagaacgtgttcccacctgaggtggccgtgttcgagcctagcgaggccgagatcagccacacccagaaagccaccctcgtgtgcctggctaccggcttctaccccgaccatgtggaactgtcttggtgggtcaacggcaaagaggtgcacagcggcgtgtgtaccgacccccagccactgaaagaacagcccgccctgaacgacagccggtactgcctgagcagcagactgagagtgtccgccaccttctggcagaacccccggaaccacttcagatgccaggtgcagttctacggcctgagcgagaacgacgagtggacccaggacagagccaagcccgtgacccagatcgtgtctgccgaagcctggggcagagccgatgatgtgattaagatccactggcaggaaaagaagtccaacaccatcctgggcagccaggaaggcaacaccatgaagaccaacgacacctacatgaagttcagctggctgaccgtgcccgagaagtccctggacaaagaacacagatgcatcgtgcggcacgaaaacaacaagaacggcgtggaccaggaaatcatcttcccacccatcaagaccgatgtgattacaatggaccccaaggacaactgctccaaggacgccaacgataccctgctgctccagctgaccaacaccagcgcctactacatgtacttgttgctgctgctgaagtccgtggtgtacttcgccatcatcacatgctgcctgctgcggagaaccgccttctgctgcaacggcgagaagtctagggccaagcgatctggatctggagcaacaaacttctcactactcaaacaagcaggtgacgtggaggagaatcccgggcctactagtatggactggatttggcgcatccttttccttgtcggcgctgctaccggcgcgcattccttcgaagtccaacttgtggagtctggagggggcctggtgcagcccggcggctctctcagactgtcttgtgcggcaagcggctacaccttcacctcttactggatagaatgggtgaggcaggcacctggaaagggactggagtggattggagagattctgccaggagggggagatacaaattacaatgaaatcttcaaggggcgggccaccttttcagcggataccagcaagaatacagcttacctgcagatgaatagcctccgggcagaagataccgctgtttattattgcacgagacgggtgccaataagactggactattgggggcaagggactcttgtcaccgtcagttcaacgcgtatccagaaccctgatcctgccgtgtaccagctgcgggatagcaagagcagcgacaagagcgtgtgtctgttcaccgacttcgacagccagaccaacgtgtcccagagcaaggactccgacgtgtacatcaccgataagtgcgtgctggacatgcggagcatggacttcaagagcaactccgccgtggcctggtccaacaagtccgatttcgcctgcgccaacgccttcaacaacagcattatccccgaggacacattcttcccaagccccgagagcagcgactccaccgaccacgtgaagcccaaagagacagagaacaccaagcagcccagcaagagctgccacaagcccaaggccatcgtgcacaccgagaaagtgaacatgatgagcctgaccgtgctgggcctgcggatgctgttcgccaaaaccgtggccgtgaacttcctgctgaccgccaagctgttcttcctc

SEQ ID NO: 5649 - DNA, 2181 bp, synthetic construct
  source 1..2181: mol_type = other DNA
atggccttaccagtgaccgccttgctcctgccgctggccttgctgctccacgccgccaggccggacatccagttgacccagtcccccagctcactcagcgccagtgtgggggaccgggtgaccattacctgtaaagccagtcagagtgtggactatgacggggatagcttcctgaattggtatcagcagaagcctggcaaagccccaaagctgctgatctacgctgcatctaatctggagtcaggcgtgccttccaggttctccggtagtgggtctgggaccgatttcacattgaccatttcatccctccaacccgaggatttcgctacatattactgtcagcagtccaatgaggaccctctcacctttggccagggcaccaaagttgaaattaagagactcgagatccagaaccctgatcctgccgtgtaccagctgcgggatagcaagagcagcgacaagagcgtgtgtctgttcaccgacttcgacagccagaccaacgtgtcccagagcaaggactccgacgtgtacatcaccgataagtgcgtgctggacatgcggagcatggacttcaagagcaactccgccgtggcctggtccaacaagtccgatttcgcctgcgccaacgccttcaacaacagcattatccccgaggacacattcttcccaagccccgagagcagcgactccaccgaccacgtgaagcccaaagagacagagaacaccaagcagcccagcaagagctgccacaagcccaaggccatcgtgcacaccgagaaagtgaacatgatgagcctgaccgtgctgggcctgcggatgctgttcgccaaaaccgtggccgtgaacttcctgctgaccgccaagctgttcttcctccgcgccaagagaagcggatctggcgtgaagcagaccctgaatttcgacctgctgaagctggctggcgacgtggaatccaacccaggccctactagtatggactggatttggcgcatccttttccttgtcggcgctgctaccggcgcgcattccttcgaagtccaacttgtggagtctggagggggcctggtgcagcccggcggctctctcagactgtcttgtgcggcaagcggctacaccttcacctcttactggatagaatgggtgaggcaggcacctggaaagggactggagtggattggagagattctgccaggagggggagatacaaattacaatgaaatcttcaaggggcgggccaccttttcagcggataccagcaagaatacagcttacctgcagatgaatagcctccgggcagaagataccgctgtttattattgcacgagacgggtgccaataagactggactattgggggcaagggactcttgtcaccgtcagttcaacgcgtgaggacctgaagaacgtgttcccacctgaggtggccgtgttcgagcctagcgaggccgagatcagccacacccagaaagccaccctcgtgtgcctggctaccggcttctaccccgaccatgtggaactgtcttggtgggtcaacggcaaagaggtgcacagcggcgtgtgtaccgacccccagccactgaaagaacagcccgccctgaacgacagccggtactgcctgagcagcagactgagagtgtccgccaccttctggcagaacccccggaaccacttcagatgccaggtgcagttctacggcctgagcgagaacgacgagtggacccaggacagagccaagcccgtgacccagatcgtgtctgccgaagcctggggcagagccgatgatgtgattaagatccactggcaggaaaagaagtccaacaccatcctgggcagccaggaaggcaacaccatgaagaccaacgacacctacatgaagttcagctggctgaccgtgcccgagaagtccctggacaaagaacacagatgcatcgtgcggcacgaaaacaacaagaacggcgtggaccaggaaatcatcttcccacccatcaagaccgatgtgattacaatggaccccaaggacaactgctccaaggacgccaacgataccctgctgctccagctgaccaacaccagcgcctactacatgtacttgttgctgctgctgaagtccgtggtgtacttcgccatcatcacatgctgcctgctgcggagaaccgccttctgctgcaacggcgagaagtct

SEQ ID NO: 5650 - DNA, 2574 bp, synthetic construct
  source 1..2574: mol_type = other DNA
atggccttaccagtgaccgccttgctcctgccgctggccttgctgctccacgccgccaggccggaagtgcagctggttgaatctggcggaggactggttcagcctggcggatctctgagactgtcttgtgccgccagcggcttcagcttcagcgacttttggatgagctgggtccgacaggcccctggcaaaggacttgaatgggtcgccacaatcagccaggccggcagcgagaaggactacgtggactctgtgaagggcagattcaccatcagccgggacaacgccaagaagtccctgtacctccagatgaacagcctgagagccgaggacaccgccgtgtactattgtgcctctggcgtgtacagcttcgactacagaggccagggcaccctggtcacagtctcttctggtaccggcggaggcggatctggcggcggaggtagcggtggcggaggatctgaattcgacatccagttgacccagtcccccagctcactcagcgccagtgtgggggaccgggtgaccattacctgtaaagccagtcagagtgtggactatgacggggatagcttcctgaattggtatcagcagaagcctggcaaagccccaaagctgctgatctacgctgcatctaatctggagtcaggcgtgccttccaggttctccggtagtgggtctgggaccgatttcacattgaccatttcatccctccaacccgaggatttcgctacatattactgtcagcagtccaatgaggaccctctcacctttggccagggcaccaaagttgaaattaagagactcgaggacctgaagaacgtgttcccacctgaggtggccgtgttcgagcctagcgaggccgagatcagccacacccagaaagccaccctcgtgtgcctggctaccggcttctaccccgaccatgtggaactgtcttggtgggtcaacggcaaagaggtgcacagcggcgtgtgtaccgacccccagccactgaaagaacagcccgccctgaacgacagccggtactgcctgagcagcagactgagagtgtccgccaccttctggcagaacccccggaaccacttcagatgccaggtgcagttctacggcctgagcgagaacgacgagtggacccaggacagagccaagcccgtgacccagatcgtgtctgccgaagcctggggcagagccgatgatgtgattaagatccactggcaggaaaagaagtccaacaccatcctgggcagccaggaaggcaacaccatgaagaccaacgacacctacatgaagttcagctggctgaccgtgcccgagaagtccctggacaaagaacacagatgcatcgtgcggcacgaaaacaacaagaacggcgtggaccaggaaatcatcttcccacccatcaagaccgatgtgattacaatggaccccaaggacaactgctccaaggacgccaacgataccctgctgctccagctgaccaacaccagcgcctactacatgtacttgttgctgctgctgaagtccgtggtgtacttcgccatcatcacatgctgcctgctgcggagaaccgccttctgctgcaacggcgagaagtctagggccaagcgatctggatctggagcaacaaacttctcactactcaaacaagcaggtgacgtggaggagaatcccgggcctactagtatggactggatttggcgcatccttttccttgtcggcgctgctaccggcgcgcattccttcgaagtccaacttgtggagtctggagggggcctggtgcagcccggcggctctctcagactgtcttgtgcggcaagcggctacaccttcacctcttactggatagaatgggtgaggcaggcacctggaaagggactggagtggattggagagattctgccaggagggggagatacaaattacaatgaaatcttcaaggggcgggccaccttttcagcggataccagcaagaatacagcttacctgcagatgaatagcctccgggcagaagataccgctgtttattattgcacgagacgggtgccaataagactggactattgggggcaagggactcttgtcaccgtcagttcaacgcgtatccagaaccctgatcctgccgtgtaccagctgcgggatagcaagagcagcgacaagagcgtgtgtctgttcaccgacttcgacagccagaccaacgtgtcccagagcaaggactccgacgtgtacatcaccgataagtgcgtgctggacatgcggagcatggacttcaagagcaactccgccgtggcctggtccaacaagtccgatttcgcctgcgccaacgccttcaacaacagcattatccccgaggacacattcttcccaagccccgagagcagcgactccaccgaccacgtgaagcccaaagagacagagaacaccaagcagcccagcaagagctgccacaagcccaaggccatcgtgcacaccgagaaagtgaacatgatgagcctgaccgtgctgggcctgcggatgctgttcgccaaaaccgtggccgtgaacttcctgctgaccgccaagctgttcttcctc

SEQ ID NO: 5651 - DNA, 2985 bp, synthetic construct
  source 1..2985: mol_type = other DNA
atggccttaccagtgaccgccttgctcctgccgctggccttgctgctccacgccgccaggccggaagtgcagctggttgaatctggcggaggactggttcagcctggcggatctctgagactgtcttgtgccgccagcggcttcagcttcagcgacttttggatgagctgggtccgacaggcccctggcaaaggacttgaatgggtcgccacaatcagccaggccggcagcgagaaggactacgtggactctgtgaagggcagattcaccatcagccgggacaacgccaagaagtccctgtacctccagatgaacagcctgagagccgaggacaccgccgtgtactattgtgcctctggcgtgtacagcttcgactacagaggccagggcaccctggtcacagtctcttctggtaccggcggaggcggatctggcggcggaggtagcggtggcggaggatctgaattcgacatccagttgacccagtcccccagctcactcagcgccagtgtgggggaccgggtgaccattacctgtaaagccagtcagagtgtggactatgacggggatagcttcctgaattggtatcagcagaagcctggcaaagccccaaagctgctgatctacgctgcatctaatctggagtcaggcgtgccttccaggttctccggtagtgggtctgggaccgatttcacattgaccatttcatccctccaacccgaggatttcgctacatattactgtcagcagtccaatgaggaccctctcacctttggccagggcaccaaagttgaaattaagagactcgaggacctgaagaacgtgttcccacctgaggtggccgtgttcgagcctagcgaggccgagatcagccacacccagaaagccaccctcgtgtgcctggctaccggcttctaccccgaccatgtggaactgtcttggtgggtcaacggcaaagaggtgcacagcggcgtgtgtaccgacccccagccactgaaagaacagcccgccctgaacgacagccggtactgcctgagcagcagactgagagtgtccgccaccttctggcagaacccccggaaccacttcagatgccaggtgcagttctacggcctgagcgagaacgacgagtggacccaggacagagccaagcccgtgacccagatcgtgtctgccgaagcctggggcagagccgatgatgtgattaagatccactggcaggaaaagaagtccaacaccatcctgggcagccaggaaggcaacaccatgaagaccaacgacacctacatgaagttcagctggctgaccgtgcccgagaagtccctggacaaagaacacagatgcatcgtgcggcacgaaaacaacaagaacggcgtggaccaggaaatcatcttcccacccatcaagaccgatgtgattacaatggaccccaaggacaactgctccaaggacgccaacgataccctgctgctccagctgaccaacaccagcgcctactacatgtacttgttgctgctgctgaagtccgtggtgtacttcgccatcatcacatgctgcctgctgcggagaaccgccttctgctgcaacggcgagaagtctagggccaagcgatctggatctggagcaacaaacttctcactactcaaacaagcaggtgacgtggaggagaatcccgggcctactagtatggactggatttggcgcatccttttccttgtcggcgctgctaccggcgcgcattccgggccccagctccagctgcaagagtctggacctggcctggtcaagcctagcgagacactgagcctgacctgtaccgtgtccggcgatagcatcagcagcggcgattactactggggctggatcagacagcctcctggcaaaggactggaatggatcggccacatctactacagcggcgtgacctactacaaccccagcctgaagtccagagtgaccatcagcgtggacaccagccggaaccagttctccctgaagctgtctagcgtgacagccgccgataccgccgtgtactactgcaccagagaggacagcagcaactggcggagtagaggccagggaacactggtcacagttagctctggatccggcggaggcggaagtggaggcggaggatctggcggcggaggctctttcgaagtccaacttgtggagtctggagggggcctggtgcagcccggcggctctctcagactgtcttgtgcggcaagcggctacaccttcacctcttactggatagaatgggtgaggcaggcacctggaaagggactggagtggattggagagattctgccaggagggggagatacaaattacaatgaaatcttcaaggggcgggccaccttttcagcggataccagcaagaatacagcttacctgcagatgaatagcctccgggcagaagataccgctgtttattattgcacgagacgggtgccaataagactggactattgggggcaagggactcttgtcaccgtcagttcaacgcgtatccagaaccctgatcctgccgtgtaccagctgcgggatagcaagagcagcgacaagagcgtgtgtctgttcaccgacttcgacagccagaccaacgtgtcccagagcaaggactccgacgtgtacatcaccgataagtgcgtgctggacatgcggagcatggacttcaagagcaactccgccgtggcctggtccaacaagtccgatttcgcctgcgccaacgccttcaacaacagcattatccccgaggacacattcttcccaagccccgagagcagcgactccaccgaccacgtgaagcccaaagagacagagaacaccaagcagcccagcaagagctgccacaagcccaaggccatcgtgcacaccgagaaagtgaacatgatgagcctgaccgtgctgggcctgcggatgctgttcgccaaaaccgtggccgtgaacttcctgctgaccgccaagctgttcttcctc

SEQ ID NO: 5652 - DNA, 1863 bp, synthetic construct
  source 1..1863: mol_type = other DNA
atggccttaccagtgaccgccttgctcctgccgctggccttgctgctccacgccgccaggccggacatccagttgacccagtcccccagctcactcagcgccagtgtgggggaccgggtgaccattacctgtaaagccagtcagagtgtggactatgacggggatagcttcctgaattggtatcagcagaagcctggcaaagccccaaagctgctgatctacgctgcatctaatctggagtcaggcgtgccttccaggttctccggtagtgggtctgggaccgatttcacattgaccatttcatccctccaacccgaggatttcgctacatattactgtcagcagtccaatgaggaccctctcacctttggccagggcaccaaagttgaaattaagagactcgaggacctgaagaacgtgttcccacctgaggtggccgtgttcgagcctagcgaggccgagatcagccacacccagaaagccaccctcgtgtgcctggctaccggcttctaccccgaccatgtggaactgtcttggtgggtcaacggcaaagaggtgcacagcggcgtgtctaccgacccccagccactgaaagaacagcccgccctgaacgacagccggtactgcctgagcagcagactgagagtgtccgccaccttctggcagaacccccggaaccacttcagatgccaggtgcagttctacggcctgagcgagaacgacgagtggacccaggacagagccaagcccgtgacccagatcgtgtctgccgaagcctggggcagagccgattgcgacgtgaagctggtggaaaagagcttcgagacagacaccaacctgaacttccagaacctgagcgtgatcggcttcagaatcctgctgctgaaagtggccggctttaacctgctgatgaccctgcggctgtggtccagcagggccaagcgatctggatctggagcaacaaacttctcactactcaaacaagcaggtgacgtggaggagaatcccgggcctactagtatggactggatttggcgcatccttttccttgtcggcgctgctaccggcgcgcattccttcgaagtccaacttgtggagtctggagggggcctggtgcagcccggcggctctctcagactgtcttgtgcggcaagcggctacaccttcacctcttactggatagaatgggtgaggcaggcacctggaaagggactggagtggattggagagattctgccaggagggggagatacaaattacaatgaaatcttcaaggggcgggccaccttttcagcggataccagcaagaatacagcttacctgcagatgaatagcctccgggcagaagataccgctgtttattattgcacgagacgggtgccaataagactggactattgggggcaagggactcttgtcaccgtcagttcaacgcgtatccagaaccctgatcctgccgtgtaccagctgcgggatagcaagagcagcgacaagagcgtgtgtctgttcaccgacttcgacagccagaccaacgtgtcccagagcaaggactccgacgtgtacatcaccgataagaccgtgctggacatgcggagcatggacttcaagagcaactccgccgtggcctggtccaacaagtccgatttcgcctgcgccaacgccttcaacaacagcattatccccgaggacacattcttcccaagccccgagagcagctgcggctttaccagcgagagctaccagcagggcgtgctgagcgccaccatcctgtacgagatcctgctgggcaaggccaccctgtacgccgtgctggtgtctgccctggtgctgatggctatggtcaagcggaaggacagccgggga

SEQ ID NO: 5653 - DNA, 1863 bp, synthetic construct
  source 1..1863: mol_type = other DNA
atggccttaccagtgaccgccttgctcctgccgctggccttgctgctccacgccgccaggccggacatccagttgacccagtcccccagctcactcagcgccagtgtgggggaccgggtgaccattacctgtaaagccagtcagagtgtggactatgacggggatagcttcctgaattggtatcagcagaagcctggcaaagccccaaagctgctgatctacgctgcatctaatctggagtcaggcgtgccttccaggttctccggtagtgggtctgggaccgatttcacattgaccatttcatccctccaacccgaggatttcgctacatattactgtcagcagtccaatgaggaccctctcacctttggccagggcaccaaagttgaaattaagagactcgaggacctgaagaacgtgttcccacctgaggtggccgtgttcgagcctagcgaggccgagatcagccacacccagaaagccaccctcgtgtgcctggctaccggcttctaccccgaccatgtggaactgtcttggtgggtcaacggcaaagaggtgcacagcggcgtgtctaccgacccccagccactgaaagaacagcccgccctgaacgacagccggtactgcctgagcagcagactgagagtgtccgccaccttctggcagaacccccggaaccacttcagatgccaggtgcagttctacggcctgagcgagaacgacgagtggacccaggacagagccaagcccgtgacccagatcgtgtctgccgaagcctggggcagagccgattgcggctttaccagcgagagctaccagcagggcgtgctgagcgccaccaacctgagcgtgatcggcttcagaatcctgctgctgaaagtggccggctttaacctgctgatgaccctgcggctgtggtccagcagggccaagcgatctggatctggagcaacaaacttctcactactcaaacaagcaggtgacgtggaggagaatcccgggcctactagtatggactggatttggcgcatccttttccttgtcggcgctgctaccggcgcgcattccttcgaagtccaacttgtggagtctggagggggcctggtgcagcccggcggctctctcagactgtcttgtgcggcaagcggctacaccttcacctcttactggatagaatgggtgaggcaggcacctggaaagggactggagtggattggagagattctgccaggagggggagatacaaattacaatgaaatcttcaaggggcgggccaccttttcagcggataccagcaagaatacagcttacctgcagatgaatagcctccgggcagaagataccgctgtttattattgcacgagacgggtgccaataagactggactattgggggcaagggactcttgtcaccgtcagttcaacgcgtatccagaaccctgatcctgccgtgtaccagctgcgggatagcaagagcagcgacaagagcgtgtgtctgttcaccgacttcgacagccagaccaacgtgtcccagagcaaggactccgacgtgtacatcaccgataagaccgtgctggacatgcggagcatggacttcaagagcaactccgccgtggcctggtccaacaagtccgatttcgcctgcgccaacgccttcaacaacagcattatccccgaggacacattcttcccaagccccgagagcagctgcgacgtgaagctggtggaaaagagcttcgagacagacaccaacctgaacttccagatcctgtacgagatcctgctgggcaaggccaccctgtacgccgtgctggtgtctgccctggtgctgatggctatggtcaagcggaaggacagccgggga

SEQ ID NO: 5654 - DNA, 2175 bp, synthetic construct
  source 1..2175: mol_type = other DNA
atggccttaccagtgaccgccttgctcctgccgctggccttgctgctccacgccgccaggccggacatccagttgacccagtcccccagctcactcagcgccagtgtgggggaccgggtgaccattacctgtaaagccagtcagagtgtggactatgacggggatagcttcctgaattggtatcagcagaagcctggcaaagccccaaagctgctgatctacgctgcatctaatctggagtcaggcgtgccttccaggttctccggtagtgggtctgggaccgatttcacattgaccatttcatccctccaacccgaggatttcgctacatattactgtcagcagtccaatgaggaccctctcacctttggccagggcaccaaagttgaaattaagagactcgaggacctgaagaacgtgttcccacctgaggtggccgtgttcgagcctagcgaggccgagatcagccacacccagaaagccaccctcgtgtgcctggctaccggcttctaccccgaccatgtggaactgtcttggtgggtcaacggcaaagaggtgcacagcggcgtgtctaccgacccccagccactgaaagaacagcccgccctgaacgacagccggtactgcctgagcagcagactgagagtgtccgccaccttctggcagaacccccggaaccacttcagatgccaggtgcagttctacggcctgagcgagaacgacgagtggacccaggacagagccaagcccgtgacccagatcgtgtctgccgaagcctggggcagagccgatgatgtgattaagatccactggcaggaaaagaagtccaacaccatcctgggcagccaggaaggcaacaccatgaagaccaacgacacctacatgaagttcagctggctgaccgtgcccgagaagtccctggacaaagaacacagatgcatcgtgcggcacgaaaacaacaagaacggcgtggaccaggaaatcatcttcccacccatcaagaccgatgtgattacaatggaccccaaggacaactgctccaaggacgccaacgataccctgctgctccagctgaccaacaccagcgcctactacatgtacttgttgctgctgctgaagtccgtggtgtacttcgccatcatcacatgctgcctgctgatggctatggtcaagcggaaggacagccggggaagggccaagcgatctggatctggagcaacaaacttctcactactcaaacaagcaggtgacgtggaggagaatcccgggcctactagtatggactggatttggcgcatccttttccttgtcggcgctgctaccggcgcgcattccttcgaagtccaacttgtggagtctggagggggcctggtgcagcccggcggctctctcagactgtcttgtgcggcaagcggctacaccttcacctcttactggatagaatgggtgaggcaggcacctggaaagggactggagtggattggagagattctgccaggagggggagatacaaattacaatgaaatcttcaaggggcgggccaccttttcagcggataccagcaagaatacagcttacctgcagatgaatagcctccgggcagaagataccgctgtttattattgcacgagacgggtgccaataagactggactattgggggcaagggactcttgtcaccgtcagttcaacgcgtatccagaaccctgatcctgccgtgtaccagctgcgggatagcaagagcagcgacaagagcgtgtgtctgttcaccgacttcgacagccagaccaacgtgtcccagagcaaggactccgacgtgtacatcaccgataagaccgtgctggacatgcggagcatggacttcaagagcaactccgccgtggcctggtccaacaagtccgatttcgcctgcgccaacgccttcaacaacagcattatccccgaggacacattcttcccaagccccgagagcagcgactccaccgaccacgtgaagcccaaagagacagagaacaccaagcagcccagcaagagctgccacaagcccaaggccatcgtgcacaccgagaaagtgaacatgatgagcctgaccgtgctgggcctgcggatgctgttcgccaaaaccgtggccgtgaacttcctgctgaccgccaagctgttcttcctcctcaccgcc

SEQ ID NO: 5655 - DNA, 2169 bp, synthetic construct
  source 1..2169: mol_type = other DNA
atggccttaccagtgaccgccttgctcctgccgctggccttgctgctccacgccgccaggccggacatccagttgacccagtcccccagctcactcagcgccagtgtgggggaccgggtgaccattacctgtaaagccagtcagagtgtggactatgacggggatagcttcctgaattggtatcagcagaagcctggcaaagccccaaagctgctgatctacgctgcatctaatctggagtcaggcgtgccttccaggttctccggtagtgggtctgggaccgatttcacattgaccatttcatccctccaacccgaggatttcgctacatattactgtcagcagtccaatgaggaccctctcacctttggccagggcaccaaagttgaaattaagagactcgaggacctgaagaacgtgttcccacctgaggtggccgtgttcgagcctagcgaggccgagatcagccacacccagaaagccaccctcgtgtgcctggctaccggcttctaccccgaccatgtggaactgtcttggtgggtcaacggcaaagaggtgcacagcggcgtgtctaccgacccccagccactgaaagaacagcccgccctgaacgacagccggtactgcctgagcagcagactgagagtgtccgccaccttctggcagaacccccggaaccacttcagatgccaggtgcagttctacggcctgagcgagaacgacgagtggacccaggacagagccaagcccgtgacccagatcgtgtctgccgaagcctggggcagagccgatgatgtgattaagatccactggcaggaaaagaagtccaacaccatcctgggcagccaggaaggcaacaccatgaagaccaacgacacctacatgaagttcagctggctgaccgtgcccgagaagtccctggacaaagaacacagatgcatcgtgcggcacgaaaacaacaagaacggcgtggaccaggaaatcatcttcccacccatcaagaccgatgtgattacaatggaccccaaggacaactgctccaaggacgccaacgataccctgctgctccagctgaccaacaccagcgcctactacatgtacttgttgctgctgctgaagtccgtggtgtacttcgccatcatcacatgctgcctgctgcggagaaccgccttctgctgcaacggcgagaagtctagggccaagcgatctggatctggagcaacaaacttctcactactcaaacaagcaggtgacgtggaggagaatcccgggcctactagtatggactggatttggcgcatccttttccttgtcggcgctgctaccggcgcgcattccttcgaagtccaacttgtggagtctggagggggcctggtgcagcccggcggctctctcagactgtcttgtgcggcaagcggctacaccttcacctcttactggatagaatgggtgaggcaggcacctggaaagggactggagtggattggagagattctgccaggagggggagatacaaattacaatgaaatcttcaaggggcgggccaccttttcagcggataccagcaagaatacagcttacctgcagatgaatagcctccgggcagaagataccgctgtttattattgcacgagacgggtgccaataagactggactattgggggcaagggactcttgtcaccgtcagttcaacgcgtatccagaaccctgatcctgccgtgtaccagctgcgggatagcaagagcagcgacaagagcgtgtgtctgttcaccgacttcgacagccagaccaacgtgtcccagagcaaggactccgacgtgtacatcaccgataagaccgtgctggacatgcggagcatggacttcaagagcaactccgccgtggcctggtccaacaagtccgatttcgcctgcgccaacgccttcaacaacagcattatccccgaggacacattcttcccaagccccgagagcagcgactccaccgaccacgtgaagcccaaagagacagagaacaccaagcagcccagcaagagctgccacaagcccaaggccatcgtgcacaccgagaaagtgaacatgatgagcctgaccgtgctgggcctgcggatgctgttcgccaaaaccgtggccgtgaacttcctgctgaccgccaagctgttcttcctc

SEQ ID NO: 5656 - DNA, 2604 bp, synthetic construct
  source 1..2604: mol_type = other DNA
atggccttaccagtgaccgccttgctcctgccgctggccttgctgctccacgccgccaggccgctcgaggaggacctgaagaacgtgttcccacctgaggtggccgtgttcgagcctagcgaggccgagatcagccacacccagaaagccaccctcgtgtgcctggctaccggcttctaccccgaccatgtggaactgtcttggtgggtcaacggcaaagaggtgcacagcggcgtgtgtaccgacccccagccactgaaagaacagcccgccctgaacgacagccggtactgcctgagcagcagactgagagtgtccgccaccttctggcagaacccccggaaccacttcagatgccaggtgcagttctacggcctgagcgagaacgacgagtggacccaggacagagccaagcccgtgacccagatcgtgtctgccgaagcctggggcagagccgattgcggctttaccagcgagagctaccagcagggcgtgctgagcgccaccaacctgagcgtgatcggcttcagaatcctgctgctgaaagtggccggctttaacctgctgatgaccctgcggctgtggtccagcagggccaagcgatctggatctggagcaacaaacttctcactactcaaacaagcaggtgacgtggaggagaatcccgggcctactagcatggccttaccagtgaccgccttgctcctgccgctggccttgctgctccacgccgccaggccggacatccagttgacccagtcccccagctcactcagcgccagtgtgggggaccgggtgaccattacctgtaaagccagtcagagtgtggactatgacggggatagcttcctgaattggtatcagcagaagcctggcaaagccccaaagctgctgatctacgctgcatctaatctggagtcaggcgtgccttccaggttctccggtagtgggtctgggaccgatttcacattgaccatttcatccctccaacccgaggatttcgctacatattactgtcagcagtccaatgaggaccctctcacctttggccagggcaccaaagttgaaattaagagaggcggaggcggaagtggaggcggaggatctggcggcggaggctctgaagtccaacttgtggagtctggagggggcctggtgcagcccggcggctctctcagactgtcttgtgcggcaagcggctacaccttcacctcttactggatagaatgggtgaggcaggcacctggaaagggactggagtggattggagagattctgccaggagggggagatacaaattacaatgaaatcttcaaggggcgggccaccttttcagcggataccagcaagaatacagcttacctgcagatgaatagcctccgggcagaagataccgctgtttattattgcacgagacgggtgccaataagactggactattgggggcaagggactcttgtcaccgtcagttcaacgcgtatccagaaccctgatcctgccgtgtaccagctgcgggatagcaagagcagcgacaagagcgtgtgtctgttcaccgacttcgacagccagaccaacgtgtcccagagcaaggactccgacgtgtacatcaccgataagtgcgtgctggacatgcggagcatggacttcaagagcaactccgccgtggcctggtccaacaagtccgatttcgcctgcgccaacgccttcaacaacagcattatccccgaggacacattcttcccaagccccgagagcagctgcgacgtgaagctggtggaaaagagcttcgagacagacaccaacctgaacttccagatcctgtacgaggtgatcggcttcagaatcctgctgctgaaagtggccggctttaacctgctgatgaccctgcggctgtggtccagccgcgccaagagaagcggatctggcgtgaagcagaccctgaatttcgacctgctgaagctggctggcgacgtggaatccaacccaggcccttctagaggccatatgaccgagtacaagcccacggtgcgcctcgccacccgcgacgacgtccccagggccgtacgcaccctcgccgccgcgttcgccgactaccccgccacgcgccacaccgtcgatccggaccgccacatcgagcgggtcaccgagctgcaagaactcttcctcacgcgcgtcgggctcgacatcggcaaggtgtgggtcgcggacgacggcgccgcggtggcggtctggaccacgccggagagcgtcgaagcgggggcggtgttcgccgagatcggcccgcgcatggccgagttgagcggttcccggctggccgcgcagcaacagatggaaggcctcctggcgccgcaccggcccaaggagcccgcgtggttcctggccaccgtcggcgtctcgcccgaccaccagggcaagggtctgggcagcgccgtcgtgctccccggagtggaggcggccgagcgcgccggggtgcccgccttcctggagacctccgcgccccgcaacctccccttctacgagcggctcggcttcaccgtcaccgccgacgtcgaggtgcccgaaggaccgcgcacctggtgcatgacccgcaagcccggtgcctga

SEQ ID NO: 5657 - DNA, 2604 bp, synthetic construct
  source 1..2604: mol_type = other DNA
atggccttaccagtgaccgccttgctcctgccgctggccttgctgctccacgccgccaggccgctcgagatccagaaccctgatcctgccgtgtaccagctgcgggatagcaagagcagcgacaagagcgtgtgtctgttcaccgacttcgacagccagaccaacgtgtcccagagcaaggactccgacgtgtacatcaccgataagtgcgtgctggacatgcggagcatggacttcaagagcaactccgccgtggcctggtccaacaagtccgatttcgcctgcgccaacgccttcaacaacagcattatccccgaggacacattcttcccaagccccgagagcagctgcgacgtgaagctggtggaaaagagcttcgagacagacaccaacctgaacttccagatcctgtacgaggtgatcggcttcagaatcctgctgctgaaagtggccggctttaacctgctgatgaccctgcggctgtggtccagcagggccaagcgatctggatctggagcaacaaacttctcactactcaaacaagcaggtgacgtggaggagaatcccgggcctactagcatggccttaccagtgaccgccttgctcctgccgctggccttgctgctccacgccgccaggccggacatccagttgacccagtcccccagctcactcagcgccagtgtgggggaccgggtgaccattacctgtaaagccagtcagagtgtggactatgacggggatagcttcctgaattggtatcagcagaagcctggcaaagccccaaagctgctgatctacgctgcatctaatctggagtcaggcgtgccttccaggttctccggtagtgggtctgggaccgatttcacattgaccatttcatccctccaacccgaggatttcgctacatattactgtcagcagtccaatgaggaccctctcacctttggccagggcaccaaagttgaaattaagagaggcggaggcggaagtggaggcggaggatctggcggcggaggctctgaagtccaacttgtggagtctggagggggcctggtgcagcccggcggctctctcagactgtcttgtgcggcaagcggctacaccttcacctcttactggatagaatgggtgaggcaggcacctggaaagggactggagtggattggagagattctgccaggagggggagatacaaattacaatgaaatcttcaaggggcgggccaccttttcagcggataccagcaagaatacagcttacctgcagatgaatagcctccgggcagaagataccgctgtttattattgcacgagacgggtgccaataagactggactattgggggcaagggactcttgtcaccgtcagttcaacgcgtgaggacctgaagaacgtgttcccacctgaggtggccgtgttcgagcctagcgaggccgagatcagccacacccagaaagccaccctcgtgtgcctggctaccggcttctaccccgaccatgtggaactgtcttggtgggtcaacggcaaagaggtgcacagcggcgtgtgtaccgacccccagccactgaaagaacagcccgccctgaacgacagccggtactgcctgagcagcagactgagagtgtccgccaccttctggcagaacccccggaaccacttcagatgccaggtgcagttctacggcctgagcgagaacgacgagtggacccaggacagagccaagcccgtgacccagatcgtgtctgccgaagcctggggcagagccgattgcggctttaccagcgagagctaccagcagggcgtgctgagcgccaccaacctgagcgtgatcggcttcagaatcctgctgctgaaagtggccggctttaacctgctgatgaccctgcggctgtggtccagccgcgccaagagaagcggatctggcgtgaagcagaccctgaatttcgacctgctgaagctggctggcgacgtggaatccaacccaggcccttctagaggccatatgaccgagtacaagcccacggtgcgcctcgccacccgcgacgacgtccccagggccgtacgcaccctcgccgccgcgttcgccgactaccccgccacgcgccacaccgtcgatccggaccgccacatcgagcgggtcaccgagctgcaagaactcttcctcacgcgcgtcgggctcgacatcggcaaggtgtgggtcgcggacgacggcgccgcggtggcggtctggaccacgccggagagcgtcgaagcgggggcggtgttcgccgagatcggcccgcgcatggccgagttgagcggttcccggctggccgcgcagcaacagatggaaggcctcctggcgccgcaccggcccaaggagcccgcgtggttcctggccaccgtcggcgtctcgcccgaccaccagggcaagggtctgggcagcgccgtcgtgctccccggagtggaggcggccgagcgcgccggggtgcccgccttcctggagacctccgcgccccgcaacctccccttctacgagcggctcggcttcaccgtcaccgccgacgtcgaggtgcccgaaggaccgcgcacctggtgcatgacccgcaagcccggtgcctga

SEQ ID NO: 5658 - DNA, 2604 bp, synthetic construct; identical to SEQ ID NO: 5656
  source 1..2604: mol_type = other DNA

SEQ ID NO: 5659 - DNA, 2928 bp, synthetic construct
  source 1..2928: mol_type = other DNA
atggccttaccagtgaccgccttgctcctgccgctggccttgctgctccacgccgccaggccgctcgaggaggacctgaagaacgtgttcccacctgaggtggccgtgttcgagcctagcgaggccgagatcagccacacccagaaagccaccctcgtgtgcctggctaccggcttctaccccgaccatgtggaactgtcttggtgggtcaacggcaaagaggtgcacagcggcgtgtctaccgacccccagccactgaaagaacagcccgccctgaacgacagccggtactgcctgagcagcagactgagagtgtccgccaccttctggcagaacccccggaaccacttcagatgccaggtgcagttctacggcctgagcgagaacgacgagtggacccaggacagagccaagcccgtgacccagatcgtgtctgccgaagcctggggcagagccgatgatgtgattaagatccactggcaggaaaagaagtccaacaccatcctgggcagccaggaaggcaacaccatgaagaccaacgacacctacatgaagttcagctggctgaccgtgcccgagaagtccctggacaaagaacacagatgcatcgtgcggcacgaaaacaacaagaacggcgtggaccaggaaatcatcttcccacccatcaagaccgatgtgattacaatggaccccaaggacaactgctccaaggacgccaacgataccctgctgctccagctgaccaacaccagcgcctactacatgtacttgttgctgctgctgaagtccgtggtgtacttcgccatcatcacatgctgcctgctgatggctatggtcaagcggaaggacagccggggaagggccaagcgatctggatctggagcaacaaacttctcactactcaaacaagcaggtgacgtggaggagaatcccgggcctactagcatggccttaccagtgaccgccttgctcctgccgctggccttgctgctccacgccgccaggccggacatccagttgacccagtcccccagctcactcagcgccagtgtgggggaccgggtgaccattacctgtaaagccagtcagagtgtggactatgacggggatagcttcctgaattggtatcagcagaagcctggcaaagccccaaagctgctgatctacgctgcatctaatctggagtcaggcgtgccttccaggttctccggtagtgggtctgggaccgatttcacattgaccatttcatccctccaacccgaggatttcgctacatattactgtcagcagtccaatgaggaccctctcacctttggccagggcaccaaagttgaaattaagagaggcggaggcggaagtggaggcggaggatctggcggcggaggctctgaagtccaacttgtggagtctggagggggcctggtgcagcccggcggctctctcagactgtcttgtgcggcaagcggctacaccttcacctcttactggatagaatgggtgaggcaggcacctggaaagggactggagtggattggagagattctgccaggagggggagatacaaattacaatgaaatcttcaaggggcgggccaccttttcagcggataccagcaagaatacagcttacctgcagatgaatagcctccgggcagaagataccgctgtttattattgcacgagacgggtgccaataagactggactattgggggcaagggactcttgtcaccgtcagttcaacgcgtatccagaaccctgatcctgccgtgtaccagctgcgggatagcaagagcagcgacaagagcgtgtgtctgttcaccgacttcgacagccagaccaacgtgtcccagagcaaggactccgacgtgtacatcaccgataagaccgtgctggacatgcggagcatggacttcaagagcaactccgccgtggcctggtccaacaagtccgatttcgcctgcgccaacgccttcaacaacagcattatccccgaggacacattcttcccaagccccgagagcagcgactccaccgaccacgtgaagcccaaagagacagagaacaccaagcagcccagcaagagctgccacaagcccaaggccatcgtgcacaccgagaaagtgaacatgatgagcctgaccgtgctgggcctgcggatgctgttcgccaaaaccgtggccgtgaacttcctgctgaccgccaagctgttcttcctcctcaccgcccgcgccaagagaagcggatctggcgtgaagcagaccctgaatttcgacctgctgaagctggctggcgacgtggaatccaacccaggcccttctagaggccatatgaccgagtacaagcccacggtgcgcctcgccacccgcgacgacgtccccagggccgtacgcaccctcgccgccgcgttcgccgactaccccgccacgcgccacaccgtcgatccggaccgccacatcgagcgggtcaccgagctgcaagaactcttcctcacgcgcgtcgggctcgacatcggcaaggtgtgggtcgcggacgacggcgccgcggtggcggtctggaccacgccggagagcgtcgaagcgggggcggtgttcgccgagatcggcccgcgcatggccgagttgagcggttcccggctggccgcgcagcaacagatggaaggcctcctggcgccgcaccggcccaaggagcccgcgtggttcctggccaccgtcggcgtctcgcccgaccaccagggcaagggtctgggcagcgccgtcgtgctccccggagtggaggcggccgagcgcgccggggtgcccgccttcctggagacctccgcgccccgcaacctccccttctacgagcggctcggcttcaccgtcaccgccgacgtcgaggtgcccgaaggaccgcgcacctggtgcatgacccgcaagcccggtgcctga

SEQ ID NO: 5660 - DNA, 2928 bp, synthetic construct
  source 1..2928: mol_type = other DNA
atggccttaccagtgaccgccttgctcctgccgctggccttgctgctccacgccgccaggccgctcgagatccagaaccctgatcctgccgtgtaccagctgcgggatagcaagagcagcgacaagagcgtgtgtctgttcaccgacttcgacagccagaccaacgtgtcccagagcaaggactccgacgtgtacatcaccgataagaccgtgctggacatgcggagcatggacttcaagagcaactccgccgtggcctggtccaacaagtccgatttcgcctgcgccaacgccttcaacaacagcattatccccgaggacacattcttcccaagccccgagagcagcgactccaccgaccacgtgaagcccaaagagacagagaacaccaagcagcccagcaagagctgccacaagcccaaggccatcgtgcacaccgagaaagtgaacatgatgagcctgaccgtgctgggcctgcggatgctgttcgccaaaaccgtggccgtgaacttcctgctgaccgccaagctgttcttcctcctcaccgccagggccaagcgatctggatctggagcaacaaacttctcactactcaaacaagcaggtgacgtggaggagaatcccgggcctactagcatggccttaccagtgaccgccttgctcctgccgctggccttgctgctccacgccgccaggccggacatccagttgacccagtcccccagctcactcagcgccagtgtgggggaccgggtgaccattacctgtaaagccagtcagagtgtggactatgacggggatagcttcctgaattggtatcagcagaagcctggcaaagccccaaagctgctgatctacgctgcatctaatctggagtcaggcgtgccttccaggttctccggtagtgggtctgggaccgatttcacattgaccatttcatccctccaacccgaggatttcgctacatattactgtcagcagtccaatgaggaccctctcacctttggccagggcaccaaagttgaaattaagagaggcggaggcggaagtggaggcggaggatctggcggcggaggctctgaagtccaacttgtggagtctggagggggcctggtgcagcccggcggctctctcagactgtcttgtgcggcaagcggctacaccttcacctcttactggatagaatgggtgaggcaggcacctggaaagggactggagtggattggagagattctgccaggagggggagatacaaattacaatgaaatcttcaaggggcgggccaccttttcagcggataccagcaagaatacagcttacctgcagatgaatagcctccgggcagaagataccgctgtttattattgcacgagacgggtgccaataagactggactattgggggcaagggactcttgtcaccgtcagttcaacgcgtgaggacctgaagaacgtgttcccacctgaggtggccgtgttcgagcctagcgaggccgagatcagccacacccagaaagccaccctcgtgtgcctggctaccggcttctaccccgaccatgtggaactgtcttggtgggtcaacggcaaagaggtgcacagcggcgtgtctaccgacccccagccactgaaagaacagcccgccctgaacgacagccggtactgcctgagcagcagactgagagtgtccgccaccttctggcagaacccccggaaccacttcagatgccaggtgcagttctacggcctgagcgagaacgacgagtggacccaggacagagccaagcccgtgacccagatcgtgtctgccgaagcctggggcagagccgatgatgtgattaagatccactggcaggaaaagaagtccaacaccatcctgggcagccaggaaggcaacaccatgaagaccaacgacacctacatgaagttcagctggctgaccgtgcccgagaagtccctggacaaagaacacagatgcatcgtgcggcacgaaaacaacaagaacggcgtggaccaggaaatcatcttcccacccatcaagaccgatgtgattacaatggaccccaaggacaactgctccaaggacgccaacgataccctgctgctccagctgaccaacaccagcgcctactacatgtacttgttgctgctgctgaagtccgtggtgtacttcgccatcatcacatgctgcctgctgatggctatggtcaagcggaaggacagccggggacgcgccaagagaagcggatctggcgtgaagcagaccctgaatttcgacctgctgaagctggctggcgacgtggaatccaacccaggcccttctagaggccatatgaccgagtacaagcccacggtgcgcctcgccacccgcgacgacgtccccagggccgtacgcaccctcgccgccgcgttcgccgactaccccgccacgcgccacaccgtcgatccggaccgccacatcgagcgggtcaccgagctgcaagaactcttcctcacgcgcgtcgggctcgacatcggcaaggtgtgggtcgcggacgacggcgccgcggtggcggtctggaccacgccggagagcgtcgaagcgggggcggtgttcgccgagatcggcccgcgcatggccgagttgagcggttcccggctggccgcgcagcaacagatggaaggcctcctggcgccgcaccggcccaaggagcccgcgtggttcctggccaccgtcggcgtctcgcccgaccaccagggcaagggtctgggcagcgccgtcgtgctccccggagtggaggcggccgagcgcgccggggtgcccgccttcctggagacctccgcgccccgcaacctccccttctacgagcggctcggcttcaccgtcaccgccgacgtcgaggtgcccgaaggaccgcgcacctggtgcatgacccgcaagcccggtgcctga

SEQ ID NO: 5661 - DNA, 2922 bp, synthetic construct
  source 1..2922: mol_type = other DNA
atggccttaccagtgaccgccttgctcctgccgctggccttgctgctccacgccgccaggccgctcgaggaggacctgaagaacgtgttcccacctgaggtggccgtgttcgagcctagcgaggccgagatcagccacacccagaaagccaccctcgtgtgcctggctaccggcttctaccccgaccatgtggaactgtcttggtgggtcaacggcaaagaggtgcacagcggcgtgtgtaccgacccccagccactgaaagaacagcccgccctgaacgacagccggtactgcctgagcagcagactgagagtgtccgccaccttctggcagaacccccggaaccacttcagatgccaggtgcagttctacggcctgagcgagaacgacgagtggacccaggacagagccaagcccgtgacccagatcgtgtctgccgaagcctggggcagagccgatgatgtgattaagatccactggcaggaaaagaagtccaacaccatcctgggcagccaggaaggcaacaccatgaagaccaacgacacctacatgaagttcagctggctgaccgtgcccgagaagtccctggacaaagaacacagatgcatcgtgcggcacgaaaacaacaagaacggcgtggaccaggaaatcatcttcccacccatcaagaccgatgtgattacaatggaccccaaggacaactgctccaaggacgccaacgataccctgctgctccagctgaccaacaccagcgcctactacatgtacttgttgctgctgctgaagtccgtggtgtacttcgccatcatcacatgctgcctgctgcggagaaccgccttctgctgcaacggcgagaagtctagggccaagcgatctggatctggagcaacaaacttctcactactcaaacaagcaggtgacgtggaggagaatcccgggcctactagcatggccttaccagtgaccgccttgctcctgccgctggccttgctgctccacgccgccaggccggacatccagttgacccagtcccccagctcactcagcgccagtgtgggggaccgggtgaccattacctgtaaagccagtcagagtgtggactatgacggggatagcttcctgaattggtatcagcagaagcctggcaaagccccaaagctgctgatctacgctgcatctaatctggagtcaggcgtgccttccaggttctccggtagtgggtctgggaccgatttcacattgaccatttcatccctccaacccgaggatttcgctacatattactgtcagcagtccaatgaggaccctctcacctttggccagggcaccaaagttgaaattaagagaggcggaggcggaagtggaggcggaggatctggcggcggaggctctgaagtccaacttgtggagtctggagggggcctggtgcagcccggcggctctctcagactgtcttgtgcggcaagcggctacaccttcacctcttactggatagaatgggtgaggcaggcacctggaaagggactggagtggattggagagattctgccaggagggggagatacaaattacaatgaaatcttcaaggggcgggccaccttttcagcggataccagcaagaatacagcttacctgcagatgaatagcctccgggcagaagataccgctgtttattattgcacgagacgggtgccaataagactggactattgggggcaagggactcttgtcaccgtcagttcaacgcgtatccagaaccctgatcctgccgtgtaccagctgcgggatagcaagagcagcgacaagagcgtgtgtctgttcaccgacttcgacagccagaccaacgtgtcccagagcaaggactccgacgtgtacatcaccgataagtgcgtgctggacatgcggagcatggacttcaagagcaactccgccgtggcctggtccaacaagtccgatttcgcctgcgccaacgccttcaacaacagcattatccccgaggacacattcttcccaagccccgagagcagcgactccaccgaccacgtgaagcccaaagagacagagaacaccaagcagcccagcaagagctgccacaagcccaaggccatcgtgcacaccgagaaagtgaacatgatgagcctgaccgtgctgggcctgcggatgctgttcgccaaaaccgtggccgtgaacttcctgctgaccgccaagctgttcttcctccgcgccaagagaagcggatctggcgtgaagcagaccctgaatttcgacctgctgaagctggctggcgacgtggaatccaacccaggcccttctagaggccatatgaccgagtacaagcccacggtgcgcctcgccacccgcgacgacgtccccagggccgtacgcaccctcgccgccgcgttcgccgactaccccgccacgcgccacaccgtcgatccggaccgccacatcgagcgggtcaccgagctgcaagaactcttcctcacgcgcgtcgggctcgacatcggcaaggtgtgggtcgcggacgacggcgccgcggtggcggtctggaccacgccggagagcgtcgaagcgggggcggtgttcgccgagatcggcccgcgcatggccgagttgagcggttcccggctggccgcgcagcaacagatggaaggcctcctggcgccgcaccggcccaaggagcccgcgtggttcctggccaccgtcggcgtctcgcccgaccaccagggcaagggtctgggcagcgccgtcgtgctccccggagtggaggcggccgagcgcgccggggtgcccgccttcctggagacctccgcgccccgcaacctccccttctacgagcggctcggcttcaccgtcaccgccgacgtcgaggtgcccgaaggaccgcgcacctggtgcatgacccgcaagcccggtgcctga

SEQ ID NO: 5662 - DNA, 2922 bp, synthetic construct
  source 1..2922: mol_type = other DNA
atggccttaccagtgaccgccttgctcctgccgctggccttgctgctccacgccgccaggccgctcgagatccagaaccctgatcctgccgtgtaccagctgcgggatagcaagagcagcgacaagagcgtgtgtctgttcaccgacttcgacagccagaccaacgtgtcccagagcaaggactccgacgtgtacatcaccgataagtgcgtgctggacatgcggagcatggacttcaagagcaactccgccgtggcctggtccaacaagtccgatttcgcctgcgccaacgccttcaacaacagcattatccccgaggacacattcttcccaagccccgagagcagcgactccaccgaccacgtgaagcccaaagagacagagaacaccaagcagcccagcaagagctgccacaagcccaaggccatcgtgcacaccgagaaagtgaacatgatgagcctgaccgtgctgggcctgcggatgctgttcgccaaaaccgtggccgtgaacttcctgctgaccgccaagctgttcttcctcagggccaagcgatctggatctggagcaacaaacttctcactactcaaacaagcaggtgacgtggaggagaatcccgggcctactagcatggccttaccagtgaccgccttgctcctgccgctggccttgctgctccacgccgccaggccggacatccagttgacccagtcccccagctcactcagcgccagtgtgggggaccgggtgaccattacctgtaaagccagtcagagtgtggactatgacggggatagcttcctgaattggtatcagcagaagcctggcaaagccccaaagctgctgatctacgctgcatctaatctggagtcaggcgtgccttccaggttctccggtagtgggtctgggaccgatttcacattgaccatttcatccctccaacccgaggatttcgctacatattactgtcagcagtccaatgaggaccctctcacctttggccagggcaccaaagttgaaattaagagaggcggaggcggaagtggaggcggaggatctggcggcggaggctctgaagtccaacttgtggagtctggagggggcctggtgcagcccggcggctctctcagactgtcttgtgcggcaagcggctacaccttcacctcttactggatagaatgggtgaggcaggcacctggaaagggactggagtggattggagagattctgccaggagggggagatacaaattacaatgaaatcttcaaggggcgggccaccttttcagcggataccagcaagaatacagcttacctgcagatgaatagcctccgggcagaagataccgctgtttattattgcacgagacgggtgccaataagactggactattgggggcaagggactcttgtcaccgtcagttcaacgcgtgaggacctgaagaacgtgttcccacctgaggtggccgtgttcgagcctagcgaggccgagatcagccacacccagaaagccaccctcgtgtgcctggctaccggcttctaccccgaccatgtggaactgtcttggtgggtcaacggcaaagaggtgcacagcggcgtgtgtaccgacccccagccactgaaagaacagcccgccctgaacgacagccggtactgcctgagcagcagactgagagtgtccgccaccttctggcagaacccccggaaccacttcagatgccaggtgcagttctacggcctgagcgagaacgacgagtggacccaggacagagccaagcccgtgacccagatcgtgtctgccgaagcctggggcagagccgatgatgtgattaagatccactggcaggaaaagaagtccaacaccatcctgggcagccaggaaggcaacaccatgaagaccaacgacacctacatgaagttcagctggctgaccgtgcccgagaagtccctggacaaagaacacagatgcatcgtgcggcacgaaaacaacaagaacggcgtggaccaggaaatcatcttcccacccatcaagaccgatgtgattacaatggaccccaaggacaactgctccaaggacgccaacgataccctgctgctccagctgaccaacaccagcgcctactacatgtacttgttgctgctgctgaagtccgtggtgtacttcgccatcatcacatgctgcctgctgcggagaaccgccttctgctgcaacggcgagaagtctcgcgccaagagaagcggatctggcgtgaagcagaccctgaatttcgacctgctgaagctggctggcgacgtggaatccaacccaggcccttctagaggccatatgaccgagtacaagcccacggtgcgcctcgccacccgcgacgacgtccccagggccgtacgcaccctcgccgccgcgttcgccgactaccccgccacgcgccacaccgtcgatccggaccgccacatcgagcgggtcaccgagctgcaagaactcttcctcacgcgcgtcgggctcgacatcggcaaggtgtgggtcgcggacgacggcgccgcggtggcggtctggaccacgccggagagcgtcgaagcgggggcggtgttcgccgagatcggcccgcgcatggccgagttgagcggttcccggctggccgcgcagcaacagatggaaggcctcctggcgccgcaccggcccaaggagcccgcgtggttcctggccaccgtcggcgtctcgcccgaccaccagggcaagggtctgggcagcgccgtcgtgctccccggagtggaggcggccgagcgcgccggggtgcccgccttcctggagacctccgcgccccgcaacctccccttctacgagcggctcggcttcaccgtcaccgccgacgtcgaggtgcccgaaggaccgcgcacctggtgcatgacccgcaagcccggtgcctga

SEQ ID NO: 5663 - DNA, 2922 bp, synthetic construct
  source 1..2922: mol_type = other DNA
atggccttaccagtgaccgccttgctcctgccgctggccttgctgctccacgccgccaggccgctcgaggaggacctgaagaacgtgttcccacctgaggtggccgtgttcgagcctagcgaggccgagatcagccacacccagaaagccaccctcgtgtgcctggctaccggcttctaccccgaccatgtggaactgtcttggtgggtcaacggcaaagaggtgcacagcggcgtgtctaccgacccccagccactgaaagaacagcccgccctgaacgacagccggtactgcctgagcagcagactgagagtgtccgccaccttctggcagaacccccggaaccacttcagatgccaggtgcagttctacggcctgagcgagaacgacgagtggacccaggacagagccaagcccgtgacccagatcgtgtctgccgaagcctggggcagagccgatgatgtgattaagatccactggcaggaaaagaagtccaacaccatcctgggcagccaggaaggcaacaccatgaagaccaacgacacctacatgaagttcagctggctgaccgtgcccgagaagtccctggacaaagaacacagatgcatcgtgcggcacgaaaacaacaagaacggcgtggaccaggaaatcatcttcccacccatcaagaccgatgtgattacaatggaccccaaggacaactgctccaaggacgccaacgataccctgctgctccagctgaccaacaccagcgcctactacatgtacttgttgctgctgctgaagtccgtggtgtacttcgccatcatcacatgctgcctgctgcggagaaccgccttctgctgcaacggcgagaagtctagggccaagcgatctggatctggagcaacaaacttctcactactcaaacaagcaggtgacgtggaggagaatcccgggcctactagcatggccttaccagtgaccgccttgctcctgccgctggccttgctgctccacgccgccaggccggacatccagttgacccagtcccccagctcactcagcgccagtgtgggggaccgggtgaccattacctgtaaagccagtcagagtgtggactatgacggggatagcttcctgaattggtatcagcagaagcctggcaaagccccaaagctgctgatctacgctgcatctaatctggagtcaggcgtgccttccaggttctccggtagtgggtctgggaccgatttcacattgaccatttcatccctccaacccgaggatttcgctacatattactgtcagcagtccaatgaggaccctctcacctttggccagggcaccaaagttgaaattaagagaggcggaggcggaagtggaggcggaggatctggcggcggaggctctgaagtccaacttgtggagtctggagggggcctggtgcagcccggcggctctctcagactgtcttgtgcggcaagcggctacaccttcacctcttactggatagaatgggtgaggcaggcacctggaaagggactggagtggattggagagattctgccaggagggggagatacaaattacaatgaaatcttcaaggggcgggccaccttttcagcggataccagcaagaatacagcttacctgcagatgaatagcctccgggcagaagataccgctgtttattattgcacgagacgggtgccaataagactggactattgggggcaagggactcttgtcaccgtcagttcaacgcgtatccagaaccctgatcctgccgtgtaccagctgcgggatagcaagagcagcgacaagagcgtgtgtctgttcaccgacttcgacagccagaccaacgtgtcccagagcaaggactccgacgtgtacatcaccgataagaccgtgctggacatgcggagcatggacttcaagagcaactccgccgtggcctggtccaacaagtccgatttcgcctgcgccaacgccttcaacaacagcattatccccgaggacacattcttcccaagccccgagagcagcgactccaccgaccacgtgaagcccaaagagacagagaacaccaagcagcccagcaagagctgccacaagcccaaggccatcgtgcacaccgagaaagtgaacatgatgagcctgaccgtgctgggcctgcggatgctgttcgccaaaaccgtggccgtgaacttcctgctgaccgccaagctgttcttcctccgcgccaagagaagcggatctggcgtgaagcagaccctgaatttcgacctgctgaagctggctggcgacgtggaatccaacccaggcccttctagaggccatatgaccgagtacaagcccacggtgcgcctcgccacccgcgacgacgtccccagggccgtacgcaccctcgccgccgcgttcgccgactaccccgccacgcgccacaccgtcgatccggaccgccacatcgagcgggtcaccgagctgcaagaactcttcctcacgcgcgtcgggctcgacatcggcaaggtgtgggtcgcggacgacggcgccgcggtggcggtctggaccacgccggagagcgtcgaagcgggggcggtgttcgccgagatcggcccgcgcatggccgagttgagcggttcccggctggccgcgcagcaacagatggaaggcctcctggcgccgcaccggcccaaggagcccgcgtggttcctggccaccgtcggcgtctcgcccgaccaccagggcaagggtctgggcagcgccgtcgtgctccccggagtggaggcggccgagcgcgccggggtgcccgccttcctggagacctccgcgccccgcaacctccccttctacgagcggctcggcttcaccgtcaccgccgacgtcgaggtgcccgaaggaccgcgcacctggtgcatgacccgcaagcccggtgcctga

SEQ ID NO: 5664 - DNA, 2922 bp, synthetic construct
  source 1..2922: mol_type = other DNA
atggccttaccagtgaccgccttgctcctgccgctggccttgctgctccacgccgccaggccgctcgagatccagaaccctgatcctgccgtgtaccagctgcgggatagcaagagcagcgacaagagcgtgtgtctgttcaccgacttcgacagccagaccaacgtgtcccagagcaaggactccgacgtgtacatcaccgataagaccgtgctggacatgcggagcatggacttcaagagcaactccgccgtggcctggtccaacaagtccgatttcgcctgcgccaacgccttcaacaacagcattatccccgaggacacattcttcccaagccccgagagcagcgactccaccgaccacgtgaagcccaaagagacagagaacaccaagcagcccagcaagagctgccacaagcccaaggccatcgtgcacaccgagaaagtgaacatgatgagcctgaccgtgctgggcctgcggatgctgttcgccaaaaccgtggccgtgaacttcctgctgaccgccaagctgttcttcctcagggccaagcgatctggatctggagcaacaaacttctcactactcaaacaagcaggtgacgtggaggagaatcccgggcctactagcatggccttaccagtgaccgccttgctcctgccgctggccttgctgctccacgccgccaggccggacatccagttgacccagtcccccagctcactcagcgccagtgtgggggaccgggtgaccattacctgtaaagccagtcagagtgtggactatgacggggatagcttcctgaattggtatcagcagaagcctggcaaagccccaaagctgctgatctacgctgcatctaatctggagtcaggcgtgccttccaggttctccggtagtgggtctgggaccgatttcacattgaccatttcatccctccaacccgaggatttcgctacatattactgtcagcagtccaatgaggaccctctcacctttggccagggcaccaaagttgaaattaagagaggcggaggcggaagtggaggcggaggatctggcggcggaggctctgaagtccaacttgtggagtctggagggggcctggtgcagcccggcggctctctcagactgtcttgtgcggcaagcggctacaccttcacctcttactggatagaatgggtgaggcaggcacctggaaagggactggagtggattggagagattctgccaggagggggagatacaaattacaatgaaatcttcaaggggcgggccaccttttcagcggataccagcaagaatacagcttacctgcagatgaatagcctccgggcagaagataccgctgtttattattgcacgagacgggtgccaataagactggactattgggggcaagggactcttgtcaccgtcagttcaacgcgtgaggacctgaagaacgtgttcccacctgaggtggccgtgttcgagcctagcgaggccgagatcagccacacccagaaagccaccctcgtgtgcctggctaccggcttctaccccgaccatgtggaactgtcttggtgggtcaacggcaaagaggtgcacagcggcgtgtctaccgacccccagccactgaaagaacagcccgccctgaacgacagccggtactgcctgagcagcagactgagagtgtccgccaccttctggcagaacccccggaaccacttcagatgccaggtgcagttctacggcctgagcgagaacgacgagtggacccaggacagagccaagcccgtgacccagatcgtgtctgccgaagcctggggcagagccgatgatgtgattaagatccactggcaggaaaagaagtccaacaccatcctgggcagccaggaaggcaacaccatgaagaccaacgacacctacatgaagttcagctggctgaccgtgcccgagaagtccctggacaaagaacacagatgcatcgtgcggcacgaaaacaacaagaacggcgtggaccaggaaatcatcttcccacccatcaagaccgatgtgattacaatggaccccaaggacaactgctccaaggacgccaacgataccctgctgctccagctgaccaacaccagcgcctactacatgtacttgttgctgctgctgaagtccgtggtgtacttcgccatcatcacatgctgcctgctgcggagaaccgccttctgctgcaacggcgagaagtctcgcgccaagagaagcggatctggcgtgaagcagaccctgaatttcgacctgctgaagctggctggcgacgtggaatccaacccaggcccttctagaggccatatgaccgagtacaagcccacggtgcgcctcgccacccgcgacgacgtccccagggccgtacgcaccctcgccgccgcgttcgccgactaccccgccacgcgccacaccgtcgatccggaccgccacatcgagcgggtcaccgagctgcaagaactcttcctcacgcgcgtcgggctcgacatcggcaaggtgtgggtcgcggacgacggcgccgcggtggcggtctggaccacgccggagagcgtcgaagcgggggcggtgttcgccgagatcggcccgcgcatggccgagttgagcggttcccggctggccgcgcagcaacagatggaaggcctcctggcgccgcaccggcccaaggagcccgcgtggttcctggccaccgtcggcgtctcgcccgaccaccagggcaagggtctgggcagcgccgtcgtgctccccggagtggaggcggccgagcgcgccggggtgcccgccttcctggagacctccgcgccccgcaacctccccttctacgagcggctcggcttcaccgtcaccgccgacgtcgaggtgcccgaaggaccgcgcacctggtgcatgacccgcaagcccggtgcctga

SEQ ID NO: 5665 - DNA, 2616 bp, synthetic construct
  source 1..2616: mol_type = other DNA
atggccttaccagtgaccgccttgctcctgccgctggccttgctgctccacgccgccaggccgctcgaggaggacctgaagaacgtgttcccacctgaggtggccgtgttcgagcctagcaaggccgagatcgcccacacccagaaagccaccctcgtgtgcctggctaccggcttctaccccgaccatgtggaactgtcttggtgggtcaacggcaaagaggtgcacagcggcgtgtgtaccgacccccagccactgaaagaacagcccgccctgaacgacagccggtactgcctgagcagcagactgagagtgtccgccaccttctggcagaacccccggaaccacttcagatgccaggtgcagttctacggcctgagcgagaacgacgagtggacccaggacagagccaagcccgtgacccagatcgtgtctgccgaagcctggggcagagccgattgcggcatcaccagcgccagctaccaccagggcgtgctgagcgccaccatcctgtacgagatcctgctgggcaaggccaccctgtacgccgtgctggtgtctgccctggtgctgatggctatggtcaagcggaaggacagccggggaagggccaagcgatctggatctggagcaacaaacttctcactactcaaacaagcaggtgacgtggaggagaatcccgggcctactagcatggccttaccagtgaccgccttgctcctgccgctggccttgctgctccacgccgccaggccggacatccagttgacccagtcccccagctcactcagcgccagtgtgggggaccgggtgaccattacctgtaaagccagtcagagtgtggactatgacggggatagcttcctgaattggtatcagcagaagcctggcaaagccccaaagctgctgatctacgctgcatctaatctggagtcaggcgtgccttccaggttctccggtagtgggtctgggaccgatttcacattgaccatttcatccctccaacccgaggatttcgctacatattactgtcagcagtccaatgaggaccctctcacctttggccagggcaccaaagttgaaattaagagaggcggaggcggaagtggaggcggaggatctggcggcggaggctctgaagtccaacttgtggagtctggagggggcctggtgcagcccggcggctctctcagactgtcttgtgcggcaagcggctacaccttcacctcttactggatagaatgggtgaggcaggcacctggaaagggactggagtggattggagagattctgccaggagggggagatacaaattacaatgaaatcttcaaggggcgggccaccttttcagcggataccagcaagaatacagcttacctgcagatgaatagcctccgggcagaagataccgctgtttattattgcacgagacgggtgccaataagactggactattgggggcaagggactcttgtcaccgtcagttcaacgcgtatccagaaccctgatcctgccgtgtaccagctgcgggatagcaagagcagcgacaagagcgtgtgtctgttcaccgacttcgacagccagaccaacgtgtcccagagcaaggactccgacgtgtacatcaccgataagtgcgtgctggacatgcggagcatggacttcaagagcaactccgccgtggcctggtccaacaagtccgatttcgcctgcgccaacgccttcaacaacagcattatccccgaggacacattcttcccaagcagcgacgtgccctgcgacgtgaagctggtggaaaagagcttcgagacagacaccaacctgaacttccagaacctgagcgtgatcggcttcagaatcctgctgctgaaagtggccggctttaacctgctgatgaccctgcggctgtggtccagccgcgccaagagaagcggatctggcgtgaagcagaccctgaatttcgacctgctgaagctggctggcgacgtggaatccaacccaggcccttctagaggccatatgaccgagtacaagcccacggtgcgcctcgccacccgcgacgacgtccccagggccgtacgcaccctcgccgccgcgttcgccgactaccccgccacgcgccacaccgtcgatccggaccgccacatcgagcgggtcaccgagctgcaagaactcttcctcacgcgcgtcgggctcgacatcggcaaggtgtgggtcgcggacgacggcgccgcggtggcggtctggaccacgccggagagcgtcgaagcgggggcggtgttcgccgagatcggcccgcgcatggccgagttgagcggttcccggctggccgcgcagcaacagatggaaggcctcctggcgccgcaccggcccaaggagcccgcgtggttcctggccaccgtcggcgtctcgcccgaccaccagggcaagggtctgggcagcgccgtcgtgctccccggagtggaggcggccgagcgcgccggggtgcccgccttcctggagacctccgcgccccgcaacctccccttctacgagcggctcggcttcaccgtcaccgccgacgtcgaggtgcccgaaggaccgcgcacctggtgcatgacccgcaagcccggtgcctga

SEQ ID NO: 5666 - DNA, 2616 bp, synthetic construct
  source 1..2616: mol_type = other DNA
atggccttaccagtgaccgccttgctcctgccgctggccttgctgctccacgccgccaggccgctcgagatccagaaccctgatcctgccgtgtaccagctgcgggatagcaagagcagcgacaagagcgtgtgtctgttcaccgacttcgacagccagaccaacgtgtcccagagcaaggactccgacgtgtacatcaccgataagtgcgtgctggacatgcggagcatggacttcaagagcaactccgccgtggcctggtccaacaagtccgatttcgcctgcgccaacgccttcaacaacagcattatccccgaggacacattcttcccaagcagcgacgtgccctgcgacgtgaagctggtggaaaagagcttcgagacagacaccaacctgaacttccagaacctgagcgtgatcggcttcagaatcctgctgctgaaagtggccggctttaacctgctgatgaccctgcggctgtggtccagcagggccaagcgatctggatctggagcaacaaacttctcactactcaaacaagcaggtgacgtggaggagaatcccgggcctactagcatggccttaccagtgaccgccttgctcctgccgctggccttgctgctccacgccgccaggccggacatccagttgacccagtcccccagctcactcagcgccagtgtgggggaccgggtgaccattacctgtaaagccagtcagagtgtggactatgacggggatagcttcctgaattggtatcagcagaagcctggcaaagccccaaagctgctgatctacgctgcatctaatctggagtcaggcgtgccttccaggttctccggtagtgggtctgggaccgatttcacattgaccatttcatccctccaacccgaggatttcgctacatattactgtcagcagtccaatgaggaccctctcacctttggccagggcaccaaagttgaaattaagagaggcggaggcggaagtggaggcggaggatctggcggcggaggctctgaagtccaacttgtggagtctggagggggcctggtgcagcccggcggctctctcagactgtcttgtgcggcaagcggctacaccttcacctcttactggatagaatgggtgaggcaggcacctggaaagggactggagtggattggagagattctgccaggagggggagatacaaattacaatgaaatcttcaaggggcgggccaccttttcagcggataccagcaagaatacagcttacctgcagatgaatagcctccgggcagaagataccgctgtttattattgcacgagacgggtgccaataagactggactattgggggcaagggactcttgtcaccgtcagttcaacgcgtgaggacctgaagaacgtgttcccacctgaggtggccgtgttcgagcctagcaaggccgagatcgcccacacccagaaagccaccctcgtgtgcctggctaccggcttctaccccgaccatgtggaactgtcttggtgggtcaacggcaaagaggtgcacagcggcgtgtgtaccgacccccagccactgaaagaacagcccgccctgaacgacagccggtactgcctgagcagcagactgagagtgtccgccaccttctggcagaacccccggaaccacttcagatgccaggtgcagttctacggcctgagcgagaacgacgagtggacccaggacagagccaagcccgtgacccagatcgtgtctgccgaagcctggggcagagccgattgcggcatcaccagcgccagctaccaccagggcgtgctgagcgccaccatcctgtacgagatcctgctgggcaaggccaccctgtacgccgtgctggtgtctgccctggtgctgatggctatggtcaagcggaaggacagccggggacgcgccaagagaagcggatctggcgtgaagcagaccctgaatttcgacctgctgaagctggctggcgacgtggaatccaacccaggcccttctagaggccatatgaccgagtacaagcccacggtgcgcctcgccacccgcgacgacgtccccagggccgtacgcaccctcgccgccgcgttcgccgactaccccgccacgcgccacaccgtcgatccggaccgccacatcgagcgggtcaccgagctgcaagaactcttcctcacgcgcgtcgggctcgacatcggcaaggtgtgggtcgcggacgacggcgccgcggtggcggtctggaccacgccggagagcgtcgaagcgggggcggtgttcgccgagatcggcccgcgcatggccgagttgagcggttcccggctggccgcgcagcaacagatggaaggcctcctggcgccgcaccggcccaaggagcccgcgtggttcctggccaccgtcggcgtctcgcccgaccaccagggcaagggtctgggcagcgccgtcgtgctccccggagtggaggcggccgagcgcgccggggtgcccgccttcctggagacctccgcgccccgcaacctccccttctacgagcggctcggcttcaccgtcaccgccgacgtcgaggtgcccgaaggaccgcgcacctggtgcatgacccgcaagcccggtgcctga

SEQ ID NO: 5667 - DNA, 2295 bp, synthetic construct
  source 1..2295: mol_type = other DNA
atggccttaccagtgaccgccttgctcctgccgctggccttgctgctccacgccgccaggccgctcgagcagagttttgggttgttggaccctaaattgtgctatctgttggacggaatcctgttcatttacggagtgatcctgaccgcattgttcctgcgggttaagttttccagatccgcagacgcacccgcttaccaacaagggcagaaccaactctacaatgaacttaatttggggcggagggaagagtacgacgttctggacaaaaggaggggacgagatcccgagatgggcggaaagcctcagcgaaggaagaatccgcaagaggggctttataacgaactccagaaagataaaatggcagaagcctatagtgagattgggatgaagggagaaaggaggaggggtaaaggtcacgatgggttgtaccaaggattgagcacagccactaaagatacctatgatgcgctccacatgcaggccctgccgccaagaagggccaagcgatctggatctggagcaacaaacttctcactactcaaacaagcaggtgacgtggaggagaatcccgggcctactagcatggccttaccagtgaccgccttgctcctgccgctggccttgctgctccacgccgccaggccggacatccagttgacccagtcccccagctcactcagcgccagtgtgggggaccgggtgaccattacctgtaaagccagtcagagtgtggactatgacggggatagcttcctgaattggtatcagcagaagcctggcaaagccccaaagctgctgatctacgctgcatctaatctggagtcaggcgtgccttccaggttctccggtagtgggtctgggaccgatttcacattgaccatttcatccctccaacccgaggatttcgctacatattactgtcagcagtccaatgaggaccctctcacctttggccagggcaccaaagttgaaattaagagaggcggaggcggaagtggaggcggaggatctggcggcggaggctctgaagtccaacttgtggagtctggagggggcctggtgcagcccggcggctctctcagactgtcttgtgcggcaagcggctacaccttcacctcttactggatagaatgggtgaggcaggcacctggaaagggactggagtggattggagagattctgccaggagggggagatacaaattacaatgaaatcttcaaggggcgggccaccttttcagcggataccagcaagaatacagcttacctgcagatgaatagcctccgggcagaagataccgctgtttattattgcacgagacgggtgccaataagactggactattgggggcaagggactcttgtcaccgtcagttcaacgcgtgagctgggagagcctcagctgtgctatatcctggacgccatcctgtttctgtacggcatcgtgctgaccctgctgtactgccggctgaagatccaagtgcggaaggccgccatcaccagctacgagaaatccgacggcgtgtacaccggcctgagcaccagaaatcaagagacatacgagacactgaagcacgaaaagcctccacaacgcgccaagagaagcggatctggcgtgaagcagaccctgaatttcgacctgctgaagctggctggcgacgtggaatccaacccaggcccttctagaggccatatgaccgagtacaagcccacggtgcgcctcgccacccgcgacgacgtccccagggccgtacgcaccctcgccgccgcgttcgccgactaccccgccacgcgccacaccgtcgatccggaccgccacatcgagcgggtcaccgagctgcaagaactcttcctcacgcgcgtcgggctcgacatcggcaaggtgtgggtcgcggacgacggcgccgcggtggcggtctggaccacgccggagagcgtcgaagcgggggcggtgttcgccgagatcggcccgcgcatggccgagttgagcggttcccggctggccgcgcagcaacagatggaaggcctcctggcgccgcaccggcccaaggagcccgcgtggttcctggccaccgtcggcgtctcgcccgaccaccagggcaagggtctgggcagcgccgtcgtgctccccggagtggaggcggccgagcgcgccggggtgcccgccttcctggagacctccgcgccccgcaacctccccttctacgagcggctcggcttcaccgtcaccgccgacgtcgaggtgcccgaaggaccgcgcacctggtgcatgacccgcaagcccggtgcctga

SEQ ID NO: 5668 - DNA, 2928 bp, synthetic construct; identical to SEQ ID NO: 5659
  source 1..2928: mol_type = other DNA

SEQ ID NO: 5669 - DNA, 2928 bp, synthetic construct; identical to SEQ ID NO: 5660
  source 1..2928: mol_type = other DNA

SEQ ID NO: 5670 - DNA, 2925 bp, synthetic construct
  source 1..2925: mol_type = other DNA
atggccttaccagtgaccgccttgctcctgccgctggccttgctgctccacgccgccaggccgctcgaggaggaggacctgaagaacgtgttcccacctgaggtggccgtgttcgagcctagcgaggccgagatcagccacacccagaaagccaccctcgtgtgcctggctaccggcttctaccccgaccatgtggaactgtcttggtgggtcaacggcaaagaggtgcacagcggcgtgtgtaccgacccccagccactgaaagaacagcccgccctgaacgacagccggtactgcctgagcagcagactgagagtgtccgccaccttctggcagaacccccggaaccacttcagatgccaggtgcagttctacggcctgagcgagaacgacgagtggacccaggacagagccaagcccgtgacccagatcgtgtctgccgaagcctggggcagagccgatgatgtgattaagatccactggcaggaaaagaagtccaacaccatcctgggcagccaggaaggcaacaccatgaagaccaacgacacctacatgaagttcagctggctgaccgtgcccgagaagtccctggacaaagaacacagatgcatcgtgcggcacgaaaacaacaagaacggcgtggaccaggaaatcatcttcccacccatcaagaccgatgtgattacaatggaccccaaggacaactgctccaaggacgccaacgataccctgctgctccagctgaccaacaccagcgcctactacatgtacttgttgctgctgctgaagtccgtggtgtacttcgccatcatcacatgctgcctgctgcggagaaccgccttctgctgcaacggcgagaagtctagggccaagcgatctggatctggagcaacaaacttctcactactcaaacaagcaggtgacgtggaggagaatcccgggcctactagcatggccttaccagtgaccgccttgctcctgccgctggccttgctgctccacgccgccaggccggacatccagttgacccagtcccccagctcactcagcgccagtgtgggggaccgggtgaccattacctgtaaagccagtcagagtgtggactatgacggggatagcttcctgaattggtatcagcagaagcctggcaaagccccaaagctgctgatctacgctgcatctaatctggagtcaggcgtgccttccaggttctccggtagtgggtctgggaccgatttcacattgaccatttcatccctccaacccgaggatttcgctacatattactgtcagcagtccaatgaggaccctctcacctttggccagggcaccaaagttgaaattaagagaggcggaggcggaagtggaggcggaggatctggcggcggaggctctgaagtccaacttgtggagtctggagggggcctggtgcagcccggcggctctctcagactgtcttgtgcggcaagcggctacaccttcacctcttactggatagaatgggtgaggcaggcacctggaaagggactggagtggattggagagattctgccaggagggggagatacaaattacaatgaaatcttcaaggggcgggccaccttttcagcggataccagcaagaatacagcttacctgcagatgaatagcctccgggcagaagataccgctgtttattattgcacgagacgggtgccaataagactggactattgggggcaagggactcttgtcaccgtcagttcaacgcgtatccagaaccctgatcctgccgtgtaccagctgcgggatagcaagagcagcgacaagagcgtgtgtctgttcaccgacttcgacagccagaccaacgtgtcccagagcaaggactccgacgtgtacatcaccgataagtgcgtgctggacatgcggagcatggacttcaagagcaactccgccgtggcctggtccaacaagtccgatttcgcctgcgccaacgccttcaacaacagcattatccccgaggacacattcttcccaagccccgagagcagcgactccaccgaccacgtgaagcccaaagagacagagaacaccaagcagcccagcaagagctgccacaagcccaaggccatcgtgcacaccgagaaagtgaacatgatgagcctgaccgtgctgggcctgcggatgctgttcgccaaaaccgtggccgtgaacttcctgctgaccgccaagctgttcttcctccgcgccaagagaagcggatctggcgtgaagcagaccctgaatttcgacctgctgaagctggctggcgacgtggaatccaacccaggcccttctagaggccatatgaccgagtacaagcccacggtgcgcctcgccacccgcgacgacgtccccagggccgtacgcaccctcgccgccgcgttcgccgactaccccgccacgcgccacaccgtcgatccggaccgccacatcgagcgggtcaccgagctgcaagaactcttcctcacgcgcgtcgggctcgacatcggcaaggtgtgggtcgcggacgacggcgccgcggtggcggtctggaccacgccggagagcgtcgaagcgggggcggtgttcgccgagatcggcccgcgcatggccgagttgagcggttcccggctggccgcgcagcaacagatggaaggcctcctggcgccgcaccggcccaaggagcccgcgtggttcctggccaccgtcggcgtctcgcccgaccaccagggcaagggtctgggcagcgccgtcgtgctccccggagtggaggcggccgagcgcgccggggtgcccgccttcctggagacctccgcgccccgcaacctccccttctacgagcggctcggcttcaccgtcaccgccgacgtcgaggtgcccgaaggaccgcgcacctggtgcatgacccgcaagcccggtgcctga

SEQ ID NO: 5671 - DNA, 2925 bp, synthetic construct
  source 1..2925: mol_type = other DNA
atggccttaccagtgaccgccttgctcctgccgctggccttgctgctccacgccgccaggccgctcgagatccagaaccctgatcctgccgtgtaccagctgcgggatagcaagagcagcgacaagagcgtgtgtctgttcaccgacttcgacagccagaccaacgtgtcccagagcaaggactccgacgtgtacatcaccgataagtgcgtgctggacatgcggagcatggacttcaagagcaactccgccgtggcctggtccaacaagtccgatttcgcctgcgccaacgccttcaacaacagcattatccccgaggacacattcttcccaagccccgagagcagcgactccaccgaccacgtgaagcccaaagagacagagaacaccaagcagcccagcaagagctgccacaagcccaaggccatcgtgcacaccgagaaagtgaacatgatgagcctgaccgtgctgggcctgcggatgctgttcgccaaaaccgtggccgtgaacttcctgctgaccgccaagctgttcttcctcagggccaagcgatctggatctggagcaacaaacttctcactactcaaacaagcaggtgacgtggaggagaatcccgggcctactagcatggccttaccagtgaccgccttgctcctgccgctggccttgctgctccacgccgccaggccggacatccagttgacccagtcccccagctcactcagcgccagtgtgggggaccgggtgaccattacctgtaaagccagtcagagtgtggactatgacggggatagcttcctgaattggtatcagcagaagcctggcaaagccccaaagctgctgatctacgctgcatctaatctggagtcaggcgtgccttccaggttctccggtagtgggtctgggaccgatttcacattgaccatttcatccctccaacccgaggatttcgctacatattactgtcagcagtccaatgaggaccctctcacctttggccagggcaccaaagttgaaattaagagaggcggaggcggaagtggaggcggaggatctggcggcggaggctctgaagtccaacttgtggagtctggagggggcctggtgcagcccggcggctctctcagactgtcttgtgcggcaagcggctacaccttcacctcttactggatagaatgggtgaggcaggcacctggaaagggactggagtggattggagagattctgccaggagggggagatacaaattacaatgaaatcttcaaggggcgggccaccttttcagcggataccagcaagaatacagcttacctgcagatgaatagcctccgggcagaagataccgctgtttattattgcacgagacgggtgccaataagactggactattgggggcaagggactcttgtcaccgtcagttcaacgcgtgaggaggacctgaagaacgtgttcccacctgaggtggccgtgttcgagcctagcgaggccgagatcagccacacccagaaagccaccctcgtgtgcctggctaccggcttctaccccgaccatgtggaactgtcttggtgggtcaacggcaaagaggtgcacagcggcgtgtgtaccgacccccagccactgaaagaacagcccgccctgaacgacagccggtactgcctgagcagcagactgagagtgtccgccaccttctggcagaacccccggaaccacttcagatgccaggtgcagttctacggcctgagcgagaacgacgagtggacccaggacagagccaagcccgtgacccagatcgtgtctgccgaagcctggggcagagccgatgatgtgattaagatccactggcaggaaaagaagtccaacaccatcctgggcagccaggaaggcaacaccatgaagaccaacgacacctacatgaagttcagctggctgaccgtgcccgagaagtccctggacaaagaacacagatgcatcgtgcggcacgaaaacaacaagaacggcgtggaccaggaaatcatcttcccacccatcaagaccgatgtgattacaatggaccccaaggacaactgctccaaggacgccaacgataccctgctgctccagctgaccaacaccagcgcctactacatgtacttgttgctgctgctgaagtccgtggtgtacttcgccatcatcacatgctgcctgctgcggagaaccgccttctgctgcaacggcgagaagtctcgcgccaagagaagcggatctggcgtgaagcagaccctgaatttcgacctgctgaagctggctggcgacgtggaatccaacccaggcccttctagaggccatatgaccgagtacaagcccacggtgcgcctcgccacccgcgacgacgtccccagggccgtacgcaccctcgccgccgcgttcgccgactaccccgccacgcgccacaccgtcgatccggaccgccacatcgagcgggtcaccgagctgcaagaactcttcctcacgcgcgtcgggctcgacatcggcaaggtgtgggtcgcggacgacggcgccgcggtggcggtctggaccacgccggagagcgtcgaagcgggggcggtgttcgccgagatcggcccgcgcatggccgagttgagcggttcccggctggccgcgcagcaacagatggaaggcctcctggcgccgcaccggcccaaggagcccgcgtggttcctggccaccgtcggcgtctcgcccgaccaccagggcaagggtctgggcagcgccgtcgtgctccccggagtggaggcggccgagcgcgccggggtgcccgccttcctggagacctccgcgccccgcaacctccccttctacgagcggctcggcttcaccgtcaccgccgacgtcgaggtgcccgaaggaccgcgcacctggtgcatgacccgcaagcccggtgcctga

SEQ ID NO: 5672 - DNA, 2616 bp, synthetic construct
  source 1..2616: mol_type = other DNA
atggccttaccagtgaccgccttgctcctgccgctggccttgctgctccacgccgccaggccgctcgaggaggacctgaagaacgtgttcccacctgaggtggccgtgttcgagcctagcgaggccgagatcagccacacccagaaagccaccctcgtgtgcctggctaccggcttctaccccgaccatgtggaactgtcttggtgggtcaacggcaaagaggtgcacagcggcgtgtctaccgacccccagccactgaaagaacagcccgccctgaacgacagccggtactgcctgagcagcagactgagagtgtccgccaccttctggcagaacccccggaaccacttcagatgccaggtgcagttctacggcctgagcgagaacgacgagtggacccaggacagagccaagcccgtgacccagatcgtgtctgccgaagcctggggcagagccgattgcggctttaccagcgagagctaccagcagggcgtgctgagcgccaccaacctgagcgtgatcggcttcagaatcctgctgctgaaagtggccggctttaacctgctgatgaccctgcggctgtggtccagcagggccaagcgatctggatctggagcaacaaacttctcactactcaaacaagcaggtgacgtggaggagaatcccgggcctactagcatggccttaccagtgaccgccttgctcctgccgctggccttgctgctccacgccgccaggccggacatccagttgacccagtcccccagctcactcagcgccagtgtgggggaccgggtgaccattacctgtaaagccagtcagagtgtggactatgacggggatagcttcctgaattggtatcagcagaagcctggcaaagccccaaagctgctgatctacgctgcatctaatctggagtcaggcgtgccttccaggttctccggtagtgggtctgggaccgatttcacattgaccatttcatccctccaacccgaggatttcgctacatattactgtcagcagtccaatgaggaccctctcacctttggccagggcaccaaagttgaaattaagagaggcggaggcggaagtggaggcggaggatctggcggcggaggctctgaagtccaacttgtggagtctggagggggcctggtgcagcccggcggctctctcagactgtcttgtgcggcaagcggctacaccttcacctcttactggatagaatgggtgaggcaggcacctggaaagggactggagtggattggagagattctgccaggagggggagatacaaattacaatgaaatcttcaaggggcgggccaccttttcagcggataccagcaagaatacagcttacctgcagatgaatagcctccgggcagaagataccgctgtttattattgcacgagacgggtgccaataagactggactattgggggcaagggactcttgtcaccgtcagttcaacgcgtatccagaaccctgatcctgccgtgtaccagctgcgggatagcaagagcagcgacaagagcgtgtgtctgttcaccgacttcgacagccagaccaacgtgtcccagagcaaggactccgacgtgtacatcaccgataagaccgtgctggacatgcggagcatggacttcaagagcaactccgccgtggcctggtccaacaagtccgatttcgcctgcgccaacgccttcaacaacagcattatccccgaggacacattcttcccaagccccgagagcagctgcgacgtgaagctggtggaaaagagcttcgagacagacaccaacctgaacttccagatcctgtacgagatcctgctgggcaaggccaccctgtacgccgtgctggtgtctgccctggtgctgatggctatggtcaagcggaaggacagccggggacgcgccaagagaagcggatctggcgtgaagcagaccctgaatttcgacctgctgaagctggctggcgacgtggaatccaacccaggcccttctagaggccatatgaccgagtacaagcccacggtgcgcctcgccacccgcgacgacgtccccagggccgtacgcaccctcgccgccgcgttcgccgactaccccgccacgcgccacaccgtcgatccggaccgccacatcgagcgggtcaccgagctgcaagaactcttcctcacgcgcgtcgggctcgacatcggcaaggtgtgggtcgcggacgacggcgccgcggtggcggtctggaccacgccggagagcgtcgaagcgggggcggtgttcgccgagatcggcccgcgcatggccgagttgagcggttcccggctggccgcgcagcaacagatggaaggcctcctggcgccgcaccggcccaaggagcccgcgtggttcctggccaccgtcggcgtctcgcccgaccaccagggcaagggtctgggcagcgccgtcgtgctccccggagtggaggcggccgagcgcgccggggtgcccgccttcctggagacctccgcgccccgcaacctccccttctacgagcggctcggcttcaccgtcaccgccgacgtcgaggtgcccgaaggaccgcgcacctggtgcatgacccgcaagcccggtgcctga

SEQ ID NO: 5673 - DNA, 2616 bp, synthetic construct
  source 1..2616: mol_type = other DNA
atggccttaccagtgaccgccttgctcctgccgctggccttgctgctccacgccgccaggccgctcgagatccagaaccctgatcctgccgtgtaccagctgcgggatagcaagagcagcgacaagagcgtgtgtctgttcaccgacttcgacagccagaccaacgtgtcccagagcaaggactccgacgtgtacatcaccgataagaccgtgctggacatgcggagcatggacttcaagagcaactccgccgtggcctggtccaacaagtccgatttcgcctgcgccaacgccttcaacaacagcattatccccgaggacacattcttcccaagccccgagagcagctgcgacgtgaagctggtggaaaagagcttcgagacagacaccaacctgaacttccagatcctgtacgagatcctgctgggcaaggccaccctgtacgccgtgctggtgtctgccctggtgctgatggctatggtcaagcggaaggacagccggggaagggccaagcgatctggatctggagcaacaaacttctcactactcaaacaagcaggtgacgtggaggagaatcccgggcctactagcatggccttaccagtgaccgccttgctcctgccgctggccttgctgctccacgccgccaggccggacatccagttgacccagtcccccagctcactcagcgccagtgtgggggaccgggtgaccattacctgtaaagccagtcagagtgtggactatgacggggatagcttcctgaattggtatcagcagaagcctggcaaagccccaaagctgctgatctacgctgcatctaatctggagtcaggcgtgccttccaggttctccggtagtgggtctgggaccgatttcacattgaccatttcatccctccaacccgaggatttcgctacatattactgtcagcagtccaatgaggaccctctcacctttggccagggcaccaaagttgaaattaagagaggcggaggcggaagtggaggcggaggatctggcggcggaggctctgaagtccaacttgtggagtctggagggggcctggtgcagcccggcggctctctcagactgtcttgtgcggcaagcggctacaccttcacctcttactggatagaatgggtgaggcaggcacctggaaagggactggagtggattggagagattctgccaggagggggagatacaaattacaatgaaatcttcaaggggcgggccaccttttcagcggataccagcaagaatacagcttacctgcagatgaatagcctccgggcagaagataccgctgtttattattgcacgagacgggtgccaataagactggactattgggggcaagggactcttgtcaccgtcagttcaacgcgtgaggacctgaagaacgtgttcccacctgaggtggccgtgttcgagcctagcgaggccgagatcagccacacccagaaagccaccctcgtgtgcctggctaccggcttctaccccgaccatgtggaactgtcttggtgggtcaacggcaaagaggtgcacagcggcgtgtctaccgacccccagccactgaaagaacagcccgccctgaacgacagccggtactgcctgagcagcagactgagagtgtccgccaccttctggcagaacccccggaaccacttcagatgccaggtgcagttctacggcctgagcgagaacgacgagtggacccaggacagagccaagcccgtgacccagatcgtgtctgccgaagcctggggcagagccgattgcggctttaccagcgagagctaccagcagggcgtgctgagcgccaccaacctgagcgtgatcggcttcagaatcctgctgctgaaagtggccggctttaacctgctgatgaccctgcggctgtggtccagccgcgccaagagaagcggatctggcgtgaagcagaccctgaatttcgacctgctgaagctggctggcgacgtggaatccaacccaggcccttctagaggccatatgaccgagtacaagcccacggtgcgcctcgccacccgcgacgacgtccccagggccgtacgcaccctcgccgccgcgttcgccgactaccccgccacgcgccacaccgtcgatccggaccgccacatcgagcgggtcaccgagctgcaagaactcttcctcacgcgcgtcgggctcgacatcggcaaggtgtgggtcgcggacgacggcgccgcggtggcggtctggaccacgccggagagcgtcgaagcgggggcggtgttcgccgagatcggcccgcgcatggccgagttgagcggttcccggctggccgcgcagcaacagatggaaggcctcctggcgccgcaccggcccaaggagcccgcgtggttcctggccaccgtcggcgtctcgcccgaccaccagggcaagggtctgggcagcgccgtcgtgctccccggagtggaggcggccgagcgcgccggggtgcccgccttcctggagacctccgcgccccgcaacctccccttctacgagcggctcggcttcaccgtcaccgccgacgtcgaggtgcccgaaggaccgcgcacctggtgcatgacccgcaagcccggtgcctga

SEQ ID NO: 5674 - DNA, 2616 bp, synthetic construct
  source 1..2616: mol_type = other DNA
atggccttaccagtgaccgccttgctcctgccgctggccttgctgctccacgccgccaggccgctcgaggaggacctgaagaacgtgttcccacctgaggtggccgtgttcgagcctagcgaggccgagatcagccacacccagaaagccaccctcgtgtgcctggctaccggcttctaccccgaccatgtggaactgtcttggtgggtcaacggcaaagaggtgcacagcggcgtgtgtaccgacccccagccactgaaagaacagcccgccctgaacgacagccggtactgcctgagcagcagactgagagtgtccgccaccttctggcagaacccccggaaccacttcagatgccaggtgcagttctacggcctgagcgagaacgacgagtggacccaggacagagccaagcccgtgacccagatcgtgtctgccgaagcctggggcagagccgattgcgacgtgaagctggtggaaaagagcttcgagacagacaccaacctgaacttccagaacctgagcgtgatcggcttcagaatcctgctgctgaaagtggccggctttaacctgctgatgaccctgcggctgtggtccagcagggccaagcgatctggatctggagcaacaaacttctcactactcaaacaagcaggtgacgtggaggagaatcccgggcctactagcatggccttaccagtgaccgccttgctcctgccgctggccttgctgctccacgccgccaggccggacatccagttgacccagtcccccagctcactcagcgccagtgtgggggaccgggtgaccattacctgtaaagccagtcagagtgtggactatgacggggatagcttcctgaattggtatcagcagaagcctggcaaagccccaaagctgctgatctacgctgcatctaatctggagtcaggcgtgccttccaggttctccggtagtgggtctgggaccgatttcacattgaccatttcatccctccaacccgaggatttcgctacatattactgtcagcagtccaatgaggaccctctcacctttggccagggcaccaaagttgaaattaagagaggcggaggcggaagtggaggcggaggatctggcggcggaggctctgaagtccaacttgtggagtctggagggggcctggtgcagcccggcggctctctcagactgtcttgtgcggcaagcggctacaccttcacctcttactggatagaatgggtgaggcaggcacctggaaagggactggagtggattggagagattctgccaggagggggagatacaaattacaatgaaatcttcaaggggcgggccaccttttcagcggataccagcaagaatacagcttacctgcagatgaatagcctccgggcagaagataccgctgtttattattgcacgagacgggtgccaataagactggactattgggggcaagggactcttgtcaccgtcagttcaacgcgtatccagaaccctgatcctgccgtgtaccagctgcgggatagcaagagcagcgacaagagcgtgtgtctgttcaccgacttcgacagccagaccaacgtgtcccagagcaaggactccgacgtgtacatcaccgataagtgcgtgctggacatgcggagcatggacttcaagagcaactccgccgtggcctggtccaacaagtccgatttcgcctgcgccaacgccttcaacaacagcattatccccgaggacacattcttcccaagccccgagagcagctgcggctttaccagcgagagctaccagcagggcgtgctgagcgccaccatcctgtacgagatcctgctgggcaaggccaccctgtacgccgtgctggtgtctgccctggtgctgatggctatggtcaagcggaaggacagccggggacgcgccaagagaagcggatctggcgtgaagcagaccctgaatttcgacctgctgaagctggctggcgacgtggaatccaacccaggcccttctagaggccatatgaccgagtacaagcccacggtgcgcctcgccacccgcgacgacgtccccagggccgtacgcaccctcgccgccgcgttcgccgactaccccgccacgcgccacaccgtcgatccggaccgccacatcgagcgggtcaccgagctgcaagaactcttcctcacgcgcgtcgggctcgacatcggcaaggtgtgggtcgcggacgacggcgccgcggtggcggtctggaccacgccggagagcgtcgaagcgggggcggtgttcgccgagatcggcccgcgcatggccgagttgagcggttcccggctggccgcgcagcaacagatggaaggcctcctggcgccgcaccggcccaaggagcccgcgtggttcctggccaccgtcggcgtctcgcccgaccaccagggcaagggtctgggcagcgccgtcgtgctccccggagtggaggcggccgagcgcgccggggtgcccgccttcctggagacctccgcgccccgcaacctccccttctacgagcggctcggcttcaccgtcaccgccgacgtcgaggtgcccgaaggaccgcgcacctggtgcatgacccgcaagcccggtgcctga

SEQ ID NO: 5675 - DNA, 2616 bp, synthetic construct
  source 1..2616: mol_type = other DNA
atggccttaccagtgaccgccttgctcctgccgctggccttgctgctccacgccgccaggccgctcgaggaggacctgaagaacgtgttcccacctgaggtggccgtgttcgagcctagcgaggccgagatcagccacacccagaaagccaccctcgtgtgcctggctaccggcttctaccccgaccatgtggaactgtcttggtgggtcaacggcaaagaggtgcacagcggcgtgtctaccgacccccagccactgaaagaacagcccgccctgaacgacagccggtactgcctgagcagcagactgagagtgtccgccaccttctggcagaacccccggaaccacttcagatgccaggtgcagttctacggcctgagcgagaacgacgagtggacccaggacagagccaagcccgtgacccagatcgtgtctgccgaagcctggggcagagccgattgcgacgtgaagctggtggaaaagagcttcgagacagacaccaacctgaacttccagaacctgagcgtgatcggcttcagaatcctgctgctgaaagtggccggctttaacctgctgatgaccctgcggctgtggtccagcagggccaagcgatctggatctggagcaacaaacttctcactactcaaacaagcaggtgacgtggaggagaatcccgggcctactagcatggccttaccagtgaccgccttgctcctgccgctggccttgctgctccacgccgccaggccggacatccagttgacccagtcccccagctcactcagcgccagtgtgggggaccgggtgaccattacctgtaaagccagtcagagtgtggactatgacggggatagcttcctgaattggtatcagcagaagcctggcaaagccccaaagctgctgatctacgctgcatctaatctggagtcaggcgtgccttccaggttctccggtagtgggtctgggaccgatttcacattgaccatttcatccctccaacccgaggatttcgctacatattactgtcagcagtccaatgaggaccctctcacctttggccagggcaccaaagttgaaattaagagaggcggaggcggaagtggaggcggaggatctggcggcggaggctctgaagtccaacttgtggagtctggagggggcctggtgcagcccggcggctctctcagactgtcttgtgcggcaagcggctacaccttcacctcttactggatagaatgggtgaggcaggcacctggaaagggactggagtggattggagagattctgccaggagggggagatacaaattacaatgaaatcttcaaggggcgggccaccttttcagcggataccagcaagaatacagcttacctgcagatgaatagcctccgggcagaagataccgctgtttattattgcacgagacgggtgccaataagactggactattgggggcaagggactcttgtcaccgtcagttcaacgcgtatccagaaccctgatcctgccgtgtaccagctgcgggatagcaagagcagcgacaagagcgtgtgtctgttcaccgacttcgacagccagaccaacgtgtcccagagcaaggactccgacgtgtacatcaccgataagaccgtgctggacatgcggagcatggacttcaagagcaactccgccgtggcctggtccaacaagtccgatttcgcctgcgccaacgccttcaacaacagcattatccccgaggacacattcttcccaagccccgagagcagctgcggctttaccagcgagagctaccagcagggcgtgctgagcgccaccatcctgtacgagatcctgctgggcaaggccaccctgtacgccgtgctggtgtctgccctggtgctgatggctatggtcaagcggaaggacagccggggacgcgccaagagaagcggatctggcgtgaagcagaccctgaatttcgacctgctgaagctggctggcgacgtggaatccaacccaggcccttctagaggccatatgaccgagtacaagcccacggtgcgcctcgccacccgcgacgacgtccccagggccgtacgcaccctcgccgccgcgttcgccgactaccccgccacgcgccacaccgtcgatccggaccgccacatcgagcgggtcaccgagctgcaagaactcttcctcacgcgcgtcgggctcgacatcggcaaggtgtgggtcgcggacgacggcgccgcggtggcggtctggaccacgccggagagcgtcgaagcgggggcggtgttcgccgagatcggcccgcgcatggccgagttgagcggttcccggctggccgcgcagcaacagatggaaggcctcctggcgccgcaccggcccaaggagcccgcgtggttcctggccaccgtcggcgtctcgcccgaccaccagggcaagggtctgggcagcgccgtcgtgctccccggagtggaggcggccgagcgcgccggggtgcccgccttcctggagacctccgcgccccgcaacctccccttctacgagcggctcggcttcaccgtcaccgccgacgtcgaggtgcccgaaggaccgcgcacctggtgcatgacccgcaagcccggtgcctga

SEQ ID NO: 5676 - DNA, 2925 bp, synthetic construct
  source 1..2925: mol_type = other DNA
atggccttaccagtgaccgccttgctcctgccgctggccttgctgctccacgccgccaggccgctcgaggaggaggacctgaagaacgtgttcccacctgaggtggccgtgttcgagcctagcgaggccgagatcagccacacccagaaagccaccctcgtgtgcctggctaccggcttctaccccgaccatgtggaactgtcttggtgggtcaacggcaaagaggtgcacagcggcgtgtctaccgacccccagccactgaaagaacagcccgccctgaacgacagccggtactgcctgagcagcagactgagagtgtccgccaccttctggcagaacccccggaaccacttcagatgccaggtgcagttctacggcctgagcgagaacgacgagtggacccaggacagagccaagcccgtgacccagatcgtgtctgccgaagcctggggcagagccgatgatgtgattaagatccactggcaggaaaagaagtccaacaccatcctgggcagccaggaaggcaacaccatgaagaccaacgacacctacatgaagttcagctggctgaccgtgcccgagaagtccctggacaaagaacacagatgcatcgtgcggcacgaaaacaacaagaacggcgtggaccaggaaatcatcttcccacccatcaagaccgatgtgattacaatggaccccaaggacaactgctccaaggacgccaacgataccctgctgctccagctgaccaacaccagcgcctactacatgtacttgttgctgctgctgaagtccgtggtgtacttcgccatcatcacatgctgcctgctgcggagaaccgccttctgctgcaacggcgagaagtctagggccaagcgatctggatctggagcaacaaacttctcactactcaaacaagcaggtgacgtggaggagaatcccgggcctactagcatggccttaccagtgaccgccttgctcctgccgctggccttgctgctccacgccgccaggccggacatccagttgacccagtcccccagctcactcagcgccagtgtgggggaccgggtgaccattacctgtaaagccagtcagagtgtggactatgacggggatagcttcctgaattggtatcagcagaagcctggcaaagccccaaagctgctgatctacgctgcatctaatctggagtcaggcgtgccttccaggttctccggtagtgggtctgggaccgatttcacattgaccatttcatccctccaacccgaggatttcgctacatattactgtcagcagtccaatgaggaccctctcacctttggccagggcaccaaagttgaaattaagagaggcggaggcggaagtggaggcggaggatctggcggcggaggctctgaagtccaacttgtggagtctggagggggcctggtgcagcccggcggctctctcagactgtcttgtgcggcaagcggctacaccttcacctcttactggatagaatgggtgaggcaggcacctggaaagggactggagtggattggagagattctgccaggagggggagatacaaattacaatgaaatcttcaaggggcgggccaccttttcagcggataccagcaagaatacagcttacctgcagatgaatagcctccgggcagaagataccgctgtttattattgcacgagacgggtgccaataagactggactattgggggcaagggactcttgtcaccgtcagttcaacgcgtatccagaaccctgatcctgccgtgtaccagctgcgggatagcaagagcagcgacaagagcgtgtgtctgttcaccgacttcgacagccagaccaacgtgtcccagagcaaggactccgacgtgtacatcaccgataagaccgtgctggacatgcggagcatggacttcaagagcaactccgccgtggcctggtccaacaagtccgatttcgcctgcgccaacgccttcaacaacagcattatccccgaggacacattcttcccaagccccgagagcagcgactccaccgaccacgtgaagcccaaagagacagagaacaccaagcagcccagcaagagctgccacaagcccaaggccatcgtgcacaccgagaaagtgaacatgatgagcctgaccgtgctgggcctgcggatgctgttcgccaaaaccgtggccgtgaacttcctgctgaccgccaagctgttcttcctccgcgccaagagaagcggatctggcgtgaagcagaccctgaatttcgacctgctgaagctggctggcgacgtggaatccaacccaggcccttctagaggccatatgaccgagtacaagcccacggtgcgcctcgccacccgcgacgacgtccccagggccgtacgcaccctcgccgccgcgttcgccgactaccccgccacgcgccacaccgtcgatccggaccgccacatcgagcgggtcaccgagctgcaagaactcttcctcacgcgcgtcgggctcgacatcggcaaggtgtgggtcgcggacgacggcgccgcggtggcggtctggaccacgccggagagcgtcgaagcgggggcggtgttcgccgagatcggcccgcgcatggccgagttgagcggttcccggctggccgcgcagcaacagatggaaggcctcctggcgccgcaccggcccaaggagcccgcgtggttcctggccaccgtcggcgtctcgcccgaccaccagggcaagggtctgggcagcgccgtcgtgctccccggagtggaggcggccgagcgcgccggggtgcccgccttcctggagacctccgcgccccgcaacctccccttctacgagcggctcggcttcaccgtcaccgccgacgtcgaggtgcccgaaggaccgcgcacctggtgcatgacccgcaagcccggtgcctga

SEQ ID NO: 5677 - DNA, 2616 bp, synthetic construct
  source 1..2616: mol_type = other DNA
atggccttaccagtgaccgccttgctcctgccgctggccttgctgctccacgccgccaggccgctcgaggaggacctgaagaacgtgttcccacctgaggtggccgtgttcgagcctagcgaggccgagatcagccacacccagaaagccaccctcgtgtgcctggctaccggcttctaccccgaccatgtggaactgtcttggtgggtcaacggcaaagaggtgcacagcggcgtgtgtaccgacccccagccactgaaagaacagcccgccctgaacgacagccggtactgcctgagcagcagactgagagtgtccgccaccttctggcagaacccccggaaccacttcagatgccaggtgcagttctacggcctgagcgagaacgacgagtggacccaggacagagccaagcccgtgacccagatcgtgtctgccgaagcctggggcagagccgattgcggctttaccagcgagagctaccagcagggcgtgctgagcgccaccaacctgagcgtgatcggcttcagaatcctgctgctgaaagtggccggctttaacctgctgatgaccctgcggctgtggtccagcagggccaagcgatctggatctggagcaacaaacttctcactactcaaacaagcaggtgacgtggaggagaatcccgggcctactagcatggccttaccagtgaccgccttgctcctgccgctggccttgctgctccacgccgccaggccggacatccagttgacccagtcccccagctcactcagcgccagtgtgggggaccgggtgaccattacctgtaaagccagtcagagtgtggactatgacggggatagcttcctgaattggtatcagcagaagcctggcaaagccccaaagctgctgatctacgctgcatctaatctggagtcaggcgtgccttccaggttctccggtagtgggtctgggaccgatttcacattgaccatttcatccctccaacccgaggatttcgctacatattactgtcagcagtccaatgaggaccctctcacctttggccagggcaccaaagttgaaattaagagaggcggaggcggaagtggaggcggaggatctggcggcggaggctctgaagtccaacttgtggagtctggagggggcctggtgcagcccggcggctctctcagactgtcttgtgcggcaagcggctacaccttcacctcttactggatagaatgggtgaggcaggcacctggaaagggactggagtggattggagagattctgccaggagggggagatacaaattacaatgaaatcttcaaggggcgggccaccttttcagcggataccagcaagaatacagcttacctgcagatgaatagcctccgggcagaagataccgctgtttattattgcacgagacgggtgccaataagactggactattgggggcaagggactcttgtcaccgtcagttcaacgcgtatccagaaccctgatcctgccgtgtaccagctgcgggatagcaagagcagcgacaagagcgtgtgtctgttcaccgacttcgacagccagaccaacgtgtcccagagcaaggactccgacgtgtacatcaccgataagtgcgtgctggacatgcggagcatggacttcaagagcaactccgccgtggcctggtccaacaagtccgatttcgcctgcgccaacgccttcaacaacagcattatccccgaggacacattcttcccaagccccgagagcagctgcgacgtgaagctggtggaaaagagcttcgagacagacaccaacctgaacttccagatcctgtacgagatcctgctgggcaaggccaccctgtacgccgtgctggtgtctgccctggtgctgatggctatggtcaagcggaaggacagccggggacgcgccaagagaagcggatctggcgtgaagcagaccctgaatttcgacctgctgaagctggctggcgacgtggaatccaacccaggcccttctagaggccatatgaccgagtacaagcccacggtgcgcctcgccacccgcgacgacgtccccagggccgtacgcaccctcgccgccgcgttcgccgactaccccgccacgcgccacaccgtcgatccggaccgccacatcgagcgggtcaccgagctgcaagaactcttcctcacgcgcgtcgggctcgacatcggcaaggtgtgggtcgcggacgacggcgccgcggtggcggtctggaccacgccggagagcgtcgaagcgggggcggtgttcgccgagatcggcccgcgcatggccgagttgagcggttcccggctggccgcgcagcaacagatggaaggcctcctggcgccgcaccggcccaaggagcccgcgtggttcctggccaccgtcggcgtctcgcccgaccaccagggcaagggtctgggcagcgccgtcgtgctccccggagtggaggcggccgagcgcgccggggtgcccgccttcctggagacctccgcgccccgcaacctccccttctacgagcggctcggcttcaccgtcaccgccgacgtcgaggtgcccgaaggaccgcgcacctggtgcatgacccgcaagcccggtgcctga

SEQ ID NO: 5678 - DNA, 2703 bp, synthetic construct
  source 1..2703: mol_type = other DNA
atggccttaccagtgaccgccttgctcctgccgctggccttgctgctccacgccgccaggccgctcgaggaggaggacctgaagaacgtgttcccacctgaggtggccgtgttcgagcctagcgaggccgagatcagccacacccagaaagccaccctcgtgtgcctggctaccggcttctaccccgaccatgtggaactgtcttggtgggtcaacggcaaagaggtgcacagcggcgtgtgtaccgacccccagccactgaaagaacagcccgccctgaacgacagccggtactgcctgagcagcagactgagagtgtccgccaccttctggcagaacccccggaaccacttcagatgccaggtgcagttctacggcctgagcgagaacgacgagtggacccaggacagagccaagcccgtgacccagatcgtgtctgccgaagcctggggcagagccgattgcggctttaccagcgagagctaccagcagggcgtgctgagcgccaccaacctgagcgtgatcggcttcagaatcctgctgctgaaagtggccggctttaacctgctgatgaccctgcggctgtggtccagcagggccaagcgatctggatctggagcaacaaacttctcactactcaaacaagcaggtgacgtggaggagaatcccgggcctactagcatggccttaccagtgaccgccttgctcctgccgctggccttgctgctccacgccgccaggccggacatccagttgacccagtcccccagctcactcagcgccagtgtgggggaccgggtgaccattacctgtaaagccagtcagagtgtggactatgacggggatagcttcctgaattggtatcagcagaagcctggcaaagccccaaagctgctgatctacgctgcatctaatctggagtcaggcgtgccttccaggttctccggtagtgggtctgggaccgatttcacattgaccatttcatccctccaacccgaggatttcgctacatattactgtcagcagtccaatgaggaccctctcacctttggccagggcaccaaagttgaaattaagagaggcggaggcggaagtggaggcggaggatctggcggcggaggctctgaagtccaacttgtggagtctggagggggcctggtgcagcccggcggctctctcagactgtcttgtgcggcaagcggctacaccttcacctcttactggatagaatgggtgaggcaggcacctggaaagggactggagtggattggagagattctgccaggagggggagatacaaattacaatgaaatcttcaaggggcgggccaccttttcagcggataccagcaagaatacagcttacctgcagatgaatagcctccgggcagaagataccgctgtttattattgcacgagacgggtgccaataagactggactattgggggcaagggactcttgtcaccgtcagttcaacgcgtggacagcctaaggccaatcctaccgtgacactgttccctccaagcagcgaagaactccaggccaacaaggccacacttgtgtgcctgatctccgacttctaccctggggctgtgacagtggcttggaaggccgatggatctcctgtgaaagccggcgtggaaaccaccaagccatccaagcagagcaacaacaaatacgccgccagctcctacctgagcctgacacctgagcagtggaagtcccacagatcctacagctgccaagtgacccacgaaggcagcaccgtggaaaagacagtggcccctacagagtgcagccccatcaagaccgatgtgattacaatggaccccaaggacaactgctccaaggacgccaacgataccctgctgctccagctgaccaacaccagcgcctactacatgtacttgttgctgctgctgaagtccgtggtgtacttcgccatcatcacatgctgcctgctgcggagaaccgccttctgctgcaacggcgagaagtctcgcgccaagagaagcggatctggcgtgaagcagaccctgaatttcgacctgctgaagctggctggcgacgtggaatccaacccaggcccttctagaggccatatgaccgagtacaagcccacggtgcgcctcgccacccgcgacgacgtccccagggccgtacgcaccctcgccgccgcgttcgccgactaccccgccacgcgccacaccgtcgatccggaccgccacatcgagcgggtcaccgagctgcaagaactcttcctcacgcgcgtcgggctcgacatcggcaaggtgtgggtcgcggacgacggcgccgcggtggcggtctggaccacgccggagagcgtcgaagcgggggcggtgttcgccgagatcggcccgcgcatggccgagttgagcggttcccggctggccgcgcagcaacagatggaaggcctcctggcgccgcaccggcccaaggagcccgcgtggttcctggccaccgtcggcgtctcgcccgaccaccagggcaagggtctgggcagcgccgtcgtgctccccggagtggaggcggccgagcgcgccggggtgcccgccttcctggagacctccgcgccccgcaacctccccttctacgagcggctcggcttcaccgtcaccgccgacgtcgaggtgcccgaaggaccgcgcacctggtgcatgacccgcaagcccggtgcctga

SEQ ID NO: 5679 - DNA, 2703 bp, synthetic construct
  source 1..2703: mol_type = other DNA
atggccttaccagtgaccgccttgctcctgccgctggccttgctgctccacgccgccaggccgctcgagggacagcctaaggccaatcctaccgtgacactgttccctccaagcagcgaagaactccaggccaacaaggccacacttgtgtgcctgatctccgacttctaccctggggctgtgacagtggcttggaaggccgatggatctcctgtgaaagccggcgtggaaaccaccaagccatccaagcagagcaacaacaaatacgccgccagctcctacctgagcctgacacctgagcagtggaagtcccacagatcctacagctgccaagtgacccacgaaggcagcaccgtggaaaagacagtggcccctacagagtgcagccccatcaagaccgatgtgattacaatggaccccaaggacaactgctccaaggacgccaacgataccctgctgctccagctgaccaacaccagcgcctactacatgtacttgttgctgctgctgaagtccgtggtgtacttcgccatcatcacatgctgcctgctgcggagaaccgccttctgctgcaacggcgagaagtctagggccaagcgatctggatctggagcaacaaacttctcactactcaaacaagcaggtgacgtggaggagaatcccgggcctactagcatggccttaccagtgaccgccttgctcctgccgctggccttgctgctccacgccgccaggccggacatccagttgacccagtcccccagctcactcagcgccagtgtgggggaccgggtgaccattacctgtaaagccagtcagagtgtggactatgacggggatagcttcctgaattggtatcagcagaagcctggcaaagccccaaagctgctgatctacgctgcatctaatctggagtcaggcgtgccttccaggttctccggtagtgggtctgggaccgatttcacattgaccatttcatccctccaacccgaggatttcgctacatattactgtcagcagtccaatgaggaccctctcacctttggccagggcaccaaagttgaaattaagagaggcggaggcggaagtggaggcggaggatctggcggcggaggctctgaagtccaacttgtggagtctggagggggcctggtgcagcccggcggctctctcagactgtcttgtgcggcaagcggctacaccttcacctcttactggatagaatgggtgaggcaggcacctggaaagggactggagtggattggagagattctgccaggagggggagatacaaattacaatgaaatcttcaaggggcgggccaccttttcagcggataccagcaagaatacagcttacctgcagatgaatagcctccgggcagaagataccgctgtttattattgcacgagacgggtgccaataagactggactattgggggcaagggactcttgtcaccgtcagttcaacgcgtgaggaggacctgaagaacgtgttcccacctgaggtggccgtgttcgagcctagcgaggccgagatcagccacacccagaaagccaccctcgtgtgcctggctaccggcttctaccccgaccatgtggaactgtcttggtgggtcaacggcaaagaggtgcacagcggcgtgtgtaccgacccccagccactgaaagaacagcccgccctgaacgacagccggtactgcctgagcagcagactgagagtgtccgccaccttctggcagaacccccggaaccacttcagatgccaggtgcagttctacggcctgagcgagaacgacgagtggacccaggacagagccaagcccgtgacccagatcgtgtctgccgaagcctggggcagagccgattgcggctttaccagcgagagctaccagcagggcgtgctgagcgccaccaacctgagcgtgatcggcttcagaatcctgctgctgaaagtggccggctttaacctgctgatgaccctgcggctgtggtccagccgcgccaagagaagcggatctggcgtgaagcagaccctgaatttcgacctgctgaagctggctggcgacgtggaatccaacccaggcccttctagaggccatatgaccgagtacaagcccacggtgcgcctcgccacccgcgacgacgtccccagggccgtacgcaccctcgccgccgcgttcgccgactaccccgccacgcgccacaccgtcgatccggaccgccacatcgagcgggtcaccgagctgcaagaactcttcctcacgcgcgtcgggctcgacatcggcaaggtgtgggtcgcggacgacggcgccgcggtggcggtctggaccacgccggagagcgtcgaagcgggggcggtgttcgccgagatcggcccgcgcatggccgagttgagcggttcccggctggccgcgcagcaacagatggaaggcctcctggcgccgcaccggcccaaggagcccgcgtggttcctggccaccgtcggcgtctcgcccgaccaccagggcaagggtctgggcagcgccgtcgtgctccccggagtggaggcggccgagcgcgccggggtgcccgccttcctggagacctccgcgccccgcaacctccccttctacgagcggctcggcttcaccgtcaccgccgacgtcgaggtgcccgaaggaccgcgcacctggtgcatgacccgcaagcccggtgcctga

SEQ ID NO: 5680 - DNA, 2694 bp, synthetic construct
  source 1..2694: mol_type = other DNA
atggccttaccagtgaccgccttgctcctgccgctggccttgctgctccacgccgccaggccgctcgaggaggcctctacaaagggaccctccgtgtttcctctggctcccagcagcaagtctacaagcggaggaacagccgctctgggctgcctggtcaaggattactttcccgagcctgtgaccgtgtcctggaatagcggagcactgacaagcggcgtgcacacctttccagccgtgctgcaaagcagcggcctgtactctctgagcagcgtggtcacagtgcctagctctagcctgggcacccagacctacatctgcaatgtgaaccacaagcctagcaacaccaaggtggacaagagagtggaacccaagagctgtcccatcaagaccgatgtgattacaatggaccccaaggacaactgctccaaggacgccaacgataccctgctgctccagctgaccaacaccagcgcctactacatgtacttgttgctgctgctgaagtccgtggtgtacttcgccatcatcacatgctgcctgctgcggagaaccgccttctgctgcaacggcgagaagtctagggccaagcgatctggatctggagcaacaaacttctcactactcaaacaagcaggtgacgtggaggagaatcccgggcctactagcatggccttaccagtgaccgccttgctcctgccgctggccttgctgctccacgccgccaggccggacatccagttgacccagtcccccagctcactcagcgccagtgtgggggaccgggtgaccattacctgtaaagccagtcagagtgtggactatgacggggatagcttcctgaattggtatcagcagaagcctggcaaagccccaaagctgctgatctacgctgcatctaatctggagtcaggcgtgccttccaggttctccggtagtgggtctgggaccgatttcacattgaccatttcatccctccaacccgaggatttcgctacatattactgtcagcagtccaatgaggaccctctcacctttggccagggcaccaaagttgaaattaagagaggcggaggcggaagtggaggcggaggatctggcggcggaggctctgaagtccaacttgtggagtctggagggggcctggtgcagcccggcggctctctcagactgtcttgtgcggcaagcggctacaccttcacctcttactggatagaatgggtgaggcaggcacctggaaagggactggagtggattggagagattctgccaggagggggagatacaaattacaatgaaatcttcaaggggcgggccaccttttcagcggataccagcaagaatacagcttacctgcagatgaatagcctccgggcagaagataccgctgtttattattgcacgagacgggtgccaataagactggactattgggggcaagggactcttgtcaccgtcagttcaacgcgtggacagcctaaggccaatcctaccgtgacactgttccctccaagcagcgaagaactccaggccaacaaggccacacttgtgtgcctgatctccgacttctaccctggggctgtgacagtggcttggaaggccgatggatctcctgtgaaagccggcgtggaaaccaccaagccatccaagcagagcaacaacaaatacgccgccagctcctacctgagcctgacacctgagcagtggaagtcccacagatcctacagctgccaagtgacccacgaaggcagcaccgtggaaaagacagtggcccctacagagtgcagcgaagtgaaaaccgactccaccgaccacgtgaagcccaaagagacagagaacaccaagcagcccagcaagagctgccacaagcccaaggccatcgtgcacaccgagaaagtgaacatgatgagcctgaccgtgctgggcctgcggatgctgttcgccaaaaccgtggccgtgaacttcctgctgaccgccaagctgttcttcctccgcgccaagagaagcggatctggcgtgaagcagaccctgaatttcgacctgctgaagctggctggcgacgtggaatccaacccaggcccttctagaggccatatgaccgagtacaagcccacggtgcgcctcgccacccgcgacgacgtccccagggccgtacgcaccctcgccgccgcgttcgccgactaccccgccacgcgccacaccgtcgatccggaccgccacatcgagcgggtcaccgagctgcaagaactcttcctcacgcgcgtcgggctcgacatcggcaaggtgtgggtcgcggacgacggcgccgcggtggcggtctggaccacgccggagagcgtcgaagcgggggcggtgttcgccgagatcggcccgcgcatggccgagttgagcggttcccggctggccgcgcagcaacagatggaaggcctcctggcgccgcaccggcccaaggagcccgcgtggttcctggccaccgtcggcgtctcgcccgaccaccagggcaagggtctgggcagcgccgtcgtgctccccggagtggaggcggccgagcgcgccggggtgcccgccttcctggagacctccgcgccccgcaacctccccttctacgagcggctcggcttcaccgtcaccgccgacgtcgaggtgcccgaaggaccgcgcacctggtgcatgacccgcaagcccggtgcctga

SEQ ID NO: 5681 - DNA, 2628 bp, synthetic construct
  source 1..2628: mol_type = other DNA
atggccttaccagtgaccgccttgctcctgccgctggccttgctgctccacgccgccaggccgctcgaggaggcctctacaaagggaccctccgtgtttcctctggctcccagcagcaagtctacaagcggaggaacagccgctctgggctgcctggtcaaggattactttcccgagcctgtgaccgtgtcctggaatagcggagcactgacaagcggcgtgcacacctttccagccgtgctgcaaagcagcggcctgtactctctgagcagcgtggtcacagtgcctagctctagcctgggcacccagacctacatctgcaatgtgaaccacaagcctagcaacaccaaggtggacaagagagtggaacccaagagctgtggcagagccgattgcggctttaccagcgagagctaccagcagggcgtgctgagcgccaccatcctgtacgagatcctgctgggcaaggccaccctgtacgccgtgctggtgtctgccctggtgctgatggctatggtcaagcggaaggacagccggggaagggccaagcgatctggatctggagcaacaaacttctcactactcaaacaagcaggtgacgtggaggagaatcccgggcctactagcatggccttaccagtgaccgccttgctcctgccgctggccttgctgctccacgccgccaggccggacatccagttgacccagtcccccagctcactcagcgccagtgtgggggaccgggtgaccattacctgtaaagccagtcagagtgtggactatgacggggatagcttcctgaattggtatcagcagaagcctggcaaagccccaaagctgctgatctacgctgcatctaatctggagtcaggcgtgccttccaggttctccggtagtgggtctgggaccgatttcacattgaccatttcatccctccaacccgaggatttcgctacatattactgtcagcagtccaatgaggaccctctcacctttggccagggcaccaaagttgaaattaagagaggcggaggcggaagtggaggcggaggatctggcggcggaggctctgaagtccaacttgtggagtctggagggggcctggtgcagcccggcggctctctcagactgtcttgtgcggcaagcggctacaccttcacctcttactggatagaatgggtgaggcaggcacctggaaagggactggagtggattggagagattctgccaggagggggagatacaaattacaatgaaatcttcaaggggcgggccaccttttcagcggataccagcaagaatacagcttacctgcagatgaatagcctccgggcagaagataccgctgtttattattgcacgagacgggtgccaataagactggactattgggggcaagggactcttgtcaccgtcagttcaacgcgtggacagcctaaggccaatcctaccgtgacactgttccctccaagcagcgaagaactccaggccaacaaggccacacttgtgtgcctgatctccgacttctaccctggggctgtgacagtggcttggaaggccgatggatctcctgtgaaagccggcgtggaaaccaccaagccatccaagcagagcaacaacaaatacgccgccagctcctacctgagcctgacacctgagcagtggaagtcccacagatcctacagctgccaagtgacccacgaaggcagcaccgtggaaaagacagtggcccctacagagtgcagcatccccgaggacacattcttcccaagccccgagagcagctgcgacgtgaagctggtggaaaagagcttcgagacagacaccaacctgaacttccagaacctgagcgtgatcggcttcagaatcctgctgctgaaagtggccggctttaacctgctgatgaccctgcggctgtggtccagccgcgccaagagaagcggatctggcgtgaagcagaccctgaatttcgacctgctgaagctggctggcgacgtggaatccaacccaggcccttctagaggccatatgaccgagtacaagcccacggtgcgcctcgccacccgcgacgacgtccccagggccgtacgcaccctcgccgccgcgttcgccgactaccccgccacgcgccacaccgtcgatccggaccgccacatcgagcgggtcaccgagctgcaagaactcttcctcacgcgcgtcgggctcgacatcggcaaggtgtgggtcgcggacgacggcgccgcggtggcggtctggaccacgccggagagcgtcgaagcgggggcggtgttcgccgagatcggcccgcgcatggccgagttgagcggttcccggctggccgcgcagcaacagatggaaggcctcctggcgccgcaccggcccaaggagcccgcgtggttcctggccaccgtcggcgtctcgcccgaccaccagggcaagggtctgggcagcgccgtcgtgctccccggagtggaggcggccgagcgcgccggggtgcccgccttcctggagacctccgcgccccgcaacctccccttctacgagcggctcggcttcaccgtcaccgccgacgtcgaggtgcccgaaggaccgcgcacctggtgcatgacccgcaagcccggtgcctga

SEQ ID NO: 5682 - DNA, 2628 bp, synthetic construct
  source 1..2628: mol_type = other DNA
atggccttaccagtgaccgccttgctcctgccgctggccttgctgctccacgccgccaggccgctcgaggaggcctctacaaagggaccctccgtgtttcctctggctcccagcagcaagtctacaagcggaggaacagccgctctgggctgcctggtcaaggattactttcccgagcctgtgaccgtgtcctggaatagcggagcactgacaagcggcgtgcacacctttccagccgtgctgcaaagcagcggcctgtactctctgagcagcgtggtcacagtgcctagctctagcctgggcacccagacctacatctgcaatgtgaaccacaagcctagcaacaccaaggtggacaagagagtggaacccaagagctgtatccccgaggacacattcttcccaagccccgagagcagctgcgacgtgaagctggtggaaaagagcttcgagacagacaccaacctgaacttccagaacctgagcgtgatcggcttcagaatcctgctgctgaaagtggccggctttaacctgctgatgaccctgcggctgtggtccagcagggccaagcgatctggatctggagcaacaaacttctcactactcaaacaagcaggtgacgtggaggagaatcccgggcctactagcatggccttaccagtgaccgccttgctcctgccgctggccttgctgctccacgccgccaggccggacatccagttgacccagtcccccagctcactcagcgccagtgtgggggaccgggtgaccattacctgtaaagccagtcagagtgtggactatgacggggatagcttcctgaattggtatcagcagaagcctggcaaagccccaaagctgctgatctacgctgcatctaatctggagtcaggcgtgccttccaggttctccggtagtgggtctgggaccgatttcacattgaccatttcatccctccaacccgaggatttcgctacatattactgtcagcagtccaatgaggaccctctcacctttggccagggcaccaaagttgaaattaagagaggcggaggcggaagtggaggcggaggatctggcggcggaggctctgaagtccaacttgtggagtctggagggggcctggtgcagcccggcggctctctcagactgtcttgtgcggcaagcggctacaccttcacctcttactggatagaatgggtgaggcaggcacctggaaagggactggagtggattggagagattctgccaggagggggagatacaaattacaatgaaatcttcaaggggcgggccaccttttcagcggataccagcaagaatacagcttacctgcagatgaatagcctccgggcagaagataccgctgtttattattgcacgagacgggtgccaataagactggactattgggggcaagggactcttgtcaccgtcagttcaacgcgtggacagcctaaggccaatcctaccgtgacactgttccctccaagcagcgaagaactccaggccaacaaggccacacttgtgtgcctgatctccgacttctaccctggggctgtgacagtggcttggaaggccgatggatctcctgtgaaagccggcgtggaaaccaccaagccatccaagcagagcaacaacaaatacgccgccagctcctacctgagcctgacacctgagcagtggaagtcccacagatcctacagctgccaagtgacccacgaaggcagcaccgtggaaaagacagtggcccctacagagtgcagcggcagagccgattgcggctttaccagcgagagctaccagcagggcgtgctgagcgccaccatcctgtacgagatcctgctgggcaaggccaccctgtacgccgtgctggtgtctgccctggtgctgatggctatggtcaagcggaaggacagccggggacgcgccaagagaagcggatctggcgtgaagcagaccctgaatttcgacctgctgaagctggctggcgacgtggaatccaacccaggcccttctagaggccatatgaccgagtacaagcccacggtgcgcctcgccacccgcgacgacgtccccagggccgtacgcaccctcgccgccgcgttcgccgactaccccgccacgcgccacaccgtcgatccggaccgccacatcgagcgggtcaccgagctgcaagaactcttcctcacgcgcgtcgggctcgacatcggcaaggtgtgggtcgcggacgacggcgccgcggtggcggtctggaccacgccggagagcgtcgaagcgggggcggtgttcgccgagatcggcccgcgcatggccgagttgagcggttcccggctggccgcgcagcaacagatggaaggcctcctggcgccgcaccggcccaaggagcccgcgtggttcctggccaccgtcggcgtctcgcccgaccaccagggcaagggtctgggcagcgccgtcgtgctccccggagtggaggcggccgagcgcgccggggtgcccgccttcctggagacctccgcgccccgcaacctccccttctacgagcggctcggcttcaccgtcaccgccgacgtcgaggtgcccgaaggaccgcgcacctggtgcatgacccgcaagcccggtgcctga

SEQ ID NO: 5683 - DNA, 1863 bp, synthetic construct
  source 1..1863: mol_type = other DNA
atggccttaccagtgaccgccttgctcctgccgctggccttgctgctccacgccgccaggccggacatccagttgacccagtcccccagctcactcagcgccagtgtgggggaccgggtgaccattacctgtaaagccagtcagagtgtggactatgacggggatagcttcctgaattggtatcagcagaagcctggcaaagccccaaagctgctgatctacgctgcatctaatctggagtcaggcgtgccttccaggttctccggtagtgggtctgggaccgatttcacattgaccatttcatccctccaacccgaggatttcgctacatattactgtcagcagtccaatgaggaccctctcacctttggccagggcaccaaagttgaaattaagagactcgaggacctgaagaacgtgttcccacctgaggtggccgtgttcgagcctagcgaggccgagatcagccacacccagaaagccaccctcgtgtgcctggctaccggcttctaccccgaccatgtggaactgtcttggtgggtcaacggcaaagaggtgcacagcggcgtgtgtaccgacccccagccactgaaagaacagcccgccctgaacgacagccggtactgcctgagcagcagactgagagtgtccgccaccttctggcagaacccccggaaccacttcagatgccaggtgcagttctacggcctgagcgagaacgacgagtggacccaggacagagccaagcccgtgacccagatcgtgtctgccgaagcctggggcagagccgatagcggctttaccagcgagagctaccagcagggcgtgctgagcgccaccatcctgtacgagatcctgctgggcaaggccaccctgtacgccgtgctggtgtctgccctggtgctgatggctatggtcaagcggaaggacagccggggaagggccaagcgatctggatctggagcaacaaacttctcactactcaaacaagcaggtgacgtggaggagaatcccgggcctactagtatggactggatttggcgcatccttttccttgtcggcgctgctaccggcgcgcattccttcgaagtccaacttgtggagtctggagggggcctggtgcagcccggcggctctctcagactgtcttgtgcggcaagcggctacaccttcacctcttactggatagaatgggtgaggcaggcacctggaaagggactggagtggattggagagattctgccaggagggggagatacaaattacaatgaaatcttcaaggggcgggccaccttttcagcggataccagcaagaatacagcttacctgcagatgaatagcctccgggcagaagataccgctgtttattattgcacgagacgggtgccaataagactggactattgggggcaagggactcttgtcaccgtcagttcaacgcgtatccagaaccctgatcctgccgtgtaccagctgcgggatagcaagagcagcgacaagagcgtgtgtctgttcaccgacttcgacagccagaccaacgtgtcccagagcaaggactccgacgtgtacatcaccgataagtgcgtgctggacatgcggagcatggacttcaagagcaactccgccgtggcctggtccaacaagtccgatttcgcctgcgccaacgccttcaacaacagcattatccccgaggacacattcttcccaagccccgagagcagcagcgacgtgaagctggtggaaaagagcttcgagacagacaccaacctgaacttccagaacctgagcgtgatcggcttcagaatcctgctgctgaaagtggccggctttaacctgctgatgaccctgcggctgtggtccagc

SEQ ID NO: 5684 - DNA, 2703 bp, synthetic construct
  source 1..2703: mol_type = other DNA
atggccttaccagtgaccgccttgctcctgccgctggccttgctgctccacgccgccaggccggaggttcagctgcttgagtctggcggaggactggttcaacctggcggaagcctgagactgtcttgtgccgcctctggcagaaccttcagcatgggctggtatagacaggcccctggcaagggcctcgaatttgtgtctgccatcacatacagcggcggcagcccttactacgccgattctgtgaagggcagattcaccatcagccgggacaacagcaagaacaccgtgtacctccagatgaacagcctgagagccgaggacaccgccgtgtactactgtgccgccaatccaacctacggcagcgactggaatgccgagaattggggccagggcacactggtcacagtgtctagtggtaccggcggaggcggatctggcggcggaggtagcggtggcggaggatctgaattcgacatccagttgacccagtcccccagctcactcagcgccagtgtgggggaccgggtgaccattacctgtaaagccagtcagagtgtggactatgacggggatagcttcctgaattggtatcagcagaagcctggcaaagccccaaagctgctgatctacgctgcatctaatctggagtcaggcgtgccttccaggttctccggtagtgggtctgggaccgatttcacattgaccatttcatccctccaacccgaggatttcgctacatattactgtcagcagtccaatgaggaccctctcacctttggccagggcaccaaagttgaaattaagagactcgagatccagaaccctgatcctgccgtgtaccagctgcgggatagcaagagcagcgacaagagcgtgtgtctgttcaccgacttcgacagccagaccaacgtgtcccagagcaaggactccgacgtgtacatcaccgataagtgcgtgctggacatgcggagcatggacttcaagagcaactccgccgtggcctggtccaacaagtccgatttcgcctgcgccaacgccttcaacaacagcattatccccgaggacacattcttcccaagcagcgacgtgccctgcgacgtgaagctggtggaaaagagcttcgagacagacaccaacctgaacttccagaacctgagcgtgatcggcttcagaatcctgctgctgaaagtggccggctttaacctgctgatgaccctgcggctgtggtccagccgcgccaagagaagcggatctggcgtgaagcagaccctgaatttcgacctgctgaagctggctggcgacgtggaatccaacccaggccctactagtaccatggactggatttggcgcatccttttccttgtcggcgctgctaccggcacccattccgggcccgaagtgcaactggttgaatccggtggcggcctggtgcaacccggcggatctctcagacttagctgtgccgcctccggcagaaccttcacaatgggatggtacaggcaggctccagggaaagagagagagttcgtcgccgccatctctctgtctcccacactggcctactacgccgactctgtgaaaggccggttcaccatctccagagataatagcaagaacaccgtggtgctgcaaatgaactctctgagagccgaggatacagccctgtactattgtgccgctgaccggaagtccgtgatgagcatcagacccgattactggggacagggcacactggtcacagtgtctagtggatccggcggcggaggatctggcggaggcggatctgggggcggaggctctttcgaagtccaacttgtggagtctggagggggcctggtgcagcccggcggctctctcagactgtcttgtgcggcaagcggctacaccttcacctcttactggatagaatgggtgaggcaggcacctggaaagggactggagtggattggagagattctgccaggagggggagatacaaattacaatgaaatcttcaaggggcgggccaccttttcagcggataccagcaagaatacagcttacctgcagatgaatagcctccgggcagaagataccgctgtttattattgcacgagacgggtgccaataagactggactattgggggcaagggactcttgtcaccgtcagttcaacgcgtgaggacctgaagaacgtgttcccacctgaggtggccgtgttcgagcctagcaaggccgagatcgcccacacccagaaagccaccctcgtgtgcctggctaccggcttctaccccgaccatgtggaactgtcttggtgggtcaacggcaaagaggtgcacagcggcgtgtgtaccgacccccagccactgaaagaacagcccgccctgaacgacagccggtactgcctgagcagcagactgagagtgtccgccaccttctggcagaacccccggaaccacttcagatgccaggtgcagttctacggcctgagcgagaacgacgagtggacccaggacagagccaagcccgtgacccagatcgtgtctgccgaagcctggggcagagccgattgcggcatcaccagcgccagctaccaccagggcgtgctgagcgccaccatcctgtacgagatcctgctgggcaaggccaccctgtacgccgtgctggtgtctgccctggtgctgatggctatggtcaagcggaaggacagccggggataa

SEQ ID NO: 5685 - DNA, 2703 bp, synthetic construct
  source 1..2703: mol_type = other DNA
atggccttaccagtgaccgccttgctcctgccgctggccttgctgctccacgccgccaggccggaagtgcagctggttgaatctggcggaggactggttcaggctggcggatctctgagactgtcttgtgccgccagcggcagaacctttagcatgggctggtttagacaggcccctggcaaagagagagagttcgtcgccgccatcacatactctggcggcagcccttactacgccgactctgtgaagggcagattcaccatcagccgggacaacgccaagaacaccgtgtacctccagatgaacagcctgaagcctgaggacaccgccgtgtactactgcgccgccaatccaacatacggcagcgactggaacgccgagaattggggccagggaacccaagtgacagtgtctagcggtaccggcggaggcggatctggcggcggaggtagcggtggcggaggatctgaattcgacatccagttgacccagtcccccagctcactcagcgccagtgtgggggaccgggtgaccattacctgtaaagccagtcagagtgtggactatgacggggatagcttcctgaattggtatcagcagaagcctggcaaagccccaaagctgctgatctacgctgcatctaatctggagtcaggcgtgccttccaggttctccggtagtgggtctgggaccgatttcacattgaccatttcatccctccaacccgaggatttcgctacatattactgtcagcagtccaatgaggaccctctcacctttggccagggcaccaaagttgaaattaagagactcgagatccagaaccctgatcctgccgtgtaccagctgcgggatagcaagagcagcgacaagagcgtgtgtctgttcaccgacttcgacagccagaccaacgtgtcccagagcaaggactccgacgtgtacatcaccgataagtgcgtgctggacatgcggagcatggacttcaagagcaactccgccgtggcctggtccaacaagtccgatttcgcctgcgccaacgccttcaacaacagcattatccccgaggacacattcttcccaagcagcgacgtgccctgcgacgtgaagctggtggaaaagagcttcgagacagacaccaacctgaacttccagaacctgagcgtgatcggcttcagaatcctgctgctgaaagtggccggctttaacctgctgatgaccctgcggctgtggtccagccgcgccaagagaagcggatctggcgtgaagcagaccctgaatttcgacctgctgaagctggctggcgacgtggaatccaacccaggccctactagtaccatggactggatttggcgcatccttttccttgtcggcgctgctaccggcgcccattccgggcccgaagtgcaactggttgaatccggtggcggcctggtgcaacccggcggatctctcagacttagctgtgccgcctccggcagaaccttcacaatgggatggtacaggcaggctccagggaaagagagagagttcgtcgccgccatctctctgtctcccacactggcctactacgccgactctgtgaaaggccggttcaccatctccagagataatagcaagaacaccgtggtgctgcaaatgaactctctgagagccgaggatacagccctgtactattgtgccgctgaccggaagtccgtgatgagcatcagacccgattactggggacagggcacactggtcacagtgtctagtggatccggcggcggaggatctggcggaggcggatctgggggcggaggctctttcgaagtccaacttgtggagtctggagggggcctggtgcagcccggcggctctctcagactgtcttgtgcggcaagcggctacaccttcacctcttactggatagaatgggtgaggcaggcacctggaaagggactggagtggattggagagattctgccaggagggggagatacaaattacaatgaaatcttcaaggggcgggccaccttttcagcggataccagcaagaatacagcttacctgcagatgaatagcctccgggcagaagataccgctgtttattattgcacgagacgggtgccaataagactggactattgggggcaagggactcttgtcaccgtcagttcaacgcgtgaggacctgaagaacgtgttcccacctgaggtggccgtgttcgagcctagcaaggccgagatcgcccacacccagaaagccaccctcgtgtgcctggctaccggcttctaccccgaccatgtggaactgtcttggtgggtcaacggcaaagaggtgcacagcggcgtgtgtaccgacccccagccactgaaagaacagcccgccctgaacgacagccggtactgcctgagcagcagactgagagtgtccgccaccttctggcagaacccccggaaccacttcagatgccaggtgcagttctacggcctgagcgagaacgacgagtggacccaggacagagccaagcccgtgacccagatcgtgtctgccgaagcctggggcagagccgattgcggcatcaccagcgccagctaccaccagggcgtgctgagcgccaccatcctgtacgagatcctgctgggcaaggccaccctgtacgccgtgctggtgtctgccctggtgctgatggctatggtcaagcggaaggacagccggggataa

SEQ ID NO: 5686 - DNA, 2694 bp, synthetic construct
  source 1..2694: mol_type = other DNA
atggccttaccagtgaccgccttgctcctgccgctggccttgctgctccacgccgccaggccggaagtgcagctggttgaatctggcggaggactggttcaggctggcggatctctgagactgtcttgtgccgccagcggcagaacctttagcatgggctggtttagacaggcccctggcaaagagagagagttcgtcgccgccatcacatactctggcggcagcccttactacgccgactctgtgaagggcagattcaccatcagccgggacaacgccaagaacaccgtgtacctccagatgaacagcctgaagcctgaggacaccgccgtgtactactgcgccgccaatccaacatacggcagcgactggaacgccgagaattggggccagggaacccaagtgacagtgtctagcggtaccggcggaggcggatctggcggcggaggtagcggtggcggaggatctgaattcgacatccagttgacccagtcccccagctcactcagcgccagtgtgggggaccgggtgaccattacctgtaaagccagtcagagtgtggactatgacggggatagcttcctgaattggtatcagcagaagcctggcaaagccccaaagctgctgatctacgctgcatctaatctggagtcaggcgtgccttccaggttctccggtagtgggtctgggaccgatttcacattgaccatttcatccctccaacccgaggatttcgctacatattactgtcagcagtccaatgaggaccctctcacctttggccagggcaccaaagttgaaattaagagactcgaggacctgaagaacgtgttcccacctgaggtggccgtgttcgagcctagcgaggccgagatcagccacacccagaaagccaccctcgtgtgcctggctaccggcttctaccccgaccatgtggaactgtcttggtgggtcaacggcaaagaggtgcacagcggcgtgtgtaccgacccccagccactgaaagaacagcccgccctgaacgacagccggtactgcctgagcagcagactgagagtgtccgccaccttctggcagaacccccggaaccacttcagatgccaggtgcagttctacggcctgagcgagaacgacgagtggacccaggacagagccaagcccgtgacccagatcgtgtctgccgaagcctggggcagagccgattgcggctttaccagcgagagctaccagcagggcgtgctgagcgccaccatcctgtacgagatcctgctgggcaaggccaccctgtacgccgtgctggtgtctgccctggtgctgatggctatggtcaagcggaaggacagccggggaagggccaagcgatctggatctggagcaacaaacttctcactactcaaacaagcaggtgacgtggaggagaatcccgggcctactagtgccaccatggactggatttggcgcatccttttccttgtcggcgctgctaccggcgcccattccgggcccgaagtgcaactggttgaatccggtggcggcctggtgcaagcaggcggatctctcagacttagctgtgccgcctccggcagaaccttcacaatgggatggtttaggcaggctccagggaaagagagagagttcgtcgccgccatctctctgtctcccacactggcctactacgccgactctgtgaaaggccggttcaccatctccagagataatgccaagaacaccgtggtgctgcaaatgaactctctgaaacccgaggatacagccctgtactattgtgccgctgaccggaagtccgtgatgagcatcagacccgattactggggacagggcacacaagtcacagtgtcctctggatccggcggcggaggatctggcggaggcggatctgggggcggaggctctttcgaagtccaacttgtggagtctggagggggcctggtgcagcccggcggctctctcagactgtcttgtgcggcaagcggctacaccttcacctcttactggatagaatgggtgaggcaggcacctggaaagggactggagtggattggagagattctgccaggagggggagatacaaattacaatgaaatcttcaaggggcgggccaccttttcagcggataccagcaagaatacagcttacctgcagatgaatagcctccgggcagaagataccgctgtttattattgcacgagacgggtgccaataagactggactattgggggcaagggactcttgtcaccgtcagttcaacgcgtatccagaaccctgatcctgccgtgtaccagctgcgggatagcaagagcagcgacaagagcgtgtgtctgttcaccgacttcgacagccagaccaacgtgtcccagagcaaggactccgacgtgtacatcaccgataagtgcgtgctggacatgcggagcatggacttcaagagcaactccgccgtggcctggtccaacaagtccgatttcgcctgcgccaacgccttcaacaacagcattatccccgaggacacattcttcccaagccccgagagcagctgcgacgtgaagctggtggaaaagagcttcgagacagacaccaacctgaacttccagaacctgagcgtgatcggcttcagaatcctgctgctgaaagtggccggctttaacctgctgatgaccctgcggctgtggtccagctaa

SEQ ID NO: 5687 - DNA, 2307 bp, synthetic construct
  source 1..2307: mol_type = other DNA
atggccttaccagtgaccgccttgctcctgccgctggccttgctgctccacgccgccaggccggaagtgcagctggttgaatctggcggaggactggttcagcctggcggatctctgagactgagctgtgaagccagcggcttcgccagcgacgattacatcatcggctggttcagacaggcccctggcaaagagagagagggcgtcagctgcatcagctctaagtacgccaacaccgtgtacaccgacagcgtgaagggcagattcagactgagcagaggcaccgccaagaataccgtgtacctccagatgagcgccctgaagcctgaggataccgccgtgtactactgcgctatggacagccgcagagtgacatgccctgagatcagcaccatgcaccggaacttcgattcttggggccagggcacactggtcacagtgtcatctggtaccggcggaggcggatctggcggcggaggtagcggtggcggaggatctgaattcgacatccagttgacccagtcccccagctcactcagcgccagtgtgggggaccgggtgaccattacctgtaaagccagtcagagtgtggactatgacggggatagcttcctgaattggtatcagcagaagcctggcaaagccccaaagctgctgatctacgctgcatctaatctggagtcaggcgtgccttccaggttctccggtagtgggtctgggaccgatttcacattgaccatttcatccctccaacccgaggatttcgctacatattactgtcagcagtccaatgaggaccctctcacctttggccagggcaccaaagttgaaattaagagactcgaggacctgaagaacgtgttcccacctgaggtggccgtgttcgagcctagcaaggccgagatcgcccacacccagaaagccaccctcgtgtgcctggctaccggcttctaccccgaccatgtggaactgtcttggtgggtcaacggcaaagaggtgcacagcggcgtgtgtaccgacccccagccactgaaagaacagcccgccctgaacgacagccggtactgcctgagcagcagactgagagtgtccgccaccttctggcagaacccccggaaccacttcagatgccaggtgcagttctacggcctgagcgagaacgacgagtggacccaggacagagccaagcccgtgacccagatcgtgtctgccgaagcctggggcagagccgattgcggcatcaccagcgccagctaccaccagggcgtgctgagcgccaccatcctgtacgagatcctgctgggcaaggccaccctgtacgccgtgctggtgtctgccctggtgctgatggctatggtcaagcggaaggacagccggggaagggccaagcgatctggatctggagcaacaaacttctcactactcaaacaagcaggtgacgtggaggagaatcccgggcctactagtatggactggatttggcgcatccttttccttgtcggcgctgctaccggcgcgcattccttcgaagtccaacttgtggagtctggagggggcctggtgcagcccggcggctctctcagactgtcttgtgcggcaagcggctacaccttcacctcttactggatagaatgggtgaggcaggcacctggaaagggactggagtggattggagagattctgccaggagggggagatacaaattacaatgaaatcttcaaggggcgggccaccttttcagcggataccagcaagaatacagcttacctgcagatgaatagcctccgggcagaagataccgctgtttattattgcacgagacgggtgccaataagactggactattgggggcaagggactcttgtcaccgtcagttcaacgcgtatccagaaccctgatcctgccgtgtaccagctgcgggatagcaagagcagcgacaagagcgtgtgtctgttcaccgacttcgacagccagaccaacgtgtcccagagcaaggactccgacgtgtacatcaccgataagtgcgtgctggacatgcggagcatggacttcaagagcaactccgccgtggcctggtccaacaagtccgatttcgcctgcgccaacgccttcaacaacagcattatccccgaggacacattcttcccaagcagcgacgtgccctgcgacgtgaagctggtggaaaagagcttcgagacagacaccaacctgaacttccagaacctgagcgtgatcggcttcagaatcctgctgctgaaagtggccggctttaacctgctgatgaccctgcggctgtggtccagctaa

SEQ ID NO: 5688 - DNA, 2280 bp, synthetic construct
  source 1..2280: mol_type = other DNA
atggccttaccagtgaccgccttgctcctgccgctggccttgctgctccacgccgccaggccggacatccagttgacccagtcccccagctcactcagcgccagtgtgggggaccgggtgaccattacctgtaaagccagtcagagtgtggactatgacggggatagcttcctgaattggtatcagcagaagcctggcaaagccccaaagctgctgatctacgctgcatctaatctggagtcaggcgtgccttccaggttctccggtagtgggtctgggaccgatttcacattgaccatttcatccctccaacccgaggatttcgctacatattactgtcagcagtccaatgaggaccctctcacctttggccagggcaccaaagttgaaattaagagactcgaggacctgaagaacgtgttcccacctgaggtggccgtgttcgagcctagcgaggccgagatcagccacacccagaaagccaccctcgtgtgcctggctaccggcttctaccccgaccatgtggaactgtcttggtgggtcaacggcaaagaggtgcacagcggcgtgtgtaccgacccccagccactgaaagaacagcccgccctgaacgacagccggtactgcctgagcagcagactgagagtgtccgccaccttctggcagaacccccggaaccacttcagatgccaggtgcagttctacggcctgagcgagaacgacgagtggacccaggacagagccaagcccgtgacccagatcgtgtctgccgaagcctggggcagagccgattgcggctttaccagcgagagctaccagcagggcgtgctgagcgccaccatcctgtacgagatcctgctgggcaaggccaccctgtacgccgtgctggtgtctgccctggtgctgatggctatggtcaagcggaaggacagccggggaagggccaagcgatctggatctggagcaacaaacttctcactactcaaacaagcaggtgacgtggaggagaatcccgggcctactagtaccatggactggatttggcgcatccttttccttgtcggcgctgctaccggcgcccattccgggcccgaagtgcaactggttgaatccggtggcggcctggtgcaacccggcggatctctcagacttagctgtgccgcctccggcagaaccttcacaatgggatggtacaggcaggctccagggaaagagagagagttcgtcgccgccatctctctgtctcccacactggcctactacgccgactctgtgaaaggccggttcaccatctccagagataatagcaagaacaccgtggtgctgcaaatgaactctctgagagccgaggatacagccctgtactattgtgccgctgaccggaagtccgtgatgagcatcagacccgattactggggacagggcacactggtcacagtgtctagtggatccggcggcggaggatctggcggaggcggatctgggggcggaggctctttcgaagtccaacttgtggagtctggagggggcctggtgcagcccggcggctctctcagactgtcttgtgcggcaagcggctacaccttcacctcttactggatagaatgggtgaggcaggcacctggaaagggactggagtggattggagagattctgccaggagggggagatacaaattacaatgaaatcttcaaggggcgggccaccttttcagcggataccagcaagaatacagcttacctgcagatgaatagcctccgggcagaagataccgctgtttattattgcacgagacgggtgccaataagactggactattgggggcaagggactcttgtcaccgtcagttcaacgcgtatccagaaccctgatcctgccgtgtaccagctgcgggatagcaagagcagcgacaagagcgtgtgtctgttcaccgacttcgacagccagaccaacgtgtcccagagcaaggactccgacgtgtacatcaccgataagtgcgtgctggacatgcggagcatggacttcaagagcaactccgccgtggcctggtccaacaagtccgatttcgcctgcgccaacgccttcaacaacagcattatccccgaggacacattcttcccaagccccgagagcagctgcgacgtgaagctggtggaaaagagcttcgagacagacaccaacctgaacttccagaacctgagcgtgatcggcttcagaatcctgctgctgaaagtggccggctttaacctgctgatgaccctgcggctgtggtccagctaa

SEQ ID NO: 5689 - DNA, 2298 bp, synthetic construct
  source 1..2298: mol_type = other DNA
atggccttaccagtgaccgccttgctcctgccgctggccttgctgctccacgccgccaggccggacatccagttgacccagtcccccagctcactcagcgccagtgtgggggaccgggtgaccattacctgtaaagccagtcagagtgtggactatgacggggatagcttcctgaattggtatcagcagaagcctggcaaagccccaaagctgctgatctacgctgcatctaatctggagtcaggcgtgccttccaggttctccggtagtgggtctgggaccgatttcacattgaccatttcatccctccaacccgaggatttcgctacatattactgtcagcagtccaatgaggaccctctcacctttggccagggcaccaaagttgaaattaagagactcgaggacctgaagaacgtgttcccacctgaggtggccgtgttcgagcctagcgaggccgagatcagccacacccagaaagccaccctcgtgtgcctggctaccggcttctaccccgaccatgtggaactgtcttggtgggtcaacggcaaagaggtgcacagcggcgtgtgtaccgacccccagccactgaaagaacagcccgccctgaacgacagccggtactgcctgagcagcagactgagagtgtccgccaccttctggcagaacccccggaaccacttcagatgccaggtgcagttctacggcctgagcgagaacgacgagtggacccaggacagagccaagcccgtgacccagatcgtgtctgccgaagcctggggcagagccgattgcggctttaccagcgagagctaccagcagggcgtgctgagcgccaccatcctgtacgagatcctgctgggcaaggccaccctgtacgccgtgctggtgtctgccctggtgctgatggctatggtcaagcggaaggacagccggggaagggccaagcgatctggatctggagcaacaaacttctcactactcaaacaagcaggtgacgtggaggagaatcccgggcctactagtaccatggactggatttggcgcatccttttccttgtcggcgctgctaccggcgcccattccgggccccaggtgcagctggttgaatctggcggaggactggttcagcctggcggatctctgagactgtcttgtgccgccagcggcaacatcaacagcagaaactgcatgggctggttcagacaggcccctggcaagggaagagaaggcgtggcagctatcggccaagtgaccggcagaacctactacgtggacagcgtgaagggcagattcaccatcagcctggacaacagcaagaacaccctgtacctccagatgaacagcctgagagccgaggacaccgccgtgtactattgtgctgctgcccctggctgtctgctgtctgcacttagaagcgccgactacagaaactggggccagggcacactggtcaccgtttcttctggatccggcggcggaggatctggcggaggcggatctgggggcggaggctctttcgaagtccaacttgtggagtctggagggggcctggtgcagcccggcggctctctcagactgtcttgtgcggcaagcggctacaccttcacctcttactggatagaatgggtgaggcaggcacctggaaagggactggagtggattggagagattctgccaggagggggagatacaaattacaatgaaatcttcaaggggcgggccaccttttcagcggataccagcaagaatacagcttacctgcagatgaatagcctccgggcagaagataccgctgtttattattgcacgagacgggtgccaataagactggactattgggggcaagggactcttgtcaccgtcagttcaacgcgtatccagaaccctgatcctgccgtgtaccagctgcgggatagcaagagcagcgacaagagcgtgtgtctgttcaccgacttcgacagccagaccaacgtgtcccagagcaaggactccgacgtgtacatcaccgataagtgcgtgctggacatgcggagcatggacttcaagagcaactccgccgtggcctggtccaacaagtccgatttcgcctgcgccaacgccttcaacaacagcattatccccgaggacacattcttcccaagccccgagagcagctgcgacgtgaagctggtggaaaagagcttcgagacagacaccaacctgaacttccagaacctgagcgtgatcggcttcagaatcctgctgctgaaagtggccggctttaacctgctgatgaccctgcggctgtggtccagc

SEQ ID NO: 5690 - DNA, 2301 bp, synthetic construct
  source 1..2301: mol_type = other DNA
atggccttaccagtgaccgccttgctcctgccgctggccttgctgctccacgccgccaggccggacatccagttgacccagtcccccagctcactcagcgccagtgtgggggaccgggtgaccattacctgtaaagccagtcagagtgtggactatgacggggatagcttcctgaattggtatcagcagaagcctggcaaagccccaaagctgctgatctacgctgcatctaatctggagtcaggcgtgccttccaggttctccggtagtgggtctgggaccgatttcacattgaccatttcatccctccaacccgaggatttcgctacatattactgtcagcagtccaatgaggaccctctcacctttggccagggcaccaaagttgaaattaagagactcgaggacctgaagaacgtgttcccacctgaggtggccgtgttcgagcctagcgaggccgagatcagccacacccagaaagccaccctcgtgtgcctggctaccggcttctaccccgaccatgtggaactgtcttggtgggtcaacggcaaagaggtgcacagcggcgtgtgtaccgacccccagccactgaaagaacagcccgccctgaacgacagccggtactgcctgagcagcagactgagagtgtccgccaccttctggcagaacccccggaaccacttcagatgccaggtgcagttctacggcctgagcgagaacgacgagtggacccaggacagagccaagcccgtgacccagatcgtgtctgccgaagcctggggcagagccgattgcggctttaccagcgagagctaccagcagggcgtgctgagcgccaccatcctgtacgagatcctgctgggcaaggccaccctgtacgccgtgctggtgtctgccctggtgctgatggctatggtcaagcggaaggacagccggggaagggccaagcgatctggatctggagcaacaaacttctcactactcaaacaagcaggtgacgtggaggagaatcccgggcctactagtaccatggactggatttggcgcatccttttccttgtcggcgctgctaccggcgcccattccgggccccaggtgcagctggttgaatctggcggaggatctgttcaggctggcggctctctgagactgtcttgtggcgcttccggcaacatcagcagcagaaactgcatgggctggttcagacaggcccctggcaaagagagagaaggcgttgccgccatcggacaagtgaccggcagatcctactacgtggacagcgtgaagggcagattcaccatcagcctggacaacgccaagaacaccctgtacctccagatgaacacactgaagcccgaggacaccgccatgtactactgtgctgctgcccctggctgtctgctgtctgcacttagaagcgccgactacagaaactggggccagggaacccaagtgacagtgtctagtggatccggcggcggaggatctggcggaggcggatctgggggcggaggctctttcgaagtccaacttgtggagtctggagggggcctggtgcagcccggcggctctctcagactgtcttgtgcggcaagcggctacaccttcacctcttactggatagaatgggtgaggcaggcacctggaaagggactggagtggattggagagattctgccaggagggggagatacaaattacaatgaaatcttcaaggggcgggccaccttttcagcggataccagcaagaatacagcttacctgcagatgaatagcctccgggcagaagataccgctgtttattattgcacgagacgggtgccaataagactggactattgggggcaagggactcttgtcaccgtcagttcaacgcgtatccagaaccctgatcctgccgtgtaccagctgcgggatagcaagagcagcgacaagagcgtgtgtctgttcaccgacttcgacagccagaccaacgtgtcccagagcaaggactccgacgtgtacatcaccgataagtgcgtgctggacatgcggagcatggacttcaagagcaactccgccgtggcctggtccaacaagtccgatttcgcctgcgccaacgccttcaacaacagcattatccccgaggacacattcttcccaagccccgagagcagctgcgacgtgaagctggtggaaaagagcttcgagacagacaccaacctgaacttccagaacctgagcgtgatcggcttcagaatcctgctgctgaaagtggccggctttaacctgctgatgaccctgcggctgtggtccagctaa

SEQ ID NO: 5691 - DNA, 2724 bp, synthetic construct
  source 1..2724: mol_type = other DNA
atggccttaccagtgaccgccttgctcctgccgctggccttgctgctccacgccgccaggccggaagtgcagctggttgaatctggcggaggactggttcaggctggcggatctctgagactgtcttgtgccgccagcggcagaacctttagcatgggctggtttagacaggcccctggcaaagagagagagttcgtcgccgccatcacatactctggcggcagcccttactacgccgactctgtgaagggcagattcaccatcagccgggacaacgccaagaacaccgtgtacctccagatgaacagcctgaagcctgaggacaccgccgtgtactactgcgccgccaatccaacatacggcagcgactggaacgccgagaattggggccagggaacccaagtgacagtgtctagcggtaccggcggaggcggatctggcggcggaggtagcggtggcggaggatctgaattcgacatccagttgacccagtcccccagctcactcagcgccagtgtgggggaccgggtgaccattacctgtaaagccagtcagagtgtggactatgacggggatagcttcctgaattggtatcagcagaagcctggcaaagccccaaagctgctgatctacgctgcatctaatctggagtcaggcgtgccttccaggttctccggtagtgggtctgggaccgatttcacattgaccatttcatccctccaacccgaggatttcgctacatattactgtcagcagtccaatgaggaccctctcacctttggccagggcaccaaagttgaaattaagagactcgagatccagaaccctgatcctgccgtgtaccagctgcgggatagcaagagcagcgacaagagcgtgtgtctgttcaccgacttcgacagccagaccaacgtgtcccagagcaaggactccgacgtgtacatcaccgataagtgcgtgctggacatgcggagcatggacttcaagagcaactccgccgtggcctggtccaacaagtccgatttcgcctgcgccaacgccttcaacaacagcattatccccgaggacacattcttcccaagcagcgacgtgccctgcgacgtgaagctggtggaaaagagcttcgagacagacaccaacctgaacttccagaacctgagcgtgatcggcttcagaatcctgctgctgaaagtggccggctttaacctgctgatgaccctgcggctgtggtccagccgcgccaagagaagcggatctggcgtgaagcagaccctgaatttcgacctgctgaagctggctggcgacgtggaatccaacccaggccctactagtaccatggactggatttggcgcatccttttccttgtcggcgctgctaccggcgcccattccgggccccaggtgcagctggttgaatctggcggaggatctgttcaggctggcggctctctgagactgtcttgtggcgcttccggcaacatcagcagcagaaactgcatgggctggttcagacaggcccctggcaaagagagagaaggcgttgccgccatcggacaagtgaccggcagatcctactacgtggacagcgtgaagggcagattcaccatcagcctggacaacgccaagaacaccctgtacctccagatgaacacactgaagcccgaggacaccgccatgtactactgtgctgctgcccctggctgtctgctgtctgcacttagaagcgccgactacagaaactggggccagggaacccaagtgacagtgtctagtggatccggcggcggaggatctggcggaggcggatctgggggcggaggctctttcgaagtccaacttgtggagtctggagggggcctggtgcagcccggcggctctctcagactgtcttgtgcggcaagcggctacaccttcacctcttactggatagaatgggtgaggcaggcacctggaaagggactggagtggattggagagattctgccaggagggggagatacaaattacaatgaaatcttcaaggggcgggccaccttttcagcggataccagcaagaatacagcttacctgcagatgaatagcctccgggcagaagataccgctgtttattattgcacgagacgggtgccaataagactggactattgggggcaagggactcttgtcaccgtcagttcaacgcgtgaggacctgaagaacgtgttcccacctgaggtggccgtgttcgagcctagcaaggccgagatcgcccacacccagaaagccaccctcgtgtgcctggctaccggcttctaccccgaccatgtggaactgtcttggtgggtcaacggcaaagaggtgcacagcggcgtgtgtaccgacccccagccactgaaagaacagcccgccctgaacgacagccggtactgcctgagcagcagactgagagtgtccgccaccttctggcagaacccccggaaccacttcagatgccaggtgcagttctacggcctgagcgagaacgacgagtggacccaggacagagccaagcccgtgacccagatcgtgtctgccgaagcctggggcagagccgattgcggcatcaccagcgccagctaccaccagggcgtgctgagcgccaccatcctgtacgagatcctgctgggcaaggccaccctgtacgccgtgctggtgtctgccctggtgctgatggctatggtcaagcggaaggacagccggggataa

SEQ ID NO: 5692 - DNA, 2715 bp, synthetic construct
  source 1..2715: mol_type = other DNA
atggccttaccagtgaccgccttgctcctgccgctggccttgctgctccacgccgccaggccgcaggtgcagctggttgaatctggcggaggatctgttcaggctggcggctctctgagactgtcttgtggcgcttccggcaacatcagcagcagaaactgcatgggctggttcagacaggcccctggcaaagagagagaaggcgttgccgccatcggacaagtgaccggcagatcctactacgtggacagcgtgaagggcagattcaccatcagcctggacaacgccaagaacaccctgtacctccagatgaacacactgaagcccgaggacaccgccatgtactactgtgctgctgcccctggctgtctgctgtctgcacttagaagcgccgactacagaaactggggccagggaacccaagtgacagtgtctagtggtaccggcggaggcggatctggcggcggaggtagcggtggcggaggatctgaattcgacatccagttgacccagtcccccagctcactcagcgccagtgtgggggaccgggtgaccattacctgtaaagccagtcagagtgtggactatgacggggatagcttcctgaattggtatcagcagaagcctggcaaagccccaaagctgctgatctacgctgcatctaatctggagtcaggcgtgccttccaggttctccggtagtgggtctgggaccgatttcacattgaccatttcatccctccaacccgaggatttcgctacatattactgtcagcagtccaatgaggaccctctcacctttggccagggcaccaaagttgaaattaagagactcgaggacctgaagaacgtgttcccacctgaggtggccgtgttcgagcctagcgaggccgagatcagccacacccagaaagccaccctcgtgtgcctggctaccggcttctaccccgaccatgtggaactgtcttggtgggtcaacggcaaagaggtgcacagcggcgtgtgtaccgacccccagccactgaaagaacagcccgccctgaacgacagccggtactgcctgagcagcagactgagagtgtccgccaccttctggcagaacccccggaaccacttcagatgccaggtgcagttctacggcctgagcgagaacgacgagtggacccaggacagagccaagcccgtgacccagatcgtgtctgccgaagcctggggcagagccgattgcggctttaccagcgagagctaccagcagggcgtgctgagcgccaccatcctgtacgagatcctgctgggcaaggccaccctgtacgccgtgctggtgtctgccctggtgctgatggctatggtcaagcggaaggacagccggggaagggccaagcgatctggatctggagcaacaaacttctcactactcaaacaagcaggtgacgtggaggagaatcccgggcctactagtgccaccatggactggatttggcgcatccttttccttgtcggcgctgctaccggcgcccattccgggcccgaagtgcaactggttgaatccggtggcggcctggtgcaagcaggcggatctctcagacttagctgtgccgcctccggcagaaccttcacaatgggatggtttaggcaggctccagggaaagagagagagttcgtcgccgccatctctctgtctcccacactggcctactacgccgactctgtgaaaggccggttcaccatctccagagataatgccaagaacaccgtggtgctgcaaatgaactctctgaaacccgaggatacagccctgtactattgtgccgctgaccggaagtccgtgatgagcatcagacccgattactggggacagggcacacaagtcacagtgtcctctggatccggcggcggaggatctggcggaggcggatctgggggcggaggctctttcgaagtccaacttgtggagtctggagggggcctggtgcagcccggcggctctctcagactgtcttgtgcggcaagcggctacaccttcacctcttactggatagaatgggtgaggcaggcacctggaaagggactggagtggattggagagattctgccaggagggggagatacaaattacaatgaaatcttcaaggggcgggccaccttttcagcggataccagcaagaatacagcttacctgcagatgaatagcctccgggcagaagataccgctgtttattattgcacgagacgggtgccaataagactggactattgggggcaagggactcttgtcaccgtcagttcaacgcgtatccagaaccctgatcctgccgtgtaccagctgcgggatagcaagagcagcgacaagagcgtgtgtctgttcaccgacttcgacagccagaccaacgtgtcccagagcaaggactccgacgtgtacatcaccgataagtgcgtgctggacatgcggagcatggacttcaagagcaactccgccgtggcctggtccaacaagtccgatttcgcctgcgccaacgccttcaacaacagcattatccccgaggacacattcttcccaagccccgagagcagctgcgacgtgaagctggtggaaaagagcttcgagacagacaccaacctgaacttccagaacctgagcgtgatcggcttcagaatcctgctgctgaaagtggccggctttaacctgctgatgaccctgcggctgtggtccagctaa

SEQ ID NO: 5693 - DNA, 2304 bp, synthetic construct
  source 1..2304: mol_type = other DNA
atggccttaccagtgaccgccttgctcctgccgctggccttgctgctccacgccgccaggccgcaggtgcagctggttgaatctggcggaggatctgttcaggctggcggctctctgagactgtcttgtggcgcttccggcaacatcagcagcagaaactgcatgggctggttcagacaggcccctggcaaagagagagaaggcgttgccgccatcggacaagtgaccggcagatcctactacgtggacagcgtgaagggcagattcaccatcagcctggacaacgccaagaacaccctgtacctccagatgaacacactgaagcccgaggacaccgccatgtactactgtgctgctgcccctggctgtctgctgtctgcacttagaagcgccgactacagaaactggggccagggaacccaagtgacagtgtctagtggtaccggcggaggcggatctggcggcggaggtagcggtggcggaggatctgaattcgacatccagttgacccagtcccccagctcactcagcgccagtgtgggggaccgggtgaccattacctgtaaagccagtcagagtgtggactatgacggggatagcttcctgaattggtatcagcagaagcctggcaaagccccaaagctgctgatctacgctgcatctaatctggagtcaggcgtgccttccaggttctccggtagtgggtctgggaccgatttcacattgaccatttcatccctccaacccgaggatttcgctacatattactgtcagcagtccaatgaggaccctctcacctttggccagggcaccaaagttgaaattaagagactcgaggacctgaagaacgtgttcccacctgaggtggccgtgttcgagcctagcgaggccgagatcagccacacccagaaagccaccctcgtgtgcctggctaccggcttctaccccgaccatgtggaactgtcttggtgggtcaacggcaaagaggtgcacagcggcgtgtgtaccgacccccagccactgaaagaacagcccgccctgaacgacagccggtactgcctgagcagcagactgagagtgtccgccaccttctggcagaacccccggaaccacttcagatgccaggtgcagttctacggcctgagcgagaacgacgagtggacccaggacagagccaagcccgtgacccagatcgtgtctgccgaagcctggggcagagccgattgcggctttaccagcgagagctaccagcagggcgtgctgagcgccaccatcctgtacgagatcctgctgggcaaggccaccctgtacgccgtgctggtgtctgccctggtgctgatggctatggtcaagcggaaggacagccggggaagggccaagcgatctggatctggagcaacaaacttctcactactcaaacaagcaggtgacgtggaggagaatcccgggcctactagtgccaccatggactggatttggcgcatccttttccttgtcggcgctgctaccggcgcccattccttcgaagtccaacttgtggagtctggagggggcctggtgcagcccggcggctctctcagactgtcttgtgcggcaagcggctacaccttcacctcttactggatagaatgggtgaggcaggcacctggaaagggactggagtggattggagagattctgccaggagggggagatacaaattacaatgaaatcttcaaggggcgggccaccttttcagcggataccagcaagaatacagcttacctgcagatgaatagcctccgggcagaagataccgctgtttattattgcacgagacgggtgccaataagactggactattgggggcaagggactcttgtcaccgtcagttcaacgcgtatccagaaccctgatcctgccgtgtaccagctgcgggatagcaagagcagcgacaagagcgtgtgtctgttcaccgacttcgacagccagaccaacgtgtcccagagcaaggactccgacgtgtacatcaccgataagtgcgtgctggacatgcggagcatggacttcaagagcaactccgccgtggcctggtccaacaagtccgatttcgcctgcgccaacgccttcaacaacagcattatccccgaggacacattcttcccaagccccgagagcagctgcgacgtgaagctggtggaaaagagcttcgagacagacaccaacctgaacttccagaacctgagcgtgatcggcttcagaatcctgctgctgaaagtggccggctttaacctgctgatgaccctgcggctgtggtccagctaa

SEQ ID NO: 5694 - DNA, 2304 bp, synthetic construct
  source 1..2304: mol_type = other DNA
atggccttaccagtgaccgccttgctcctgccgctggccttgctgctccacgccgccaggccgcaagttcagctggtggaaagcggtggtggcgttgtgcaacctggtggaagtctgaggctgagctgtgccgcttctggcctgagctttagcacctacactgtggcctggttcaggcaggctcccggaaagggtcttgaaggcgtggccgccattccttacaccagccagcacatggtgtacacagacagcgtcagaggccggttcaccatcagcagagacaactccaagaatacgctctatctccagatgaactctctgcgcgccgaagatacagccgtgtattactgcgccaccgacagacggcctggcacctctatgctggctatcaacggctacaacagatggggacagggaaccaccgtgaccgtgtcatctggtaccggcggaggcggatctggcggcggaggtagcggtggcggaggatctgaattcgacatccagttgacccagtcccccagctcactcagcgccagtgtgggggaccgggtgaccattacctgtaaagccagtcagagtgtggactatgacggggatagcttcctgaattggtatcagcagaagcctggcaaagccccaaagctgctgatctacgctgcatctaatctggagtcaggcgtgccttccaggttctccggtagtgggtctgggaccgatttcacattgaccatttcatccctccaacccgaggatttcgctacatattactgtcagcagtccaatgaggaccctctcacctttggccagggcaccaaagttgaaattaagagactcgaggacctgaagaacgtgttcccacctgaggtggccgtgttcgagcctagcgaggccgagatcagccacacccagaaagccaccctcgtgtgcctggctaccggcttctaccccgaccatgtggaactgtcttggtgggtcaacggcaaagaggtgcacagcggcgtgtgtaccgacccccagccactgaaagaacagcccgccctgaacgacagccggtactgcctgagcagcagactgagagtgtccgccaccttctggcagaacccccggaaccacttcagatgccaggtgcagttctacggcctgagcgagaacgacgagtggacccaggacagagccaagcccgtgacccagatcgtgtctgccgaagcctggggcagagccgattgcggctttaccagcgagagctaccagcagggcgtgctgagcgccaccatcctgtacgagatcctgctgggcaaggccaccctgtacgccgtgctggtgtctgccctggtgctgatggctatggtcaagcggaaggacagccggggaagggccaagcgatctggatctggagcaacaaacttctcactactcaaacaagcaggtgacgtggaggagaatcccgggcctactagtgccaccatggactggatttggcgcatccttttccttgtcggcgctgctaccggcgcccattccttcgaagtccaacttgtggagtctggagggggcctggtgcagcccggcggctctctcagactgtcttgtgcggcaagcggctacaccttcacctcttactggatagaatgggtgaggcaggcacctggaaagggactggagtggattggagagattctgccaggagggggagatacaaattacaatgaaatcttcaaggggcgggccaccttttcagcggataccagcaagaatacagcttacctgcagatgaatagcctccgggcagaagataccgctgtttattattgcacgagacgggtgccaataagactggactattgggggcaagggactcttgtcaccgtcagttcaacgcgtatccagaaccctgatcctgccgtgtaccagctgcgggatagcaagagcagcgacaagagcgtgtgtctgttcaccgacttcgacagccagaccaacgtgtcccagagcaaggactccgacgtgtacatcaccgataagtgcgtgctggacatgcggagcatggacttcaagagcaactccgccgtggcctggtccaacaagtccgatttcgcctgcgccaacgccttcaacaacagcattatccccgaggacacattcttcccaagccccgagagcagctgcgacgtgaagctggtggaaaagagcttcgagacagacaccaacctgaacttccagaacctgagcgtgatcggcttcagaatcctgctgctgaaagtggccggctttaacctgctgatgaccctgcggctgtggtccagctaa

SEQ ID NO: 5695 - DNA, 2301 bp, synthetic construct
  source 1..2301: mol_type = other DNA
atggccttaccagtgaccgccttgctcctgccgctggccttgctgctccacgccgccaggccggacatccagttgacccagtcccccagctcactcagcgccagtgtgggggaccgggtgaccattacctgtaaagccagtcagagtgtggactatgacggggatagcttcctgaattggtatcagcagaagcctggcaaagccccaaagctgctgatctacgctgcatctaatctggagtcaggcgtgccttccaggttctccggtagtgggtctgggaccgatttcacattgaccatttcatccctccaacccgaggatttcgctacatattactgtcagcagtccaatgaggaccctctcacctttggccagggcaccaaagttgaaattaagagactcgaggacctgaagaacgtgttcccacctgaggtggccgtgttcgagcctagcgaggccgagatcagccacacccagaaagccaccctcgtgtgcctggctaccggcttctaccccgaccatgtggaactgtcttggtgggtcaacggcaaagaggtgcacagcggcgtgtgtaccgacccccagccactgaaagaacagcccgccctgaacgacagccggtactgcctgagcagcagactgagagtgtccgccaccttctggcagaacccccggaaccacttcagatgccaggtgcagttctacggcctgagcgagaacgacgagtggacccaggacagagccaagcccgtgacccagatcgtgtctgccgaagcctggggcagagccgattgcggctttaccagcgagagctaccagcagggcgtgctgagcgccaccatcctgtacgagatcctgctgggcaaggccaccctgtacgccgtgctggtgtctgccctggtgctgatggctatggtcaagcggaaggacagccggggaagggccaagcgatctggatctggagcaacaaacttctcactactcaaacaagcaggtgacgtggaggagaatcccgggcctactagtaccatggactggatttggcgcatccttttccttgtcggcgctgctaccggcgcccattccgggccccaagttcagctggtggaaagcggtggtggcgttgtgcaacctggtggaagtctgaggctgagctgtgccgcttctggcctgagctttagcacctacactgtggcctggttcaggcaggctcccggaaagggtcttgaaggcgtggccgccattccttacaccagccagcacatggtgtacacagacagcgtcagaggccggttcaccatcagcagagacaactccaagaatacgctctatctccagatgaactctctgcgcgccgaagatacagccgtgtattactgcgccaccgacagacggcctggcacctctatgctggctatcaacggctacaacagatggggacagggaaccaccgtgaccgtgtcatctggatccggcggcggaggatctggcggaggcggatctgggggcggaggctctttcgaagtccaacttgtggagtctggagggggcctggtgcagcccggcggctctctcagactgtcttgtgcggcaagcggctacaccttcacctcttactggatagaatgggtgaggcaggcacctggaaagggactggagtggattggagagattctgccaggagggggagatacaaattacaatgaaatcttcaaggggcgggccaccttttcagcggataccagcaagaatacagcttacctgcagatgaatagcctccgggcagaagataccgctgtttattattgcacgagacgggtgccaataagactggactattgggggcaagggactcttgtcaccgtcagttcaacgcgtatccagaaccctgatcctgccgtgtaccagctgcgggatagcaagagcagcgacaagagcgtgtgtctgttcaccgacttcgacagccagaccaacgtgtcccagagcaaggactccgacgtgtacatcaccgataagtgcgtgctggacatgcggagcatggacttcaagagcaactccgccgtggcctggtccaacaagtccgatttcgcctgcgccaacgccttcaacaacagcattatccccgaggacacattcttcccaagccccgagagcagctgcgacgtgaagctggtggaaaagagcttcgagacagacaccaacctgaacttccagaacctgagcgtgatcggcttcagaatcctgctgctgaaagtggccggctttaacctgctgatgaccctgcggctgtggtccagctaa

SEQ ID NO: 5696 - DNA, 2307 bp, synthetic construct
  source 1..2307: mol_type = other DNA
atggccttaccagtgaccgccttgctcctgccgctggccttgctgctccacgccgccaggccggacatccagttgacccagtcccccagctcactcagcgccagtgtgggggaccgggtgaccattacctgtaaagccagtcagagtgtggactatgacggggatagcttcctgaattggtatcagcagaagcctggcaaagccccaaagctgctgatctacgctgcatctaatctggagtcaggcgtgccttccaggttctccggtagtgggtctgggaccgatttcacattgaccatttcatccctccaacccgaggatttcgctacatattactgtcagcagtccaatgaggaccctctcacctttggccagggcaccaaagttgaaattaagagactcgaggacctgaagaacgtgttcccacctgaggtggccgtgttcgagcctagcgaggccgagatcagccacacccagaaagccaccctcgtgtgcctggctaccggcttctaccccgaccatgtggaactgtcttggtgggtcaacggcaaagaggtgcacagcggcgtgtgtaccgacccccagccactgaaagaacagcccgccctgaacgacagccggtactgcctgagcagcagactgagagtgtccgccaccttctggcagaacccccggaaccacttcagatgccaggtgcagttctacggcctgagcgagaacgacgagtggacccaggacagagccaagcccgtgacccagatcgtgtctgccgaagcctggggcagagccgattgcggctttaccagcgagagctaccagcagggcgtgctgagcgccaccatcctgtacgagatcctgctgggcaaggccaccctgtacgccgtgctggtgtctgccctggtgctgatggctatggtcaagcggaaggacagccggggaagggccaagcgatctggatctggagcaacaaacttctcactactcaaacaagcaggtgacgtggaggagaatcccgggcctactagtaccatggactggatttggcgcatccttttccttgtcggcgctgctaccggcgcccattccgggcccgaggtgcagctggttgaatctggcggaggatctgttcaggctggcggctctctgagactgtcttgtgccgccagcggctacacctacagcatcaactgcatgggctggttcagacaggcccctggcaaagagagagaaggcgttgccgccatctctaccggcggaggcagaaccgattaccgggattctgtgaagggcagattcaccatcagccaggacaacgccaagaacaccgtgtacctccagatgaacagcctgaagcctgaggacaccgccatgtactactgtgccggcaagaccacctatcctggctacggatgtggcctgggcagaagcgcctacaattattggggccagggcacccaagtgaccgtgtcatctggatccggcggcggaggatctggcggaggcggatctgggggcggaggctctttcgaagtccaacttgtggagtctggagggggcctggtgcagcccggcggctctctcagactgtcttgtgcggcaagcggctacaccttcacctcttactggatagaatgggtgaggcaggcacctggaaagggactggagtggattggagagattctgccaggagggggagatacaaattacaatgaaatcttcaaggggcgggccaccttttcagcggataccagcaagaatacagcttacctgcagatgaatagcctccgggcagaagataccgctgtttattattgcacgagacgggtgccaataagactggactattgggggcaagggactcttgtcaccgtcagttcaacgcgtatccagaaccctgatcctgccgtgtaccagctgcgggatagcaagagcagcgacaagagcgtgtgtctgttcaccgacttcgacagccagaccaacgtgtcccagagcaaggactccgacgtgtacatcaccgataagtgcgtgctggacatgcggagcatggacttcaagagcaactccgccgtggcctggtccaacaagtccgatttcgcctgcgccaacgccttcaacaacagcattatccccgaggacacattcttcccaagccccgagagcagctgcgacgtgaagctggtggaaaagagcttcgagacagacaccaacctgaacttccagaacctgagcgtgatcggcttcagaatcctgctgctgaaagtggccggctttaacctgctgatgaccctgcggctgtggtccagctaa

SEQ ID NO: 5697 - DNA, 1863 bp, synthetic construct
  source 1..1863: mol_type = other DNA
atggccttaccagtgaccgccttgctcctgccgctggccttgctgctccacgccgccaggccggacatccagttgacccagtcccccagctcactcagcgccagtgtgggggaccgggtgaccattacctgtaaagccagtcagagtgtggactatgacggggatagcttcctgaattggtatcagcagaagcctggcaaagccccaaagctgctgatctacgctgcatctaatctggagtcaggcgtgccttccaggttctccggtagtgggtctgggaccgatttcacattgaccatttcatccctccaacccgaggatttcgctacatattactgtcagcagtccaatgaggaccctctcacctttggccagggcaccaaagttgaaattaagagactcgaggacctgaagcacgtgttcccacctgaggtggccgtgttcgagcctagcgacgccgagatctggcacacccagaaagccaccctcgtgtgcctggctaccggcttctaccccgaccatgtggaactgtcttggtgggtcaacggcaaagaggtgcacagcggcgtgtctaccgacccccagccactgaaagaacagcccgccctgaacgacagccggtactgcctgagcagcagactgagagtgtccgccaccttctggcagaacccccggaaccacttcagatgccaggtgcagttctacggcctgagcgagaacgacgagtggacccaggacagagccaagcccgtgacccagatcgtgtctgccgaagcctggggcagagccgattgcggctttaccagcgagagctaccagcagggcgtgctgagcgccaccatcctgtacgagatcctgctgggcaaggccaccctgtacgccgtgctggtgtctgccctggtgctgatggctatggtcaagcggaaggacagccggggaagggccaagcgatctggatctggagcaacaaacttctcactactcaaacaagcaggtgacgtggaggagaatcccgggcctactagtatggactggatttggcgcatccttttccttgtcggcgctgctaccggcgcgcattccttcgaagtccaacttgtggagtctggagggggcctggtgcagcccggcggctctctcagactgtcttgtgcggcaagcggctacaccttcacctcttactggatagaatgggtgaggcaggcacctggaaagggactggagtggattggagagattctgccaggagggggagatacaaattacaatgaaatcttcaaggggcgggccaccttttcagcggataccagcaagaatacagcttacctgcagatgaatagcctccgggcagaagataccgctgtttattattgcacgagacgggtgccaataagactggactattgggggcaagggactcttgtcaccgtcagttcaacgcgtatccagaaccctgatcctgccgtgtaccagctgcgggatagcaagagcagcgacaagagcgtgtgtctgttcaccgacttcgacagccagaccaacgtgtcccagagcaaggactccgacgtgtacatcaccgataagaccgtgctggacatgcggagcatggacttcaagagcaactccgccgtggcctggtccagcaagtccgatttcgcctgcgccaacgccttcaacaacagcattatccccgaggacacattcttcccaagccccgagatggcctgcgacgtgaagctggtggaaaagagcttcgagacagacaccaacctgaacttccagaacctgctcgtgatctggctgagaatcctgctgctgaaagtggccggctttaacctgctgatgaccctgcggctgtggtccagc

SEQ ID NO: 5698 - DNA, 1863 bp, synthetic construct
  source 1..1863: mol_type = other DNA
atggccttaccagtgaccgccttgctcctgccgctggccttgctgctccacgccgccaggccggacatccagttgacccagtcccccagctcactcagcgccagtgtgggggaccgggtgaccattacctgtaaagccagtcagagtgtggactatgacggggatagcttcctgaattggtatcagcagaagcctggcaaagccccaaagctgctgatctacgctgcatctaatctggagtcaggcgtgccttccaggttctccggtagtgggtctgggaccgatttcacattgaccatttcatccctccaacccgaggatttcgctacatattactgtcagcagtccaatgaggaccctctcacctttggccagggcaccaaagttgaaattaagagactcgaggacctgaagcacgtgttcccacctgaggtggccgtgttcgagcctagcgacgccgagatctggcacacccagaaagccaccctcgtgtgcctggctaccggcttctaccccgaccatgtggaactgtcttggtgggtcaacggcaaagaggtgcacagcggcgtgtctaccgacccccagccactgaaagaacagcccgccctgaacgacagccggtactgcctgagcagcagactgagagtgtccgccaccttctggcagaacccccggaaccacttcagatgccaggtgcagttctacggcctgagcgagaacgacgagtggacccaggacagagccaagcccgtgacccagatcgtgtctgccgaagcctggggcagagccgattgcggctttaccagcgagagctaccagcagggcgtgctgagcgccaccatcctgtacgagatcctgctgggcaaggccaccctgtacgccgtgctggtgtctgccctggtgctgatggctatggtcaagcggaaggacagccggggaagggccaagcgatctggatctggagcaacaaacttctcactactcaaacaagcaggtgacgtggaggagaatcccgggcctactagtatggactggatttggcgcatccttttccttgtcggcgctgctaccggcgcgcattccttcgaagtccaacttgtggagtctggagggggcctggtgcagcccggcggctctctcagactgtcttgtgcggcaagcggctacaccttcacctcttactggatagaatgggtgaggcaggcacctggaaagggactggagtggattggagagattctgccaggagggggagatacaaattacaatgaaatcttcaaggggcgggccaccttttcagcggataccagcaagaatacagcttacctgcagatgaatagcctccgggcagaagataccgctgtttattattgcacgagacgggtgccaataagactggactattgggggcaagggactcttgtcaccgtcagttcaacgcgtatccagaaccctgatcctgccgtgtaccagctgcgggatagcaagagcagcgacaagagcgtgtgtctgttcaccgacttcgacagccagaccaacgtgtcccagagcaaggactccgacgtgtacatcaccgataagaccgtgctggacatgcggagcatggacttcaagagcaactccgccgtggcctggtccaccaagtccgatttcgcctgcgccaacgccttcaacaacagcattatccccgaggacacattcttcccaagccccgaggtggtgtgcgacgtgaagctggtggaaaagagcttcgagacagacaccaacctgaacttccagaacctggtggtgatcggcgccagaatcctgctgctgaaagtggccggctttaacctgctgatgaccctgcggctgtggtccagc

SEQ ID NO: 5699 - DNA, 1863 bp, synthetic construct
  source 1..1863: mol_type = other DNA
atggccttaccagtgaccgccttgctcctgccgctggccttgctgctccacgccgccaggccggacatccagttgacccagtcccccagctcactcagcgccagtgtgggggaccgggtgaccattacctgtaaagccagtcagagtgtggactatgacggggatagcttcctgaattggtatcagcagaagcctggcaaagccccaaagctgctgatctacgctgcatctaatctggagtcaggcgtgccttccaggttctccggtagtgggtctgggaccgatttcacattgaccatttcatccctccaacccgaggatttcgctacatattactgtcagcagtccaatgaggaccctctcacctttggccagggcaccaaagttgaaattaagagactcgaggacctgaagaacgtgttcccacctgaggtggccgtgttcgagcctagcaaggccgagatcagcagaacccagaaagccaccctcgtgtgcctggctaccggcttctaccctcctcatgtggaactgtcttggtgggtcaacggcaaagaggtgcacgacggcgtgtgtaccgacccccagccactgaaagaacagcccgccctgaacgacagccggtactgcctgagcagcagactgagagtgtccgccaccttctggcagaacccccggaaccacttcagatgccaggtgcagttctacggcctgagcgagaacgacgagtggacccaggacagagccaagcccgtgacccagatcgtgtctgccgaagcctggggcagagccgattgcggctttaccagcgagagctaccagcagggcgtgctgagcgccaccatcctgtacgagatcctgctgggcaaggccaccctgtacgccgtgctggtgtctgccctggtgctgatggctatggtcaagcggaaggacagccggggaagggccaagcgatctggatctggagcaacaaacttctcactactcaaacaagcaggtgacgtggaggagaatcccgggcctactagtatggactggatttggcgcatccttttccttgtcggcgctgctaccggcgcgcattccttcgaagtccaacttgtggagtctggagggggcctggtgcagcccggcggctctctcagactgtcttgtgcggcaagcggctacaccttcacctcttactggatagaatgggtgaggcaggcacctggaaagggactggagtggattggagagattctgccaggagggggagatacaaattacaatgaaatcttcaaggggcgggccaccttttcagcggataccagcaagaatacagcttacctgcagatgaatagcctccgggcagaagataccgctgtttattattgcacgagacgggtgccaataagactggactattgggggcaagggactcttgtcaccgtcagttcaacgcgtatccagaaccctgatcctgccgtgtaccagctgcgggatagcaagagcagcgacaagttcgtgtgtctgttcaccgacttcgacagccagatcaacgtgtcccagagcaaggactccgacgtgtacatcaccgataagtgcgtgctggacatgcggagcatggacttcaagagcaactccgccgtggcctggtccaacaagtccgatttcacctgcgccaacgccttcaacaacagcattatccccgaggacacattcttcccaagccccgagagcagctgcgacgtgaagctggtggaaaagagcttcgagacagacaccaacctgaacttccagaacctgagcgtgatcggcttcagaatcctgctgctgaaagtggccggctttaacctgctgatgaccctgcggctgtggtccagc

SEQ ID NO: 5700 - DNA, 2289 bp, synthetic construct
  source 1..2289: mol_type = other DNA
atggccttaccagtgaccgccttgctcctgccgctggccttgctgctccacgccgccaggccggacatccagttgacccagtcccccagctcactcagcgccagtgtgggggaccgggtgaccattacctgtaaagccagtcagagtgtggactatgacggggatagcttcctgaattggtatcagcagaagcctggcaaagccccaaagctgctgatctacgctgcatctaatctggagtcaggcgtgccttccaggttctccggtagtgggtctgggaccgatttcacattgaccatttcatccctccaacccgaggatttcgctacatattactgtcagcagtccaatgaggaccctctcacctttggccagggcaccaaagttgaaattaagagactcgaggacctgaagaacgtgttcccacctgaggtggccgtgttcgagcctagcgaggccgagatcagccacacccagaaagccaccctcgtgtgcctggctaccggcttctaccccgaccatgtggaactgtcttggtgggtcaacggcaaagaggtgcacagcggcgtgtgtaccgacccccagccactgaaagaacagcccgccctgaacgacagccggtactgcctgagcagcagactgagagtgtccgccaccttctggcagaacccccggaaccacttcagatgccaggtgcagttctacggcctgagcgagaacgacgagtggacccaggacagagccaagcccgtgacccagatcgtgtctgccgaagcctggggcagagccgattgcggctttaccagcgagagctaccagcagggcgtgctgagcgccaccatcctgtacgagatcctgctgggcaaggccaccctgtacgccgtgctggtgtctgccctggtgctgatggctatggtcaagcggaaggacagccggggaagggccaagcgatctggatctggagcaacaaacttctcactactcaaacaagcaggtgacgtggaggagaatcccgggcctactagtaccatggactggatttggcgcatccttttccttgtcggcgctgctaccggcgcccattccgggccccaggtgcagctccaagaaagcggacccggactggttaagccctctcagaccctgtctctgacctgcacagttagcggagccagcattaccacaggcgagtattattggaattggtttcggcagccaccaggcaaggggcttgagtggatgggtgctattgctgcctctggcagcaccacctactctcccagctttgagagcagaacctccatcagccgggacacctccaaaaaccagttctctctgaagctgtcctccgtgaccgctgctgacaccgccgtctattattgtggccggtctttcggcgtggcagctgtgaccacaggacagaacagaggccagggaacacttgtgaccgtgtcctctggatccggcggcggaggatctggcggaggcggatctgggggcggaggctctttcgaagtccaacttgtggagtctggagggggcctggtgcagcccggcggctctctcagactgtcttgtgcggcaagcggctacaccttcacctcttactggatagaatgggtgaggcaggcacctggaaagggactggagtggattggagagattctgccaggagggggagatacaaattacaatgaaatcttcaaggggcgggccaccttttcagcggataccagcaagaatacagcttacctgcagatgaatagcctccgggcagaagataccgctgtttattattgcacgagacgggtgccaataagactggactattgggggcaagggactcttgtcaccgtcagttcaacgcgtatccagaaccctgatcctgccgtgtaccagctgcgggatagcaagagcagcgacaagagcgtgtgtctgttcaccgacttcgacagccagaccaacgtgtcccagagcaaggactccgacgtgtacatcaccgataagtgcgtgctggacatgcggagcatggacttcaagagcaactccgccgtggcctggtccaacaagtccgatttcgcctgcgccaacgccttcaacaacagcattatccccgaggacacattcttcccaagccccgagagcagctgcgacgtgaagctggtggaaaagagcttcgagacagacaccaacctgaacttccagaacctgagcgtgatcggcttcagaatcctgctgctgaaagtggccggctttaacctgctgatgaccctgcggctgtggtccagc

SEQ ID NO: 5701 - DNA, 2712 bp, synthetic construct
  source 1..2712: mol_type = other DNA
atggccttaccagtgaccgccttgctcctgccgctggccttgctgctccacgccgccaggccgcaggttcagctgcaagagtctggccctggcctggtcaagcctagccaaacactgagcctgacctgtaccgtgtctggcggctctatcaccaccggcgagttctactggaactggttcagacagcctcctggcaaaggactggaatggatgggagccattgccgccagcggcagcacaacatacagccctagcttcgagagccggaccagcatcagcagagacaccagcaagaatcagttcagcctgaagctgagcagcgtgacagccgccgatacagccgtgtattactgcggcagatcctttggagtggccgccgtgacaaccggccagaatagaggacagggcaccctggtcacagtgtctagcggtaccggcggaggcggatctggcggcggaggtagcggtggcggaggatctgaattcgacatccagttgacccagtcccccagctcactcagcgccagtgtgggggaccgggtgaccattacctgtaaagccagtcagagtgtggactatgacggggatagcttcctgaattggtatcagcagaagcctggcaaagccccaaagctgctgatctacgctgcatctaatctggagtcaggcgtgccttccaggttctccggtagtgggtctgggaccgatttcacattgaccatttcatccctccaacccgaggatttcgctacatattactgtcagcagtccaatgaggaccctctcacctttggccagggcaccaaagttgaaattaagagactcgagatccagaaccctgatcctgccgtgtaccagctgcgggatagcaagagcagcgacaagagcgtgtgtctgttcaccgacttcgacagccagaccaacgtgtcccagagcaaggactccgacgtgtacatcaccgataagtgcgtgctggacatgcggagcatggacttcaagagcaactccgccgtggcctggtccaacaagtccgatttcgcctgcgccaacgccttcaacaacagcattatccccgaggacacattcttcccaagcagcgacgtgccctgcgacgtgaagctggtggaaaagagcttcgagacagacaccaacctgaacttccagaacctgagcgtgatcggcttcagaatcctgctgctgaaagtggccggctttaacctgctgatgaccctgcggctgtggtccagccgcgccaagagaagcggatctggcgtgaagcagaccctgaatttcgacctgctgaagctggctggcgacgtggaatccaacccaggccctactagtaccatggactggatttggcgcatccttttccttgtcggcgctgctaccggcgcccattccgggcccgaagtgcaactggttgaatccggtggcggcctggtgcaacccggcggatctctcagacttagctgtgccgcctccggcagaaccttcacaatgggatggtacaggcaggctccagggaaagagagagagttcgtcgccgccatctctctgtctcccacactggcctactacgccgactctgtgaaaggccggttcaccatctccagagataatagcaagaacaccgtggtgctgcaaatgaactctctgagagccgaggatacagccctgtactattgtgccgctgaccggaagtccgtgatgagcatcagacccgattactggggacagggcacactggtcacagtgtctagtggatccggcggcggaggatctggcggaggcggatctgggggcggaggctctttcgaagtccaacttgtggagtctggagggggcctggtgcagcccggcggctctctcagactgtcttgtgcggcaagcggctacaccttcacctcttactggatagaatgggtgaggcaggcacctggaaagggactggagtggattggagagattctgccaggagggggagatacaaattacaatgaaatcttcaaggggcgggccaccttttcagcggataccagcaagaatacagcttacctgcagatgaatagcctccgggcagaagataccgctgtttattattgcacgagacgggtgccaataagactggactattgggggcaagggactcttgtcaccgtcagttcaacgcgtgaggacctgaagaacgtgttcccacctgaggtggccgtgttcgagcctagcaaggccgagatcgcccacacccagaaagccaccctcgtgtgcctggctaccggcttctaccccgaccatgtggaactgtcttggtgggtcaacggcaaagaggtgcacagcggcgtgtgtaccgacccccagccactgaaagaacagcccgccctgaacgacagccggtactgcctgagcagcagactgagagtgtccgccaccttctggcagaacccccggaaccacttcagatgccaggtgcagttctacggcctgagcgagaacgacgagtggacccaggacagagccaagcccgtgacccagatcgtgtctgccgaagcctggggcagagccgattgcggcatcaccagcgccagctaccaccagggcgtgctgagcgccaccatcctgtacgagatcctgctgggcaaggccaccctgtacgccgtgctggtgtctgccctggtgctgatggctatggtcaagcggaaggacagccgggga

SEQ ID NO: 5702 - DNA, 2301 bp, synthetic construct
  source 1..2301: mol_type = other DNA
atggccttaccagtgaccgccttgctcctgccgctggccttgctgctccacgccgccaggccgcaggttcagctgcaagagtctggccctggcctggtcaagcctagccaaacactgagcctgacctgtaccgtgtctggcggctctatcaccaccggcgagttctactggaactggttcagacagcctcctggcaaaggactggaatggatgggagccattgccgccagcggcagcacaacatacagccctagcttcgagagccggaccagcatcagcagagacaccagcaagaatcagttcagcctgaagctgagcagcgtgacagccgccgatacagccgtgtattactgcggcagatcctttggagtggccgccgtgacaaccggccagaatagaggacagggcaccctggtcacagtgtctagcggtaccggcggaggcggatctggcggcggaggtagcggtggcggaggatctgaattcgacatccagttgacccagtcccccagctcactcagcgccagtgtgggggaccgggtgaccattacctgtaaagccagtcagagtgtggactatgacggggatagcttcctgaattggtatcagcagaagcctggcaaagccccaaagctgctgatctacgctgcatctaatctggagtcaggcgtgccttccaggttctccggtagtgggtctgggaccgatttcacattgaccatttcatccctccaacccgaggatttcgctacatattactgtcagcagtccaatgaggaccctctcacctttggccagggcaccaaagttgaaattaagagactcgagatccagaaccctgatcctgccgtgtaccagctgcgggatagcaagagcagcgacaagagcgtgtgtctgttcaccgacttcgacagccagaccaacgtgtcccagagcaaggactccgacgtgtacatcaccgataagtgcgtgctggacatgcggagcatggacttcaagagcaactccgccgtggcctggtccaacaagtccgatttcgcctgcgccaacgccttcaacaacagcattatccccgaggacacattcttcccaagcagcgacgtgccctgcgacgtgaagctggtggaaaagagcttcgagacagacaccaacctgaacttccagaacctgagcgtgatcggcttcagaatcctgctgctgaaagtggccggctttaacctgctgatgaccctgcggctgtggtccagccgcgccaagagaagcggatctggcgtgaagcagaccctgaatttcgacctgctgaagctggctggcgacgtggaatccaacccaggccctactagtaccatggactggatttggcgcatccttttccttgtcggcgctgctaccggcgcccattccttcgaagtccaacttgtggagtctggagggggcctggtgcagcccggcggctctctcagactgtcttgtgcggcaagcggctacaccttcacctcttactggatagaatgggtgaggcaggcacctggaaagggactggagtggattggagagattctgccaggagggggagatacaaattacaatgaaatcttcaaggggcgggccaccttttcagcggataccagcaagaatacagcttacctgcagatgaatagcctccgggcagaagataccgctgtttattattgcacgagacgggtgccaataagactggactattgggggcaagggactcttgtcaccgtcagttcaacgcgtgaggacctgaagaacgtgttcccacctgaggtggccgtgttcgagcctagcaaggccgagatcgcccacacccagaaagccaccctcgtgtgcctggctaccggcttctaccccgaccatgtggaactgtcttggtgggtcaacggcaaagaggtgcacagcggcgtgtgtaccgacccccagccactgaaagaacagcccgccctgaacgacagccggtactgcctgagcagcagactgagagtgtccgccaccttctggcagaacccccggaaccacttcagatgccaggtgcagttctacggcctgagcgagaacgacgagtggacccaggacagagccaagcccgtgacccagatcgtgtctgccgaagcctggggcagagccgattgcggcatcaccagcgccagctaccaccagggcgtgctgagcgccaccatcctgtacgagatcctgctgggcaaggccaccctgtacgccgtgctggtgtctgccctggtgctgatggctatggtcaagcggaaggacagccgggga

SEQ ID NO: 5703 - DNA, 2700 bp, synthetic construct
  source 1..2700: mol_type = other DNA
atggccttaccagtgaccgccttgctcctgccgctggccttgctgctccacgccgccaggccggaagtgcagctggttgaatctggcggaggactggttcaggctggcggatctctgagactgtcttgtgccgccagcggcagaacctttagcatgggctggtttagacaggcccctggcaaagagagagagttcgtcgccgccatcacatactctggcggcagcccttactacgccgactctgtgaagggcagattcaccatcagccgggacaacgccaagaacaccgtgtacctccagatgaacagcctgaagcctgaggacaccgccgtgtactactgcgccgccaatccaacatacggcagcgactggaacgccgagaattggggccagggaacccaagtgacagtgtctagcggtaccggcggaggcggatctggcggcggaggtagcggtggcggaggatctgaattcgacatccagttgacccagtcccccagctcactcagcgccagtgtgggggaccgggtgaccattacctgtaaagccagtcagagtgtggactatgacggggatagcttcctgaattggtatcagcagaagcctggcaaagccccaaagctgctgatctacgctgcatctaatctggagtcaggcgtgccttccaggttctccggtagtgggtctgggaccgatttcacattgaccatttcatccctccaacccgaggatttcgctacatattactgtcagcagtccaatgaggaccctctcacctttggccagggcaccaaagttgaaattaagagactcgaggacctgaagaacgtgttcccacctgaggtggccgtgttcgagcctagcgaggccgagatcagccacacccagaaagccaccctcgtgtgcctggctaccggcttctaccccgaccatgtggaactgtcttggtgggtcaacggcaaagaggtgcacagcggcgtgtgtaccgacccccagccactgaaagaacagcccgccctgaacgacagccggtactgcctgagcagcagactgagagtgtccgccaccttctggcagaacccccggaaccacttcagatgccaggtgcagttctacggcctgagcgagaacgacgagtggacccaggacagagccaagcccgtgacccagatcgtgtctgccgaagcctggggcagagccgattgcggctttaccagcgagagctaccagcagggcgtgctgagcgccaccatcctgtacgagatcctgctgggcaaggccaccctgtacgccgtgctggtgtctgccctggtgctgatggctatggtcaagcggaaggacagccggggaagggccaagcgatctggatctggagcaacaaacttctcactactcaaacaagcaggtgacgtggaggagaatcccgggcctactagtaccatggactggatttggcgcatccttttccttgtcggcgctgctaccggcgcccattccgggccccaggtgcagctccaagaaagcggacccggactggttaagccctctcagaccctgtctctgacctgcacagttagcggagccagcattaccacaggcgagtattattggaattggtttcggcagccaccaggcaaggggcttgagtggatgggtgctattgctgcctctggcagcaccacctactctcccagctttgagagcagaacctccatcagccgggacacctccaaaaaccagttctctctgaagctgtcctccgtgaccgctgctgacaccgccgtctattattgtggccggtctttcggcgtggcagctgtgaccacaggacagaacagaggccagggaacacttgtgaccgtgtcctctggatccggcggcggaggatctggcggaggcggatctgggggcggaggctctttcgaagtccaacttgtggagtctggagggggcctggtgcagcccggcggctctctcagactgtcttgtgcggcaagcggctacaccttcacctcttactggatagaatgggtgaggcaggcacctggaaagggactggagtggattggagagattctgccaggagggggagatacaaattacaatgaaatcttcaaggggcgggccaccttttcagcggataccagcaagaatacagcttacctgcagatgaatagcctccgggcagaagataccgctgtttattattgcacgagacgggtgccaataagactggactattgggggcaagggactcttgtcaccgtcagttcaacgcgtatccagaaccctgatcctgccgtgtaccagctgcgggatagcaagagcagcgacaagagcgtgtgtctgttcaccgacttcgacagccagaccaacgtgtcccagagcaaggactccgacgtgtacatcaccgataagtgcgtgctggacatgcggagcatggacttcaagagcaactccgccgtggcctggtccaacaagtccgatttcgcctgcgccaacgccttcaacaacagcattatccccgaggacacattcttcccaagccccgagagcagctgcgacgtgaagctggtggaaaagagcttcgagacagacaccaacctgaacttccagaacctgagcgtgatcggcttcagaatcctgctgctgaaagtggccggctttaacctgctgatgaccctgcggctgtggtccagc

SEQ ID NO: 5704 - DNA, 2721 bp, synthetic construct
  source 1..2721: mol_type = other DNA
atggccttaccagtgaccgccttgctcctgccgctggccttgctgctccacgccgccaggccggaagtgcagctggttgaatctggcggaggactggttcaggctggcggatctctgagactgtcttgtgccgccagcggcagaacctttagcatgggctggtttagacaggcccctggcaaagagagagagttcgtcgccgccatcacatactctggcggcagcccttactacgccgactctgtgaagggcagattcaccatcagccgggacaacgccaagaacaccgtgtacctccagatgaacagcctgaagcctgaggacaccgccgtgtactactgcgccgccaatccaacatacggcagcgactggaacgccgagaattggggccagggaacccaagtgacagtgtctagcggtaccggcggaggcggatctggcggcggaggtagcggtggcggaggatctgaattcgacatccagttgacccagtcccccagctcactcagcgccagtgtgggggaccgggtgaccattacctgtaaagccagtcagagtgtggactatgacggggatagcttcctgaattggtatcagcagaagcctggcaaagccccaaagctgctgatctacgctgcatctaatctggagtcaggcgtgccttccaggttctccggtagtgggtctgggaccgatttcacattgaccatttcatccctccaacccgaggatttcgctacatattactgtcagcagtccaatgaggaccctctcacctttggccagggcaccaaagttgaaattaagagactcgagatccagaaccctgatcctgccgtgtaccagctgcgggatagcaagagcagcgacaagagcgtgtgtctgttcaccgacttcgacagccagaccaacgtgtcccagagcaaggactccgacgtgtacatcaccgataagtgcgtgctggacatgcggagcatggacttcaagagcaactccgccgtggcctggtccaacaagtccgatttcgcctgcgccaacgccttcaacaacagcattatccccgaggacacattcttcccaagcagcgacgtgccctgcgacgtgaagctggtggaaaagagcttcgagacagacaccaacctgaacttccagaacctgagcgtgatcggcttcagaatcctgctgctgaaagtggccggctttaacctgctgatgaccctgcggctgtggtccagccgcgccaagagaagcggatctggcgtgaagcagaccctgaatttcgacctgctgaagctggctggcgacgtggaatccaacccaggccctactagtaccatggactggatttggcgcatccttttccttgtcggcgctgctaccggcgcccattccgggccccaggtgcagctggttgaatctggcggaggactggttcagcctggcggatctctgagactgtcttgtgccgccagcggcaacatcaacagcagaaactgcatgggctggttcagacaggcccctggcaagggaagagaaggcgtggcagctatcggccaagtgaccggcagaacctactacgtggacagcgtgaagggcagattcaccatcagcctggacaacagcaagaacaccctgtacctccagatgaacagcctgagagccgaggacaccgccgtgtactattgtgctgctgcccctggctgtctgctgtctgcacttagaagcgccgactacagaaactggggccagggcacactggtcaccgtttcttctggatccggcggcggaggatctggcggaggcggatctgggggcggaggctctttcgaagtccaacttgtggagtctggagggggcctggtgcagcccggcggctctctcagactgtcttgtgcggcaagcggctacaccttcacctcttactggatagaatgggtgaggcaggcacctggaaagggactggagtggattggagagattctgccaggagggggagatacaaattacaatgaaatcttcaaggggcgggccaccttttcagcggataccagcaagaatacagcttacctgcagatgaatagcctccgggcagaagataccgctgtttattattgcacgagacgggtgccaataagactggactattgggggcaagggactcttgtcaccgtcagttcaacgcgtgaggacctgaagaacgtgttcccacctgaggtggccgtgttcgagcctagcaaggccgagatcgcccacacccagaaagccaccctcgtgtgcctggctaccggcttctaccccgaccatgtggaactgtcttggtgggtcaacggcaaagaggtgcacagcggcgtgtgtaccgacccccagccactgaaagaacagcccgccctgaacgacagccggtactgcctgagcagcagactgagagtgtccgccaccttctggcagaacccccggaaccacttcagatgccaggtgcagttctacggcctgagcgagaacgacgagtggacccaggacagagccaagcccgtgacccagatcgtgtctgccgaagcctggggcagagccgattgcggcatcaccagcgccagctaccaccagggcgtgctgagcgccaccatcctgtacgagatcctgctgggcaaggccaccctgtacgccgtgctggtgtctgccctggtgctgatggctatggtcaagcggaaggacagccgggga

SEQ ID NO: 5705 - DNA, 2709 bp, synthetic construct
  source 1..2709: mol_type = other DNA
atggccttaccagtgaccgccttgctcctgccgctggccttgctgctccacgccgccaggccggaagtgcagctggttgaatctggcggaggactggttcaggctggcggatctctgagactgtcttgtgccgccagcggcagaacctttagcatgggctggtttagacaggcccctggcaaagagagagagttcgtcgccgccatcacatactctggcggcagcccttactacgccgactctgtgaagggcagattcaccatcagccgggacaacgccaagaacaccgtgtacctccagatgaacagcctgaagcctgaggacaccgccgtgtactactgcgccgccaatccaacatacggcagcgactggaacgccgagaattggggccagggaacccaagtgacagtgtctagcggtaccggcggaggcggatctggcggcggaggtagcggtggcggaggatctgaattcgacatccagttgacccagtcccccagctcactcagcgccagtgtgggggaccgggtgaccattacctgtaaagccagtcagagtgtggactatgacggggatagcttcctgaattggtatcagcagaagcctggcaaagccccaaagctgctgatctacgctgcatctaatctggagtcaggcgtgccttccaggttctccggtagtgggtctgggaccgatttcacattgaccatttcatccctccaacccgaggatttcgctacatattactgtcagcagtccaatgaggaccctctcacctttggccagggcaccaaagttgaaattaagagactcgaggacctgaagaacgtgttcccacctgaggtggccgtgttcgagcctagcgaggccgagatcagccacacccagaaagccaccctcgtgtgcctggctaccggcttctaccccgaccatgtggaactgtcttggtgggtcaacggcaaagaggtgcacagcggcgtgtgtaccgacccccagccactgaaagaacagcccgccctgaacgacagccggtactgcctgagcagcagactgagagtgtccgccaccttctggcagaacccccggaaccacttcagatgccaggtgcagttctacggcctgagcgagaacgacgagtggacccaggacagagccaagcccgtgacccagatcgtgtctgccgaagcctggggcagagccgattgcggctttaccagcgagagctaccagcagggcgtgctgagcgccaccatcctgtacgagatcctgctgggcaaggccaccctgtacgccgtgctggtgtctgccctggtgctgatggctatggtcaagcggaaggacagccggggaagggccaagcgatctggatctggagcaacaaacttctcactactcaaacaagcaggtgacgtggaggagaatcccgggcctactagtaccatggactggatttggcgcatccttttccttgtcggcgctgctaccggcgcccattccgggccccaggtgcagctggttgaatctggcggaggactggttcagcctggcggatctctgagactgtcttgtgccgccagcggcaacatcaacagcagaaactgcatgggctggttcagacaggcccctggcaagggaagagaaggcgtggcagctatcggccaagtgaccggcagaacctactacgtggacagcgtgaagggcagattcaccatcagcctggacaacagcaagaacaccctgtacctccagatgaacagcctgagagccgaggacaccgccgtgtactattgtgctgctgcccctggctgtctgctgtctgcacttagaagcgccgactacagaaactggggccagggcacactggtcaccgtttcttctggatccggcggcggaggatctggcggaggcggatctgggggcggaggctctttcgaagtccaacttgtggagtctggagggggcctggtgcagcccggcggctctctcagactgtcttgtgcggcaagcggctacaccttcacctcttactggatagaatgggtgaggcaggcacctggaaagggactggagtggattggagagattctgccaggagggggagatacaaattacaatgaaatcttcaaggggcgggccaccttttcagcggataccagcaagaatacagcttacctgcagatgaatagcctccgggcagaagataccgctgtttattattgcacgagacgggtgccaataagactggactattgggggcaagggactcttgtcaccgtcagttcaacgcgtatccagaaccctgatcctgccgtgtaccagctgcgggatagcaagagcagcgacaagagcgtgtgtctgttcaccgacttcgacagccagaccaacgtgtcccagagcaaggactccgacgtgtacatcaccgataagtgcgtgctggacatgcggagcatggacttcaagagcaactccgccgtggcctggtccaacaagtccgatttcgcctgcgccaacgccttcaacaacagcattatccccgaggacacattcttcccaagccccgagagcagctgcgacgtgaagctggtggaaaagagcttcgagacagacaccaacctgaacttccagaacctgagcgtgatcggcttcagaatcctgctgctgaaagtggccggctttaacctgctgatgaccctgcggctgtggtccagc

SEQ ID NO: 5706 - DNA, 2709 bp, synthetic construct
  source 1..2709: mol_type = other DNA
atggccttaccagtgaccgccttgctcctgccgctggccttgctgctccacgccgccaggccggaagtgcaactggttgaatccggtggcggcctggtgcaagcaggcggatctctcagacttagctgtgccgcctccggcagaaccttcacaatgggatggtttaggcaggctccagggaaagagagagagttcgtcgccgccatctctctgtctcccacactggcctactacgccgactctgtgaaaggccggttcaccatctccagagataatgccaagaacaccgtggtgctgcaaatgaactctctgaaacccgaggatacagccctgtactattgtgccgctgaccggaagtccgtgatgagcatcagacccgattactggggacagggcacacaagtcacagtgtcctctggtaccggcggaggcggatctggcggcggaggtagcggtggcggaggatctgaattcgacatccagttgacccagtcccccagctcactcagcgccagtgtgggggaccgggtgaccattacctgtaaagccagtcagagtgtggactatgacggggatagcttcctgaattggtatcagcagaagcctggcaaagccccaaagctgctgatctacgctgcatctaatctggagtcaggcgtgccttccaggttctccggtagtgggtctgggaccgatttcacattgaccatttcatccctccaacccgaggatttcgctacatattactgtcagcagtccaatgaggaccctctcacctttggccagggcaccaaagttgaaattaagagactcgaggacctgaagaacgtgttcccacctgaggtggccgtgttcgagcctagcgaggccgagatcagccacacccagaaagccaccctcgtgtgcctggctaccggcttctaccccgaccatgtggaactgtcttggtgggtcaacggcaaagaggtgcacagcggcgtgtgtaccgacccccagccactgaaagaacagcccgccctgaacgacagccggtactgcctgagcagcagactgagagtgtccgccaccttctggcagaacccccggaaccacttcagatgccaggtgcagttctacggcctgagcgagaacgacgagtggacccaggacagagccaagcccgtgacccagatcgtgtctgccgaagcctggggcagagccgattgcggctttaccagcgagagctaccagcagggcgtgctgagcgccaccatcctgtacgagatcctgctgggcaaggccaccctgtacgccgtgctggtgtctgccctggtgctgatggctatggtcaagcggaaggacagccggggaagggccaagcgatctggatctggagcaacaaacttctcactactcaaacaagcaggtgacgtggaggagaatcccgggcctactagtaccatggactggatttggcgcatccttttccttgtcggcgctgctaccggcgcccattccgggccccaggtgcagctggttgaatctggcggaggactggttcagcctggcggatctctgagactgtcttgtgccgccagcggcaacatcaacagcagaaactgcatgggctggttcagacaggcccctggcaagggaagagaaggcgtggcagctatcggccaagtgaccggcagaacctactacgtggacagcgtgaagggcagattcaccatcagcctggacaacagcaagaacaccctgtacctccagatgaacagcctgagagccgaggacaccgccgtgtactattgtgctgctgcccctggctgtctgctgtctgcacttagaagcgccgactacagaaactggggccagggcacactggtcaccgtttcttctggatccggcggcggaggatctggcggaggcggatctgggggcggaggctctttcgaagtccaacttgtggagtctggagggggcctggtgcagcccggcggctctctcagactgtcttgtgcggcaagcggctacaccttcacctcttactggatagaatgggtgaggcaggcacctggaaagggactggagtggattggagagattctgccaggagggggagatacaaattacaatgaaatcttcaaggggcgggccaccttttcagcggataccagcaagaatacagcttacctgcagatgaatagcctccgggcagaagataccgctgtttattattgcacgagacgggtgccaataagactggactattgggggcaagggactcttgtcaccgtcagttcaacgcgtatccagaaccctgatcctgccgtgtaccagctgcgggatagcaagagcagcgacaagagcgtgtgtctgttcaccgacttcgacagccagaccaacgtgtcccagagcaaggactccgacgtgtacatcaccgataagtgcgtgctggacatgcggagcatggacttcaagagcaactccgccgtggcctggtccaacaagtccgatttcgcctgcgccaacgccttcaacaacagcattatccccgaggacacattcttcccaagccccgagagcagctgcgacgtgaagctggtggaaaagagcttcgagacagacaccaacctgaacttccagaacctgagcgtgatcggcttcagaatcctgctgctgaaagtggccggctttaacctgctgatgaccctgcggctgtggtccagc

SEQ ID NO: 5707 - DNA, 2721 bp, synthetic construct
  source 1..2721: mol_type = other DNA
atggccttaccagtgaccgccttgctcctgccgctggccttgctgctccacgccgccaggccgcaggttcagctgcaagagtctggccctggcctggtcaagcctagccaaacactgagcctgacctgtaccgtgtctggcggctctatcaccaccggcgagttctactggaactggttcagacagcctcctggcaaaggactggaatggatgggagccattgccgccagcggcagcacaacatacagccctagcttcgagagccggaccagcatcagcagagacaccagcaagaatcagttcagcctgaagctgagcagcgtgacagccgccgatacagccgtgtattactgcggcagatcctttggagtggccgccgtgacaaccggccagaatagaggacagggcaccctggtcacagtgtctagcggtaccggcggaggcggatctggcggcggaggtagcggtggcggaggatctgaattcgacatccagttgacccagtcccccagctcactcagcgccagtgtgggggaccgggtgaccattacctgtaaagccagtcagagtgtggactatgacggggatagcttcctgaattggtatcagcagaagcctggcaaagccccaaagctgctgatctacgctgcatctaatctggagtcaggcgtgccttccaggttctccggtagtgggtctgggaccgatttcacattgaccatttcatccctccaacccgaggatttcgctacatattactgtcagcagtccaatgaggaccctctcacctttggccagggcaccaaagttgaaattaagagactcgaggacctgaagaacgtgttcccacctgaggtggccgtgttcgagcctagcgaggccgagatcagccacacccagaaagccaccctcgtgtgcctggctaccggcttctaccccgaccatgtggaactgtcttggtgggtcaacggcaaagaggtgcacagcggcgtgtgtaccgacccccagccactgaaagaacagcccgccctgaacgacagccggtactgcctgagcagcagactgagagtgtccgccaccttctggcagaacccccggaaccacttcagatgccaggtgcagttctacggcctgagcgagaacgacgagtggacccaggacagagccaagcccgtgacccagatcgtgtctgccgaagcctggggcagagccgattgcggctttaccagcgagagctaccagcagggcgtgctgagcgccaccatcctgtacgagatcctgctgggcaaggccaccctgtacgccgtgctggtgtctgccctggtgctgatggctatggtcaagcggaaggacagccggggaagggccaagcgatctggatctggagcaacaaacttctcactactcaaacaagcaggtgacgtggaggagaatcccgggcctactagtaccatggactggatttggcgcatccttttccttgtcggcgctgctaccggcgcccattccgggccccaggtgcagctggttgaatctggcggaggactggttcagcctggcggatctctgagactgtcttgtgccgccagcggcaacatcaacagcagaaactgcatgggctggttcagacaggcccctggcaagggaagagaaggcgtggcagctatcggccaagtgaccggcagaacctactacgtggacagcgtgaagggcagattcaccatcagcctggacaacagcaagaacaccctgtacctccagatgaacagcctgagagccgaggacaccgccgtgtactattgtgctgctgcccctggctgtctgctgtctgcacttagaagcgccgactacagaaactggggccagggcacactggtcaccgtttcttctggatccggcggcggaggatctggcggaggcggatctgggggcggaggctctttcgaagtccaacttgtggagtctggagggggcctggtgcagcccggcggctctctcagactgtcttgtgcggcaagcggctacaccttcacctcttactggatagaatgggtgaggcaggcacctggaaagggactggagtggattggagagattctgccaggagggggagatacaaattacaatgaaatcttcaaggggcgggccaccttttcagcggataccagcaagaatacagcttacctgcagatgaatagcctccgggcagaagataccgctgtttattattgcacgagacgggtgccaataagactggactattgggggcaagggactcttgtcaccgtcagttcaacgcgtatccagaaccctgatcctgccgtgtaccagctgcgggatagcaagagcagcgacaagagcgtgtgtctgttcaccgacttcgacagccagaccaacgtgtcccagagcaaggactccgacgtgtacatcaccgataagtgcgtgctggacatgcggagcatggacttcaagagcaactccgccgtggcctggtccaacaagtccgatttcgcctgcgccaacgccttcaacaacagcattatccccgaggacacattcttcccaagccccgagagcagctgcgacgtgaagctggtggaaaagagcttcgagacagacaccaacctgaacttccagaacctgagcgtgatcggcttcagaatcctgctgctgaaagtggccggctttaacctgctgatgaccctgcggctgtggtccagc

SEQ ID NO: 5708 - DNA, 1461 bp, synthetic construct
  source 1..1461: mol_type = other DNA
atggccttaccagtgaccgccttgctcctgccgctggccttgctgctccacgccgccaggccggacatccagttgacccagtcccccagctcactcagcgccagtgtgggggaccgggtgaccattacctgtaaagccagtcagagtgtggactatgagggggatagcttcctgaattggtatcagcagaagcctggcaaagccccaaagctgctgatctacgctgcatctaatctggagtcaggcgtgccttctaggttctccggtagtgggtctgggaccgatttcacattgaccatttcatccctccaacccgaggatttcgctacatattactgtcagcagtccaatgaggaccctctcacctttggccagggcaccaaagttgaaattaagagaggcggaggcggaagtggaggcggaggatctggcggcggaggctctgaagtccaacttgtggagtctggagggggcctggtgcagcccggcggctctctcagactgtcttgtgcggcaagcggctacaccttcacctcttactggatagaatgggtgaggcaggcacctggaaagggactggagtggattggagagattctgccaggagggggagatacaaattacaatgaaatcttcaaggggcgggccaccttttcagcggataccagcaagaatacagcttacctgcagatgaatagcctccgggcagaagataccgctgtttattattgcacgagacgggtgccaataagactggactattgggggcaagggactcttgtcaccgtcagttcaacgcgtaaaattgaagttatgtatcctcctccttacctagacaatgagaagagcaatggaaccattatccatgtgaaagggaaacacctttgtccaagtcccctatttcccggaccttctaagcccttttgggtgctggtggtggttgggggagtcctggcttgctatagcttgctagtaacagtggcctttattattttctgggtgaggagtaagaggagcaggctcctgcacagtgactacatgaacatgactccacgccgccccggacccacccgcaagcattaccagccctatgccccaccacgcgacttcgcagcctatcgctccagagtgaagttcagcaggagcgcagacgcccccgcgtaccagcagggccagaaccagctctataacgagctcaatctaggacgaagagaggagtacgatgttttggacaagagacgtggccgggaccctgagatggggggaaagccgagaaggaagaaccctcaggaaggcctgtacaatgaactgcagaaagataagatggcggaggcctacagtgagattgggatgaaaggcgagcgccggaggggcaaggggcacgatggcctttaccagggtctcagtacagccaccaaggacacctacgacgcccttcacatgcaggccctgccccctcgc

SEQ ID NO: 5709 - DNA, 1479 bp, synthetic construct
  source 1..1479: mol_type = other DNA
atggccttaccagtgaccgccttgctcctgccgctggccttgctgctccacgccgccaggccggacatccagttgacccagtcccccagctcactcagcgccagtgtgggggaccgggtgaccattacctgtaaagccagtcagagtgtggactatgagggggatagcttcctgaattggtatcagcagaagcctggcaaagccccaaagctgctgatctacgctgcatctaatctggagtcaggcgtgccttctaggttctccggtagtgggtctgggaccgatttcacattgaccatttcatccctccaacccgaggatttcgctacatattactgtcagcagtccaatgaggaccctctcacctttggccagggcaccaaagttgaaattaagagaggcggaggcggaagtggaggcggaggatctggcggcggaggctctgaagtccaacttgtggagtctggagggggcctggtgcagcccggcggctctctcagactgtcttgtgcggcaagcggctacaccttcacctcttactggatagaatgggtgaggcaggcacctggaaagggactggagtggattggagagattctgccaggagggggagatacaaattacaatgaaatcttcaaggggcgggccaccttttcagcggataccagcaagaatacagcttacctgcagatgaatagcctccgggcagaagataccgctgtttattattgcacgagacgggtgccaataagactggactattgggggcaagggactcttgtcaccgtcagttcaacgcgtgcgaagcccaccacgacgccagcgccgcgaccaccaacaccggcgcccaccatcgcgtcgcagcccctgtccctgcgcccagaggcgtgccggccagcggcggggggcgcagtgcacacgagggggctggacttcgcctgtgacatctacatctgggcgcccttggccgggacttgtggggtccttctcctgtcactggttatcaccctttactgcaaacggggcagaaagaaactcctgtatatattcaaacaaccatttatgagaccagtacaaactactcaagaggaagatggctgtagctgccgatttccagaagaagaagaaggaggatgtgaactgagagtgaagttcagcaggagcgcagacgcccccgcgtaccagcagggccagaaccagctctataacgagctgaatctaggacgaagagaggagtacgatgttttggacaagagacgtggccgggaccctgagatggggggaaagccgagaaggaagaaccctcaggaaggcctgtacaatgaactgcagaaagataagatggcggaggcctacagtgagattgggatgaaaggcgagcgccggaggggcaaggggcacgatggcctttaccagggtctcagtacagccaccaaggacacctacgacgcccttcacatgcaggccctgccccctcgc

SEQ ID NO: 5710 - DNA, 1479 bp, synthetic construct
  source 1..1479: mol_type = other DNA
atggccttaccagtgaccgccttgctcctgccgctggccttgctgctccacgccgccaggccggaagtccaacttgtggagtctggagggggcctggtgcagcccggcggctctctcagactgtcttgtgcggcaagcggctacaccttcacctcttactggatagaatgggtgaggcaggcacctggaaagggactggagtggattggagagattctgccaggagggggagatacaaattacaatgaaatcttcaaggggcgggccaccttttcagcggataccagcaagaatacagcttacctgcagatgaatagcctccgggcagaagataccgctgtttattattgcacgagacgggtgccaataagactggactattgggggcaagggactcttgtcaccgtcagttcaggcggaggcggaagtggaggcggaggatctggcggcggaggctctgacatccagttgacccagtcccccagctcactcagcgccagtgtgggggaccgggtgaccattacctgtaaagccagtcagagtgtggactatgagggggatagcttcctgaattggtatcagcagaagcctggcaaagccccaaagctgctgatctacgctgcatctaatctggagtcaggcgtgccttctaggttctccggtagtgggtctgggaccgatttcacattgaccatttcatccctccaacccgaggatttcgctacatattactgtcagcagtccaatgaggaccctctcacctttggccagggcaccaaagttgaaattaagagaacgcgtgcgaagcccaccacgacgccagcgccgcgaccaccaacaccggcgcccaccatcgcgtcgcagcccctgtccctgcgcccagaggcgtgccggccagcggcggggggcgcagtgcacacgagggggctggacttcgcctgtgacatctacatctgggcgcccttggccgggacttgtggggtccttctcctgtcactggttatcaccctttactgcaaacggggcagaaagaaactcctgtatatattcaaacaaccatttatgagaccagtacaaactactcaagaggaagatggctgtagctgccgatttccagaagaagaagaaggaggatgtgaactgagagtgaagttcagcaggagcgcagacgcccccgcgtaccagcagggccagaaccagctctataacgagctgaatctaggacgaagagaggagtacgatgttttggacaagagacgtggccgggaccctgagatggggggaaagccgagaaggaagaaccctcaggaaggcctgtacaatgaactgcagaaagataagatggcggaggcctacagtgagattgggatgaaaggcgagcgccggaggggcaaggggcacgatggcctttaccagggtctcagtacagccaccaaggacacctacgacgcccttcacatgcaggccctgccccctcgc

SEQ ID NO: 5711 - DNA, 1875 bp, synthetic construct
  source 1..1875: mol_type = other DNA
atggccttaccagtgaccgccttgctcctgccgctggccttgctgctccacgccgccaggccggacatccagttgacccagtcccccagctcactcagcgccagtgtgggggaccgggtgaccattacctgtaaagccagtcagagtgtggactatgagggggatagcttcctgaattggtatcagcagaagcctggcaaagccccaaagctgctgatctacgctgcatctaatctggagtcaggcgtgccttctaggttctccggtagtgggtctgggaccgatttcacattgaccatttcatccctccaacccgaggatttcgctacatattactgtcagcagtccaatgaggaccctctcacctttggccagggcaccaaagttgaaattaagagactcgagatccagaaccctgatcctgccgtgtaccagctgcgggatagcaagagcagcgacaagagcgtgtgtctgttcaccgacttcgacagccagaccaacgtgtcccagagcaaggactccgacgtgtacatcaccgataagtgcgtgctggacatgcggagcatggacttcaagagcaactccgccgtggcctggtccaacaagtccgatttcgcctgcgccaacgccttcaacaacagcattatccccgaggacacattcttcccaagcagcgacgtgccctgcgacgtgaagctggtggaaaagagcttcgagacagacaccaacctgaacttccagaacctgagcgtgatcggcttcagaatcctgctgctgaaagtggccggctttaacctgctgatgaccctgcggctgtggtccagccgcgccaagagaagcggatctggcgtgaagcagaccctgaatttcgacctgctgaagctggctggcgacgtggaatccaacccaggccctactagtatggactggatttggcgcatccttttccttgtcggcgctgctaccggcgcgcattccttcgaagtccaacttgtggagtctggagggggcctggtgcagcccggcggctctctcagactgtcttgtgcggcaagcggctacaccttcacctcttactggatagaatgggtgaggcaggcacctggaaagggactggagtggattggagagattctgccaggagggggagatacaaattacaatgaaatcttcaaggggcgggccaccttttcagcggataccagcaagaatacagcttacctgcagatgaatagcctccgggcagaagataccgctgtttattattgcacgagacgggtgccaataagactggactattgggggcaagggactcttgtcaccgtcagttcaacgcgtgaggacctgaagaacgtgttcccacctgaggtggccgtgttcgagcctagcaaggccgagatcgcccacacccagaaagccaccctcgtgtgcctggctaccggcttctaccccgaccatgtggaactgtcttggtgggtcaacggcaaagaggtgcacagcggcgtgtgtaccgacccccagccactgaaagaacagcccgccctgaacgacagccggtactgcctgagcagcagactgagagtgtccgccaccttctggcagaacccccggaaccacttcagatgccaggtgcagttctacggcctgagcgagaacgacgagtggacccaggacagagccaagcccgtgacccagatcgtgtctgccgaagcctggggcagagccgattgcggcatcaccagcgccagctaccaccagggcgtgctgagcgccaccatcctgtacgagatcctgctgggcaaggccaccctgtacgccgtgctggtgtctgccctggtgctgatggctatggtcaagcggaaggacagccgggga

SEQ ID NO: 5712 - DNA, 1863 bp, synthetic construct
  source 1..1863: mol_type = other DNA
atggccttaccagtgaccgccttgctcctgccgctggccttgctgctccacgccgccaggccggacatccagttgacccagtcccccagctcactcagcgccagtgtgggggaccgggtgaccattacctgtaaagccagtcagagtgtggactatgagggggatagcttcctgaattggtatcagcagaagcctggcaaagccccaaagctgctgatctacgctgcatctaatctggagtcaggcgtgccttctaggttctccggtagtgggtctgggaccgatttcacattgaccatttcatccctccaacccgaggatttcgctacatattactgtcagcagtccaatgaggaccctctcacctttggccagggcaccaaagttgaaattaagagactcgaggacctgaagaacgtgttcccacctgaggtggccgtgttcgagcctagcaaggccgagatcgcccacacccagaaagccaccctcgtgtgcctggctaccggcttctaccccgaccatgtggaactgtcttggtgggtcaacggcaaagaggtgcacagcggcgtgtgtaccgacccccagccactgaaagaacagcccgccctgaacgacagccggtactgcctgagcagcagactgagagtgtccgccaccttctggcagaacccccggaaccacttcagatgccaggtgcagttctacggcctgagcgagaacgacgagtggacccaggacagagccaagcccgtgacccagatcgtgtctgccgaagcctggggcagagccgattgcggcatcaccagcgccagctaccaccagggcgtgctgagcgccaccatcctgtacgagatcctgctgggcaaggccaccctgtacgccgtgctggtgtctgccctggtgctgatggctatggtcaagcggaaggacagccggggaagggccaagcgatctggatctggagcaacaaacttctcactactcaaacaagcaggtgacgtggaggagaatcccgggcctactagtatggactggatttggcgcatccttttccttgtcggcgctgctaccggcgcgcattccttcgaagtccaacttgtggagtctggagggggcctggtgcagcccggcggctctctcagactgtcttgtgcggcaagcggctacaccttcacctcttactggatagaatgggtgaggcaggcacctggaaagggactggagtggattggagagattctgccaggagggggagatacaaattacaatgaaatcttcaaggggcgggccaccttttcagcggataccagcaagaatacagcttacctgcagatgaatagcctccgggcagaagataccgctgtttattattgcacgagacgggtgccaataagactggactattgggggcaagggactcttgtcaccgtcagttcaacgcgtatccagaaccctgatcctgccgtgtaccagctgcgggatagcaagagcagcgacaagagcgtgtgtctgttcaccgacttcgacagccagaccaacgtgtcccagagcaaggactccgacgtgtacatcaccgataagtgcgtgctggacatgcggagcatggacttcaagagcaactccgccgtggcctggtccaacaagtccgatttcgcctgcgccaacgccttcaacaacagcattatccccgaggacacattcttcccaagcagcgacgtgccctgcgacgtgaagctggtggaaaagagcttcgagacagacaccaacctgaacttccagaacctgagcgtgatcggcttcagaatcctgctgctgaaagtggccggctttaacctgctgatgaccctgcggctgtggtccagc

SEQ ID NO: 5713 - DNA, 1863 bp, synthetic construct; identical to SEQ ID NO: 4737
  source 1..1863: mol_type = other DNA

SEQ ID NO: 5714 - DNA, 1875 bp, synthetic construct
  source 1..1875: mol_type = other DNA
atggccttaccagtgaccgccttgctcctgccgctggccttgctgctccacgccgccaggccggacatccagttgacccagtcccccagctcactcagcgccagtgtgggggaccgggtgaccattacctgtaaagccagtcagagtgtggactatgagggggatagcttcctgaattggtatcagcagaagcctggcaaagccccaaagctgctgatctacgctgcatctaatctggagtcaggcgtgccttctaggttctccggtagtgggtctgggaccgatttcacattgaccatttcatccctccaacccgaggatttcgctacatattactgtcagcagtccaatgaggaccctctcacctttggccagggcaccaaagttgaaattaagagactcgagatccagaaccctgatcctgccgtgtaccagctgcgggatagcaagagcagcgacaagagcgtgtgtctgttcaccgacttcgacagccagaccaacgtgtcccagagcaaggactccgacgtgtacatcaccgataagtgcgtgctggacatgcggagcatggacttcaagagcaactccgccgtggcctggtccaacaagtccgatttcgcctgcgccaacgccttcaacaacagcattatccccgaggacacattcttcccaagccccgagagcagctgcgacgtgaagctggtggaaaagagcttcgagacagacaccaacctgaacttccagaacctgagcgtgatcggcttcagaatcctgctgctgaaagtggccggctttaacctgctgatgaccctgcggctgtggtccagccgcgccaagagaagcggatctggcgtgaagcagaccctgaatttcgacctgctgaagctggctggcgacgtggaatccaacccaggccctactagtatggactggatttggcgcatccttttccttgtcggcgctgctaccggcgcgcattccttcgaagtccaacttgtggagtctggagggggcctggtgcagcccggcggctctctcagactgtcttgtgcggcaagcggctacaccttcacctcttactggatagaatgggtgaggcaggcacctggaaagggactggagtggattggagagattctgccaggagggggagatacaaattacaatgaaatcttcaaggggcgggccaccttttcagcggataccagcaagaatacagcttacctgcagatgaatagcctccgggcagaagataccgctgtttattattgcacgagacgggtgccaataagactggactattgggggcaagggactcttgtcaccgtcagttcaacgcgtgaggacctgaagaacgtgttcccacctgaggtggccgtgttcgagcctagcgaggccgagatcagccacacccagaaagccaccctcgtgtgcctggctaccggcttctaccccgaccatgtggaactgtcttggtgggtcaacggcaaagaggtgcacagcggcgtgtgtaccgacccccagccactgaaagaacagcccgccctgaacgacagccggtactgcctgagcagcagactgagagtgtccgccaccttctggcagaacccccggaaccacttcagatgccaggtgcagttctacggcctgagcgagaacgacgagtggacccaggacagagccaagcccgtgacccagatcgtgtctgccgaagcctggggcagagccgattgcggctttaccagcgagagctaccagcagggcgtgctgagcgccaccatcctgtacgagatcctgctgggcaaggccaccctgtacgccgtgctggtgtctgccctggtgctgatggctatggtcaagcggaaggacagccgggga

SEQ ID NO: 5715 - DNA, 1914 bp, synthetic construct
  source 1..1914: mol_type = other DNA
atggccttaccagtgaccgccttgctcctgccgctggccttgctgctccacgccgccaggccgctcgaggaggacctgaagaacgtgttcccacctgaggtggccgtgttcgagcctagcaaggccgagatcgcccacacccagaaagccaccctcgtgtgcctggctaccggcttctaccccgaccatgtggaactgtcttggtgggtcaacggcaaagaggtgcacagcggcgtgtgtaccgacccccagccactgaaagaacagcccgccctgaacgacagccggtactgcctgagcagcagactgagagtgtccgccaccttctggcagaacccccggaaccacttcagatgccaggtgcagttctacggcctgagcgagaacgacgagtggacccaggacagagccaagcccgtgacccagatcgtgtctgccgaagcctggggcagagccgattgcggcatcaccagcgccagctaccaccagggcgtgctgagcgccaccatcctgtacgagatcctgctgggcaaggccaccctgtacgccgtgctggtgtctgccctggtgctgatggctatggtcaagcggaaggacagccggggaagggccaagcgatctggatctggagcaacaaacttctcactactcaaacaagcaggtgacgtggaggagaatcccgggcctactagcatggccttaccagtgaccgccttgctcctgccgctggccttgctgctccacgccgccaggccggacatccagttgacccagtcccccagctcactcagcgccagtgtgggggaccgggtgaccattacctgtaaagccagtcagagtgtggactatgagggggatagcttcctgaattggtatcagcagaagcctggcaaagccccaaagctgctgatctacgctgcatctaatctggagtcaggcgtgccttctaggttctccggtagtgggtctgggaccgatttcacattgaccatttcatccctccaacccgaggatttcgctacatattactgtcagcagtccaatgaggaccctctcacctttggccagggcaccaaagttgaaattaagagaggcggaggcggaagtggaggcggaggatctggcggcggaggctctgaagtccaacttgtggagtctggagggggcctggtgcagcccggcggctctctcagactgtcttgtgcggcaagcggctacaccttcacctcttactggatagaatgggtgaggcaggcacctggaaagggactggagtggattggagagattctgccaggagggggagatacaaattacaatgaaatcttcaaggggcgggccaccttttcagcggataccagcaagaatacagcttacctgcagatgaatagcctccgggcagaagataccgctgtttattattgcacgagacgggtgccaataagactggactattgggggcaagggactcttgtcaccgtcagttcaacgcgtatccagaaccctgatcctgccgtgtaccagctgcgggatagcaagagcagcgacaagagcgtgtgtctgttcaccgacttcgacagccagaccaacgtgtcccagagcaaggactccgacgtgtacatcaccgataagtgcgtgctggacatgcggagcatggacttcaagagcaactccgccgtggcctggtccaacaagtccgatttcgcctgcgccaacgccttcaacaacagcattatccccgaggacacattcttcccaagcagcgacgtgccctgcgacgtgaagctggtggaaaagagcttcgagacagacaccaacctgaacttccagaacctgagcgtgatcggcttcagaatcctgctgctgaaagtggccggctttaacctgctgatgaccctgcggctgtggtccagc

SEQ ID NO: 5716 - DNA, 1935 bp, synthetic construct
  source 1..1935: mol_type = other DNA
atggccttaccagtgaccgccttgctcctgccgctggccttgctgctccacgccgccaggccgctcgagggctccggcgatcgccctgatcctgccgtgtaccagctgcgggatagcaagagcagcgacaagagcgtgtgtctgttcaccgacttcgacagccagaccaacgtgtcccagagcaaggactccgacgtgtacatcaccgataagtgcgtgctggacatgcggagcatggacttcaagagcaactccgccgtggcctggtccaacaagtccgatttcgcctgcgccaacgccttcaacaacagcattatccccgaggacacattcttcccaagccccgagagcagctgcgacgtgaagctggtggaaaagagcttcgagacagacaccaacctgaacttccagaacctgagcgtgatcggcttcagaatcctgctgctgaaagtggccggctttaacctgctgatgaccctgcggctgtggtccagctctagtcgcgccaagagaagcggatctggcgtgaagcagaccctgaatttcgacctgctgaagctggctggcgacgtggaatccaacccaggccccactagcatggccttaccagtgaccgccttgctcctgccgctggccttgctgctccacgccgccaggccggacatccagttgacccagtcccccagctcactcagcgccagtgtgggggaccgggtgaccattacctgtaaagccagtcagagtgtggactatgagggggatagcttcctgaattggtatcagcagaagcctggcaaagccccaaagctgctgatctacgctgcatctaatctggagtcaggcgtgccttctaggttctccggtagtgggtctgggaccgatttcacattgaccatttcatccctccaacccgaggatttcgctacatattactgtcagcagtccaatgaggaccctctcacctttggccagggcaccaaagttgaaattaagagaggcggaggcggaagtggaggcggaggatctggcggcggaggctctgaagtccaacttgtggagtctggagggggcctggtgcagcccggcggctctctcagactgtcttgtgcggcaagcggctacaccttcacctcttactggatagaatgggtgaggcaggcacctggaaagggactggagtggattggagagattctgccaggagggggagatacaaattacaatgaaatcttcaaggggcgggccaccttttcagcggataccagcaagaatacagcttacctgcagatgaatagcctccgggcagaagataccgctgtttattattgcacgagacgggtgccaataagactggactattgggggcaagggactcttgtcaccgtcagttcaacgcgtgaggacctgaagaacgtgttcccacctgaggtggccgtgttcgagcctagcgaggccgagatcagccacacccagaaagccaccctcgtgtgcctggctaccggcttctaccccgaccatgtggaactgtcttggtgggtcaacggcaaagaggtgcacagcggcgtgtgtaccgacccccagccactgaaagaacagcccgccctgaacgacagccggtactgcctgagcagcagactgagagtgtccgccaccttctggcagaacccccggaaccacttcagatgccaggtgcagttctacggcctgagcgagaacgacgagtggacccaggacagagccaagcccgtgacccagatcgtgtctgccgaagcctggggcagagccgattgcggctttaccagcgagagctaccagcagggcgtgctgagcgccaccatcctgtacgagatcctgctgggcaaggccaccctgtacgccgtgctggtgtctgccctggtgctgatggctatggtcaagcggaaggacagccgggga

SEQ ID NO: 5717 - DNA, 1863 bp, synthetic construct
  source 1..1863: mol_type = other DNA
atggccttaccagtgaccgccttgctcctgccgctggccttgctgctccacgccgccaggccggacatccagttgacccagtcccccagctcactcagcgccagtgtgggggaccgggtgaccattacctgtaaagccagtcagagtgtggactatgagggggatagcttcctgaattggtatcagcagaagcctggcaaagccccaaagctgctgatctacgctgcatctaatctggagtcaggcgtgccttctaggttctccggtagtgggtctgggaccgatttcacattgaccatttcatccctccaacccgaggatttcgctacatattactgtcagcagtccaatgaggaccctctcacctttggccagggcaccaaagttgaaattaagagactcgaggacctgaagaacgtgttcccacctgaggtggccgtgttcgagcctagcgaggccgagatcagccacacccagaaagccaccctcgtgtgcctggctaccggcttctaccccgaccatgtggaactgtcttggtgggtcaacggcaaagaggtgcacagcggcgtgtctaccgacccccagccactgaaagaacagcccgccctgaacgacagccggtactgcctgagcagcagactgagagtgtccgccaccttctggcagaacccccggaaccacttcagatgccaggtgcagttctacggcctgagcgagaacgacgagtggacccaggacagagccaagcccgtgacccagatcgtgtctgccgaagcctggggcagagccgattgcggctttaccagcgagagctaccagcagggcgtgctgagcgccaccatcctgtacgagatcctgctgggcaaggccaccctgtacgccgtgctggtgtctgccctggtgctgatggctatggtcaagcggaaggacagccggggaagggccaagcgatctggatctggagcaacaaacttctcactactcaaacaagcaggtgacgtggaggagaatcccgggcctactagtatggactggatttggcgcatccttttccttgtcggcgctgctaccggcgcgcattccttcgaagtccaacttgtggagtctggagggggcctggtgcagcccggcggctctctcagactgtcttgtgcggcaagcggctacaccttcacctcttactggatagaatgggtgaggcaggcacctggaaagggactggagtggattggagagattctgccaggagggggagatacaaattacaatgaaatcttcaaggggcgggccaccttttcagcggataccagcaagaatacagcttacctgcagatgaatagcctccgggcagaagataccgctgtttattattgcacgagacgggtgccaataagactggactattgggggcaagggactcttgtcaccgtcagttcaacgcgtatccagaaccctgatcctgccgtgtaccagctgcgggatagcaagagcagcgacaagagcgtgtgtctgttcaccgacttcgacagccagaccaacgtgtcccagagcaaggactccgacgtgtacatcaccgataagaccgtgctggacatgcggagcatggacttcaagagcaactccgccgtggcctggtccaacaagtccgatttcgcctgcgccaacgccttcaacaacagcattatccccgaggacacattcttcccaagccccgagagcagctgcgacgtgaagctggtggaaaagagcttcgagacagacaccaacctgaacttccagaacctgagcgtgatcggcttcagaatcctgctgctgaaagtggccggctttaacctgctgatgaccctgcggctgtggtccagc

SEQ ID NO: 5718 - DNA, 1887 bp, synthetic construct
  source 1..1887: mol_type = other DNA
atggccttaccagtgaccgccttgctcctgccgctggccttgctgctccacgccgccaggccggacatccagttgacccagtcccccagctcactcagcgccagtgtgggggaccgggtgaccattacctgtaaagccagtcagagtgtggactatgagggggatagcttcctgaattggtatcagcagaagcctggcaaagccccaaagctgctgatctacgctgcatctaatctggagtcaggcgtgccttctaggttctccggtagtgggtctgggaccgatttcacattgaccatttcatccctccaacccgaggatttcgctacatattactgtcagcagtccaatgaggaccctctcacctttggccagggcaccaaagttgaaattaagagactcgaggacaagcagctggacgccgacgtgtcccccaagcctaccatcttcctgccctctatcgccgagacaaagctccagaaggccggcacctacctgtgcctgctggaaaagttcttcccagatgtgattaagatccactggcaggaaaagaagtccaacaccatcctgggcagccaggaaggcaacaccatgaagaccaacgacacctacatgaagttcagctggctgaccgtgcccgagaagtccctggacaaagaacacagatgcatcgtgcggcacgaaaacaacaagaacggcgtggaccaggaaatcatcttcccacccatcaagaccgatgtgattacaatggaccccaaggacaactgctccaaggacgccaacgataccctgctgctccagctgaccaacaccagcgcctactacatgtacttgttgctgctgctgaagtccgtggtgtacttcgccatcatcacatgctgcctgctgcggagaaccgccttctgctgcaacggcgagaagtctagggccaagcgatctggatctggagcaacaaacttctcactactcaaacaagcaggtgacgtggaggagaatcccgggcctactagtatggactggatttggcgcatccttttccttgtcggcgctgctaccggcgcgcattccttcgaagtccaacttgtggagtctggagggggcctggtgcagcccggcggctctctcagactgtcttgtgcggcaagcggctacaccttcacctcttactggatagaatgggtgaggcaggcacctggaaagggactggagtggattggagagattctgccaggagggggagatacaaattacaatgaaatcttcaaggggcgggccaccttttcagcggataccagcaagaatacagcttacctgcagatgaatagcctccgggcagaagataccgctgtttattattgcacgagacgggtgccaataagactggactattgggggcaagggactcttgtcaccgtcagttcaacgcgtagccagcctcacaccaagcccagcgtgttcgtgatgaagaacggcaccaacgtggcctgcctcgtgaaagagttctaccccaaggacatcaggatcaacctggtgtccagcaagaagatcaccgagttcgaccccgccatcgtgatctcccccagcggcaagtacaacgccgtgaagctggggaagtacgaggacagcaacagcgtgacctgctccgtgcagcacgacaacaagaccgtgcacagcaccgactttgaagtgaaaaccgactccaccgaccacgtgaagcccaaagagacagagaacaccaagcagcccagcaagagctgccacaagcccaaggccatcgtgcacaccgagaaagtgaacatgatgagcctgaccgtgctgggcctgcggatgctgttcgccaaaaccgtggccgtgaacttcctgctgaccgccaagctgttcttcctc

SEQ ID NO: 5719 - DNA, 1887 bp, synthetic construct
  source 1..1887: mol_type = other DNA
atggccttaccagtgaccgccttgctcctgccgctggccttgctgctccacgccgccaggccggacatccagttgacccagtcccccagctcactcagcgccagtgtgggggaccgggtgaccattacctgtaaagccagtcagagtgtggactatgagggggatagcttcctgaattggtatcagcagaagcctggcaaagccccaaagctgctgatctacgctgcatctaatctggagtcaggcgtgccttctaggttctccggtagtgggtctgggaccgatttcacattgaccatttcatccctccaacccgaggatttcgctacatattactgtcagcagtccaatgaggaccctctcacctttggccagggcaccaaagttgaaattaagagactcgagagccagcctcacaccaagcccagcgtgttcgtgatgaagaacggcaccaacgtggcctgcctcgtgaaagagttctaccccaaggacatcaggatcaacctggtgtccagcaagaagatcaccgagttcgaccccgccatcgtgatctcccccagcggcaagtacaacgccgtgaagctggggaagtacgaggacagcaacagcgtgacctgctccgtgcagcacgacaacaagaccgtgcacagcaccgactttgaagtgaaaaccgactccaccgaccacgtgaagcccaaagagacagagaacaccaagcagcccagcaagagctgccacaagcccaaggccatcgtgcacaccgagaaagtgaacatgatgagcctgaccgtgctgggcctgcggatgctgttcgccaaaaccgtggccgtgaacttcctgctgaccgccaagctgttcttcctcagggccaagcgatctggatctggagcaacaaacttctcactactcaaacaagcaggtgacgtggaggagaatcccgggcctactagtatggactggatttggcgcatccttttccttgtcggcgctgctaccggcgcgcattccttcgaagtccaacttgtggagtctggagggggcctggtgcagcccggcggctctctcagactgtcttgtgcggcaagcggctacaccttcacctcttactggatagaatgggtgaggcaggcacctggaaagggactggagtggattggagagattctgccaggagggggagatacaaattacaatgaaatcttcaaggggcgggccaccttttcagcggataccagcaagaatacagcttacctgcagatgaatagcctccgggcagaagataccgctgtttattattgcacgagacgggtgccaataagactggactattgggggcaagggactcttgtcaccgtcagttcaacgcgtgacaagcagctggacgccgacgtgtcccccaagcctaccatcttcctgccctctatcgccgagacaaagctccagaaggccggcacctacctgtgcctgctggaaaagttcttcccagatgtgattaagatccactggcaggaaaagaagtccaacaccatcctgggcagccaggaaggcaacaccatgaagaccaacgacacctacatgaagttcagctggctgaccgtgcccgagaagtccctggacaaagaacacagatgcatcgtgcggcacgaaaacaacaagaacggcgtggaccaggaaatcatcttcccacccatcaagaccgatgtgattacaatggaccccaaggacaactgctccaaggacgccaacgataccctgctgctccagctgaccaacaccagcgcctactacatgtacttgttgctgctgctgaagtccgtggtgtacttcgccatcatcacatgctgcctgctgcggagaaccgccttctgctgcaacggcgagaagtct

SEQ ID NO: 5720 - DNA, 1935 bp, synthetic construct
  source 1..1935: mol_type = other DNA
atggccttaccagtgaccgccttgctcctgccgctggccttgctgctccacgccgccaggccgctcgaggacaagcagctggacgccgacgtgtcccccaagcctaccatcttcctgccctctatcgccgagacaaagctccagaaggccggcacctacctgtgcctgctggaaaagttcttcccagatgtgattaagatccactggcaggaaaagaagtccaacaccatcctgggcagccaggaaggcaacaccatgaagaccaacgacacctacatgaagttcagctggctgaccgtgcccgagaagtccctggacaaagaacacagatgcatcgtgcggcacgaaaacaacaagaacggcgtggaccaggaaatcatcttcccacccatcaagaccgatgtgattacaatggaccccaaggacaactgctccaaggacgccaacgataccctgctgctccagctgaccaacaccagcgcctactacatgtacttgttgctgctgctgaagtccgtggtgtacttcgccatcatcacatgctgcctgctgcggagaaccgccttctgctgcaacggcgagaagtctagggccaagcgatctggatctggagcaacaaacttctcactactcaaacaagcaggtgacgtggaggagaatcccgggcctactagcatggccttaccagtgaccgccttgctcctgccgctggccttgctgctccacgccgccaggccggacatccagttgacccagtcccccagctcactcagcgccagtgtgggggaccgggtgaccattacctgtaaagccagtcagagtgtggactatgagggggatagcttcctgaattggtatcagcagaagcctggcaaagccccaaagctgctgatctacgctgcatctaatctggagtcaggcgtgccttctaggttctccggtagtgggtctgggaccgatttcacattgaccatttcatccctccaacccgaggatttcgctacatattactgtcagcagtccaatgaggaccctctcacctttggccagggcaccaaagttgaaattaagagaggcggaggcggaagtggaggcggaggatctggcggcggaggctctgaagtccaacttgtggagtctggagggggcctggtgcagcccggcggctctctcagactgtcttgtgcggcaagcggctacaccttcacctcttactggatagaatgggtgaggcaggcacctggaaagggactggagtggattggagagattctgccaggagggggagatacaaattacaatgaaatcttcaaggggcgggccaccttttcagcggataccagcaagaatacagcttacctgcagatgaatagcctccgggcagaagataccgctgtttattattgcacgagacgggtgccaataagactggactattgggggcaagggactcttgtcaccgtcagttcaacgcgtagccagcctcacaccaagcccagcgtgttcgtgatgaagaacggcaccaacgtggcctgcctcgtgaaagagttctaccccaaggacatcaggatcaacctggtgtccagcaagaagatcaccgagttcgaccccgccatcgtgatctcccccagcggcaagtacaacgccgtgaagctggggaagtacgaggacagcaacagcgtgacctgctccgtgcagcacgacaacaagaccgtgcacagcaccgactttgaagtgaaaaccgactccaccgaccacgtgaagcccaaagagacagagaacaccaagcagcccagcaagagctgccacaagcccaaggccatcgtgcacaccgagaaagtgaacatgatgagcctgaccgtgctgggcctgcggatgctgttcgccaaaaccgtggccgtgaacttcctgctgaccgccaagctgttcttcctc

SEQ ID NO: 5721 - DNA, 2394 bp, synthetic construct
  source 1..2394: mol_type = other DNA
atggccttaccagtgaccgccttgctcctgccgctggccttgctgctccacgccgccaggccggacatccagttgacccagtcccccagctcactcagcgccagtgtgggggaccgggtgaccattacctgtaaagccagtcagagtgtggactatgagggggatagcttcctgaattggtatcagcagaagcctggcaaagccccaaagctgctgatctacgctgcatctaatctggagtcaggcgtgccttctaggttctccggtagtgggtctgggaccgatttcacattgaccatttcatccctccaacccgaggatttcgctacatattactgtcagcagtccaatgaggaccctctcacctttggccagggcaccaaagttgaaattaagagaggacagcctaaggccaatcctaccgtgacactgttccctccaagcagcgaagaactccaggccaacaaggccacacttgtgtgcctgatctccgacttctaccctggggctgtgacagtggcttggaaggccgatggatctcctgtgaaagccggcgtggaaaccaccaagccatccaagcagagcaacaacaaatacgccgccagctcctacctgagcctgacacctgagcagtggaagtcccacagatcctacagctgccaagtgacccacgaaggcagcaccgtggaaaagacagtggcccctacagagtgcagcggatcccagagcttcggcctgctggaccccaagctgtgctacctgctggatggcatcctgttcatctacggcgtgatcctgaccgccctgttcctgagagtgaagttcagcagaagcgccgacgcccctgcctaccagcagggacagaaccaactgtacaacgagctgaacctgggcagacgggaagagtacgacgtgctggacaagcggagaggcagggaccctgagatgggcggaaagccccagcggagaaagaacccccaggaaggactgtataacgaactccagaaagacaagatggccgaagcctacagcgagatcggcatgaagggcgagcggagaagaggcaagggccacgatggcctgtaccagggcctgagcaccgccaccaaggacacctatgacgccctgcacatgcaggccctgcctccaagaagggccaagcgatctggatctggagcaacaaacttctcactactcaaacaagcaggtgacgtggaggagaatcccgggcctactagtatggactggatttggcgcatccttttccttgtcggcgctgctaccggcgcgcattccttcgaagtccaacttgtggagtctggagggggcctggtgcagcccggcggctctctcagactgtcttgtgcggcaagcggctacaccttcacctcttactggatagaatgggtgaggcaggcacctggaaagggactggagtggattggagagattctgccaggagggggagatacaaattacaatgaaatcttcaaggggcgggccaccttttcagcggataccagcaagaatacagcttacctgcagatgaatagcctccgggcagaagataccgctgtttattattgcacgagacgggtgccaataagactggactattgggggcaagggactcttgtcaccgtcagttcagcctctacaaagggaccctccgtgtttcctctggctcccagcagcaagtctacaagcggaggaacagccgctctgggctgcctggtcaaggattactttcccgagcctgtgaccgtgtcctggaatagcggagcactgacaagcggcgtgcacacctttccagccgtgctgcaaagcagcggcctgtactctctgagcagcgtggtcacagtgcctagctctagcctgggcacccagacctacatctgcaatgtgaaccacaagcctagcaacaccaaggtggacaagagagtggaacccaagagctgtggtacccagagttttgggttgttggaccctaaattgtgctatctgttggacggaatcctgttcatttacggagtgatcctgaccgcattgttcctgcgggttaagttttccagatccgcagacgcacccgcttaccaacaagggcagaaccaactctacaatgaacttaatttggggcggagggaagagtacgacgttctggacaaaaggaggggacgagatcccgagatgggcggaaagcctcagcgaaggaagaatccgcaagaggggctttataacgaactccagaaagataaaatggcagaagcctatagtgagattgggatgaagggagaaaggaggaggggtaaaggtcacgatgggttgtaccaaggattgagcacagccactaaagatacctatgatgcgctccacatgcaggccctgccgccaaga

SEQ ID NO: 5722 - DNA, 2451 bp, synthetic construct
  source 1..2451: mol_type = other DNA
atggccttaccagtgaccgccttgctcctgccgctggccttgctgctccacgccgccaggccggacatccagttgacccagtcccccagctcactcagcgccagtgtgggggaccgggtgaccattacctgtaaagccagtcagagtgtggactatgagggggatagcttcctgaattggtatcagcagaagcctggcaaagccccaaagctgctgatctacgctgcatctaatctggagtcaggcgtgccttctaggttctccggtagtgggtctgggaccgatttcacattgaccatttcatccctccaacccgaggatttcgctacatattactgtcagcagtccaatgaggaccctctcacctttggccagggcaccaaagttgaaattaagagactcgaggacctgaagaacgtgttcccacctgaggtggccgtgttcgagcctagcgaggccgagatcagccacacccagaaagccaccctcgtgtgcctggctaccggcttctaccccgaccatgtggaactgtcttggtgggtcaacggcaaagaggtgcacagcggcgtgtctaccgacccccagccactgaaagaacagcccgccctgaacgacagccggtactgcctgagcagcagactgagagtgtccgccaccttctggcagaacccccggaaccacttcagatgccaggtgcagttctacggcctgagcgagaacgacgagtggacccaggacagagccaagcccgtgacccagatcgtgtctgccgaagcctggggcagagccgattgcggatcccagagcttcggcctgctggaccccaagctgtgctacctgctggatggcatcctgttcatctacggcgtgatcctgaccgccctgttcctgagagtgaagttcagcagaagcgccgacgcccctgcctaccagcagggacagaaccaactgtacaacgagctgaacctgggcagacgggaagagtacgacgtgctggacaagcggagaggcagggaccctgagatgggcggaaagccccagcggagaaagaacccccaggaaggactgtataacgaactccagaaagacaagatggccgaagcctacagcgagatcggcatgaagggcgagcggagaagaggcaagggccacgatggcctgtaccagggcctgagcaccgccaccaaggacacctatgacgccctgcacatgcaggccctgcctccaagaagggccaagcgatctggatctggagcaacaaacttctcactactcaaacaagcaggtgacgtggaggagaatcccgggcctactagtatggactggatttggcgcatccttttccttgtcggcgctgctaccggcgcgcattccttcgaagtccaacttgtggagtctggagggggcctggtgcagcccggcggctctctcagactgtcttgtgcggcaagcggctacaccttcacctcttactggatagaatgggtgaggcaggcacctggaaagggactggagtggattggagagattctgccaggagggggagatacaaattacaatgaaatcttcaaggggcgggccaccttttcagcggataccagcaagaatacagcttacctgcagatgaatagcctccgggcagaagataccgctgtttattattgcacgagacgggtgccaataagactggactattgggggcaagggactcttgtcaccgtcagttcaacgcgtatccagaaccctgatcctgccgtgtaccagctgcgggatagcaagagcagcgacaagagcgtgtgtctgttcaccgacttcgacagccagaccaacgtgtcccagagcaaggactccgacgtgtacatcaccgataagaccgtgctggacatgcggagcatggacttcaagagcaactccgccgtggcctggtccaacaagtccgatttcgcctgcgccaacgccttcaacaacagcattatccccgaggacacattcttcccaagccccgagagcagctgcggtacccagagttttgggttgttggaccctaaattgtgctatctgttggacggaatcctgttcatttacggagtgatcctgaccgcattgttcctgcgggttaagttttccagatccgcagacgcacccgcttaccaacaagggcagaaccaactctacaatgaacttaatttggggcggagggaagagtacgacgttctggacaaaaggaggggacgagatcccgagatgggcggaaagcctcagcgaaggaagaatccgcaagaggggctttataacgaactccagaaagataaaatggcagaagcctatagtgagattgggatgaagggagaaaggaggaggggtaaaggtcacgatgggttgtaccaaggattgagcacagccactaaagatacctatgatgcgctccacatgcaggccctgccgccaaga

SEQ ID NO: 5723 - DNA, 2577 bp, synthetic construct
  source 1..2577: mol_type = other DNA
atggccttaccagtgaccgccttgctcctgccgctggccttgctgctccacgccgccaggccggacatccagttgacccagtcccccagctcactcagcgccagtgtgggggaccgggtgaccattacctgtaaagccagtcagagtgtggactatgagggggatagcttcctgaattggtatcagcagaagcctggcaaagccccaaagctgctgatctacgctgcatctaatctggagtcaggcgtgccttctaggttctccggtagtgggtctgggaccgatttcacattgaccatttcatccctccaacccgaggatttcgctacatattactgtcagcagtccaatgaggaccctctcacctttggccagggcaccaaagttgaaattaagagactcgaggaggacctgaagaacgtgttcccacctgaggtggccgtgttcgagcctagcgaggccgagatcagccacacccagaaagccaccctcgtgtgcctggctaccggcttctaccccgaccatgtggaactgtcttggtgggtcaacggcaaagaggtgcacagcggcgtgtctaccgacccccagccactgaaagaacagcccgccctgaacgacagccggtactgcctgagcagcagactgagagtgtccgccaccttctggcagaacccccggaaccacttcagatgccaggtgcagttctacggcctgagcgagaacgacgagtggacccaggacagagccaagcccgtgacccagatcgtgtctgccgaagcctggggcagagccgattgcggatcccagagcttcggcctgctggaccccaagctgtgctacctgctggatggcatcctgttcatctacggcgtgatcctgaccgccctgttcctgagagtgaagttcagcagaagcgccgacgcccctgcctaccagcagggacagaaccaactgtacaacgagctgaacctgggcagacgggaagagtacgacgtgctggacaagcggagaggcagggaccctgagatgggcggaaagccccagcggagaaagaacccccaggaaggactgtataacgaactccagaaagacaagatggccgaagcctacagcgagatcggcatgaagggcgagcggagaagaggcaagggccacgatggcctgtaccagggcctgagcaccgccaccaaggacacctatgacgccctgcacatgcaggccctgcctccaagaagggccaagcgatctggatctggagcaacaaacttctcactactcaaacaagcaggtgacgtggaggagaatcccgggcctactagtatggactggatttggcgcatccttttccttgtcggcgctgctaccggcgcgcattccttcgaagtccaacttgtggagtctggagggggcctggtgcagcccggcggctctctcagactgtcttgtgcggcaagcggctacaccttcacctcttactggatagaatgggtgaggcaggcacctggaaagggactggagtggattggagagattctgccaggagggggagatacaaattacaatgaaatcttcaaggggcgggccaccttttcagcggataccagcaagaatacagcttacctgcagatgaatagcctccgggcagaagataccgctgtttattattgcacgagacgggtgccaataagactggactattgggggcaagggactcttgtcaccgtcagttcaacgcgtatccagaaccctgatcctgccgtgtaccagctgcgggatagcaagagcagcgacaagagcgtgtgtctgttcaccgacttcgacagccagaccaacgtgtcccagagcaaggactccgacgtgtacatcaccgataagaccgtgctggacatgcggagcatggacttcaagagcaactccgccgtggcctggtccaacaagtccgatttcgcctgcgccaacgccttcaacaacagcattatccccgaggacacattcttcccaagccccgagagcagctgcggtacccagagttttgggttgttggaccctaaattgtgctatctgttggacggaatcctgttcatttacggagtgatcctgaccgcattgttcctgaggagcaagcggtcacggctgctccacagcgattacatgaatatgacaccacgaagaccgggtcctactcgcaaacactaccaaccctacgcacctccccgcgactttgcagcgtaccgatctcgggttaagttttccagatccgcagacgcacccgcttaccaacaagggcagaaccaactctacaatgaacttaatttggggcggagggaagagtacgacgttctggacaaaaggaggggacgagatcccgagatgggcggaaagcctcagcgaaggaagaatccgcaagaggggctttataacgaactccagaaagataaaatggcagaagcctatagtgagattgggatgaagggagaaaggaggaggggtaaaggtcacgatgggttgtaccaaggattgagcacagccactaaagatacctatgatgcgctccacatgcaggccctgccgccaaga

SEQ ID NO: 5724 - DNA, 2706 bp, synthetic construct
  source 1..2706: mol_type = other DNA
atggccttaccagtgaccgccttgctcctgccgctggccttgctgctccacgccgccaggccggacatccagttgacccagtcccccagctcactcagcgccagtgtgggggaccgggtgaccattacctgtaaagccagtcagagtgtggactatgagggggatagcttcctgaattggtatcagcagaagcctggcaaagccccaaagctgctgatctacgctgcatctaatctggagtcaggcgtgccttctaggttctccggtagtgggtctgggaccgatttcacattgaccatttcatccctccaacccgaggatttcgctacatattactgtcagcagtccaatgaggaccctctcacctttggccagggcaccaaagttgaaattaagagactcgaggaggacctgaagaacgtgttcccacctgaggtggccgtgttcgagcctagcgaggccgagatcagccacacccagaaagccaccctcgtgtgcctggctaccggcttctaccccgaccatgtggaactgtcttggtgggtcaacggcaaagaggtgcacagcggcgtgtctaccgacccccagccactgaaagaacagcccgccctgaacgacagccggtactgcctgagcagcagactgagagtgtccgccaccttctggcagaacccccggaaccacttcagatgccaggtgcagttctacggcctgagcgagaacgacgagtggacccaggacagagccaagcccgtgacccagatcgtgtctgccgaagcctggggcagagccgattgcggatcccagagcttcggcctgctggaccccaagctgtgctacctgctggatggcatcctgttcatctacggcgtgatcctgaccgccctgttcctgaaacggggcagaaagaaactcctgtatatattcaaacaaccatttatgagaccagtacaaactactcaagaggaagatggctgtagctgccgatttccagaagaagaagaaggaggatgtgaactgagagtgaagttcagcagaagcgccgacgcccctgcctaccagcagggacagaaccaactgtacaacgagctgaacctgggcagacgggaagagtacgacgtgctggacaagcggagaggcagggaccctgagatgggcggaaagccccagcggagaaagaacccccaggaaggactgtataacgaactccagaaagacaagatggccgaagcctacagcgagatcggcatgaagggcgagcggagaagaggcaagggccacgatggcctgtaccagggcctgagcaccgccaccaaggacacctatgacgccctgcacatgcaggccctgcctccaagaagggccaagcgatctggatctggagcaacaaacttctcactactcaaacaagcaggtgacgtggaggagaatcccgggcctactagtatggactggatttggcgcatccttttccttgtcggcgctgctaccggcgcgcattccttcgaagtccaacttgtggagtctggagggggcctggtgcagcccggcggctctctcagactgtcttgtgcggcaagcggctacaccttcacctcttactggatagaatgggtgaggcaggcacctggaaagggactggagtggattggagagattctgccaggagggggagatacaaattacaatgaaatcttcaaggggcgggccaccttttcagcggataccagcaagaatacagcttacctgcagatgaatagcctccgggcagaagataccgctgtttattattgcacgagacgggtgccaataagactggactattgggggcaagggactcttgtcaccgtcagttcaacgcgtatccagaaccctgatcctgccgtgtaccagctgcgggatagcaagagcagcgacaagagcgtgtgtctgttcaccgacttcgacagccagaccaacgtgtcccagagcaaggactccgacgtgtacatcaccgataagaccgtgctggacatgcggagcatggacttcaagagcaactccgccgtggcctggtccaacaagtccgatttcgcctgcgccaacgccttcaacaacagcattatccccgaggacacattcttcccaagccccgagagcagctgcggtacccagagttttgggttgttggaccctaaattgtgctatctgttggacggaatcctgttcatttacggagtgatcctgaccgcattgttcctgaagagaggccggaagaagctgctgtacatcttcaagcagcctttcatgcggcccgtgcagaccacccaggaagaggacggctgctcctgccggttccccgaggaagaagaaggcggctgcgagctgcgggttaagttttccagatccgcagacgcacccgcttaccaacaagggcagaaccaactctacaatgaacttaatttggggcggagggaagagtacgacgttctggacaaaaggaggggacgagatcccgagatgggcggaaagcctcagcgaaggaagaatccgcaagaggggctttataacgaactccagaaagataaaatggcagaagcctatagtgagattgggatgaagggagaaaggaggaggggtaaaggtcacgatgggttgtaccaaggattgagcacagccactaaagatacctatgatgcgctccacatgcaggccctgccgccaaga

SEQ ID NO: 5725 - DNA, 1767 bp, synthetic construct
  source 1..1767: mol_type = other DNA
atggccttaccagtgaccgccttgctcctgccgctggccttgctgctccacgccgccaggccggacatccagttgacccagtcccccagctcactcagcgccagtgtgggggaccgggtgaccattacctgtaaagccagtcagagtgtggactatgagggggatagcttcctgaattggtatcagcagaagcctggcaaagccccaaagctgctgatctacgctgcatctaatctggagtcaggcgtgccttctaggttctccggtagtgggtctgggaccgatttcacattgaccatttcatccctccaacccgaggatttcgctacatattactgtcagcagtccaatgaggaccctctcacctttggccagggcaccaaagttgaaattaagagactcgagcagagcttcggcctgctggaccccaagctgtgctacctgctggatggcatcctgttcatctacggcgtgatcctgaccgccctgttcctgagagtgaagttcagcagaagcgccgacgcccctgcctaccagcagggacagaaccaactgtacaacgagctgaacctgggcagacgggaagagtacgacgtgctggacaagcggagaggcagggaccctgagatgggcggaaagccccagcggagaaagaacccccaggaaggactgtataacgaactccagaaagacaagatggccgaagcctacagcgagatcggcatgaagggcgagcggagaagaggcaagggccacgatggcctgtaccagggcctgagcaccgccaccaaggacacctatgacgccctgcacatgcaggccctgcctccaagaagggccaagcgatctggatctggagcaacaaacttctcactactcaaacaagcaggtgacgtggaggagaatcccgggcctactagtatggactggatttggcgcatccttttccttgtcggcgctgctaccggcgcgcattccttcgaagtccaacttgtggagtctggagggggcctggtgcagcccggcggctctctcagactgtcttgtgcggcaagcggctacaccttcacctcttactggatagaatgggtgaggcaggcacctggaaagggactggagtggattggagagattctgccaggagggggagatacaaattacaatgaaatcttcaaggggcgggccaccttttcagcggataccagcaagaatacagcttacctgcagatgaatagcctccgggcagaagataccgctgtttattattgcacgagacgggtgccaataagactggactattgggggcaagggactcttgtcaccgtcagttcaacgcgtcagagttttgggttgttggaccctaaattgtgctatctgttggacggaatcctgttcatttacggagtgatcctgaccgcattgttcctgcgggttaagttttccagatccgcagacgcacccgcttaccaacaagggcagaaccaactctacaatgaacttaatttggggcggagggaagagtacgacgttctggacaaaaggaggggacgagatcccgagatgggcggaaagcctcagcgaaggaagaatccgcaagaggggctttataacgaactccagaaagataaaatggcagaagcctatagtgagattgggatgaagggagaaaggaggaggggtaaaggtcacgatgggttgtaccaaggattgagcacagccactaaagatacctatgatgcgctccacatgcaggccctgccgccaaga

SEQ ID NO: 5726 - DNA, 1941 bp, synthetic construct
  source 1..1941: mol_type = other DNA
atggccttaccagtgaccgccttgctcctgccgctggccttgctgctccacgccgccaggccggacatccagttgacccagtcccccagctcactcagcgccagtgtgggggaccgggtgaccattacctgtaaagccagtcagagtgtggactatgagggggatagcttcctgaattggtatcagcagaagcctggcaaagccccaaagctgctgatctacgctgcatctaatctggagtcaggcgtgccttctaggttctccggtagtgggtctgggaccgatttcacattgaccatttcatccctccaacccgaggatttcgctacatattactgtcagcagtccaatgaggaccctctcacctttggccagggcaccaaagttgaaattaagagactcgagggacagcctaaggccaatcctaccgtgacactgttccctccaagcagcgaagaactccaggccaacaaggccacacttgtgtgcctgatctccgacttctaccctggggctgtgacagtggcttggaaggccgatggatctcctgtgaaagccggcgtggaaaccaccaagccatccaagcagagcaacaacaaatacgccgccagctcctacctgagcctgacacctgagcagtggaagtcccacagatcctacagctgccaagtgacccacgaaggcagcaccgtggaaaagacagtggcccctacagagtgcagccccatcaagaccgatgtgattacaatggaccccaaggacaactgctccaaggacgccaacgataccctgctgctccagctgaccaacaccagcgcctactacatgtacttgttgctgctgctgaagtccgtggtgtacttcgccatcatcacatgctgcctgctgcggagaaccgccttctgctgcaacggcgagaagtctagggccaagcgatctggatctggagcaacaaacttctcactactcaaacaagcaggtgacgtggaggagaatcccgggcctactagtatggactggatttggcgcatccttttccttgtcggcgctgctaccggcgcgcattccttcgaagtccaacttgtggagtctggagggggcctggtgcagcccggcggctctctcagactgtcttgtgcggcaagcggctacaccttcacctcttactggatagaatgggtgaggcaggcacctggaaagggactggagtggattggagagattctgccaggagggggagatacaaattacaatgaaatcttcaaggggcgggccaccttttcagcggataccagcaagaatacagcttacctgcagatgaatagcctccgggcagaagataccgctgtttattattgcacgagacgggtgccaataagactggactattgggggcaagggactcttgtcaccgtcagttcaacgcgtgcctctacaaagggaccctccgtgtttcctctggctcccagcagcaagtctacaagcggaggaacagccgctctgggctgcctggtcaaggattactttcccgagcctgtgaccgtgtcctggaatagcggagcactgacaagcggcgtgcacacctttccagccgtgctgcaaagcagcggcctgtactctctgagcagcgtggtcacagtgcctagctctagcctgggcacccagacctacatctgcaatgtgaaccacaagcctagcaacaccaaggtggacaagagagtggaacccaagagctgtgaagtgaaaaccgactccaccgaccacgtgaagcccaaagagacagagaacaccaagcagcccagcaagagctgccacaagcccaaggccatcgtgcacaccgagaaagtgaacatgatgagcctgaccgtgctgggcctgcggatgctgttcgccaaaaccgtggccgtgaacttcctgctgaccgccaagctgttcttcctc

SEQ ID NO: 5727 - DNA, 1875 bp, synthetic construct
  source 1..1875: mol_type = other DNA
atggccttaccagtgaccgccttgctcctgccgctggccttgctgctccacgccgccaggccggacatccagttgacccagtcccccagctcactcagcgccagtgtgggggaccgggtgaccattacctgtaaagccagtcagagtgtggactatgagggggatagcttcctgaattggtatcagcagaagcctggcaaagccccaaagctgctgatctacgctgcatctaatctggagtcaggcgtgccttctaggttctccggtagtgggtctgggaccgatttcacattgaccatttcatccctccaacccgaggatttcgctacatattactgtcagcagtccaatgaggaccctctcacctttggccagggcaccaaagttgaaattaagagactcgagggacagcctaaggccaatcctaccgtgacactgttccctccaagcagcgaagaactccaggccaacaaggccacacttgtgtgcctgatctccgacttctaccctggggctgtgacagtggcttggaaggccgatggatctcctgtgaaagccggcgtggaaaccaccaagccatccaagcagagcaacaacaaatacgccgccagctcctacctgagcctgacacctgagcagtggaagtcccacagatcctacagctgccaagtgacccacgaaggcagcaccgtggaaaagacagtggcccctacagagtgcagcggcagagccgattgcggcatcaccagcgccagctaccaccagggcgtgctgagcgccaccatcctgtacgagatcctgctgggcaaggccaccctgtacgccgtgctggtgtctgccctggtgctgatggctatggtcaagcggaaggacagccggggaagggccaagcgatctggatctggagcaacaaacttctcactactcaaacaagcaggtgacgtggaggagaatcccgggcctactagtatggactggatttggcgcatccttttccttgtcggcgctgctaccggcgcgcattccttcgaagtccaacttgtggagtctggagggggcctggtgcagcccggcggctctctcagactgtcttgtgcggcaagcggctacaccttcacctcttactggatagaatgggtgaggcaggcacctggaaagggactggagtggattggagagattctgccaggagggggagatacaaattacaatgaaatcttcaaggggcgggccaccttttcagcggataccagcaagaatacagcttacctgcagatgaatagcctccgggcagaagataccgctgtttattattgcacgagacgggtgccaataagactggactattgggggcaagggactcttgtcaccgtcagttcaacgcgtgcctctacaaagggaccctccgtgtttcctctggctcccagcagcaagtctacaagcggaggaacagccgctctgggctgcctggtcaaggattactttcccgagcctgtgaccgtgtcctggaatagcggagcactgacaagcggcgtgcacacctttccagccgtgctgcaaagcagcggcctgtactctctgagcagcgtggtcacagtgcctagctctagcctgggcacccagacctacatctgcaatgtgaaccacaagcctagcaacaccaaggtggacaagagagtggaacccaagagctgtatccccgaggacacattcttcccaagcagcgacgtgccctgcgacgtgaagctggtggaaaagagcttcgagacagacaccaacctgaacttccagaacctgagcgtgatcggcttcagaatcctgctgctgaaagtggccggctttaacctgctgatgaccctgcggctgtggtccagc

SEQ ID NO: 5728 - DNA, 1875 bp, synthetic construct
  source 1..1875: mol_type = other DNA
atggccttaccagtgaccgccttgctcctgccgctggccttgctgctccacgccgccaggccggacatccagttgacccagtcccccagctcactcagcgccagtgtgggggaccgggtgaccattacctgtaaagccagtcagagtgtggactatgagggggatagcttcctgaattggtatcagcagaagcctggcaaagccccaaagctgctgatctacgctgcatctaatctggagtcaggcgtgccttctaggttctccggtagtgggtctgggaccgatttcacattgaccatttcatccctccaacccgaggatttcgctacatattactgtcagcagtccaatgaggaccctctcacctttggccagggcaccaaagttgaaattaagagactcgagggacagcctaaggccaatcctaccgtgacactgttccctccaagcagcgaagaactccaggccaacaaggccacacttgtgtgcctgatctccgacttctaccctggggctgtgacagtggcttggaaggccgatggatctcctgtgaaagccggcgtggaaaccaccaagccatccaagcagagcaacaacaaatacgccgccagctcctacctgagcctgacacctgagcagtggaagtcccacagatcctacagctgccaagtgacccacgaaggcagcaccgtggaaaagacagtggcccctacagagtgcagcggcagagccgattgcggctttaccagcgagagctaccagcagggcgtgctgagcgccaccatcctgtacgagatcctgctgggcaaggccaccctgtacgccgtgctggtgtctgccctggtgctgatggctatggtcaagcggaaggacagccggggaagggccaagcgatctggatctggagcaacaaacttctcactactcaaacaagcaggtgacgtggaggagaatcccgggcctactagtatggactggatttggcgcatccttttccttgtcggcgctgctaccggcgcgcattccttcgaagtccaacttgtggagtctggagggggcctggtgcagcccggcggctctctcagactgtcttgtgcggcaagcggctacaccttcacctcttactggatagaatgggtgaggcaggcacctggaaagggactggagtggattggagagattctgccaggagggggagatacaaattacaatgaaatcttcaaggggcgggccaccttttcagcggataccagcaagaatacagcttacctgcagatgaatagcctccgggcagaagataccgctgtttattattgcacgagacgggtgccaataagactggactattgggggcaagggactcttgtcaccgtcagttcaacgcgtgcctctacaaagggaccctccgtgtttcctctggctcccagcagcaagtctacaagcggaggaacagccgctctgggctgcctggtcaaggattactttcccgagcctgtgaccgtgtcctggaatagcggagcactgacaagcggcgtgcacacctttccagccgtgctgcaaagcagcggcctgtactctctgagcagcgtggtcacagtgcctagctctagcctgggcacccagacctacatctgcaatgtgaaccacaagcctagcaacaccaaggtggacaagagagtggaacccaagagctgtatccccgaggacacattcttcccaagccccgagagcagctgcgacgtgaagctggtggaaaagagcttcgagacagacaccaacctgaacttccagaacctgagcgtgatcggcttcagaatcctgctgctgaaagtggccggctttaacctgctgatgaccctgcggctgtggtccagc

SEQ ID NO: 5729 - DNA, 1356 bp, synthetic construct
  source 1..1356: mol_type = other DNA
atggccttaccagtgaccgccttgctcctgccgctggccttgctgctccacgccgccaggccggacatccagttgacccagtcccccagctcactcagcgccagtgtgggggaccgggtgaccattacctgtaaagccagtcagagtgtggactatgagggggatagcttcctgaattggtatcagcagaagcctggcaaagccccaaagctgctgatctacgctgcatctaatctggagtcaggcgtgccttctaggttctccggtagtgggtctgggaccgatttcacattgaccatttcatccctccaacccgaggatttcgctacatattactgtcagcagtccaatgaggaccctctcacctttggccagggcaccaaagttgaaattaagagaggcggaggcggaagtggaggcggaggatctggcggcggaggctctgaagtccaacttgtggagtctggagggggcctggtgcagcccggcggctctctcagactgtcttgtgcggcaagcggctacaccttcacctcttactggatagaatgggtgaggcaggcacctggaaagggactggagtggattggagagattctgccaggagggggagatacaaattacaatgaaatcttcaaggggcgggccaccttttcagcggataccagcaagaatacagcttacctgcagatgaatagcctccgggcagaagataccgctgtttattattgcacgagacgggtgccaataagactggactattgggggcaagggactcttgtcaccgtcagttcaacgcgtgacggtaacgaggagatgggaggaatcactcaaaccccttacaaagtctcaatttcaggaacaactgttatccttacatgtccccagtatcctggcagcgagatcctttggcagcataacgacaagaatatagggggagatgaagacgataagaatatcggatctgacgaggatcacttgagcctgaaagagttctccgagcttgaacaaagcggatattatgtgtgctatccgcgcgggtcaaagccggaagacgctaacttttacctttatctccgagccagagtgtgcgaaaattgcatggaaatggacgttatgtccgttgctacaatagttatcgtagatatatgcatcacgggtggactgcttctgctggtttattattggtccaagaatagaaaggccaaagctaaacccgtgaccagaggcgctggcgcaggcggaaggcaaaggggacaaaacaaagaacggccaccaccagtgccaaatccagattatgagcctattcggaaaggacagagggacctgtactctggcctgaatcagagaagaatc

SEQ ID NO: 5730 - DNA, 1251 bp, synthetic construct
  source 1..1251: mol_type = other DNA
atggccttaccagtgaccgccttgctcctgccgctggccttgctgctccacgccgccaggccggacatccagttgacccagtcccccagctcactcagcgccagtgtgggggaccgggtgaccattacctgtaaagccagtcagagtgtggactatgagggggatagcttcctgaattggtatcagcagaagcctggcaaagccccaaagctgctgatctacgctgcatctaatctggagtcaggcgtgccttctaggttctccggtagtgggtctgggaccgatttcacattgaccatttcatccctccaacccgaggatttcgctacatattactgtcagcagtccaatgaggaccctctcacctttggccagggcaccaaagttgaaattaagagaggcggaggcggaagtggaggcggaggatctggcggcggaggctctgaagtccaacttgtggagtctggagggggcctggtgcagcccggcggctctctcagactgtcttgtgcggcaagcggctacaccttcacctcttactggatagaatgggtgaggcaggcacctggaaagggactggagtggattggagagattctgccaggagggggagatacaaattacaatgaaatcttcaaggggcgggccaccttttcagcggataccagcaagaatacagcttacctgcagatgaatagcctccgggcagaagataccgctgtttattattgcacgagacgggtgccaataagactggactattgggggcaagggactcttgtcaccgtcagttcaacgcgtttcaagatccccatcgaggaactggaagatcgggtgttcgtgaactgcaacacctctatcacctgggtggaaggcaccgtgggaacactgctgagcgacatcaccagactggacctcggcaagcggattctggaccctcggggcatctacagatgcaacggcaccgacatctacaaggacaaagaaagcaccgtgcaggtccactacagaatgtgccagtcctgcgtggaactggaccctgctacagtggccggcatcatcgtgaccgatgtgatcgctactctgctgctggctctgggagtgttctgcttcgccggacacgaaacaggcagactgtctggcgctgccgatacacaggccctgctgagaaacgaccaagtgtatcagcccctgcgcgacagagatgatgcccagtattctcacctcggcggcaactgggctagaaacaag

SEQ ID NO: 5731 - DNA, 1281 bp, synthetic construct
  source 1..1281: mol_type = other DNA
atggccttaccagtgaccgccttgctcctgccgctggccttgctgctccacgccgccaggccggacatccagttgacccagtcccccagctcactcagcgccagtgtgggggaccgggtgaccattacctgtaaagccagtcagagtgtggactatgagggggatagcttcctgaattggtatcagcagaagcctggcaaagccccaaagctgctgatctacgctgcatctaatctggagtcaggcgtgccttctaggttctccggtagtgggtctgggaccgatttcacattgaccatttcatccctccaacccgaggatttcgctacatattactgtcagcagtccaatgaggaccctctcacctttggccagggcaccaaagttgaaattaagagaggcggaggcggaagtggaggcggaggatctggcggcggaggctctgaagtccaacttgtggagtctggagggggcctggtgcagcccggcggctctctcagactgtcttgtgcggcaagcggctacaccttcacctcttactggatagaatgggtgaggcaggcacctggaaagggactggagtggattggagagattctgccaggagggggagatacaaattacaatgaaatcttcaaggggcgggccaccttttcagcggataccagcaagaatacagcttacctgcagatgaatagcctccgggcagaagataccgctgtttattattgcacgagacgggtgccaataagactggactattgggggcaagggactcttgtcaccgtcagttcaacgcgtcagagcatcaagggcaaccacctggtcaaggtgtacgactaccaagaggacggcagcgtgctgctgacatgtgatgccgaggccaagaacatcacctggtttaaggacggcaagatgatcggcttcctgaccgaggacaagaagaagtggaacctgggcagcaacgctaaggaccccagaggcatgtatcagtgcaagggcagccagaacaagagcaagcccctccaggtgtactaccggatgtgccagaactgcatcgagctgaacgccgctaccatcagcggctttctgttcgccgagatcgtgtccatcttcgtgctggccgtgggcgtgtactttatcgctggacaggatggcgtgcggcagagcagagcttccgataagcaaaccctgctgcctaacgaccagctgtaccagcctctgaaggacagagaggacgaccagtacagccacctccagggcaatcagctgagaagaaac

SEQ ID NO: 5732 - DNA, 1230 bp, synthetic construct
  source 1..1230: mol_type = other DNA
atggccttaccagtgaccgccttgctcctgccgctggccttgctgctccacgccgccaggccggacatccagttgacccagtcccccagctcactcagcgccagtgtgggggaccgggtgaccattacctgtaaagccagtcagagtgtggactatgagggggatagcttcctgaattggtatcagcagaagcctggcaaagccccaaagctgctgatctacgctgcatctaatctggagtcaggcgtgccttctaggttctccggtagtgggtctgggaccgatttcacattgaccatttcatccctccaacccgaggatttcgctacatattactgtcagcagtccaatgaggaccctctcacctttggccagggcaccaaagttgaaattaagagaggcggaggcggaagtggaggcggaggatctggcggcggaggctctgaagtccaacttgtggagtctggagggggcctggtgcagcccggcggctctctcagactgtcttgtgcggcaagcggctacaccttcacctcttactggatagaatgggtgaggcaggcacctggaaagggactggagtggattggagagattctgccaggagggggagatacaaattacaatgaaatcttcaaggggcgggccaccttttcagcggataccagcaagaatacagcttacctgcagatgaatagcctccgggcagaagataccgctgtttattattgcacgagacgggtgccaataagactggactattgggggcaagggactcttgtcaccgtcagttcaacgcgtcagagttttgggttgttggaccctaaattgtgctatctgttggacggaatcctgttcatttacggagtgatcctgaccgcattgttcctgcgggttaagttttccagatccgcagacgcacccgcttaccaacaagggcagaaccaactctacaatgaacttaatttggggcggagggaagagtacgacgttctggacaaaaggaggggacgagatcccgagatgggcggaaagcctcagcgaaggaagaatccgcaagaggggctttataacgaactccagaaagataaaatggcagaagcctatagtgagattgggatgaagggagaaaggaggaggggtaaaggtcacgatgggttgtaccaaggattgagcacagccactaaagatacctatgatgcgctccacatgcaggccctgccgccaaga

SEQ ID NO: 5733 - DNA, 1515 bp, synthetic construct
  source 1..1515: mol_type = other DNA
atggccttaccagtgaccgccttgctcctgccgctggccttgctgctccacgccgccaggccggacatccagttgacccagtcccccagctcactcagcgccagtgtgggggaccgggtgaccattacctgtaaagccagtcagagtgtggactatgagggggatagcttcctgaattggtatcagcagaagcctggcaaagccccaaagctgctgatctacgctgcatctaatctggagtcaggcgtgccttctaggttctccggtagtgggtctgggaccgatttcacattgaccatttcatccctccaacccgaggatttcgctacatattactgtcagcagtccaatgaggaccctctcacctttggccagggcaccaaagttgaaattaagagaggcggaggcggaagtggaggcggaggatctggcggcggaggctctgaagtccaacttgtggagtctggagggggcctggtgcagcccggcggctctctcagactgtcttgtgcggcaagcggctacaccttcacctcttactggatagaatgggtgaggcaggcacctggaaagggactggagtggattggagagattctgccaggagggggagatacaaattacaatgaaatcttcaaggggcgggccaccttttcagcggataccagcaagaatacagcttacctgcagatgaatagcctccgggcagaagataccgctgtttattattgcacgagacgggtgccaataagactggactattgggggcaagggactcttgtcaccgtcagttcaacgcgtggaatgaggactgaggatcttcccaaagctgtcgtctttctcgaaccccaatggtatcgggtgctcgaaaaagactctgtgacactgaaatgccaaggggcctactctcccgaggacaactccacacagtggtttcataatgagtccctcatcagctctcaggccagctcttatttcattgatgccgctacagtggacgactccggcgagtatcggtgtcagaccaatctgtctacactgtctgaccccgtgcagcttgaggtccacattggatggttgctcttgcaagccccacgctgggttttcaaagaggaagatccaatccatctgcggtgccacagctggaaaaacaccgctctccacaaagtcacatacctgcaaaatggcaaaggacgcaaatacttccatcacaattccgatttttacattccgaaggctaccctgaaagacagcggcagctatttctgccggggactcgtcggctccaagaatgtgtcctccgaaaccgtgaatatcacgattacccaaggactggctgtgcctacaatctctagcttctttccgcctggataccaagtctccttctgtcttgtgatggtcctcctgtttgctgtggacacaggactgtacttttccgtgaaaacgaacatccgcagctccacacgcgattggaaagatcacaagtttaaatggcgcaaagatccccaggacaag

SEQ ID NO: 5734 - DNA, 1440 bp, synthetic construct
  source 1..1440: mol_type = other DNA
atggccttaccagtgaccgccttgctcctgccgctggccttgctgctccacgccgccaggccggacatccagttgacccagtcccccagctcactcagcgccagtgtgggggaccgggtgaccattacctgtaaagccagtcagagtgtggactatgagggggatagcttcctgaattggtatcagcagaagcctggcaaagccccaaagctgctgatctacgctgcatctaatctggagtcaggcgtgccttctaggttctccggtagtgggtctgggaccgatttcacattgaccatttcatccctccaacccgaggatttcgctacatattactgtcagcagtccaatgaggaccctctcacctttggccagggcaccaaagttgaaattaagagaggcggaggcggaagtggaggcggaggatctggcggcggaggctctgaagtccaacttgtggagtctggagggggcctggtgcagcccggcggctctctcagactgtcttgtgcggcaagcggctacaccttcacctcttactggatagaatgggtgaggcaggcacctggaaagggactggagtggattggagagattctgccaggagggggagatacaaattacaatgaaatcttcaaggggcgggccaccttttcagcggataccagcaagaatacagcttacctgcagatgaatagcctccgggcagaagataccgctgtttattattgcacgagacgggtgccaataagactggactattgggggcaagggactcttgtcaccgtcagttcaacgcgtggaatgaggactgaggatcttcccaaagctgtcgtctttctcgaaccccaatggtatcgggtgctcgaaaaagactctgtgacactgaaatgccaaggggcctactctcccgaggacaactccacacagtggtttcataatgagtccctcatcagctctcaggccagctcttatttcattgatgccgctacagtggacgactccggcgagtatcggtgtcagaccaatctgtctacactgtctgaccccgtgcagcttgaggtccacattggatggttgctcttgcaagccccacgctgggttttcaaagaggaagatccaatccatctgcggtgccacagctggaaaaacaccgctctccacaaagtcacatacctgcaaaatggcaaaggacgcaaatacttccatcacaattccgatttttacattccgaaggctaccctgaaagacagcggcagctatttctgccggggactcgtcggctccaagaatgtgtcctccgaaaccgtgaatatcacgattacccaaggactggctgtgcctacaatctctagcttctttccgcctggataccaagtctccttctgtcttgtgatggtcctcctgtttgctgtggacacaggactgtacttttccgtg

SEQ ID NO: 5735 - DNA, 1443 bp, synthetic construct
  source 1..1443: mol_type = other DNA
atggccttaccagtgaccgccttgctcctgccgctggccttgctgctccacgccgccaggccggacatccagttgacccagtcccccagctcactcagcgccagtgtgggggaccgggtgaccattacctgtaaagccagtcagagtgtggactatgagggggatagcttcctgaattggtatcagcagaagcctggcaaagccccaaagctgctgatctacgctgcatctaatctggagtcaggcgtgccttctaggttctccggtagtgggtctgggaccgatttcacattgaccatttcatccctccaacccgaggatttcgctacatattactgtcagcagtccaatgaggaccctctcacctttggccagggcaccaaagttgaaattaagagaggcggaggcggaagtggaggcggaggatctggcggcggaggctctgaagtccaacttgtggagtctggagggggcctggtgcagcccggcggctctctcagactgtcttgtgcggcaagcggctacaccttcacctcttactggatagaatgggtgaggcaggcacctggaaagggactggagtggattggagagattctgccaggagggggagatacaaattacaatgaaatcttcaaggggcgggccaccttttcagcggataccagcaagaatacagcttacctgcagatgaatagcctccgggcagaagataccgctgtttattattgcacgagacgggtgccaataagactggactattgggggcaagggactcttgtcaccgtcagttcaacgcgtggaatgaggactgaggatcttcccaaagctgtcgtctttctcgaaccccaatggtatcgggtgctcgaaaaagactctgtgacactgaaatgccaaggggcctactctcccgaggacaactccacacagtggtttcataatgagtccctcatcagctctcaggccagctcttatttcattgatgccgctacagtggacgactccggcgagtatcggtgtcagaccaatctgtctacactgtctgaccccgtgcagcttgaggtccacattggatggttgctcttgcaagccccacgctgggttttcaaagaggaagatccaatccatctgcggtgccacagctggaaaaacaccgctctccacaaagtcacatacctgcaaaatggcaaaggacgcaaatacttccatcacaattccgatttttacattccgaaggctaccctgaaagacagcggcagctatttctgccggggactcgtcggctccaagaatgtgtcctccgaaaccgtgaatatcacgattacccaaggactggctgtgcctacaatctctagcttctttccgcctggataccaagtctccttctgtcttgtgatggtcctcctgtttgctgtggacacaggactgtacttttccgtgaaa

SEQ ID NO: 5736 - DNA, 2172 bp, synthetic construct
  source 1..2172: mol_type = other DNA
atggccttaccagtgaccgccttgctcctgccgctggccttgctgctccacgccgccaggccggacatccagttgacccagtcccccagctcactcagcgccagtgtgggggaccgggtgaccattacctgtaaagccagtcagagtgtggactatgagggggatagcttcctgaattggtatcagcagaagcctggcaaagccccaaagctgctgatctacgctgcatctaatctggagtcaggcgtgccttctaggttctccggtagtgggtctgggaccgatttcacattgaccatttcatccctccaacccgaggatttcgctacatattactgtcagcagtccaatgaggaccctctcacctttggccagggcaccaaagttgaaattaagagactcgagggacagcctaaggccaatcctaccgtgacactgttccctccaagcagcgaagaactccaggccaacaaggccacacttgtgtgcctgatctccgacttctaccctggggctgtgacagtggcttggaaggccgatggatctcctgtgaaagccggcgtggaaaccaccaagccatccaagcagagcaacaacaaatacgccgccagctcctacctgagcctgacacctgagcagtggaagtcccacagatcctacagctgccaagtgacccacgaaggcagcaccgtggaaaagacagtggcccctacagagtgcagcggatcccagagcttcggcctgctggaccccaagctgtgctacctgctggatggcatcctgttcatctacggcgtgatcctgaccgccctgttcctgagagtgaagttcagcagaagcgccgacgcccctgcctaccagcagggacagaaccaactgtacaacgagctgaacctgggcagacgggaagagtacgacgtgctggacaagcggagaggcagggaccctgagatgggcggaaagccccagcggagaaagaacccccaggaaggactgtataacgaactccagaaagacaagatggccgaagcctacagcgagatcggcatgaagggcgagcggagaagaggcaagggccacgatggcctgtaccagggcctgagcaccgccaccaaggacacctatgacgccctgcacatgcaggccctgcctccaagaagggccaagcgatctggatctggagcaacaaacttctcactactcaaacaagcaggtgacgtggaggagaatcccgggcctactagtatggactggatttggcgcatccttttccttgtcggcgctgctaccggcgcgcattccttcgaagtccaacttgtggagtctggagggggcctggtgcagcccggcggctctctcagactgtcttgtgcggcaagcggctacaccttcacctcttactggatagaatgggtgaggcaggcacctggaaagggactggagtggattggagagattctgccaggagggggagatacaaattacaatgaaatcttcaaggggcgggccaccttttcagcggataccagcaagaatacagcttacctgcagatgaatagcctccgggcagaagataccgctgtttattattgcacgagacgggtgccaataagactggactattgggggcaagggactcttgtcaccgtcagttcaacgcgtgcctctacaaagggaccctccgtgtttcctctggctcccagcagcaagtctacaagcggaggaacagccgctctgggctgcctggtcaaggattactttcccgagcctgtgaccgtgtcctggaatagcggagcactgacaagcggcgtgcacacctttccagccgtgctgcaaagcagcggcctgtactctctgagcagcgtggtcacagtgcctagctctagcctgggcacccagacctacatctgcaatgtgaaccacaagcctagcaacaccaaggtggacaagagagtggaacccaagagctgtggtaccatcactcaaggtttggcagtgtcaaccatctcatcattctttccacctggctaccaagtgtccttctgcctggtcatggtgctgctgttcgccgtggataccggcctgtacttcagcgtcaagaccaacatccggtccagcaccagagactggaaggaccacaagttcaagtggcggaaggaccctcaggacaag

SEQ ID NO: 5737 - DNA, 2217 bp, synthetic construct; identical to SEQ ID NO: 4665
  source 1..2217: mol_type = other DNA

SEQ ID NO: 5738 - DNA, 2142 bp, synthetic construct
  source 1..2142: mol_type = other DNA
atggccttaccagtgaccgccttgctcctgccgctggccttgctgctccacgccgccaggccggacatccagttgacccagtcccccagctcactcagcgccagtgtgggggaccgggtgaccattacctgtaaagccagtcagagtgtggactatgagggggatagcttcctgaattggtatcagcagaagcctggcaaagccccaaagctgctgatctacgctgcatctaatctggagtcaggcgtgccttctaggttctccggtagtgggtctgggaccgatttcacattgaccatttcatccctccaacccgaggatttcgctacatattactgtcagcagtccaatgaggaccctctcacctttggccagggcaccaaagttgaaattaagagactcgaggacctgaagaacgtgttcccacctgaggtggccgtgttcgagcctagcgaggccgagatcagccacacccagaaagccaccctcgtgtgcctggctaccggcttctaccccgaccatgtggaactgtcttggtgggtcaacggcaaagaggtgcacagcggcgtgtctaccgacccccagccactgaaagaacagcccgccctgaacgacagccggtactgcctgagcagcagactgagagtgtccgccaccttctggcagaacccccggaaccacttcagatgccaggtgcagttctacggcctgagcgagaacgacgagtggacccaggacagagccaagcccgtgacccagatcgtgtctgccgaagcctggggcagagccgattgcggatcccagagcttcggcctgctggaccccaagctgtgctacctgctggatggcatcctgttcatctacggcgtgatcctgaccgccctgttcctgagagtgaagttcagcagaagcgccgacgcccctgcctaccagcagggacagaaccaactgtacaacgagctgaacctgggcagacgggaagagtacgacgtgctggacaagcggagaggcagggaccctgagatgggcggaaagccccagcggagaaagaacccccaggaaggactgtataacgaactccagaaagacaagatggccgaagcctacagcgagatcggcatgaagggcgagcggagaagaggcaagggccacgatggcctgtaccagggcctgagcaccgccaccaaggacacctatgacgccctgcacatgcaggccctgcctccaagaagggccaagcgatctggatctggagcaacaaacttctcactactcaaacaagcaggtgacgtggaggagaatcccgggcctactagtatggactggatttggcgcatccttttccttgtcggcgctgctaccggcgcgcattccttcgaagtccaacttgtggagtctggagggggcctggtgcagcccggcggctctctcagactgtcttgtgcggcaagcggctacaccttcacctcttactggatagaatgggtgaggcaggcacctggaaagggactggagtggattggagagattctgccaggagggggagatacaaattacaatgaaatcttcaaggggcgggccaccttttcagcggataccagcaagaatacagcttacctgcagatgaatagcctccgggcagaagataccgctgtttattattgcacgagacgggtgccaataagactggactattgggggcaagggactcttgtcaccgtcagttcaacgcgtatccagaaccctgatcctgccgtgtaccagctgcgggatagcaagagcagcgacaagagcgtgtgtctgttcaccgacttcgacagccagaccaacgtgtcccagagcaaggactccgacgtgtacatcaccgataagaccgtgctggacatgcggagcatggacttcaagagcaactccgccgtggcctggtccaacaagtccgatttcgcctgcgccaacgccttcaacaacagcattatccccgaggacacattcttcccaagccccgagagcagctgcggtaccatcactcaaggtttggcagtgtcaaccatctcatcattctttccacctggctaccaagtgtccttctgcctggtcatggtgctgctgttcgccgtggataccggcctgtacttcagcgtc

SEQ ID NO: 5739 - DNA, 2145 bp, synthetic construct
  source 1..2145: mol_type = other DNA
atggccttaccagtgaccgccttgctcctgccgctggccttgctgctccacgccgccaggccggacatccagttgacccagtcccccagctcactcagcgccagtgtgggggaccgggtgaccattacctgtaaagccagtcagagtgtggactatgagggggatagcttcctgaattggtatcagcagaagcctggcaaagccccaaagctgctgatctacgctgcatctaatctggagtcaggcgtgccttctaggttctccggtagtgggtctgggaccgatttcacattgaccatttcatccctccaacccgaggatttcgctacatattactgtcagcagtccaatgaggaccctctcacctttggccagggcaccaaagttgaaattaagagactcgaggacctgaagaacgtgttcccacctgaggtggccgtgttcgagcctagcgaggccgagatcagccacacccagaaagccaccctcgtgtgcctggctaccggcttctaccccgaccatgtggaactgtcttggtgggtcaacggcaaagaggtgcacagcggcgtgtctaccgacccccagccactgaaagaacagcccgccctgaacgacagccggtactgcctgagcagcagactgagagtgtccgccaccttctggcagaacccccggaaccacttcagatgccaggtgcagttctacggcctgagcgagaacgacgagtggacccaggacagagccaagcccgtgacccagatcgtgtctgccgaagcctggggcagagccgattgcggatcccagagcttcggcctgctggaccccaagctgtgctacctgctggatggcatcctgttcatctacggcgtgatcctgaccgccctgttcctgagagtgaagttcagcagaagcgccgacgcccctgcctaccagcagggacagaaccaactgtacaacgagctgaacctgggcagacgggaagagtacgacgtgctggacaagcggagaggcagggaccctgagatgggcggaaagccccagcggagaaagaacccccaggaaggactgtataacgaactccagaaagacaagatggccgaagcctacagcgagatcggcatgaagggcgagcggagaagaggcaagggccacgatggcctgtaccagggcctgagcaccgccaccaaggacacctatgacgccctgcacatgcaggccctgcctccaagaagggccaagcgatctggatctggagcaacaaacttctcactactcaaacaagcaggtgacgtggaggagaatcccgggcctactagtatggactggatttggcgcatccttttccttgtcggcgctgctaccggcgcgcattccttcgaagtccaacttgtggagtctggagggggcctggtgcagcccggcggctctctcagactgtcttgtgcggcaagcggctacaccttcacctcttactggatagaatgggtgaggcaggcacctggaaagggactggagtggattggagagattctgccaggagggggagatacaaattacaatgaaatcttcaaggggcgggccaccttttcagcggataccagcaagaatacagcttacctgcagatgaatagcctccgggcagaagataccgctgtttattattgcacgagacgggtgccaataagactggactattgggggcaagggactcttgtcaccgtcagttcaacgcgtatccagaaccctgatcctgccgtgtaccagctgcgggatagcaagagcagcgacaagagcgtgtgtctgttcaccgacttcgacagccagaccaacgtgtcccagagcaaggactccgacgtgtacatcaccgataagaccgtgctggacatgcggagcatggacttcaagagcaactccgccgtggcctggtccaacaagtccgatttcgcctgcgccaacgccttcaacaacagcattatccccgaggacacattcttcccaagccccgagagcagctgcggtaccatcactcaaggtttggcagtgtcaaccatctcatcattctttccacctggctaccaagtgtccttctgcctggtcatggtgctgctgttcgccgtggataccggcctgtacttcagcgtcaag

SEQ ID NO: 5740 - DNA, 2148 bp, synthetic construct
  source 1..2148: mol_type = other DNA
atggccttaccagtgaccgccttgctcctgccgctggccttgctgctccacgccgccaggccggacatccagttgacccagtcccccagctcactcagcgccagtgtgggggaccgggtgaccattacctgtaaagccagtcagagtgtggactatgagggggatagcttcctgaattggtatcagcagaagcctggcaaagccccaaagctgctgatctacgctgcatctaatctggagtcaggcgtgccttctaggttctccggtagtgggtctgggaccgatttcacattgaccatttcatccctccaacccgaggatttcgctacatattactgtcagcagtccaatgaggaccctctcacctttggccagggcaccaaagttgaaattaagagactcgaggacctgaagaacgtgttcccacctgaggtggccgtgttcgagcctagcgaggccgagatcagccacacccagaaagccaccctcgtgtgcctggctaccggcttctaccccgaccatgtggaactgtcttggtgggtcaacggcaaagaggtgcacagcggcgtgtctaccgacccccagccactgaaagaacagcccgccctgaacgacagccggtactgcctgagcagcagactgagagtgtccgccaccttctggcagaacccccggaaccacttcagatgccaggtgcagttctacggcctgagcgagaacgacgagtggacccaggacagagccaagcccgtgacccagatcgtgtctgccgaagcctggggcagagccgattgcggatcccagagcttcggcctgctggaccccaagctgtgctacctgctggatggcatcctgttcatctacggcgtgatcctgaccgccctgttcctgagagtgaagttcagcagaagcgccgacgcccctgcctaccagcagggacagaaccaactgtacaacgagctgaacctgggcagacgggaagagtacgacgtgctggacaagcggagaggcagggaccctgagatgggcggaaagccccagcggagaaagaacccccaggaaggactgtataacgaactccagaaagacaagatggccgaagcctacagcgagatcggcatgaagggcgagcggagaagaggcaagggccacgatggcctgtaccagggcctgagcaccgccaccaaggacacctatgacgccctgcacatgcaggccctgcctccaagaagggccaagcgatctggatctggagcaacaaacttctcactactcaaacaagcaggtgacgtggaggagaatcccgggcctactagtatggactggatttggcgcatccttttccttgtcggcgctgctaccggcgcgcattccttcgaagtccaacttgtggagtctggagggggcctggtgcagcccggcggctctctcagactgtcttgtgcggcaagcggctacaccttcacctcttactggatagaatgggtgaggcaggcacctggaaagggactggagtggattggagagattctgccaggagggggagatacaaattacaatgaaatcttcaaggggcgggccaccttttcagcggataccagcaagaatacagcttacctgcagatgaatagcctccgggcagaagataccgctgtttattattgcacgagacgggtgccaataagactggactattgggggcaagggactcttgtcaccgtcagttcaacgcgtatccagaaccctgatcctgccgtgtaccagctgcgggatagcaagagcagcgacaagagcgtgtgtctgttcaccgacttcgacagccagaccaacgtgtcccagagcaaggactccgacgtgtacatcaccgataagaccgtgctggacatgcggagcatggacttcaagagcaactccgccgtggcctggtccaacaagtccgatttcgcctgcgccaacgccttcaacaacagcattatccccgaggacacattcttcccaagccccgagagcagctgcggtaccatcactcaaggtttggcagtgtcaaccatctcatcattctttccacctggctaccaagtgtccttctgcctggtcatggtgctgctgttcgccgtggataccggcctgtacttcagcgtcaagacc

SEQ ID NO: 5741 - DNA, 1959 bp, synthetic construct
  source 1..1959: mol_type = other DNA
atggccttaccagtgaccgccttgctcctgccgctggccttgctgctccacgccgccaggccggacatccagttgacccagtcccccagctcactcagcgccagtgtgggggaccgggtgaccattacctgtaaagccagtcagagtgtggactatgagggggatagcttcctgaattggtatcagcagaagcctggcaaagccccaaagctgctgatctacgctgcatctaatctggagtcaggcgtgccttctaggttctccggtagtgggtctgggaccgatttcacattgaccatttcatccctccaacccgaggatttcgctacatattactgtcagcagtccaatgaggaccctctcacctttggccagggcaccaaagttgaaattaagagactcgagggacagcctaaggccaatcctaccgtgacactgttccctccaagcagcgaagaactccaggccaacaaggccacacttgtgtgcctgatctccgacttctaccctggggctgtgacagtggcttggaaggccgatggatctcctgtgaaagccggcgtggaaaccaccaagccatccaagcagagcaacaacaaatacgccgccagctcctacctgagcctgacacctgagcagtggaagtcccacagatcctacagctgccaagtgacccacgaaggcagcaccgtggaaaagacagtggcccctacagagtgcagcggatccctgggagagcctcagctgtgctatatcctggacgccatcctgtttctgtacggcatcgtgctgaccctgctgtactgccggctgaagatccaagtgcggaaggccgccatcaccagctacgagaaatccgacggcgtgtacaccggcctgagcaccagaaatcaagagacatacgagacactgaagcacgaaaagcctccacaaagggccaagcgatctggatctggagcaacaaacttctcactactcaaacaagcaggtgacgtggaggagaatcccgggcctactagtatggactggatttggcgcatccttttccttgtcggcgctgctaccggcgcgcattccttcgaagtccaacttgtggagtctggagggggcctggtgcagcccggcggctctctcagactgtcttgtgcggcaagcggctacaccttcacctcttactggatagaatgggtgaggcaggcacctggaaagggactggagtggattggagagattctgccaggagggggagatacaaattacaatgaaatcttcaaggggcgggccaccttttcagcggataccagcaagaatacagcttacctgcagatgaatagcctccgggcagaagataccgctgtttattattgcacgagacgggtgccaataagactggactattgggggcaagggactcttgtcaccgtcagttcaacgcgtgcctctacaaagggaccctccgtgtttcctctggctcccagcagcaagtctacaagcggaggaacagccgctctgggctgcctggtcaaggattactttcccgagcctgtgaccgtgtcctggaatagcggagcactgacaagcggcgtgcacacctttccagccgtgctgcaaagcagcggcctgtactctctgagcagcgtggtcacagtgcctagctctagcctgggcacccagacctacatctgcaatgtgaaccacaagcctagcaacaccaaggtggacaagagagtggaacccaagagctgtggtaccctcggagaaccacagctctgttacattctggatgctatcctgttcctctatgggatcgtcctgacactcctgtattgcagactcaaaattcaagttcgcaaagccgccattacctcttacgagaagagtgatggggtgtacacaggactgtctacccggaatcaagaaacctacgaaaccctcaaacatgagaagccacctcagtaa

SEQ ID NO: 5742 - DNA, 1866 bp, synthetic construct
  source 1..1866: mol_type = other DNA
atggccttaccagtgaccgccttgctcctgccgctggccttgctgctccacgccgccaggccggacatccagttgacccagtcccccagctcactcagcgccagtgtgggggaccgggtgaccattacctgtaaagccagtcagagtgtggactatgagggggatagcttcctgaattggtatcagcagaagcctggcaaagccccaaagctgctgatctacgctgcatctaatctggagtcaggcgtgccttctaggttctccggtagtgggtctgggaccgatttcacattgaccatttcatccctccaacccgaggatttcgctacatattactgtcagcagtccaatgaggaccctctcacctttggccagggcaccaaagttgaaattaagagactcgaggacctgaagaacgtgttcccacctgaggtggccgtgttcgagcctagcgaggccgagatcagccacacccagaaagccaccctcgtgtgcctggctaccggcttctaccccgaccatgtggaactgtcttggtgggtcaacggcaaagaggtgcacagcggcgtgtgtaccgacccccagccactgaaagaacagcccgccctgaacgacagccggtactgcctgagcagcagactgagagtgtccgccaccttctggcagaacccccggaaccacttcagatgccaggtgcagttctacggcctgagcgagaacgacgagtggacccaggacagagccaagcccgtgacccagatcgtgtctgccgaagcctggggcagagccgattgcggctttaccagcgagagctaccagcagggcgtgctgagcgcctactacatgtacttgttgctgctgctgaagtccgtggtgtacttcgccatcatcacatgctgcctgctgcggagaaccgccttctgctgcaacggcgagaagtctagggccaagcgatctggatctggagcaacaaacttctcactactcaaacaagcaggtgacgtggaggagaatcccgggcctactagtatggactggatttggcgcatccttttccttgtcggcgctgctaccggcgcgcattccttcgaagtccaacttgtggagtctggagggggcctggtgcagcccggcggctctctcagactgtcttgtgcggcaagcggctacaccttcacctcttactggatagaatgggtgaggcaggcacctggaaagggactggagtggattggagagattctgccaggagggggagatacaaattacaatgaaatcttcaaggggcgggccaccttttcagcggataccagcaagaatacagcttacctgcagatgaatagcctccgggcagaagataccgctgtttattattgcacgagacgggtgccaataagactggactattgggggcaagggactcttgtcaccgtcagttcaacgcgtatccagaaccctgatcctgccgtgtaccagctgcgggatagcaagagcagcgacaagagcgtgtgtctgttcaccgacttcgacagccagaccaacgtgtcccagagcaaggactccgacgtgtacatcaccgataagtgcgtgctggacatgcggagcatggacttcaagagcaactccgccgtggcctggtccaacaagtccgatttcgcctgcgccaacgccttcaacaacagcattatccccgaggacacattcttcccaagccccgagagcagctgcgacgtgaagctggtggaaaagagcttcgagacagacaccaacctgaacttccagaacctgagcgtgatcggcttcagaatcctgctgctgaaagtggccggctttaacctgctgatgaccctgcggctgtggtccagc

SEQ ID NO: 5743 - DNA, 1887 bp, synthetic construct
  source 1..1887: mol_type = other DNA
atggccttaccagtgaccgccttgctcctgccgctggccttgctgctccacgccgccaggccggacatccagttgacccagtcccccagctcactcagcgccagtgtgggggaccgggtgaccattacctgtaaagccagtcagagtgtggactatgagggggatagcttcctgaattggtatcagcagaagcctggcaaagccccaaagctgctgatctacgctgcatctaatctggagtcaggcgtgccttctaggttctccggtagtgggtctgggaccgatttcacattgaccatttcatccctccaacccgaggatttcgctacatattactgtcagcagtccaatgaggaccctctcacctttggccagggcaccaaagttgaaattaagagactcgaggacaagcagctggacgccgacgtgtcccccaagcctaccatcttcctgccctctatcgccgagacaaagctccagaaggccggcacctacctgtgcctgctggaaaagttcttcccagatgtgattaagatccactggcaggaaaagaagtccaacaccatcctgggcagccaggaaggcaacaccatgaagaccaacgacacctacatgaagttcagctggctgaccgtgcccgagaagtccctggacaaagaacacagatgcatcgtgcggcacgaaaacaacaagaacggcgtggaccaggaaatcatcttcccacccatcaagaccgatgtgattacaatggaccccaaggacaactgctccaaggacgccaacgataccctgctgctccagctgaccaacaccagcgcctactacatgtacgagatcctgctgggcaaggccaccctgtacgccgtgctggtgtctgccctggtgctgatggctatggtcaagcggaaggacagccggggaagggccaagcgatctggatctggagcaacaaacttctcactactcaaacaagcaggtgacgtggaggagaatcccgggcctactagtatggactggatttggcgcatccttttccttgtcggcgctgctaccggcgcgcattccttcgaagtccaacttgtggagtctggagggggcctggtgcagcccggcggctctctcagactgtcttgtgcggcaagcggctacaccttcacctcttactggatagaatgggtgaggcaggcacctggaaagggactggagtggattggagagattctgccaggagggggagatacaaattacaatgaaatcttcaaggggcgggccaccttttcagcggataccagcaagaatacagcttacctgcagatgaatagcctccgggcagaagataccgctgtttattattgcacgagacgggtgccaataagactggactattgggggcaagggactcttgtcaccgtcagttcaacgcgtagccagcctcacaccaagcccagcgtgttcgtgatgaagaacggcaccaacgtggcctgcctcgtgaaagagttctaccccaaggacatcaggatcaacctggtgtccagcaagaagatcaccgagttcgaccccgccatcgtgatctcccccagcggcaagtacaacgccgtgaagctggggaagtatgaggacagcaacagcgtgacctgctccgtgcagcacgacaacaagaccgtgcacagcaccgactttgaagtgaaaaccgactccaccgaccacgtgaagcccaaagagacagagaacaccaagcagcccagcaagagctgccacaagcccaaggccatcgtgcacaccgagaaagtgaacatgatgagcctgaccgtgatcggcttcagaatcctgctgctgaaagtggccggctttaacctgctgatgaccctgcggctgtggtccagctaa

SEQ ID NO: 5744 - DNA, 1887 bp, synthetic construct
  source 1..1887: mol_type = other DNA
atggccttaccagtgaccgccttgctcctgccgctggccttgctgctccacgccgccaggccggacatccagttgacccagtcccccagctcactcagcgccagtgtgggggaccgggtgaccattacctgtaaagccagtcagagtgtggactatgagggggatagcttcctgaattggtatcagcagaagcctggcaaagccccaaagctgctgatctacgctgcatctaatctggagtcaggcgtgccttctaggttctccggtagtgggtctgggaccgatttcacattgaccatttcatccctccaacccgaggatttcgctacatattactgtcagcagtccaatgaggaccctctcacctttggccagggcaccaaagttgaaattaagagactcgaggacaagcagctggacgccgacgtgtcccccaagcctaccatcttcctgccctctatcgccgagacaaagctccagaaggccggcacctacctgtgcctgctggaaaagttcttcccagatgtgattaagatccactggcaggaaaagaagtccaacaccatcctgggcagccaggaaggcaacaccatgaagaccaacgacacctacatgaagttcagctggctgaccgtgcccgagaagtccctggacaaagaacacagatgcatcgtgcggcacgaaaacaacaagaacggcgtggaccaggaaatcatcttcccacccatcaagaccgatgtgattacaatggaccccaaggacaactgctccaaggacgccaacgataccctgctgctccagctgaccaacaccagcgccaccatcctgtacgagatcctgctgggcaaggccaccctgtacgccgtgctggtgtctgccctggtgctgatggctatggtcaagcggaaggacagccggggaagggccaagcgatctggatctggagcaacaaacttctcactactcaaacaagcaggtgacgtggaggagaatcccgggcctactagtatggactggatttggcgcatccttttccttgtcggcgctgctaccggcgcgcattccttcgaagtccaacttgtggagtctggagggggcctggtgcagcccggcggctctctcagactgtcttgtgcggcaagcggctacaccttcacctcttactggatagaatgggtgaggcaggcacctggaaagggactggagtggattggagagattctgccaggagggggagatacaaattacaatgaaatcttcaaggggcgggccaccttttcagcggataccagcaagaatacagcttacctgcagatgaatagcctccgggcagaagataccgctgtttattattgcacgagacgggtgccaataagactggactattgggggcaagggactcttgtcaccgtcagttcaacgcgtagccagcctcacaccaagcccagcgtgttcgtgatgaagaacggcaccaacgtggcctgcctcgtgaaagagttctaccccaaggacatcaggatcaacctggtgtccagcaagaagatcaccgagttcgaccccgccatcgtgatctcccccagcggcaagtacaacgccgtgaagctggggaagtatgaggacagcaacagcgtgacctgctccgtgcagcacgacaacaagaccgtgcacagcaccgactttgaagtgaaaaccgactccaccgaccacgtgaagcccaaagagacagagaacaccaagcagcccagcaagagctgccacaagcccaaggccatcgtgcacaccgagaaagtgaacatgatgagcctgaccgtgatcggcttcagaatcctgctgctgaaagtggccggctttaacctgctgatgaccctgcggctgtggtccagctaa

SEQ ID NO: 5745 - DNA, 1887 bp, synthetic construct
  source 1..1887: mol_type = other DNA
atggccttaccagtgaccgccttgctcctgccgctggccttgctgctccacgccgccaggccggacatccagttgacccagtcccccagctcactcagcgccagtgtgggggaccgggtgaccattacctgtaaagccagtcagagtgtggactatgagggggatagcttcctgaattggtatcagcagaagcctggcaaagccccaaagctgctgatctacgctgcatctaatctggagtcaggcgtgccttctaggttctccggtagtgggtctgggaccgatttcacattgaccatttcatccctccaacccgaggatttcgctacatattactgtcagcagtccaatgaggaccctctcacctttggccagggcaccaaagttgaaattaagagactcgaggacaagcagctggacgccgacgtgtcccccaagcctaccatcttcctgccctctatcgccgagacaaagctccagaaggccggcacctacctgtgcctgctggaaaagttcttcccagatgtgattaagatccactggcaggaaaagaagtccaacaccatcctgggcagccaggaaggcaacaccatgaagaccaacgacacctacatgaagttcagctggctgaccgtgcccgagaagtccctggacaaagaacacagatgcatcgtgcggcacgaaaacaacaagaacggcgtggaccaggaaatcatcttcccacccatcaagaccgatgtgattacaatggaccccaaggacaactgctccaaggacgccaacgataccctgctgctccagctgaccaacaccagcgcctactacatgtacgagatcctgctgggcaaggccaccctgtacgccgtgctggtgtctgccctggtgctgatggctatggtcaagcggaaggacagccggggaagggccaagcgatctggatctggagcaacaaacttctcactactcaaacaagcaggtgacgtggaggagaatcccgggcctactagtatggactggatttggcgcatccttttccttgtcggcgctgctaccggcgcgcattccttcgaagtccaacttgtggagtctggagggggcctggtgcagcccggcggctctctcagactgtcttgtgcggcaagcggctacaccttcacctcttactggatagaatgggtgaggcaggcacctggaaagggactggagtggattggagagattctgccaggagggggagatacaaattacaatgaaatcttcaaggggcgggccaccttttcagcggataccagcaagaatacagcttacctgcagatgaatagcctccgggcagaagataccgctgtttattattgcacgagacgggtgccaataagactggactattgggggcaagggactcttgtcaccgtcagttcaacgcgtagccagcctcacaccaagcccagcgtgttcgtgatgaagaacggcaccaacgtggcctgcctcgtgaaagagttctaccccaaggacatcaggatcaacctggtgtccagcaagaagatcaccgagttcgaccccgccatcgtgatctcccccagcggcaagtacaacgccgtgaagctggggaagtacgaggacagcaacagcgtgacctgctccgtgcagcacgacaacaagaccgtgcacagcaccgactttgaagtgaaaaccgactccaccgaccacgtgaagcccaaagagacagagaacaccaagcagcccagcaagagctgccacaagcccaaggccatcgtgcacaccgagaaagtgaacatgatgagcctgaccgtgctgggcttcagaatcctgctgctgaaagtggccggctttaacctgctgatgaccctgcggctgtggtccagctaa

SEQ ID NO: 5746 - DNA, 1887 bp, synthetic construct
  source 1..1887: mol_type = other DNA
atggccttaccagtgaccgccttgctcctgccgctggccttgctgctccacgccgccaggccggacatccagttgacccagtcccccagctcactcagcgccagtgtgggggaccgggtgaccattacctgtaaagccagtcagagtgtggactatgagggggatagcttcctgaattggtatcagcagaagcctggcaaagccccaaagctgctgatctacgctgcatctaatctggagtcaggcgtgccttctaggttctccggtagtgggtctgggaccgatttcacattgaccatttcatccctccaacccgaggatttcgctacatattactgtcagcagtccaatgaggaccctctcacctttggccagggcaccaaagttgaaattaagagactcgaggacaagcagctggacgccgacgtgtcccccaagcctaccatcttcctgccctctatcgccgagacaaagctccagaaggccggcacctacctgtgcctgctggaaaagttcttcccagatgtgattaagatccactggcaggaaaagaagtccaacaccatcctgggcagccaggaaggcaacaccatgaagaccaacgacacctacatgaagttcagctggctgaccgtgcccgagaagtccctggacaaagaacacagatgcatcgtgcggcacgaaaacaacaagaacggcgtggaccaggaaatcatcttcccacccatcaagaccgatgtgattacaatggaccccaaggacaactgctccaaggacgccaacgataccctgctgctccagctgaccaacaccagcgccaccatcctgtacgagatcctgctgggcaaggccaccctgtacgccgtgctggtgtctgccctggtgctgatggctatggtcaagcggaaggacagccggggaagggccaagcgatctggatctggagcaacaaacttctcactactcaaacaagcaggtgacgtggaggagaatcccgggcctactagtatggactggatttggcgcatccttttccttgtcggcgctgctaccggcgcgcattccttcgaagtccaacttgtggagtctggagggggcctggtgcagcccggcggctctctcagactgtcttgtgcggcaagcggctacaccttcacctcttactggatagaatgggtgaggcaggcacctggaaagggactggagtggattggagagattctgccaggagggggagatacaaattacaatgaaatcttcaaggggcgggccaccttttcagcggataccagcaagaatacagcttacctgcagatgaatagcctccgggcagaagataccgctgtttattattgcacgagacgggtgccaataagactggactattgggggcaagggactcttgtcaccgtcagttcaacgcgtagccagcctcacaccaagcccagcgtgttcgtgatgaagaacggcaccaacgtggcctgcctcgtgaaagagttctaccccaaggacatcaggatcaacctggtgtccagcaagaagatcaccgagttcgaccccgccatcgtgatctcccccagcggcaagtacaacgccgtgaagctggggaagtacgaggacagcaacagcgtgacctgctccgtgcagcacgacaacaagaccgtgcacagcaccgactttgaagtgaaaaccgactccaccgaccacgtgaagcccaaagagacagagaacaccaagcagcccagcaagagctgccacaagcccaaggccatcgtgcacaccgagaaagtgaacatgatgagcctgaccgtgctgggcttcagaatcctgctgctgaaagtggccggctttaacctgctgatgaccctgcggctgtggtccagctaa

SEQ ID NO: 5747 - DNA, 1869 bp, synthetic construct
  source 1..1869: mol_type = other DNA
atggccttaccagtgaccgccttgctcctgccgctggccttgctgctccacgccgccaggccggacatccagttgacccagtcccccagctcactcagcgccagtgtgggggaccgggtgaccattacctgtaaagccagtcagagtgtggactatgagggggatagcttcctgaattggtatcagcagaagcctggcaaagccccaaagctgctgatctacgctgcatctaatctggagtcaggcgtgccttctaggttctccggtagtgggtctgggaccgatttcacattgaccatttcatccctccaacccgaggatttcgctacatattactgtcagcagtccaatgaggaccctctcacctttggccagggcaccaaagttgaaattaagagactcgaggacctgaagaacgtgttcccacctgaggtggccgtgttcgagcctagcgaggccgagatcagccacacccagaaagccaccctcgtgtgcctggctaccggcttctaccccgaccatgtggaactgtcttggtgggtcaacggcaaagaggtgcacagcggcgtgtgtaccgacccccagccactgaaagaacagcccgccctgaacgacagccggtactgcctgagcagcagactgagagtgtccgccaccttctggcagaacccccggaaccacttcagatgccaggtgcagttctacggcctgagcgagaacgacgagtggacccaggacagagccaagcccgtgacccagatcgtgtctgccgaagcctggggcagagccgattgcggctttaccagcgagagctaccagcagggcgtgctgagcgccaccatcctgtacttgttgctgctgctgaagtccgtggtgtacttcgccatcatcacatgctgcctgctgcggagaaccgccttctgctgcaacggcgagaagtctagggccaagcgatctggatctggagcaacaaacttctcactactcaaacaagcaggtgacgtggaggagaatcccgggcctactagtatggactggatttggcgcatccttttccttgtcggcgctgctaccggcgcgcattccttcgaagtccaacttgtggagtctggagggggcctggtgcagcccggcggctctctcagactgtcttgtgcggcaagcggctacaccttcacctcttactggatagaatgggtgaggcaggcacctggaaagggactggagtggattggagagattctgccaggagggggagatacaaattacaatgaaatcttcaaggggcgggccaccttttcagcggataccagcaagaatacagcttacctgcagatgaatagcctccgggcagaagataccgctgtttattattgcacgagacgggtgccaataagactggactattgggggcaagggactcttgtcaccgtcagttcaacgcgtatccagaaccctgatcctgccgtgtaccagctgcgggatagcaagagcagcgacaagagcgtgtgtctgttcaccgacttcgacagccagaccaacgtgtcccagagcaaggactccgacgtgtacatcaccgataagtgcgtgctggacatgcggagcatggacttcaagagcaactccgccgtggcctggtccaacaagtccgatttcgcctgcgccaacgccttcaacaacagcattatccccgaggacacattcttcccaagccccgagagcagctgcgacgtgaagctggtggaaaagagcttcgagacagacaccaacctgaacttccagaacctgagcgtgatcggcctgcggatgctgttcgccaaaaccgtggccgtgaacttcctgctgaccgccaagctgttcttcctctaa

SEQ ID NO: 5748 - DNA, 1956 bp, synthetic construct
  source 1..1956: mol_type = other DNA
atggccttaccagtgaccgccttgctcctgccgctggccttgctgctccacgccgccaggccggacatccagttgacccagtcccccagctcactcagcgccagtgtgggggaccgggtgaccattacctgtaaagccagtcagagtgtggactatgagggggatagcttcctgaattggtatcagcagaagcctggcaaagccccaaagctgctgatctacgctgcatctaatctggagtcaggcgtgccttctaggttctccggtagtgggtctgggaccgatttcacattgaccatttcatccctccaacccgaggatttcgctacatattactgtcagcagtccaatgaggaccctctcacctttggccagggcaccaaagttgaaattaagagactcgaggacctgaagaacgtgttcccacctgaggtggccgtgttcgagcctagcgaggccgagatcagccacacccagaaagccaccctcgtgtgcctggctaccggcttctaccccgaccatgtggaactgtcttggtgggtcaacggcaaagaggtgcacagcggcgtgtctaccgacccccagccactgaaagaacagcccgccctgaacgacagccggtactgcctgagcagcagactgagagtgtccgccaccttctggcagaacccccggaaccacttcagatgccaggtgcagttctacggcctgagcgagaacgacgagtggacccaggacagagccaagcccgtgacccagatcgtgtctgccgaagcctggggcagagccgattgcggatcctccaaggacgccaacgataccctgctgctccagctgaccaacaccagcgcctactacatgtacttgttgctgctgctgaagtccgtggtgtacttcgccatcatcacatgctgcctgctgcggagaaccgccttctgctgcaacggcgagaagtctagggccaagcgatctggatctggagcaacaaacttctcactactcaaacaagcaggtgacgtggaggagaatcccgggcctactagtatggactggatttggcgcatccttttccttgtcggcgctgctaccggcgcgcattccttcgaagtccaacttgtggagtctggagggggcctggtgcagcccggcggctctctcagactgtcttgtgcggcaagcggctacaccttcacctcttactggatagaatgggtgaggcaggcacctggaaagggactggagtggattggagagattctgccaggagggggagatacaaattacaatgaaatcttcaaggggcgggccaccttttcagcggataccagcaagaatacagcttacctgcagatgaatagcctccgggcagaagataccgctgtttattattgcacgagacgggtgccaataagactggactattgggggcaagggactcttgtcaccgtcagttcaacgcgtatccagaaccctgatcctgccgtgtaccagctgcgggatagcaagagcagcgacaagagcgtgtgtctgttcaccgacttcgacagccagaccaacgtgtcccagagcaaggactccgacgtgtacatcaccgataagaccgtgctggacatgcggagcatggacttcaagagcaactccgccgtggcctggtccaacaagtccgatttcgcctgcgccaacgccttcaacaacagcattatccccgaggacacattcttcccaagccccgagagcagctgcggtaccgaagtgaaaaccgactccaccgaccacgtgaagcccaaagagacagagaacaccaagcagcccagcaagagctgccacaagcccaaggccatcgtgcacaccgagaaagtgaacatgatgagcctgaccgtgctgggcctgcggatgctgttcgccaaaaccgtggccgtgaacttcctgctgaccgccaagctgttcttcctctaa

SEQ ID NO: 5749 - DNA, 1866 bp, synthetic construct
  source 1..1866: mol_type = other DNA
atggccttaccagtgaccgccttgctcctgccgctggccttgctgctccacgccgccaggccggacatccagttgacccagtcccccagctcactcagcgccagtgtgggggaccgggtgaccattacctgtaaagccagtcagagtgtggactatgagggggatagcttcctgaattggtatcagcagaagcctggcaaagccccaaagctgctgatctacgctgcatctaatctggagtcaggcgtgccttctaggttctccggtagtgggtctgggaccgatttcacattgaccatttcatccctccaacccgaggatttcgctacatattactgtcagcagtccaatgaggaccctctcacctttggccagggcaccaaagttgaaattaagagactcgaggacctgaagaacgtgttcccacctgaggtggccgtgttcgagcctagcgaggccgagatcagccacacccagaaagccaccctcgtgtgcctggctaccggcttctaccccgaccatgtggaactgtcttggtgggtcaacggcaaagaggtgcacagcggcgtgtgtaccgacccccagccactgaaagaacagcccgccctgaacgacagccggtactgcctgagcagcagactgagagtgtccgccaccttctggcagaacccccggaaccacttcagatgccaggtgcagttctacggcctgagcgagaacgacgagtggacccaggacagagccaagcccgtgacccagatcgtgtctgccgaagcctggggcagagccgattgcgacgtgaagctggtggaaaagagcttcgagacagacaccaacctgaacttccagaacctgagcgtgatcggcttcagaatcctgctgctgaaagtggccggctttaacctgctgatgaccctgcggctgtggtccagcagggccaagcgatctggatctggagcaacaaacttctcactactcaaacaagcaggtgacgtggaggagaatcccgggcctactagtatggactggatttggcgcatccttttccttgtcggcgctgctaccggcgcgcattccttcgaagtccaacttgtggagtctggagggggcctggtgcagcccggcggctctctcagactgtcttgtgcggcaagcggctacaccttcacctcttactggatagaatgggtgaggcaggcacctggaaagggactggagtggattggagagattctgccaggagggggagatacaaattacaatgaaatcttcaaggggcgggccaccttttcagcggataccagcaagaatacagcttacctgcagatgaatagcctccgggcagaagataccgctgtttattattgcacgagacgggtgccaataagactggactattgggggcaagggactcttgtcaccgtcagttcaacgcgtatccagaaccctgatcctgccgtgtaccagctgcgggatagcaagagcagcgacaagagcgtgtgtctgttcaccgacttcgacagccagaccaacgtgtcccagagcaaggactccgacgtgtacatcaccgataagtgcgtgctggacatgcggagcatggacttcaagagcaactccgccgtggcctggtccaacaagtccgatttcgcctgcgccaacgccttcaacaacagcattatccccgaggacacattcttcccaagccccgagagcagctgcggctttaccagcgagagctaccagcagggcgtgctgagcgccaccatcctgtacgagatcctgctgggcaaggccaccctgtacgccgtgctggtgtctgccctggtgctgatggctatggtcaagcggaaggacagccggggataa

SEQ ID NO: 5750 - DNA, 1866 bp, synthetic construct
  source 1..1866: mol_type = other DNA
atggccttaccagtgaccgccttgctcctgccgctggccttgctgctccacgccgccaggccggacatccagttgacccagtcccccagctcactcagcgccagtgtgggggaccgggtgaccattacctgtaaagccagtcagagtgtggactatgagggggatagcttcctgaattggtatcagcagaagcctggcaaagccccaaagctgctgatctacgctgcatctaatctggagtcaggcgtgccttctaggttctccggtagtgggtctgggaccgatttcacattgaccatttcatccctccaacccgaggatttcgctacatattactgtcagcagtccaatgaggaccctctcacctttggccagggcaccaaagttgaaattaagagactcgaggacctgaagaacgtgttcccacctgaggtggccgtgttcgagcctagcgaggccgagatcagccacacccagaaagccaccctcgtgtgcctggctaccggcttctaccccgaccatgtggaactgtcttggtgggtcaacggcaaagaggtgcacagcggcgtgtgtaccgacccccagccactgaaagaacagcccgccctgaacgacagccggtactgcctgagcagcagactgagagtgtccgccaccttctggcagaacccccggaaccacttcagatgccaggtgcagttctacggcctgagcgagaacgacgagtggacccaggacagagccaagcccgtgacccagatcgtgtctgccgaagcctggggcagagccgattgcggctttaccagcgagagctaccagcagggcgtgctgagcgccaccaacctgagcgtgatcggcttcagaatcctgctgctgaaagtggccggctttaacctgctgatgaccctgcggctgtggtccagcagggccaagcgatctggatctggagcaacaaacttctcactactcaaacaagcaggtgacgtggaggagaatcccgggcctactagtatggactggatttggcgcatccttttccttgtcggcgctgctaccggcgcgcattccttcgaagtccaacttgtggagtctggagggggcctggtgcagcccggcggctctctcagactgtcttgtgcggcaagcggctacaccttcacctcttactggatagaatgggtgaggcaggcacctggaaagggactggagtggattggagagattctgccaggagggggagatacaaattacaatgaaatcttcaaggggcgggccaccttttcagcggataccagcaagaatacagcttacctgcagatgaatagcctccgggcagaagataccgctgtttattattgcacgagacgggtgccaataagactggactattgggggcaagggactcttgtcaccgtcagttcaacgcgtatccagaaccctgatcctgccgtgtaccagctgcgggatagcaagagcagcgacaagagcgtgtgtctgttcaccgacttcgacagccagaccaacgtgtcccagagcaaggactccgacgtgtacatcaccgataagtgcgtgctggacatgcggagcatggacttcaagagcaactccgccgtggcctggtccaacaagtccgatttcgcctgcgccaacgccttcaacaacagcattatccccgaggacacattcttcccaagccccgagagcagctgcgacgtgaagctggtggaaaagagcttcgagacagacaccaacctgaacttccagatcctgtacgagatcctgctgggcaaggccaccctgtacgccgtgctggtgtctgccctggtgctgatggctatggtcaagcggaaggacagccggggataa

SEQ ID NO: 5751 - DNA, 1866 bp, synthetic construct; identical to SEQ ID NO: 5749
  source 1..1866: mol_type = other DNA

SEQ ID NO: 5752 - DNA, 1866 bp, synthetic construct; identical to SEQ ID NO: 5750
  source 1..1866: mol_type = other DNA

SEQ ID NO: 5753 - DNA, 1863 bp, synthetic construct
  source 1..1863: mol_type = other DNA
atggccttaccagtgaccgccttgctcctgccgctggccttgctgctccacgccgccaggccggacatccagttgacccagtcccccagctcactcagcgccagtgtgggggaccgggtgaccattacctgtaaagccagtcagagtgtggactatgagggggatagcttcctgaattggtatcagcagaagcctggcaaagccccaaagctgctgatctacgctgcatctaatctggagtcaggcgtgccttctaggttctccggtagtgggtctgggaccgatttcacattgaccatttcatccctccaacccgaggatttcgctacatattactgtcagcagtccaatgaggaccctctcacctttggccagggcaccaaagttgaaattaagagactcgaggacctgaagaacgtgttcccacctgaggtggccgtgttcgagcctagcgaggccgagatcagccacacccagaaagccaccctcgtgtgcctggctaccggcttctaccccgaccatgtggaactgtcttggtgggtcaacggcaaagaggtgcacagcggcgtgtgtaccgacccccagccactgaaagaacagcccgccctgaacgacagccggtactgcctgagcagcagactgagagtgtccgccaccttctggcagaacccccggaaccacttcagatgccaggtgcagttctacggcctgagcgagaacgacgagtggacccaggacagagccaagcccgtgacccagatcgtgtctgccgaagcctggggcagagccgattgcgacgtgaagctggtggaaaagagcttcgagacagacaccaacctgaacttccagaacctgagcgtgatcggcttcagaatcctgctgctgaaagtggccggctttaacctgctgatgaccctgcggctgtggtccagcagggccaagcgatctggatctggagcaacaaacttctcactactcaaacaagcaggtgacgtggaggagaatcccgggcctactagtatggactggatttggcgcatccttttccttgtcggcgctgctaccggcgcgcattccttcgaagtccaacttgtggagtctggagggggcctggtgcagcccggcggctctctcagactgtcttgtgcggcaagcggctacaccttcacctcttactggatagaatgggtgaggcaggcacctggaaagggactggagtggattggagagattctgccaggagggggagatacaaattacaatgaaatcttcaaggggcgggccaccttttcagcggataccagcaagaatacagcttacctgcagatgaatagcctccgggcagaagataccgctgtttattattgcacgagacgggtgccaataagactggactattgggggcaagggactcttgtcaccgtcagttcaacgcgtatccagaaccctgatcctgccgtgtaccagctgcgggatagcaagagcagcgacaagagcgtgtgtctgttcaccgacttcgacagccagaccaacgtgtcccagagcaaggactccgacgtgtacatcaccgataagtgcgtgctggacatgcggagcatggacttcaagagcaactccgccgtggcctggtccaacaagtccgatttcgcctgcgccaacgccttcaacaacagcattatccccgaggacacattcttcccaagccccgagagcagctgcggctttaccagcgagagctaccagcagggcgtgctgagcgccaccatcctgtacgagatcctgctgggcaaggccaccctgtacgccgtgctggtgtctgccctggtgctgatggctatggtcaagcggaaggacagccgggga

SEQ ID NO: 5754 - DNA, 1875 bp, synthetic construct
  source 1..1875: mol_type = other DNA
atggccttaccagtgaccgccttgctcctgccgctggccttgctgctccacgccgccaggccggacatccagttgacccagtcccccagctcactcagcgccagtgtgggggaccgggtgaccattacctgtaaagccagtcagagtgtggactatgagggggatagcttcctgaattggtatcagcagaagcctggcaaagccccaaagctgctgatctacgctgcatctaatctggagtcaggcgtgccttctaggttctccggtagtgggtctgggaccgatttcacattgaccatttcatccctccaacccgaggatttcgctacatattactgtcagcagtccaatgaggaccctctcacctttggccagggcaccaaagttgaaattaagagactcgaggccgacgtgtcccccaagcctaccatcttcctgccctctatcgccgagacaaagctccagaaggccggcacctacctgtgcctgctggaaaagttcttcccagatgtgattaagatccactggcaggaaaagaagtccaacaccatcctgggcagccaggaaggcaacaccatgaagaccaacgacacctacatgaagttcagctggctgaccgtgcccgagaagtccctggacaaagaacacagatgcatcgtgcggcacgaaaacaacaagaacggcgtggaccaggaaatcatcttcccacccatcaagaccgatgtgattacaatggaccccaaggacaactgctccaaggacgccaacgataccctgctgctccagctgaccaacaccagcgcctactacatgtacttgttgctgctgctgaagtccgtggtgtacttcgccatcatcacatgctgcctgctgcggagaaccgccttctgctgcaacggcgagaagtctagggccaagcgatctggatctggagcaacaaacttctcactactcaaacaagcaggtgacgtggaggagaatcccgggcctactagtatggactggatttggcgcatccttttccttgtcggcgctgctaccggcgcgcattccttcgaagtccaacttgtggagtctggagggggcctggtgcagcccggcggctctctcagactgtcttgtgcggcaagcggctacaccttcacctcttactggatagaatgggtgaggcaggcacctggaaagggactggagtggattggagagattctgccaggagggggagatacaaattacaatgaaatcttcaaggggcgggccaccttttcagcggataccagcaagaatacagcttacctgcagatgaatagcctccgggcagaagataccgctgtttattattgcacgagacgggtgccaataagactggactattgggggcaagggactcttgtcaccgtcagttcaacgcgtagccagcctcacaccaagcccagcgtgttcgtgatgaagaacggcaccaacgtggcctgcctcgtgaaagagttctaccccaaggacatcaggatcaacctggtgtccagcaagaagatcaccgagttcgaccccgccatcgtgatctcccccagcggcaagtacaacgccgtgaagctggggaagtatgaggacagcaacagcgtgacctgctccgtgcagcacgacaacaagaccgtgcacagcaccgactttgaagtgaaaaccgactccaccgaccacgtgaagcccaaagagacagagaacaccaagcagcccagcaagagctgccacaagcccaaggccatcgtgcacaccgagaaagtgaacatgatgagcctgaccgtgatcggcttcagaatcctgctgctgaaagtggccggctttaacctgctgatgaccctgcggctgtggtccagctaa

SEQ ID NO: 5755 - DNA, 1875 bp, synthetic construct
  source 1..1875: mol_type = other DNA
atggccttaccagtgaccgccttgctcctgccgctggccttgctgctccacgccgccaggccggacatccagttgacccagtcccccagctcactcagcgccagtgtgggggaccgggtgaccattacctgtaaagccagtcagagtgtggactatgagggggatagcttcctgaattggtatcagcagaagcctggcaaagccccaaagctgctgatctacgctgcatctaatctggagtcaggcgtgccttctaggttctccggtagtgggtctgggaccgatttcacattgaccatttcatccctccaacccgaggatttcgctacatattactgtcagcagtccaatgaggaccctctcacctttggccagggcaccaaagttgaaattaagagactcgaggccgacgtgtcccccaagcctaccatcttcctgccctctatcgccgagacaaagctccagaaggccggcacctacctgtgcctgctggaaaagttcttcccagatgtgattaagatccactggcaggaaaagaagtccaacaccatcctgggcagccaggaaggcaacaccatgaagaccaacgacacctacatgaagttcagctggctgaccgtgcccgagaagtccctggacaaagaacacagatgcatcgtgcggcacgaaaacaacaagaacggcgtggaccaggaaatcatcttcccacccatcaagaccgatgtgattacaatggaccccaaggacaactgctccaaggacgccaacgataccctgctgctccagctgaccaacaccagcgcctactacatgtacttgttgctgctgctgaagtccgtggtgtacttcgccatcatcacatgctgcctgctgcggagaaccgccttctgctgcaacggcgagaagtctagggccaagcgatctggatctggagcaacaaacttctcactactcaaacaagcaggtgacgtggaggagaatcccgggcctactagtatggactggatttggcgcatccttttccttgtcggcgctgctaccggcgcgcattccttcgaagtccaacttgtggagtctggagggggcctggtgcagcccggcggctctctcagactgtcttgtgcggcaagcggctacaccttcacctcttactggatagaatgggtgaggcaggcacctggaaagggactggagtggattggagagattctgccaggagggggagatacaaattacaatgaaatcttcaaggggcgggccaccttttcagcggataccagcaagaatacagcttacctgcagatgaatagcctccgggcagaagataccgctgtttattattgcacgagacgggtgccaataagactggactattgggggcaagggactcttgtcaccgtcagttcaacgcgtagccagcctcacaccaagcccagcgtgttcgtgatgaagaacggcaccaacgtggcctgcctcgtgaaagagttctaccccaaggacatcaggatcaacctggtgtccagcaagaagatcaccgagttcgaccccgccatcgtgatctcccccagcggcaagtacaacgccgtgaagctggggaagtacgaggacagcaacagcgtgacctgctccgtgcagcacgacaacaagaccgtgcacagcaccgactttgaagtgaaaaccgactccaccgaccacgtgaagcccaaagagacagagaacaccaagcagcccagcaagagctgccacaagcccaaggccatcgtgcacaccgagaaagtgaacatgatgagcctgaccgtgctgggcttcagaatcctgctgctgaaagtggccggctttaacctgctgatgaccctgcggctgtggtccagctaa

SEQ ID NO: 5756 - DNA, 1863 bp, synthetic construct; identical to SEQ ID NO: 5753
  source 1..1863: mol_type = other DNA

SEQ ID NO: 5757 - DNA, 1875 bp, synthetic construct
  source 1..1875: mol_type = other DNA
atggccttaccagtgaccgccttgctcctgccgctggccttgctgctccacgccgccaggccggacatccagttgacccagtcccccagctcactcagcgccagtgtgggggaccgggtgaccattacctgtaaagccagtcagagtgtggactatgagggggatagcttcctgaattggtatcagcagaagcctggcaaagccccaaagctgctgatctacgctgcatctaatctggagtcaggcgtgccttctaggttctccggtagtgggtctgggaccgatttcacattgaccatttcatccctccaacccgaggatttcgctacatattactgtcagcagtccaatgaggaccctctcacctttggccagggcaccaaagttgaaattaagagactcgagatccagaaccctgatcctgccgtgtaccagctgcgggatagcaagagcagcgacaagagcgtgtgtctgttcaccgacttcgacagccagaccaacgtgtcccagagcaaggactccgacgtgtacatcaccgataagtgcgtgctggacatgcggagcatggacttcaagagcaactccgccgtggcctggtccaacaagtccgatttcgcctgcgccaacgccttcaacaacagcattatccccgaggacacattcttcccaagccccgagagcagctgcggctttaccagcgagagctaccagcagggcgtgctgagcgccaccatcctgtacgagatcctgctgggcaaggccaccctgtacgccgtgctggtgtctgccctggtgctgatggctatggtcaagcggaaggacagccggggacgcgccaagagaagcggatctggcgtgaagcagaccctgaatttcgacctgctgaagctggctggcgacgtggaatccaacccaggccctactagtatggactggatttggcgcatccttttccttgtcggcgctgctaccggcgcgcattccttcgaagtccaacttgtggagtctggagggggcctggtgcagcccggcggctctctcagactgtcttgtgcggcaagcggctacaccttcacctcttactggatagaatgggtgaggcaggcacctggaaagggactggagtggattggagagattctgccaggagggggagatacaaattacaatgaaatcttcaaggggcgggccaccttttcagcggataccagcaagaatacagcttacctgcagatgaatagcctccgggcagaagataccgctgtttattattgcacgagacgggtgccaataagactggactattgggggcaagggactcttgtcaccgtcagttcaacgcgtgaggacctgaagaacgtgttcccacctgaggtggccgtgttcgagcctagcgaggccgagatcagccacacccagaaagccaccctcgtgtgcctggctaccggcttctaccccgaccatgtggaactgtcttggtgggtcaacggcaaagaggtgcacagcggcgtgtgtaccgacccccagccactgaaagaacagcccgccctgaacgacagccggtactgcctgagcagcagactgagagtgtccgccaccttctggcagaacccccggaaccacttcagatgccaggtgcagttctacggcctgagcgagaacgacgagtggacccaggacagagccaagcccgtgacccagatcgtgtctgccgaagcctggggcagagccgattgcgacgtgaagctggtggaaaagagcttcgagacagacaccaacctgaacttccagaacctgagcgtgatcggcttcagaatcctgctgctgaaagtggccggctttaacctgctgatgaccctgcggctgtggtccagc

SEQ ID NO: 5758 - DNA, 2268 bp, synthetic construct
  source 1..2268: mol_type = other DNA
atggccttaccagtgaccgccttgctcctgccgctggccttgctgctccacgccgccaggccggaagtgcagctggttgaatctggcggaggactggttcagcctggcggatctctgagactgtcttgtgccgccagcggcttcagcttcagcgacttttggatgagctgggtccgacaggcccctggcaaaggacttgaatgggtcgccacaatcagccaggccggcagcgagaaggactacgtggactctgtgaagggcagattcaccatcagccgggacaacgccaagaagtccctgtacctccagatgaacagcctgagagccgaggacaccgccgtgtactattgtgcctctggcgtgtacagcttcgactacagaggccagggcaccctggtcacagtctcttctggtaccggcggaggcggatctggcggcggaggtagcggtggcggaggatctgaattcgacatccagttgacccagtcccccagctcactcagcgccagtgtgggggaccgggtgaccattacctgtaaagccagtcagagtgtggactatgagggggatagcttcctgaattggtatcagcagaagcctggcaaagccccaaagctgctgatctacgctgcatctaatctggagtcaggcgtgccttctaggttctccggtagtgggtctgggaccgatttcacattgaccatttcatccctccaacccgaggatttcgctacatattactgtcagcagtccaatgaggaccctctcacctttggccagggcaccaaagttgaaattaagagactcgaggacctgaagaacgtgttcccacctgaggtggccgtgttcgagcctagcgaggccgagatcagccacacccagaaagccaccctcgtgtgcctggctaccggcttctaccccgaccatgtggaactgtcttggtgggtcaacggcaaagaggtgcacagcggcgtgtgtaccgacccccagccactgaaagaacagcccgccctgaacgacagccggtactgcctgagcagcagactgagagtgtccgccaccttctggcagaacccccggaaccacttcagatgccaggtgcagttctacggcctgagcgagaacgacgagtggacccaggacagagccaagcccgtgacccagatcgtgtctgccgaagcctggggcagagccgattgcgacgtgaagctggtggaaaagagcttcgagacagacaccaacctgaacttccagaacctgagcgtgatcggcttcagaatcctgctgctgaaagtggccggctttaacctgctgatgaccctgcggctgtggtccagcagggccaagcgatctggatctggagcaacaaacttctcactactcaaacaagcaggtgacgtggaggagaatcccgggcctactagtatggactggatttggcgcatccttttccttgtcggcgctgctaccggcgcgcattccttcgaagtccaacttgtggagtctggagggggcctggtgcagcccggcggctctctcagactgtcttgtgcggcaagcggctacaccttcacctcttactggatagaatgggtgaggcaggcacctggaaagggactggagtggattggagagattctgccaggagggggagatacaaattacaatgaaatcttcaaggggcgggccaccttttcagcggataccagcaagaatacagcttacctgcagatgaatagcctccgggcagaagataccgctgtttattattgcacgagacgggtgccaataagactggactattgggggcaagggactcttgtcaccgtcagttcaacgcgtatccagaaccctgatcctgccgtgtaccagctgcgggatagcaagagcagcgacaagagcgtgtgtctgttcaccgacttcgacagccagaccaacgtgtcccagagcaaggactccgacgtgtacatcaccgataagtgcgtgctggacatgcggagcatggacttcaagagcaactccgccgtggcctggtccaacaagtccgatttcgcctgcgccaacgccttcaacaacagcattatccccgaggacacattcttcccaagccccgagagcagctgcggctttaccagcgagagctaccagcagggcgtgctgagcgccaccatcctgtacgagatcctgctgggcaaggccaccctgtacgccgtgctggtgtctgccctggtgctgatggctatggtcaagcggaaggacagccgggga

SEQ ID NO: 5759 - DNA, 2280 bp, synthetic construct
  source 1..2280: mol_type = other DNA
atggccttaccagtgaccgccttgctcctgccgctggccttgctgctccacgccgccaggccggaagtgcagctggttgaatctggcggaggactggttcagcctggcggatctctgagactgtcttgtgccgccagcggcttcagcttcagcgacttttggatgagctgggtccgacaggcccctggcaaaggacttgaatgggtcgccacaatcagccaggccggcagcgagaaggactacgtggactctgtgaagggcagattcaccatcagccgggacaacgccaagaagtccctgtacctccagatgaacagcctgagagccgaggacaccgccgtgtactattgtgcctctggcgtgtacagcttcgactacagaggccagggcaccctggtcacagtctcttctggtaccggcggaggcggatctggcggcggaggtagcggtggcggaggatctgaattcgacatccagttgacccagtcccccagctcactcagcgccagtgtgggggaccgggtgaccattacctgtaaagccagtcagagtgtggactatgagggggatagcttcctgaattggtatcagcagaagcctggcaaagccccaaagctgctgatctacgctgcatctaatctggagtcaggcgtgccttctaggttctccggtagtgggtctgggaccgatttcacattgaccatttcatccctccaacccgaggatttcgctacatattactgtcagcagtccaatgaggaccctctcacctttggccagggcaccaaagttgaaattaagagactcgagatccagaaccctgatcctgccgtgtaccagctgcgggatagcaagagcagcgacaagagcgtgtgtctgttcaccgacttcgacagccagaccaacgtgtcccagagcaaggactccgacgtgtacatcaccgataagtgcgtgctggacatgcggagcatggacttcaagagcaactccgccgtggcctggtccaacaagtccgatttcgcctgcgccaacgccttcaacaacagcattatccccgaggacacattcttcccaagccccgagagcagctgcggctttaccagcgagagctaccagcagggcgtgctgagcgccaccatcctgtacgagatcctgctgggcaaggccaccctgtacgccgtgctggtgtctgccctggtgctgatggctatggtcaagcggaaggacagccggggacgcgccaagagaagcggatctggcgtgaagcagaccctgaatttcgacctgctgaagctggctggcgacgtggaatccaacccaggccctactagtatggactggatttggcgcatccttttccttgtcggcgctgctaccggcgcgcattccttcgaagtccaacttgtggagtctggagggggcctggtgcagcccggcggctctctcagactgtcttgtgcggcaagcggctacaccttcacctcttactggatagaatgggtgaggcaggcacctggaaagggactggagtggattggagagattctgccaggagggggagatacaaattacaatgaaatcttcaaggggcgggccaccttttcagcggataccagcaagaatacagcttacctgcagatgaatagcctccgggcagaagataccgctgtttattattgcacgagacgggtgccaataagactggactattgggggcaagggactcttgtcaccgtcagttcaacgcgtgaggacctgaagaacgtgttcccacctgaggtggccgtgttcgagcctagcgaggccgagatcagccacacccagaaagccaccctcgtgtgcctggctaccggcttctaccccgaccatgtggaactgtcttggtgggtcaacggcaaagaggtgcacagcggcgtgtgtaccgacccccagccactgaaagaacagcccgccctgaacgacagccggtactgcctgagcagcagactgagagtgtccgccaccttctggcagaacccccggaaccacttcagatgccaggtgcagttctacggcctgagcgagaacgacgagtggacccaggacagagccaagcccgtgacccagatcgtgtctgccgaagcctggggcagagccgattgcgacgtgaagctggtggaaaagagcttcgagacagacaccaacctgaacttccagaacctgagcgtgatcggcttcagaatcctgctgctgaaagtggccggctttaacctgctgatgaccctgcggctgtggtccagc

SEQ ID NO: 5760 - DNA, 2679 bp, synthetic construct
  source 1..2679: mol_type = other DNA
atggccttaccagtgaccgccttgctcctgccgctggccttgctgctccacgccgccaggccggaagtgcagctggttgaatctggcggaggactggttcagcctggcggatctctgagactgtcttgtgccgccagcggcttcagcttcagcgacttttggatgagctgggtccgacaggcccctggcaaaggacttgaatgggtcgccacaatcagccaggccggcagcgagaaggactacgtggactctgtgaagggcagattcaccatcagccgggacaacgccaagaagtccctgtacctccagatgaacagcctgagagccgaggacaccgccgtgtactattgtgcctctggcgtgtacagcttcgactacagaggccagggcaccctggtcacagtctcttctggtaccggcggaggcggatctggcggcggaggtagcggtggcggaggatctgaattcgacatccagttgacccagtcccccagctcactcagcgccagtgtgggggaccgggtgaccattacctgtaaagccagtcagagtgtggactatgagggggatagcttcctgaattggtatcagcagaagcctggcaaagccccaaagctgctgatctacgctgcatctaatctggagtcaggcgtgccttctaggttctccggtagtgggtctgggaccgatttcacattgaccatttcatccctccaacccgaggatttcgctacatattactgtcagcagtccaatgaggaccctctcacctttggccagggcaccaaagttgaaattaagagactcgaggacctgaagaacgtgttcccacctgaggtggccgtgttcgagcctagcgaggccgagatcagccacacccagaaagccaccctcgtgtgcctggctaccggcttctaccccgaccatgtggaactgtcttggtgggtcaacggcaaagaggtgcacagcggcgtgtgtaccgacccccagccactgaaagaacagcccgccctgaacgacagccggtactgcctgagcagcagactgagagtgtccgccaccttctggcagaacccccggaaccacttcagatgccaggtgcagttctacggcctgagcgagaacgacgagtggacccaggacagagccaagcccgtgacccagatcgtgtctgccgaagcctggggcagagccgattgcgacgtgaagctggtggaaaagagcttcgagacagacaccaacctgaacttccagaacctgagcgtgatcggcttcagaatcctgctgctgaaagtggccggctttaacctgctgatgaccctgcggctgtggtccagcagggccaagcgatctggatctggagcaacaaacttctcactactcaaacaagcaggtgacgtggaggagaatcccgggcctactagtatggactggatttggcgcatccttttccttgtcggcgctgctaccggcgcgcattccgggccccagctccagctgcaagagtctggacctggcctggtcaagcctagcgagacactgagcctgacctgtaccgtgtccggcgatagcatcagcagcggcgattactactggggctggatcagacagcctcctggcaaaggactggaatggatcggccacatctactacagcggcgtgacctactacaaccccagcctgaagtccagagtgaccatcagcgtggacaccagccggaaccagttctccctgaagctgtctagcgtgacagccgccgataccgccgtgtactactgcaccagagaggacagcagcaactggcggagtagaggccagggaacactggtcacagttagctctggatccggcggaggcggaagtggaggcggaggatctggcggcggaggctctttcgaagtccaacttgtggagtctggagggggcctggtgcagcccggcggctctctcagactgtcttgtgcggcaagcggctacaccttcacctcttactggatagaatgggtgaggcaggcacctggaaagggactggagtggattggagagattctgccaggagggggagatacaaattacaatgaaatcttcaaggggcgggccaccttttcagcggataccagcaagaatacagcttacctgcagatgaatagcctccgggcagaagataccgctgtttattattgcacgagacgggtgccaataagactggactattgggggcaagggactcttgtcaccgtcagttcaacgcgtatccagaaccctgatcctgccgtgtaccagctgcgggatagcaagagcagcgacaagagcgtgtgtctgttcaccgacttcgacagccagaccaacgtgtcccagagcaaggactccgacgtgtacatcaccgataagtgcgtgctggacatgcggagcatggacttcaagagcaactccgccgtggcctggtccaacaagtccgatttcgcctgcgccaacgccttcaacaacagcattatccccgaggacacattcttcccaagccccgagagcagctgcggctttaccagcgagagctaccagcagggcgtgctgagcgccaccatcctgtacgagatcctgctgggcaaggccaccctgtacgccgtgctggtgtctgccctggtgctgatggctatggtcaagcggaaggacagccgggga

SEQ ID NO: 5761 - DNA, 2691 bp, synthetic construct
  source 1..2691: mol_type = other DNA
atggccttaccagtgaccgccttgctcctgccgctggccttgctgctccacgccgccaggccggaagtgcagctggttgaatctggcggaggactggttcagcctggcggatctctgagactgtcttgtgccgccagcggcttcagcttcagcgacttttggatgagctgggtccgacaggcccctggcaaaggacttgaatgggtcgccacaatcagccaggccggcagcgagaaggactacgtggactctgtgaagggcagattcaccatcagccgggacaacgccaagaagtccctgtacctccagatgaacagcctgagagccgaggacaccgccgtgtactattgtgcctctggcgtgtacagcttcgactacagaggccagggcaccctggtcacagtctcttctggtaccggcggaggcggatctggcggcggaggtagcggtggcggaggatctgaattcgacatccagttgacccagtcccccagctcactcagcgccagtgtgggggaccgggtgaccattacctgtaaagccagtcagagtgtggactatgagggggatagcttcctgaattggtatcagcagaagcctggcaaagccccaaagctgctgatctacgctgcatctaatctggagtcaggcgtgccttctaggttctccggtagtgggtctgggaccgatttcacattgaccatttcatccctccaacccgaggatttcgctacatattactgtcagcagtccaatgaggaccctctcacctttggccagggcaccaaagttgaaattaagagactcgagatccagaaccctgatcctgccgtgtaccagctgcgggatagcaagagcagcgacaagagcgtgtgtctgttcaccgacttcgacagccagaccaacgtgtcccagagcaaggactccgacgtgtacatcaccgataagtgcgtgctggacatgcggagcatggacttcaagagcaactccgccgtggcctggtccaacaagtccgatttcgcctgcgccaacgccttcaacaacagcattatccccgaggacacattcttcccaagccccgagagcagctgcggctttaccagcgagagctaccagcagggcgtgctgagcgccaccatcctgtacgagatcctgctgggcaaggccaccctgtacgccgtgctggtgtctgccctggtgctgatggctatggtcaagcggaaggacagccggggacgcgccaagagaagcggatctggcgtgaagcagaccctgaatttcgacctgctgaagctggctggcgacgtggaatccaacccaggccctactagtatggactggatttggcgcatccttttccttgtcggcgctgctaccggcgcgcattccgggccccagctccagctgcaagagtctggacctggcctggtcaagcctagcgagacactgagcctgacctgtaccgtgtccggcgatagcatcagcagcggcgattactactggggctggatcagacagcctcctggcaaaggactggaatggatcggccacatctactacagcggcgtgacctactacaaccccagcctgaagtccagagtgaccatcagcgtggacaccagccggaaccagttctccctgaagctgtctagcgtgacagccgccgataccgccgtgtactactgcaccagagaggacagcagcaactggcggagtagaggccagggaacactggtcacagttagctctggatccggcggaggcggaagtggaggcggaggatctggcggcggaggctctttcgaagtccaacttgtggagtctggagggggcctggtgcagcccggcggctctctcagactgtcttgtgcggcaagcggctacaccttcacctcttactggatagaatgggtgaggcaggcacctggaaagggactggagtggattggagagattctgccaggagggggagatacaaattacaatgaaatcttcaaggggcgggccaccttttcagcggataccagcaagaatacagcttacctgcagatgaatagcctccgggcagaagataccgctgtttattattgcacgagacgggtgccaataagactggactattgggggcaagggactcttgtcaccgtcagttcaacgcgtgaggacctgaagaacgtgttcccacctgaggtggccgtgttcgagcctagcgaggccgagatcagccacacccagaaagccaccctcgtgtgcctggctaccggcttctaccccgaccatgtggaactgtcttggtgggtcaacggcaaagaggtgcacagcggcgtgtgtaccgacccccagccactgaaagaacagcccgccctgaacgacagccggtactgcctgagcagcagactgagagtgtccgccaccttctggcagaacccccggaaccacttcagatgccaggtgcagttctacggcctgagcgagaacgacgagtggacccaggacagagccaagcccgtgacccagatcgtgtctgccgaagcctggggcagagccgattgcgacgtgaagctggtggaaaagagcttcgagacagacaccaacctgaacttccagaacctgagcgtgatcggcttcagaatcctgctgctgaaagtggccggctttaacctgctgatgaccctgcggctgtggtccagc

SEQ ID NO: 5762 - DNA, 2073 bp, synthetic construct
  source 1..2073: mol_type = other DNA
atggccttaccagtgaccgccttgctcctgccgctggccttgctgctccacgccgccaggccggacatccagttgacccagtcccccagctcactcagcgccagtgtgggggaccgggtgaccattacctgtaaagccagtcagagtgtggactatgagggggatagcttcctgaattggtatcagcagaagcctggcaaagccccaaagctgctgatctacgctgcatctaatctggagtcaggcgtgccttctaggttctccggtagtgggtctgggaccgatttcacattgaccatttcatccctccaacccgaggatttcgctacatattactgtcagcagtccaatgaggaccctctcacctttggccagggcaccaaagttgaaattaagagactcgaggacctgaagaacgtgttcccacctgaggtggccgtgttcgagcctagcgaggccgagatcagccacacccagaaagccaccctcgtgtgcctggctaccggcttctaccccgaccatgtggaactgtcttggtgggtcaacggcaaagaggtgcacagcggcgtgtgtaccgacccccagccactgaaagaacagcccgccctgaacgacagccggtactgcctgagcagcagactgagagtgtccgccaccttctggcagaacccccggaaccacttcagatgccaggtgcagttctacggcctgagcgagaacgacgagtggacccaggacagagccaagcccgtgacccagatcgtgtctgccgaagcctggggcagagccgattgcgacgtgaagctggtggaaaagagcttcgagacagacaccaacctgaacttccagaacctgagcgtgatcggcttcagaatcctgctgctgaaagtggccggctttaacctgctgatgaccctgcggctgtggtccagcagggccaagcgatctggatctggagcaacaaacttctcactactcaaacaagcaggtgacgtggaggagaatcccgggcctactagtatggactggatttggcgcatccttttccttgtcggcgctgctaccggcgcccattccgggcccatggaccccgacctggaaatcagagccgccttcctgcggcagagaaacacagccctgagaacagaggtggccgagctggaacaagaggtgcagcggctggaaaacgaggtgtcccagtacgagacaagatacggccctctcggaggcggaaaaggatccggcggcggaggatctggcggaggcggatctgggggcggaggctctttcgaagtccaacttgtggagtctggagggggcctggtgcagcccggcggctctctcagactgtcttgtgcggcaagcggctacaccttcacctcttactggatagaatgggtgaggcaggcacctggaaagggactggagtggattggagagattctgccaggagggggagatacaaattacaatgaaatcttcaaggggcgggccaccttttcagcggataccagcaagaatacagcttacctgcagatgaatagcctccgggcagaagataccgctgtttattattgcacgagacgggtgccaataagactggactattgggggcaagggactcttgtcaccgtcagttcaacgcgtatccagaaccctgatcctgccgtgtaccagctgcgggatagcaagagcagcgacaagagcgtgtgtctgttcaccgacttcgacagccagaccaacgtgtcccagagcaaggactccgacgtgtacatcaccgataagtgcgtgctggacatgcggagcatggacttcaagagcaactccgccgtggcctggtccaacaagtccgatttcgcctgcgccaacgccttcaacaacagcattatccccgaggacacattcttcccaagccccgagagcagctgcggctttaccagcgagagctaccagcagggcgtgctgagcgccaccatcctgtacgagatcctgctgggcaaggccaccctgtacgccgtgctggtgtctgccctggtgctgatggctatggtcaagcggaaggacagccgggga

SEQ ID NO: 5763 - DNA, 2085 bp, synthetic construct
  source 1..2085: mol_type = other DNA
atggccttaccagtgaccgccttgctcctgccgctggccttgctgctccacgccgccaggccggacatccagttgacccagtcccccagctcactcagcgccagtgtgggggaccgggtgaccattacctgtaaagccagtcagagtgtggactatgagggggatagcttcctgaattggtatcagcagaagcctggcaaagccccaaagctgctgatctacgctgcatctaatctggagtcaggcgtgccttctaggttctccggtagtgggtctgggaccgatttcacattgaccatttcatccctccaacccgaggatttcgctacatattactgtcagcagtccaatgaggaccctctcacctttggccagggcaccaaagttgaaattaagagactcgagatccagaaccctgatcctgccgtgtaccagctgcgggatagcaagagcagcgacaagagcgtgtgtctgttcaccgacttcgacagccagaccaacgtgtcccagagcaaggactccgacgtgtacatcaccgataagtgcgtgctggacatgcggagcatggacttcaagagcaactccgccgtggcctggtccaacaagtccgatttcgcctgcgccaacgccttcaacaacagcattatccccgaggacacattcttcccaagccccgagagcagctgcggctttaccagcgagagctaccagcagggcgtgctgagcgccaccatcctgtacgagatcctgctgggcaaggccaccctgtacgccgtgctggtgtctgccctggtgctgatggctatggtcaagcggaaggacagccggggacgcgccaagagaagcggatctggcgtgaagcagaccctgaatttcgacctgctgaagctggctggcgacgtggaatccaacccaggccctactagtatggactggatttggcgcatccttttccttgtcggcgctgctaccggcgcccattccgggcccatggaccccgacctggaaatcagagccgccttcctgcggcagagaaacacagccctgagaacagaggtggccgagctggaacaagaggtgcagcggctggaaaacgaggtgtcccagtacgagacaagatacggccctctcggaggcggaaaaggatccggcggcggaggatctggcggaggcggatctgggggcggaggctctttcgaagtccaacttgtggagtctggagggggcctggtgcagcccggcggctctctcagactgtcttgtgcggcaagcggctacaccttcacctcttactggatagaatgggtgaggcaggcacctggaaagggactggagtggattggagagattctgccaggagggggagatacaaattacaatgaaatcttcaaggggcgggccaccttttcagcggataccagcaagaatacagcttacctgcagatgaatagcctccgggcagaagataccgctgtttattattgcacgagacgggtgccaataagactggactattgggggcaagggactcttgtcaccgtcagttcaacgcgtgaggacctgaagaacgtgttcccacctgaggtggccgtgttcgagcctagcgaggccgagatcagccacacccagaaagccaccctcgtgtgcctggctaccggcttctaccccgaccatgtggaactgtcttggtgggtcaacggcaaagaggtgcacagcggcgtgtgtaccgacccccagccactgaaagaacagcccgccctgaacgacagccggtactgcctgagcagcagactgagagtgtccgccaccttctggcagaacccccggaaccacttcagatgccaggtgcagttctacggcctgagcgagaacgacgagtggacccaggacagagccaagcccgtgacccagatcgtgtctgccgaagcctggggcagagccgattgcgacgtgaagctggtggaaaagagcttcgagacagacaccaacctgaacttccagaacctgagcgtgatcggcttcagaatcctgctgctgaaagtggccggctttaacctgctgatgaccctgcggctgtggtccagc

SEQ ID NO: 5764 - DNA, 2004 bp, synthetic construct
  source 1..2004: mol_type = other DNA
atggccttaccagtgaccgccttgctcctgccgctggccttgctgctccacgccgccaggccggacatccagttgacccagtcccccagctcactcagcgccagtgtgggggaccgggtgaccattacctgtaaagccagtcagagtgtggactatgagggggatagcttcctgaattggtatcagcagaagcctggcaaagccccaaagctgctgatctacgctgcatctaatctggagtcaggcgtgccttctaggttctccggtagtgggtctgggaccgatttcacattgaccatttcatccctccaacccgaggatttcgctacatattactgtcagcagtccaatgaggaccctctcacctttggccagggcaccaaagttgaaattaagagactcgaggacctgaagaacgtgttcccacctgaggtggccgtgttcgagcctagcgaggccgagatcagccacacccagaaagccaccctcgtgtgcctggctaccggcttctaccccgaccatgtggaactgtcttggtgggtcaacggcaaagaggtgcacagcggcgtgtgtaccgacccccagccactgaaagaacagcccgccctgaacgacagccggtactgcctgagcagcagactgagagtgtccgccaccttctggcagaacccccggaaccacttcagatgccaggtgcagttctacggcctgagcgagaacgacgagtggacccaggacagagccaagcccgtgacccagatcgtgtctgccgaagcctggggcagagccgattgcgacgtgaagctggtggaaaagagcttcgagacagacaccaacctgaacttccagaacctgagcgtgatcggcttcagaatcctgctgctgaaagtggccggctttaacctgctgatgaccctgcggctgtggtccagcagggccaagcgatctggatctggagcaacaaacttctcactactcaaacaagcaggtgacgtggaggagaatcccgggcctactagtatggactggatttggcgcatccttttccttgtcggcgctgctaccggcgcccattccgggcccgaagttgctgccctcgagaaggaggtagcagctttggaaaaagaagtcgcagcccttgagaaagaagttgcggctctggagaagggatccggcggcggaggatctggcggaggcggatctgggggcggaggctctttcgaagtccaacttgtggagtctggagggggcctggtgcagcccggcggctctctcagactgtcttgtgcggcaagcggctacaccttcacctcttactggatagaatgggtgaggcaggcacctggaaagggactggagtggattggagagattctgccaggagggggagatacaaattacaatgaaatcttcaaggggcgggccaccttttcagcggataccagcaagaatacagcttacctgcagatgaatagcctccgggcagaagataccgctgtttattattgcacgagacgggtgccaataagactggactattgggggcaagggactcttgtcaccgtcagttcaacgcgtatccagaaccctgatcctgccgtgtaccagctgcgggatagcaagagcagcgacaagagcgtgtgtctgttcaccgacttcgacagccagaccaacgtgtcccagagcaaggactccgacgtgtacatcaccgataagtgcgtgctggacatgcggagcatggacttcaagagcaactccgccgtggcctggtccaacaagtccgatttcgcctgcgccaacgccttcaacaacagcattatccccgaggacacattcttcccaagccccgagagcagctgcggctttaccagcgagagctaccagcagggcgtgctgagcgccaccatcctgtacgagatcctgctgggcaaggccaccctgtacgccgtgctggtgtctgccctggtgctgatggctatggtcaagcggaaggacagccgggga

SEQ ID NO: 5765 - DNA, 2016 bp, synthetic construct
  source 1..2016: mol_type = other DNA
atggccttaccagtgaccgccttgctcctgccgctggccttgctgctccacgccgccaggccggacatccagttgacccagtcccccagctcactcagcgccagtgtgggggaccgggtgaccattacctgtaaagccagtcagagtgtggactatgagggggatagcttcctgaattggtatcagcagaagcctggcaaagccccaaagctgctgatctacgctgcatctaatctggagtcaggcgtgccttctaggttctccggtagtgggtctgggaccgatttcacattgaccatttcatccctccaacccgaggatttcgctacatattactgtcagcagtccaatgaggaccctctcacctttggccagggcaccaaagttgaaattaagagactcgagatccagaaccctgatcctgccgtgtaccagctgcgggatagcaagagcagcgacaagagcgtgtgtctgttcaccgacttcgacagccagaccaacgtgtcccagagcaaggactccgacgtgtacatcaccgataagtgcgtgctggacatgcggagcatggacttcaagagcaactccgccgtggcctggtccaacaagtccgatttcgcctgcgccaacgccttcaacaacagcattatccccgaggacacattcttcccaagccccgagagcagctgcggctttaccagcgagagctaccagcagggcgtgctgagcgccaccatcctgtacgagatcctgctgggcaaggccaccctgtacgccgtgctggtgtctgccctggtgctgatggctatggtcaagcggaaggacagccggggacgcgccaagagaagcggatctggcgtgaagcagaccctgaatttcgacctgctgaagctggctggcgacgtggaatccaacccaggccctactagtatggactggatttggcgcatccttttccttgtcggcgctgctaccggcgcccattccgggcccgaagttgctgccctcgagaaggaggtagcagctttggaaaaagaagtcgcagcccttgagaaagaagttgcggctctggagaagggatccggcggcggaggatctggcggaggcggatctgggggcggaggctctttcgaagtccaacttgtggagtctggagggggcctggtgcagcccggcggctctctcagactgtcttgtgcggcaagcggctacaccttcacctcttactggatagaatgggtgaggcaggcacctggaaagggactggagtggattggagagattctgccaggagggggagatacaaattacaatgaaatcttcaaggggcgggccaccttttcagcggataccagcaagaatacagcttacctgcagatgaatagcctccgggcagaagataccgctgtttattattgcacgagacgggtgccaataagactggactattgggggcaagggactcttgtcaccgtcagttcaacgcgtgaggacctgaagaacgtgttcccacctgaggtggccgtgttcgagcctagcgaggccgagatcagccacacccagaaagccaccctcgtgtgcctggctaccggcttctaccccgaccatgtggaactgtcttggtgggtcaacggcaaagaggtgcacagcggcgtgtgtaccgacccccagccactgaaagaacagcccgccctgaacgacagccggtactgcctgagcagcagactgagagtgtccgccaccttctggcagaacccccggaaccacttcagatgccaggtgcagttctacggcctgagcgagaacgacgagtggacccaggacagagccaagcccgtgacccagatcgtgtctgccgaagcctggggcagagccgattgcgacgtgaagctggtggaaaagagcttcgagacagacaccaacctgaacttccagaacctgagcgtgatcggcttcagaatcctgctgctgaaagtggccggctttaacctgctgatgaccctgcggctgtggtccagc

SEQ ID NO: 5766 - DNA, 2274 bp, synthetic construct
  source 1..2274: mol_type = other DNA
atggccttaccagtgaccgccttgctcctgccgctggccttgctgctccacgccgccaggccggacatccagttgacccagtcccccagctcactcagcgccagtgtgggggaccgggtgaccattacctgtaaagccagtcagagtgtggactatgagggggatagcttcctgaattggtatcagcagaagcctggcaaagccccaaagctgctgatctacgctgcatctaatctggagtcaggcgtgccttctaggttctccggtagtgggtctgggaccgatttcacattgaccatttcatccctccaacccgaggatttcgctacatattactgtcagcagtccaatgaggaccctctcacctttggccagggcaccaaagttgaaattaagagactcgaggacctgaagaacgtgttcccacctgaggtggccgtgttcgagcctagcgaggccgagatcagccacacccagaaagccaccctcgtgtgcctggctaccggcttctaccccgaccatgtggaactgtcttggtgggtcaacggcaaagaggtgcacagcggcgtgtgtaccgacccccagccactgaaagaacagcccgccctgaacgacagccggtactgcctgagcagcagactgagagtgtccgccaccttctggcagaacccccggaaccacttcagatgccaggtgcagttctacggcctgagcgagaacgacgagtggacccaggacagagccaagcccgtgacccagatcgtgtctgccgaagcctggggcagagccgattgcgacgtgaagctggtggaaaagagcttcgagacagacaccaacctgaacttccagaacctgagcgtgatcggcttcagaatcctgctgctgaaagtggccggctttaacctgctgatgaccctgcggctgtggtccagcagggccaagcgatctggatctggagcaacaaacttctcactactcaaacaagcaggtgacgtggaggagaatcccgggcctactagtatggactggatttggcgcatccttttccttgtcggcgctgctaccggcgcccattccgggccccaggttcagctgcaagagtctggcggaggacttgctcaagctggcggaagcctgagactgtcttgtgccgcctctggcagaaccttcagcatgggctggtttagacaggcccctggcaaagagagagagttcgtcgccgccatcacatacagcggcggcagcccttactacgcctcttctgtcagaggccggttcaccatcagccgggacaacgccaagaacaccgtgtacctccagatgaacagcctgaagccagaggacaccgccgtgtactactgtgccgccaatccaacctacggcagcgactggaatgccgagaattggggccagggcacccaagtgacagtgtctagtggatccggcggcggaggatctggcggaggcggatctgggggcggaggctctttcgaagtccaacttgtggagtctggagggggcctggtgcagcccggcggctctctcagactgtcttgtgcggcaagcggctacaccttcacctcttactggatagaatgggtgaggcaggcacctggaaagggactggagtggattggagagattctgccaggagggggagatacaaattacaatgaaatcttcaaggggcgggccaccttttcagcggataccagcaagaatacagcttacctgcagatgaatagcctccgggcagaagataccgctgtttattattgcacgagacgggtgccaataagactggactattgggggcaagggactcttgtcaccgtcagttcaacgcgtatccagaaccctgatcctgccgtgtaccagctgcgggatagcaagagcagcgacaagagcgtgtgtctgttcaccgacttcgacagccagaccaacgtgtcccagagcaaggactccgacgtgtacatcaccgataagtgcgtgctggacatgcggagcatggacttcaagagcaactccgccgtggcctggtccaacaagtccgatttcgcctgcgccaacgccttcaacaacagcattatccccgaggacacattcttcccaagccccgagagcagctgcggctttaccagcgagagctaccagcagggcgtgctgagcgccaccatcctgtacgagatcctgctgggcaaggccaccctgtacgccgtgctggtgtctgccctggtgctgatggctatggtcaagcggaaggacagccgggga

SEQ ID NO: 5767 - DNA, 2286 bp, synthetic construct
  source 1..2286: mol_type = other DNA
atggccttaccagtgaccgccttgctcctgccgctggccttgctgctccacgccgccaggccggacatccagttgacccagtcccccagctcactcagcgccagtgtgggggaccgggtgaccattacctgtaaagccagtcagagtgtggactatgagggggatagcttcctgaattggtatcagcagaagcctggcaaagccccaaagctgctgatctacgctgcatctaatctggagtcaggcgtgccttctaggttctccggtagtgggtctgggaccgatttcacattgaccatttcatccctccaacccgaggatttcgctacatattactgtcagcagtccaatgaggaccctctcacctttggccagggcaccaaagttgaaattaagagactcgagatccagaaccctgatcctgccgtgtaccagctgcgggatagcaagagcagcgacaagagcgtgtgtctgttcaccgacttcgacagccagaccaacgtgtcccagagcaaggactccgacgtgtacatcaccgataagtgcgtgctggacatgcggagcatggacttcaagagcaactccgccgtggcctggtccaacaagtccgatttcgcctgcgccaacgccttcaacaacagcattatccccgaggacacattcttcccaagccccgagagcagctgcggctttaccagcgagagctaccagcagggcgtgctgagcgccaccatcctgtacgagatcctgctgggcaaggccaccctgtacgccgtgctggtgtctgccctggtgctgatggctatggtcaagcggaaggacagccggggacgcgccaagagaagcggatctggcgtgaagcagaccctgaatttcgacctgctgaagctggctggcgacgtggaatccaacccaggccctactagtatggactggatttggcgcatccttttccttgtcggcgctgctaccggcgcccattccgggccccaggttcagctgcaagagtctggcggaggacttgctcaagctggcggaagcctgagactgtcttgtgccgcctctggcagaaccttcagcatgggctggtttagacaggcccctggcaaagagagagagttcgtcgccgccatcacatacagcggcggcagcccttactacgcctcttctgtcagaggccggttcaccatcagccgggacaacgccaagaacaccgtgtacctccagatgaacagcctgaagccagaggacaccgccgtgtactactgtgccgccaatccaacctacggcagcgactggaatgccgagaattggggccagggcacccaagtgacagtgtctagtggatccggcggcggaggatctggcggaggcggatctgggggcggaggctctttcgaagtccaacttgtggagtctggagggggcctggtgcagcccggcggctctctcagactgtcttgtgcggcaagcggctacaccttcacctcttactggatagaatgggtgaggcaggcacctggaaagggactggagtggattggagagattctgccaggagggggagatacaaattacaatgaaatcttcaaggggcgggccaccttttcagcggataccagcaagaatacagcttacctgcagatgaatagcctccgggcagaagataccgctgtttattattgcacgagacgggtgccaataagactggactattgggggcaagggactcttgtcaccgtcagttcaacgcgtgaggacctgaagaacgtgttcccacctgaggtggccgtgttcgagcctagcgaggccgagatcagccacacccagaaagccaccctcgtgtgcctggctaccggcttctaccccgaccatgtggaactgtcttggtgggtcaacggcaaagaggtgcacagcggcgtgtgtaccgacccccagccactgaaagaacagcccgccctgaacgacagccggtactgcctgagcagcagactgagagtgtccgccaccttctggcagaacccccggaaccacttcagatgccaggtgcagttctacggcctgagcgagaacgacgagtggacccaggacagagccaagcccgtgacccagatcgtgtctgccgaagcctggggcagagccgattgcgacgtgaagctggtggaaaagagcttcgagacagacaccaacctgaacttccagaacctgagcgtgatcggcttcagaatcctgctgctgaaagtggccggctttaacctgctgatgaccctgcggctgtggtccagc

SEQ ID NO: 5768 - DNA, 2292 bp, synthetic construct
  source 1..2292: mol_type = other DNA
atggccttaccagtgaccgccttgctcctgccgctggccttgctgctccacgccgccaggccggaagtgcaactggtggaatctggaggctctctggtgcagccagggggaagcctgagactgtcttgtgccgcttccggcttcaccttcgacgactacgccatgagctgggtgcgccaggtgccaggcaaaggcctggaatgggtgtccagcatcaactggagcggcacccacaccgattacgccgactccgtgaaaggcagattcacaatcagcagaaacaacgccaacaataccctgtacctgcagatgaactccctgaagtctgaggatacagcagtgtattattgcgccaagaactggcgggacgccggcaccacttggtttgagaaaagcggctctgccggacagggaacccaagtgacagtgtcctccggtaccggcggaggcggatctggcggcggaggtagcggtggcggaggatctgaattcgacatccagttgacccagtcccccagctcactcagcgccagtgtgggggaccgggtgaccattacctgtaaagccagtcagagtgtggactatgagggggatagcttcctgaattggtatcagcagaagcctggcaaagccccaaagctgctgatctacgctgcatctaatctggagtcaggcgtgccttctaggttctccggtagtgggtctgggaccgatttcacattgaccatttcatccctccaacccgaggatttcgctacatattactgtcagcagtccaatgaggaccctctcacctttggccagggcaccaaagttgaaattaagagactcgaggacctgaagaacgtgttcccacctgaggtggccgtgttcgagcctagcgaggccgagatcagccacacccagaaagccaccctcgtgtgcctggctaccggcttctaccccgaccatgtggaactgtcttggtgggtcaacggcaaagaggtgcacagcggcgtgtgtaccgacccccagccactgaaagaacagcccgccctgaacgacagccggtactgcctgagcagcagactgagagtgtccgccaccttctggcagaacccccggaaccacttcagatgccaggtgcagttctacggcctgagcgagaacgacgagtggacccaggacagagccaagcccgtgacccagatcgtgtctgccgaagcctggggcagagccgattgcgacgtgaagctggtggaaaagagcttcgagacagacaccaacctgaacttccagaacctgagcgtgatcggcttcagaatcctgctgctgaaagtggccggctttaacctgctgatgaccctgcggctgtggtccagcagggccaagcgatctggatctggagcaacaaacttctcactactcaaacaagcaggtgacgtggaggagaatcccgggcctactagtatggactggatttggcgcatccttttccttgtcggcgctgctaccggcgcgcattccttcgaagtccaacttgtggagtctggagggggcctggtgcagcccggcggctctctcagactgtcttgtgcggcaagcggctacaccttcacctcttactggatagaatgggtgaggcaggcacctggaaagggactggagtggattggagagattctgccaggagggggagatacaaattacaatgaaatcttcaaggggcgggccaccttttcagcggataccagcaagaatacagcttacctgcagatgaatagcctccgggcagaagataccgctgtttattattgcacgagacgggtgccaataagactggactattgggggcaagggactcttgtcaccgtcagttcaacgcgtatccagaaccctgatcctgccgtgtaccagctgcgggatagcaagagcagcgacaagagcgtgtgtctgttcaccgacttcgacagccagaccaacgtgtcccagagcaaggactccgacgtgtacatcaccgataagtgcgtgctggacatgcggagcatggacttcaagagcaactccgccgtggcctggtccaacaagtccgatttcgcctgcgccaacgccttcaacaacagcattatccccgaggacacattcttcccaagccccgagagcagctgcggctttaccagcgagagctaccagcagggcgtgctgagcgccaccatcctgtacgagatcctgctgggcaaggccaccctgtacgccgtgctggtgtctgccctggtgctgatggctatggtcaagcggaaggacagccgggga

SEQ ID NO: 5769 - DNA, 2304 bp, synthetic construct
  source 1..2304: mol_type = other DNA
atggccttaccagtgaccgccttgctcctgccgctggccttgctgctccacgccgccaggccggaagtgcaactggtggaatctggaggctctctggtgcagccagggggaagcctgagactgtcttgtgccgcttccggcttcaccttcgacgactacgccatgagctgggtgcgccaggtgccaggcaaaggcctggaatgggtgtccagcatcaactggagcggcacccacaccgattacgccgactccgtgaaaggcagattcacaatcagcagaaacaacgccaacaataccctgtacctgcagatgaactccctgaagtctgaggatacagcagtgtattattgcgccaagaactggcgggacgccggcaccacttggtttgagaaaagcggctctgccggacagggaacccaagtgacagtgtcctccggtaccggcggaggcggatctggcggcggaggtagcggtggcggaggatctgaattcgacatccagttgacccagtcccccagctcactcagcgccagtgtgggggaccgggtgaccattacctgtaaagccagtcagagtgtggactatgagggggatagcttcctgaattggtatcagcagaagcctggcaaagccccaaagctgctgatctacgctgcatctaatctggagtcaggcgtgccttctaggttctccggtagtgggtctgggaccgatttcacattgaccatttcatccctccaacccgaggatttcgctacatattactgtcagcagtccaatgaggaccctctcacctttggccagggcaccaaagttgaaattaagagactcgagatccagaaccctgatcctgccgtgtaccagctgcgggatagcaagagcagcgacaagagcgtgtgtctgttcaccgacttcgacagccagaccaacgtgtcccagagcaaggactccgacgtgtacatcaccgataagtgcgtgctggacatgcggagcatggacttcaagagcaactccgccgtggcctggtccaacaagtccgatttcgcctgcgccaacgccttcaacaacagcattatccccgaggacacattcttcccaagccccgagagcagctgcggctttaccagcgagagctaccagcagggcgtgctgagcgccaccatcctgtacgagatcctgctgggcaaggccaccctgtacgccgtgctggtgtctgccctggtgctgatggctatggtcaagcggaaggacagccggggacgcgccaagagaagcggatctggcgtgaagcagaccctgaatttcgacctgctgaagctggctggcgacgtggaatccaacccaggccctactagtatggactggatttggcgcatccttttccttgtcggcgctgctaccggcgcgcattccttcgaagtccaacttgtggagtctggagggggcctggtgcagcccggcggctctctcagactgtcttgtgcggcaagcggctacaccttcacctcttactggatagaatgggtgaggcaggcacctggaaagggactggagtggattggagagattctgccaggagggggagatacaaattacaatgaaatcttcaaggggcgggccaccttttcagcggataccagcaagaatacagcttacctgcagatgaatagcctccgggcagaagataccgctgtttattattgcacgagacgggtgccaataagactggactattgggggcaagggactcttgtcaccgtcagttcaacgcgtgaggacctgaagaacgtgttcccacctgaggtggccgtgttcgagcctagcgaggccgagatcagccacacccagaaagccaccctcgtgtgcctggctaccggcttctaccccgaccatgtggaactgtcttggtgggtcaacggcaaagaggtgcacagcggcgtgtgtaccgacccccagccactgaaagaacagcccgccctgaacgacagccggtactgcctgagcagcagactgagagtgtccgccaccttctggcagaacccccggaaccacttcagatgccaggtgcagttctacggcctgagcgagaacgacgagtggacccaggacagagccaagcccgtgacccagatcgtgtctgccgaagcctggggcagagccgattgcgacgtgaagctggtggaaaagagcttcgagacagacaccaacctgaacttccagaacctgagcgtgatcggcttcagaatcctgctgctgaaagtggccggctttaacctgctgatgaccctgcggctgtggtccagc

SEQ ID NO: 5770 - DNA, 2286 bp, synthetic construct
  source 1..2286: mol_type = other DNA
atggccttaccagtgaccgccttgctcctgccgctggccttgctgctccacgccgccaggccggaagttcagctgcttgagtctggcggaggactggttcaacctggcggaagcctgagactgtcttgtgccgccagcggcttcatcttcagcagctacgccatgagctgggtccgacaggctcctggaaagggccaagaatgggtttccggcgttagcggcacaggcgtgaacacctactacgccgatagcgtgaagggcagattcaccatcagccgggacaacagcaagaacaccctgtacctccagatgaacagcctgagagccgaggacaccgccgtgtactattgtgcctctggcaaaggctgggacagcggctcttggtacgaggactatagaggccagggcaccctggtcacagtttcttcaggtaccggcggaggcggatctggcggcggaggtagcggtggcggaggatctgaattcgacatccagttgacccagtcccccagctcactcagcgccagtgtgggggaccgggtgaccattacctgtaaagccagtcagagtgtggactatgagggggatagcttcctgaattggtatcagcagaagcctggcaaagccccaaagctgctgatctacgctgcatctaatctggagtcaggcgtgccttctaggttctccggtagtgggtctgggaccgatttcacattgaccatttcatccctccaacccgaggatttcgctacatattactgtcagcagtccaatgaggaccctctcacctttggccagggcaccaaagttgaaattaagagactcgaggacctgaagaacgtgttcccacctgaggtggccgtgttcgagcctagcgaggccgagatcagccacacccagaaagccaccctcgtgtgcctggctaccggcttctaccccgaccatgtggaactgtcttggtgggtcaacggcaaagaggtgcacagcggcgtgtgtaccgacccccagccactgaaagaacagcccgccctgaacgacagccggtactgcctgagcagcagactgagagtgtccgccaccttctggcagaacccccggaaccacttcagatgccaggtgcagttctacggcctgagcgagaacgacgagtggacccaggacagagccaagcccgtgacccagatcgtgtctgccgaagcctggggcagagccgattgcgacgtgaagctggtggaaaagagcttcgagacagacaccaacctgaacttccagaacctgagcgtgatcggcttcagaatcctgctgctgaaagtggccggctttaacctgctgatgaccctgcggctgtggtccagcagggccaagcgatctggatctggagcaacaaacttctcactactcaaacaagcaggtgacgtggaggagaatcccgggcctactagtatggactggatttggcgcatccttttccttgtcggcgctgctaccggcgcgcattccttcgaagtccaacttgtggagtctggagggggcctggtgcagcccggcggctctctcagactgtcttgtgcggcaagcggctacaccttcacctcttactggatagaatgggtgaggcaggcacctggaaagggactggagtggattggagagattctgccaggagggggagatacaaattacaatgaaatcttcaaggggcgggccaccttttcagcggataccagcaagaatacagcttacctgcagatgaatagcctccgggcagaagataccgctgtttattattgcacgagacgggtgccaataagactggactattgggggcaagggactcttgtcaccgtcagttcaacgcgtatccagaaccctgatcctgccgtgtaccagctgcgggatagcaagagcagcgacaagagcgtgtgtctgttcaccgacttcgacagccagaccaacgtgtcccagagcaaggactccgacgtgtacatcaccgataagtgcgtgctggacatgcggagcatggacttcaagagcaactccgccgtggcctggtccaacaagtccgatttcgcctgcgccaacgccttcaacaacagcattatccccgaggacacattcttcccaagccccgagagcagctgcggctttaccagcgagagctaccagcagggcgtgctgagcgccaccatcctgtacgagatcctgctgggcaaggccaccctgtacgccgtgctggtgtctgccctggtgctgatggctatggtcaagcggaaggacagccgggga

SEQ ID NO: 5771 - DNA, 2298 bp, synthetic construct
  source 1..2298: mol_type = other DNA
atggccttaccagtgaccgccttgctcctgccgctggccttgctgctccacgccgccaggccggaagttcagctgcttgagtctggcggaggactggttcaacctggcggaagcctgagactgtcttgtgccgccagcggcttcatcttcagcagctacgccatgagctgggtccgacaggctcctggaaagggccaagaatgggtttccggcgttagcggcacaggcgtgaacacctactacgccgatagcgtgaagggcagattcaccatcagccgggacaacagcaagaacaccctgtacctccagatgaacagcctgagagccgaggacaccgccgtgtactattgtgcctctggcaaaggctgggacagcggctcttggtacgaggactatagaggccagggcaccctggtcacagtttcttcaggtaccggcggaggcggatctggcggcggaggtagcggtggcggaggatctgaattcgacatccagttgacccagtcccccagctcactcagcgccagtgtgggggaccgggtgaccattacctgtaaagccagtcagagtgtggactatgagggggatagcttcctgaattggtatcagcagaagcctggcaaagccccaaagctgctgatctacgctgcatctaatctggagtcaggcgtgccttctaggttctccggtagtgggtctgggaccgatttcacattgaccatttcatccctccaacccgaggatttcgctacatattactgtcagcagtccaatgaggaccctctcacctttggccagggcaccaaagttgaaattaagagactcgagatccagaaccctgatcctgccgtgtaccagctgcgggatagcaagagcagcgacaagagcgtgtgtctgttcaccgacttcgacagccagaccaacgtgtcccagagcaaggactccgacgtgtacatcaccgataagtgcgtgctggacatgcggagcatggacttcaagagcaactccgccgtggcctggtccaacaagtccgatttcgcctgcgccaacgccttcaacaacagcattatccccgaggacacattcttcccaagccccgagagcagctgcggctttaccagcgagagctaccagcagggcgtgctgagcgccaccatcctgtacgagatcctgctgggcaaggccaccctgtacgccgtgctggtgtctgccctggtgctgatggctatggtcaagcggaaggacagccggggacgcgccaagagaagcggatctggcgtgaagcagaccctgaatttcgacctgctgaagctggctggcgacgtggaatccaacccaggccctactagtatggactggatttggcgcatccttttccttgtcggcgctgctaccggcgcgcattccttcgaagtccaacttgtggagtctggagggggcctggtgcagcccggcggctctctcagactgtcttgtgcggcaagcggctacaccttcacctcttactggatagaatgggtgaggcaggcacctggaaagggactggagtggattggagagattctgccaggagggggagatacaaattacaatgaaatcttcaaggggcgggccaccttttcagcggataccagcaagaatacagcttacctgcagatgaatagcctccgggcagaagataccgctgtttattattgcacgagacgggtgccaataagactggactattgggggcaagggactcttgtcaccgtcagttcaacgcgtgaggacctgaagaacgtgttcccacctgaggtggccgtgttcgagcctagcgaggccgagatcagccacacccagaaagccaccctcgtgtgcctggctaccggcttctaccccgaccatgtggaactgtcttggtgggtcaacggcaaagaggtgcacagcggcgtgtgtaccgacccccagccactgaaagaacagcccgccctgaacgacagccggtactgcctgagcagcagactgagagtgtccgccaccttctggcagaacccccggaaccacttcagatgccaggtgcagttctacggcctgagcgagaacgacgagtggacccaggacagagccaagcccgtgacccagatcgtgtctgccgaagcctggggcagagccgattgcgacgtgaagctggtggaaaagagcttcgagacagacaccaacctgaacttccagaacctgagcgtgatcggcttcagaatcctgctgctgaaagtggccggctttaacctgctgatgaccctgcggctgtggtccagc

SEQ ID NO: 5772 - DNA, 2190 bp, synthetic construct
  source 1..2190: mol_type = other DNA
atggccttaccagtgaccgccttgctcctgccgctggccttgctgctccacgccgccaggccgatgctgcccgctcctaagaatctggtggtgtccagaatcaccgaggacagcgccagactgtcttggacagctcctgatgccgccttcgacagcttccccatccggtacatcgagacactgatctggggcgaagccatctggctggatgtgcctggaagcgagagaagctacgacctgaccggactgaagcctggcacagagtatgccgtggtcatcaccggcgtgaaaggcggcagattctctagccctctggtggcctctttcaccaccggtaccggcggaggcggatctggcggcggaggtagcggtggcggaggatctgaattcgacatccagttgacccagtcccccagctcactcagcgccagtgtgggggaccgggtgaccattacctgtaaagccagtcagagtgtggactatgagggggatagcttcctgaattggtatcagcagaagcctggcaaagccccaaagctgctgatctacgctgcatctaatctggagtcaggcgtgccttctaggttctccggtagtgggtctgggaccgatttcacattgaccatttcatccctccaacccgaggatttcgctacatattactgtcagcagtccaatgaggaccctctcacctttggccagggcaccaaagttgaaattaagagactcgaggacctgaagaacgtgttcccacctgaggtggccgtgttcgagcctagcgaggccgagatcagccacacccagaaagccaccctcgtgtgcctggctaccggcttctaccccgaccatgtggaactgtcttggtgggtcaacggcaaagaggtgcacagcggcgtgtgtaccgacccccagccactgaaagaacagcccgccctgaacgacagccggtactgcctgagcagcagactgagagtgtccgccaccttctggcagaacccccggaaccacttcagatgccaggtgcagttctacggcctgagcgagaacgacgagtggacccaggacagagccaagcccgtgacccagatcgtgtctgccgaagcctggggcagagccgattgcgacgtgaagctggtggaaaagagcttcgagacagacaccaacctgaacttccagaacctgagcgtgatcggcttcagaatcctgctgctgaaagtggccggctttaacctgctgatgaccctgcggctgtggtccagcagggccaagcgatctggatctggagcaacaaacttctcactactcaaacaagcaggtgacgtggaggagaatcccgggcctactagtatggactggatttggcgcatccttttccttgtcggcgctgctaccggcgcgcattccttcgaagtccaacttgtggagtctggagggggcctggtgcagcccggcggctctctcagactgtcttgtgcggcaagcggctacaccttcacctcttactggatagaatgggtgaggcaggcacctggaaagggactggagtggattggagagattctgccaggagggggagatacaaattacaatgaaatcttcaaggggcgggccaccttttcagcggataccagcaagaatacagcttacctgcagatgaatagcctccgggcagaagataccgctgtttattattgcacgagacgggtgccaataagactggactattgggggcaagggactcttgtcaccgtcagttcaacgcgtatccagaaccctgatcctgccgtgtaccagctgcgggatagcaagagcagcgacaagagcgtgtgtctgttcaccgacttcgacagccagaccaacgtgtcccagagcaaggactccgacgtgtacatcaccgataagtgcgtgctggacatgcggagcatggacttcaagagcaactccgccgtggcctggtccaacaagtccgatttcgcctgcgccaacgccttcaacaacagcattatccccgaggacacattcttcccaagccccgagagcagctgcggctttaccagcgagagctaccagcagggcgtgctgagcgccaccatcctgtacgagatcctgctgggcaaggccaccctgtacgccgtgctggtgtctgccctggtgctgatggctatggtcaagcggaaggacagccgggga

SEQ ID NO: 5773 - DNA, 2202 bp, synthetic construct
  source 1..2202: mol_type = other DNA
atggccttaccagtgaccgccttgctcctgccgctggccttgctgctccacgccgccaggccgatgctgcccgctcctaagaatctggtggtgtccagaatcaccgaggacagcgccagactgtcttggacagctcctgatgccgccttcgacagcttccccatccggtacatcgagacactgatctggggcgaagccatctggctggatgtgcctggaagcgagagaagctacgacctgaccggactgaagcctggcacagagtatgccgtggtcatcaccggcgtgaaaggcggcagattctctagccctctggtggcctctttcaccaccggtaccggcggaggcggatctggcggcggaggtagcggtggcggaggatctgaattcgacatccagttgacccagtcccccagctcactcagcgccagtgtgggggaccgggtgaccattacctgtaaagccagtcagagtgtggactatgagggggatagcttcctgaattggtatcagcagaagcctggcaaagccccaaagctgctgatctacgctgcatctaatctggagtcaggcgtgccttctaggttctccggtagtgggtctgggaccgatttcacattgaccatttcatccctccaacccgaggatttcgctacatattactgtcagcagtccaatgaggaccctctcacctttggccagggcaccaaagttgaaattaagagactcgagatccagaaccctgatcctgccgtgtaccagctgcgggatagcaagagcagcgacaagagcgtgtgtctgttcaccgacttcgacagccagaccaacgtgtcccagagcaaggactccgacgtgtacatcaccgataagtgcgtgctggacatgcggagcatggacttcaagagcaactccgccgtggcctggtccaacaagtccgatttcgcctgcgccaacgccttcaacaacagcattatccccgaggacacattcttcccaagccccgagagcagctgcggctttaccagcgagagctaccagcagggcgtgctgagcgccaccatcctgtacgagatcctgctgggcaaggccaccctgtacgccgtgctggtgtctgccctggtgctgatggctatggtcaagcggaaggacagccggggacgcgccaagagaagcggatctggcgtgaagcagaccctgaatttcgacctgctgaagctggctggcgacgtggaatccaacccaggccctactagtatggactggatttggcgcatccttttccttgtcggcgctgctaccggcgcgcattccttcgaagtccaacttgtggagtctggagggggcctggtgcagcccggcggctctctcagactgtcttgtgcggcaagcggctacaccttcacctcttactggatagaatgggtgaggcaggcacctggaaagggactggagtggattggagagattctgccaggagggggagatacaaattacaatgaaatcttcaaggggcgggccaccttttcagcggataccagcaagaatacagcttacctgcagatgaatagcctccgggcagaagataccgctgtttattattgcacgagacgggtgccaataagactggactattgggggcaagggactcttgtcaccgtcagttcaacgcgtgaggacctgaagaacgtgttcccacctgaggtggccgtgttcgagcctagcgaggccgagatcagccacacccagaaagccaccctcgtgtgcctggctaccggcttctaccccgaccatgtggaactgtcttggtgggtcaacggcaaagaggtgcacagcggcgtgtgtaccgacccccagccactgaaagaacagcccgccctgaacgacagccggtactgcctgagcagcagactgagagtgtccgccaccttctggcagaacccccggaaccacttcagatgccaggtgcagttctacggcctgagcgagaacgacgagtggacccaggacagagccaagcccgtgacccagatcgtgtctgccgaagcctggggcagagccgattgcgacgtgaagctggtggaaaagagcttcgagacagacaccaacctgaacttccagaacctgagcgtgatcggcttcagaatcctgctgctgaaagtggccggctttaacctgctgatgaccctgcggctgtggtccagc

SEQ ID NO: 5774 - DNA, 2277 bp, synthetic construct
  source 1..2277: mol_type = other DNA
atggccttaccagtgaccgccttgctcctgccgctggccttgctgctccacgccgccaggccggaggtgcagctggttgaatctggcggaggactggttcagcctggcggatctctgagactgtcttgtgccgccagcggcttcaacatcaaggatacctgtatcggctgggttcgcagagcccctggcaaagaggaagaactggtcgccaaaatctgcaagtacagcggccacaccagatacgccgacagcgtgaagggcagattcaccatcagcgccgacaccagcaagaacaccgcctacctccagatgaacagcctgagagccgaggacaccgccgtgtactattgtgccgctgtgtccgtcagagatgggcactacaattactggggccagggcaccaccgtgaccgtttcttcaggtaccggcggaggcggatctggcggcggaggtagcggtggcggaggatctgaattcgacatccagttgacccagtcccccagctcactcagcgccagtgtgggggaccgggtgaccattacctgtaaagccagtcagagtgtggactatgagggggatagcttcctgaattggtatcagcagaagcctggcaaagccccaaagctgctgatctacgctgcatctaatctggagtcaggcgtgccttctaggttctccggtagtgggtctgggaccgatttcacattgaccatttcatccctccaacccgaggatttcgctacatattactgtcagcagtccaatgaggaccctctcacctttggccagggcaccaaagttgaaattaagagactcgaggacctgaagaacgtgttcccacctgaggtggccgtgttcgagcctagcgaggccgagatcagccacacccagaaagccaccctcgtgtgcctggctaccggcttctaccccgaccatgtggaactgtcttggtgggtcaacggcaaagaggtgcacagcggcgtgtgtaccgacccccagccactgaaagaacagcccgccctgaacgacagccggtactgcctgagcagcagactgagagtgtccgccaccttctggcagaacccccggaaccacttcagatgccaggtgcagttctacggcctgagcgagaacgacgagtggacccaggacagagccaagcccgtgacccagatcgtgtctgccgaagcctggggcagagccgattgcgacgtgaagctggtggaaaagagcttcgagacagacaccaacctgaacttccagaacctgagcgtgatcggcttcagaatcctgctgctgaaagtggccggctttaacctgctgatgaccctgcggctgtggtccagcagggccaagcgatctggatctggagcaacaaacttctcactactcaaacaagcaggtgacgtggaggagaatcccgggcctactagtatggactggatttggcgcatccttttccttgtcggcgctgctaccggcgcgcattccttcgaagtccaacttgtggagtctggagggggcctggtgcagcccggcggctctctcagactgtcttgtgcggcaagcggctacaccttcacctcttactggatagaatgggtgaggcaggcacctggaaagggactggagtggattggagagattctgccaggagggggagatacaaattacaatgaaatcttcaaggggcgggccaccttttcagcggataccagcaagaatacagcttacctgcagatgaatagcctccgggcagaagataccgctgtttattattgcacgagacgggtgccaataagactggactattgggggcaagggactcttgtcaccgtcagttcaacgcgtatccagaaccctgatcctgccgtgtaccagctgcgggatagcaagagcagcgacaagagcgtgtgtctgttcaccgacttcgacagccagaccaacgtgtcccagagcaaggactccgacgtgtacatcaccgataagtgcgtgctggacatgcggagcatggacttcaagagcaactccgccgtggcctggtccaacaagtccgatttcgcctgcgccaacgccttcaacaacagcattatccccgaggacacattcttcccaagccccgagagcagctgcggctttaccagcgagagctaccagcagggcgtgctgagcgccaccatcctgtacgagatcctgctgggcaaggccaccctgtacgccgtgctggtgtctgccctggtgctgatggctatggtcaagcggaaggacagccgggga

SEQ ID NO: 5775 - DNA, 2289 bp, synthetic construct
  source 1..2289: mol_type = other DNA
atggccttaccagtgaccgccttgctcctgccgctggccttgctgctccacgccgccaggccggaggtgcagctggttgaatctggcggaggactggttcagcctggcggatctctgagactgtcttgtgccgccagcggcttcaacatcaaggatacctgtatcggctgggttcgcagagcccctggcaaagaggaagaactggtcgccaaaatctgcaagtacagcggccacaccagatacgccgacagcgtgaagggcagattcaccatcagcgccgacaccagcaagaacaccgcctacctccagatgaacagcctgagagccgaggacaccgccgtgtactattgtgccgctgtgtccgtcagagatgggcactacaattactggggccagggcaccaccgtgaccgtttcttcaggtaccggcggaggcggatctggcggcggaggtagcggtggcggaggatctgaattcgacatccagttgacccagtcccccagctcactcagcgccagtgtgggggaccgggtgaccattacctgtaaagccagtcagagtgtggactatgagggggatagcttcctgaattggtatcagcagaagcctggcaaagccccaaagctgctgatctacgctgcatctaatctggagtcaggcgtgccttctaggttctccggtagtgggtctgggaccgatttcacattgaccatttcatccctccaacccgaggatttcgctacatattactgtcagcagtccaatgaggaccctctcacctttggccagggcaccaaagttgaaattaagagactcgagatccagaaccctgatcctgccgtgtaccagctgcgggatagcaagagcagcgacaagagcgtgtgtctgttcaccgacttcgacagccagaccaacgtgtcccagagcaaggactccgacgtgtacatcaccgataagtgcgtgctggacatgcggagcatggacttcaagagcaactccgccgtggcctggtccaacaagtccgatttcgcctgcgccaacgccttcaacaacagcattatccccgaggacacattcttcccaagccccgagagcagctgcggctttaccagcgagagctaccagcagggcgtgctgagcgccaccatcctgtacgagatcctgctgggcaaggccaccctgtacgccgtgctggtgtctgccctggtgctgatggctatggtcaagcggaaggacagccggggacgcgccaagagaagcggatctggcgtgaagcagaccctgaatttcgacctgctgaagctggctggcgacgtggaatccaacccaggccctactagtatggactggatttggcgcatccttttccttgtcggcgctgctaccggcgcgcattccttcgaagtccaacttgtggagtctggagggggcctggtgcagcccggcggctctctcagactgtcttgtgcggcaagcggctacaccttcacctcttactggatagaatgggtgaggcaggcacctggaaagggactggagtggattggagagattctgccaggagggggagatacaaattacaatgaaatcttcaaggggcgggccaccttttcagcggataccagcaagaatacagcttacctgcagatgaatagcctccgggcagaagataccgctgtttattattgcacgagacgggtgccaataagactggactattgggggcaagggactcttgtcaccgtcagttcaacgcgtgaggacctgaagaacgtgttcccacctgaggtggccgtgttcgagcctagcgaggccgagatcagccacacccagaaagccaccctcgtgtgcctggctaccggcttctaccccgaccatgtggaactgtcttggtgggtcaacggcaaagaggtgcacagcggcgtgtgtaccgacccccagccactgaaagaacagcccgccctgaacgacagccggtactgcctgagcagcagactgagagtgtccgccaccttctggcagaacccccggaaccacttcagatgccaggtgcagttctacggcctgagcgagaacgacgagtggacccaggacagagccaagcccgtgacccagatcgtgtctgccgaagcctggggcagagccgattgcgacgtgaagctggtggaaaagagcttcgagacagacaccaacctgaacttccagaacctgagcgtgatcggcttcagaatcctgctgctgaaagtggccggctttaacctgctgatgaccctgcggctgtggtccagc

SEQ ID NO: 5776 - DNA, 3393 bp, synthetic construct
  source 1..3393: mol_type = other DNA
atggccttaccagtgaccgccttgctcctgccgctggccttgctgctccacgccgccaggccggaagtgcagctggttgaatctggcggaggactggttcaggctggcggatctctgagactgtcttgtgccgccagcggcagaacctttagcatgggctggtttagacaggcccctggcaaagagagagagttcgtcgccgccatcacatactctggcggcagcccttactacgccgactctgtgaagggcagattcaccatcagccgggacaacgccaagaacaccgtgtacctccagatgaacagcctgaagcctgaggacaccgccgtgtactactgcgccgccaatccaacatacggcagcgactggaacgccgagaattggggccagggaacccaagtgacagtgtctagcggtaccggcggaggcggatctggcggcggaggtagcggtggcggaggatctgaattcgacatccagttgacccagtcccccagctcactcagcgccagtgtgggggaccgggtgaccattacctgtaaagccagtcagagtgtggactatgagggggatagcttcctgaattggtatcagcagaagcctggcaaagccccaaagctgctgatctacgctgcatctaatctggagtcaggcgtgccttctaggttctccggtagtgggtctgggaccgatttcacattgaccatttcatccctccaacccgaggatttcgctacatattactgtcagcagtccaatgaggaccctctcacctttggccagggcaccaaagttgaaattaagagactcgaggacctgaagaacgtgttcccacctgaggtggccgtgttcgagcctagcgaggccgagatcagccacacccagaaagccaccctcgtgtgcctggctaccggcttctaccccgaccatgtggaactgtcttggtgggtcaacggcaaagaggtgcacagcggcgtgtgtaccgacccccagccactgaaagaacagcccgccctgaacgacagccggtactgcctgagcagcagactgagagtgtccgccaccttctggcagaacccccggaaccacttcagatgccaggtgcagttctacggcctgagcgagaacgacgagtggacccaggacagagccaagcccgtgacccagatcgtgtctgccgaagcctggggcagagccgattgcgacgtgaagctggtggaaaagagcttcgagacagacaccaacctgaacttccagaacctgagcgtgatcggcttcagaatcctgctgctgaaagtggccggctttaacctgctgatgaccctgcggctgtggtccagcagggccaagcgatctggatctggagcaacaaacttctcactactcaaacaagcaggtgacgtggaggagaatcccgggcctactagtgccaccatggactggatttggcgcatccttttccttgtcggcgctgctaccggcgcccattccgggcccgaagtgcaactggttgaatccggtggcggcctggtgcaagcaggcggatctctcagacttagctgtgccgcctccggcagaaccttcacaatgggatggtttaggcaggctccagggaaagagagagagttcgtcgccgccatctctctgtctcccacactggcctactacgccgactctgtgaaaggccggttcaccatctccagagataatgccaagaacaccgtggtgctgcaaatgaactctctgaaacccgaggatacagccctgtactattgtgccgctgaccggaagtccgtgatgagcatcagacccgattactggggacagggcacacaagtcacagtgtcctctggatccggcggcggaggatctggcggaggcggatctgggggcggaggctctttcgaagtccaacttgtggagtctggagggggcctggtgcagcccggcggctctctcagactgtcttgtgcggcaagcggctacaccttcacctcttactggatagaatgggtgaggcaggcacctggaaagggactggagtggattggagagattctgccaggagggggagatacaaattacaatgaaatcttcaaggggcgggccaccttttcagcggataccagcaagaatacagcttacctgcagatgaatagcctccgggcagaagataccgctgtttattattgcacgagacgggtgccaataagactggactattgggggcaagggactcttgtcaccgtcagttcaacgcgtatccagaaccctgatcctgccgtgtaccagctgcgggatagcaagagcagcgacaagagcgtgtgtctgttcaccgacttcgacagccagaccaacgtgtcccagagcaaggactccgacgtgtacatcaccgataagtgcgtgctggacatgcggagcatggacttcaagagcaactccgccgtggcctggtccaacaagtccgatttcgcctgcgccaacgccttcaacaacagcattatccccgaggacacattcttcccaagccccgagagcagctgcggctttaccagcgagagctaccagcagggcgtgctgagcgccaccatcctgtacgagatcctgctgggcaaggccaccctgtacgccgtgctggtgtctgccctggtgctgatggctatggtcaagcggaaggacagccggggacgcgccaagagaagcggatctggcgtgaagcagaccctgaatttcgacctgctgaagctggctggcgacgtggaatccaacccaggcccttctagaggccatatgaccgagtacaagcccacggtgcgcctcgccacccgcgacgacgtccccagggccgtacgcaccctcgccgccgcgttcgccgactaccccgccacgcgccacaccgtcgatccggaccgccacatcgagcgggtcaccgagctgcaagaactcttcctcacgcgcgtcgggctcgacatcggcaaggtgtgggtcgcggacgacggcgccgcggtggcggtctggaccacgccggagagcgtcgaagcgggggcggtgttcgccgagatcggcccgcgcatggccgagttgagcggttcccggctggccgcgcagcaacagatggaaggcctcctggcgccgcaccggcccaaggagcccgcgtggttcctggccaccgtcggcgtctcgcccgaccaccagggcaagggtctgggcagcgccgtcgtgctccccggagtggaggcggccgagcgcgccggggtgcccgccttcctggagacctccgcgccccgcaacctccccttctacgagcggctcggcttcaccgtcaccgccgacgtcgaggtgcccgaaggaccgcgcacctggtgcatgacccgcaagcccggtgcctga

SEQ ID NO: 5777 - DNA, 2307 bp, synthetic construct
  source 1..2307: mol_type = other DNA
atggccttaccagtgaccgccttgctcctgccgctggccttgctgctccacgccgccaggccggaagtgcagctggttgaatctggcggaggactggttcagcctggcggatctctgagactgtcttgtgccgcctctggcttcgccagcgactactatatcatcggctggttcagacaggcccctggcaaagagagagagggcgtcagctgtatcagcagcagatacgccaacaccaactacgccgacagcgtgaagggcagattcaccatcagccgggacaacgccaagaacaccgtgtacctccagatgaacagcctgaagcctgaggacaccgccgtgtactactgtgccgccgacaccagaagatacacctgtcctgacattgccaccatgcaccggaacttcgattcttggggccagggcacactggtcaccgtttcttctggtaccggcggaggcggatctggcggcggaggtagcggtggcggaggatctgaattcgacatccagttgacccagtcccccagctcactcagcgccagtgtgggggaccgggtgaccattacctgtaaagccagtcagagtgtggactatgagggggatagcttcctgaattggtatcagcagaagcctggcaaagccccaaagctgctgatctacgctgcatctaatctggagtcaggcgtgccttctaggttctccggtagtgggtctgggaccgatttcacattgaccatttcatccctccaacccgaggatttcgctacatattactgtcagcagtccaatgaggaccctctcacctttggccagggcaccaaagttgaaattaagagactcgaggacctgaagaacgtgttcccacctgaggtggccgtgttcgagcctagcgaggccgagatcagccacacccagaaagccaccctcgtgtgcctggctaccggcttctaccccgaccatgtggaactgtcttggtgggtcaacggcaaagaggtgcacagcggcgtgtgtaccgacccccagccactgaaagaacagcccgccctgaacgacagccggtactgcctgagcagcagactgagagtgtccgccaccttctggcagaacccccggaaccacttcagatgccaggtgcagttctacggcctgagcgagaacgacgagtggacccaggacagagccaagcccgtgacccagatcgtgtctgccgaagcctggggcagagccgattgcgacgtgaagctggtggaaaagagcttcgagacagacaccaacctgaacttccagaacctgagcgtgatcggcttcagaatcctgctgctgaaagtggccggctttaacctgctgatgaccctgcggctgtggtccagcagggccaagcgatctggatctggagcaacaaacttctcactactcaaacaagcaggtgacgtggaggagaatcccgggcctactagtatggactggatttggcgcatccttttccttgtcggcgctgctaccggcgcgcattccttcgaagtccaacttgtggagtctggagggggcctggtgcagcccggcggctctctcagactgtcttgtgcggcaagcggctacaccttcacctcttactggatagaatgggtgaggcaggcacctggaaagggactggagtggattggagagattctgccaggagggggagatacaaattacaatgaaatcttcaaggggcgggccaccttttcagcggataccagcaagaatacagcttacctgcagatgaatagcctccgggcagaagataccgctgtttattattgcacgagacgggtgccaataagactggactattgggggcaagggactcttgtcaccgtcagttcaacgcgtatccagaaccctgatcctgccgtgtaccagctgcgggatagcaagagcagcgacaagagcgtgtgtctgttcaccgacttcgacagccagaccaacgtgtcccagagcaaggactccgacgtgtacatcaccgataagtgcgtgctggacatgcggagcatggacttcaagagcaactccgccgtggcctggtccaacaagtccgatttcgcctgcgccaacgccttcaacaacagcattatccccgaggacacattcttcccaagccccgagagcagctgcggctttaccagcgagagctaccagcagggcgtgctgagcgccaccatcctgtacgagatcctgctgggcaaggccaccctgtacgccgtgctggtgtctgccctggtgctgatggctatggtcaagcggaaggacagccggggataa

SEQ ID NO: 5778 - DNA, 2307 bp, synthetic construct
  source 1..2307: mol_type = other DNA
atggccttaccagtgaccgccttgctcctgccgctggccttgctgctccacgccgccaggccggaagtgcagctggttgaatctggcggaggactggttcagcctggcggatctctgagactgagctgtgaagccagcggcttcgccagcgacgattacatcatcggctggttcagacaggcccctggcaaagagagagagggcgtcagctgcatcagctctaagtacgccaacaccgtgtacaccgacagcgtgaagggcagattcagactgagcagaggcaccgccaagaataccgtgtacctccagatgagcgccctgaagcctgaggataccgccgtgtactactgcgctatggacagccgcagagtgacatgccctgagatcagcaccatgcaccggaacttcgattcttggggccagggcacactggtcacagtgtcatctggtaccggcggaggcggatctggcggcggaggtagcggtggcggaggatctgaattcgacatccagttgacccagtcccccagctcactcagcgccagtgtgggggaccgggtgaccattacctgtaaagccagtcagagtgtggactatgagggggatagcttcctgaattggtatcagcagaagcctggcaaagccccaaagctgctgatctacgctgcatctaatctggagtcaggcgtgccttctaggttctccggtagtgggtctgggaccgatttcacattgaccatttcatccctccaacccgaggatttcgctacatattactgtcagcagtccaatgaggaccctctcacctttggccagggcaccaaagttgaaattaagagactcgaggacctgaagaacgtgttcccacctgaggtggccgtgttcgagcctagcgaggccgagatcagccacacccagaaagccaccctcgtgtgcctggctaccggcttctaccccgaccatgtggaactgtcttggtgggtcaacggcaaagaggtgcacagcggcgtgtgtaccgacccccagccactgaaagaacagcccgccctgaacgacagccggtactgcctgagcagcagactgagagtgtccgccaccttctggcagaacccccggaaccacttcagatgccaggtgcagttctacggcctgagcgagaacgacgagtggacccaggacagagccaagcccgtgacccagatcgtgtctgccgaagcctggggcagagccgattgcgacgtgaagctggtggaaaagagcttcgagacagacaccaacctgaacttccagaacctgagcgtgatcggcttcagaatcctgctgctgaaagtggccggctttaacctgctgatgaccctgcggctgtggtccagcagggccaagcgatctggatctggagcaacaaacttctcactactcaaacaagcaggtgacgtggaggagaatcccgggcctactagtatggactggatttggcgcatccttttccttgtcggcgctgctaccggcgcgcattccttcgaagtccaacttgtggagtctggagggggcctggtgcagcccggcggctctctcagactgtcttgtgcggcaagcggctacaccttcacctcttactggatagaatgggtgaggcaggcacctggaaagggactggagtggattggagagattctgccaggagggggagatacaaattacaatgaaatcttcaaggggcgggccaccttttcagcggataccagcaagaatacagcttacctgcagatgaatagcctccgggcagaagataccgctgtttattattgcacgagacgggtgccaataagactggactattgggggcaagggactcttgtcaccgtcagttcaacgcgtatccagaaccctgatcctgccgtgtaccagctgcgggatagcaagagcagcgacaagagcgtgtgtctgttcaccgacttcgacagccagaccaacgtgtcccagagcaaggactccgacgtgtacatcaccgataagtgcgtgctggacatgcggagcatggacttcaagagcaactccgccgtggcctggtccaacaagtccgatttcgcctgcgccaacgccttcaacaacagcattatccccgaggacacattcttcccaagccccgagagcagctgcggctttaccagcgagagctaccagcagggcgtgctgagcgccaccatcctgtacgagatcctgctgggcaaggccaccctgtacgccgtgctggtgtctgccctggtgctgatggctatggtcaagcggaaggacagccggggataa

SEQ ID NO: 5779 - DNA, 2304 bp, synthetic construct
  source 1..2304: mol_type = other DNA
atggccttaccagtgaccgccttgctcctgccgctggccttgctgctccacgccgccaggccggaagtgcagctggttgaatctggcggaggactggttcagcctggcggatctctgagactgtcttgtgccgcctctggcttcgccagcgactactatatcatcggctggttcagacaggcccctggcaaagagagagagggcgtcagctgtatcagcagcagatacgccaacaccaactacgccgacagcgtgaagggcagattcaccatcagccgggacaacgccaagaacaccgtgtacctccagatgaacagcctgaagcctgaggacaccgccgtgtactactgtgccgccgacaccagaagatacacctgtcctgacattgccaccatgcaccggaacttcgattcttggggccagggcacactggtcaccgtttcttctggtaccggcggaggcggatctggcggcggaggtagcggtggcggaggatctgaattcgacatccagttgacccagtcccccagctcactcagcgccagtgtgggggaccgggtgaccattacctgtaaagccagtcagagtgtggactatgagggggatagcttcctgaattggtatcagcagaagcctggcaaagccccaaagctgctgatctacgctgcatctaatctggagtcaggcgtgccttctaggttctccggtagtgggtctgggaccgatttcacattgaccatttcatccctccaacccgaggatttcgctacatattactgtcagcagtccaatgaggaccctctcacctttggccagggcaccaaagttgaaattaagagactcgagatccagaaccctgatcctgccgtgtaccagctgcgggatagcaagagcagcgacaagagcgtgtgtctgttcaccgacttcgacagccagaccaacgtgtcccagagcaaggactccgacgtgtacatcaccgataagtgcgtgctggacatgcggagcatggacttcaagagcaactccgccgtggcctggtccaacaagtccgatttcgcctgcgccaacgccttcaacaacagcattatccccgaggacacattcttcccaagccccgagagcagctgcggctttaccagcgagagctaccagcagggcgtgctgagcgccaccatcctgtacgagatcctgctgggcaaggccaccctgtacgccgtgctggtgtctgccctggtgctgatggctatggtcaagcggaaggacagccggggaagggccaagcgatctggatctggagcaacaaacttctcactactcaaacaagcaggtgacgtggaggagaatcccgggcctactagtatggactggatttggcgcatccttttccttgtcggcgctgctaccggcgcgcattccttcgaagtccaacttgtggagtctggagggggcctggtgcagcccggcggctctctcagactgtcttgtgcggcaagcggctacaccttcacctcttactggatagaatgggtgaggcaggcacctggaaagggactggagtggattggagagattctgccaggagggggagatacaaattacaatgaaatcttcaaggggcgggccaccttttcagcggataccagcaagaatacagcttacctgcagatgaatagcctccgggcagaagataccgctgtttattattgcacgagacgggtgccaataagactggactattgggggcaagggactcttgtcaccgtcagttcaacgcgtgacctgaagaacgtgttcccacctgaggtggccgtgttcgagcctagcgaggccgagatcagccacacccagaaagccaccctcgtgtgcctggctaccggcttctaccccgaccatgtggaactgtcttggtgggtcaacggcaaagaggtgcacagcggcgtgtgtaccgacccccagccactgaaagaacagcccgccctgaacgacagccggtactgcctgagcagcagactgagagtgtccgccaccttctggcagaacccccggaaccacttcagatgccaggtgcagttctacggcctgagcgagaacgacgagtggacccaggacagagccaagcccgtgacccagatcgtgtctgccgaagcctggggcagagccgattgcgacgtgaagctggtggaaaagagcttcgagacagacaccaacctgaacttccagaacctgagcgtgatcggcttcagaatcctgctgctgaaagtggccggctttaacctgctgatgaccctgcggctgtggtccagc

SEQ ID NO: 5780 - DNA, 2304 bp, synthetic construct
  source 1..2304: mol_type = other DNA
atggccttaccagtgaccgccttgctcctgccgctggccttgctgctccacgccgccaggccggaagtgcagctggttgaatctggcggaggactggttcagcctggcggatctctgagactgagctgtgaagccagcggcttcgccagcgacgattacatcatcggctggttcagacaggcccctggcaaagagagagagggcgtcagctgcatcagctctaagtacgccaacaccgtgtacaccgacagcgtgaagggcagattcagactgagcagaggcaccgccaagaataccgtgtacctccagatgagcgccctgaagcctgaggataccgccgtgtactactgcgctatggacagccgcagagtgacatgccctgagatcagcaccatgcaccggaacttcgattcttggggccagggcacactggtcacagtgtcatctggtaccggcggaggcggatctggcggcggaggtagcggtggcggaggatctgaattcgacatccagttgacccagtcccccagctcactcagcgccagtgtgggggaccgggtgaccattacctgtaaagccagtcagagtgtggactatgagggggatagcttcctgaattggtatcagcagaagcctggcaaagccccaaagctgctgatctacgctgcatctaatctggagtcaggcgtgccttctaggttctccggtagtgggtctgggaccgatttcacattgaccatttcatccctccaacccgaggatttcgctacatattactgtcagcagtccaatgaggaccctctcacctttggccagggcaccaaagttgaaattaagagactcgagatccagaaccctgatcctgccgtgtaccagctgcgggatagcaagagcagcgacaagagcgtgtgtctgttcaccgacttcgacagccagaccaacgtgtcccagagcaaggactccgacgtgtacatcaccgataagtgcgtgctggacatgcggagcatggacttcaagagcaactccgccgtggcctggtccaacaagtccgatttcgcctgcgccaacgccttcaacaacagcattatccccgaggacacattcttcccaagccccgagagcagctgcggctttaccagcgagagctaccagcagggcgtgctgagcgccaccatcctgtacgagatcctgctgggcaaggccaccctgtacgccgtgctggtgtctgccctggtgctgatggctatggtcaagcggaaggacagccggggaagggccaagcgatctggatctggagcaacaaacttctcactactcaaacaagcaggtgacgtggaggagaatcccgggcctactagtatggactggatttggcgcatccttttccttgtcggcgctgctaccggcgcgcattccttcgaagtccaacttgtggagtctggagggggcctggtgcagcccggcggctctctcagactgtcttgtgcggcaagcggctacaccttcacctcttactggatagaatgggtgaggcaggcacctggaaagggactggagtggattggagagattctgccaggagggggagatacaaattacaatgaaatcttcaaggggcgggccaccttttcagcggataccagcaagaatacagcttacctgcagatgaatagcctccgggcagaagataccgctgtttattattgcacgagacgggtgccaataagactggactattgggggcaagggactcttgtcaccgtcagttcaacgcgtgacctgaagaacgtgttcccacctgaggtggccgtgttcgagcctagcgaggccgagatcagccacacccagaaagccaccctcgtgtgcctggctaccggcttctaccccgaccatgtggaactgtcttggtgggtcaacggcaaagaggtgcacagcggcgtgtgtaccgacccccagccactgaaagaacagcccgccctgaacgacagccggtactgcctgagcagcagactgagagtgtccgccaccttctggcagaacccccggaaccacttcagatgccaggtgcagttctacggcctgagcgagaacgacgagtggacccaggacagagccaagcccgtgacccagatcgtgtctgccgaagcctggggcagagccgattgcgacgtgaagctggtggaaaagagcttcgagacagacaccaacctgaacttccagaacctgagcgtgatcggcttcagaatcctgctgctgaaagtggccggctttaacctgctgatgaccctgcggctgtggtccagc

SEQ ID NO: 5781 - DNA, 2277 bp, synthetic construct
  source 1..2277: mol_type = other DNA
atggccttaccagtgaccgccttgctcctgccgctggccttgctgctccacgccgccaggccgcaagtcaaactggaagaaagcggtggcggcctggtgcaacctggcgaatctctgagactgagctgtagcgccagcggctccatcttcaaggtgttcagagtgttcgccatgagctggtacaggcaaggccctggcaagcagagagagctggtcgcctctatcagcagcggcgagacaaccacatacgccgaatctgtgaaaggccggttcaccatcagccgggataatgccaagaataccgcctatctccagatggactccctgaagcctgaagatacagctgtgtactactgcaacgccgaccataccttcaccggcgatttttggggccagggaacccaagtgaccgtgtctagtggtaccggcggaggcggatctggcggcggaggtagcggtggcggaggatctgaattcgacatccagttgacccagtcccccagctcactcagcgccagtgtgggggaccgggtgaccattacctgtaaagccagtcagagtgtggactatgagggggatagcttcctgaattggtatcagcagaagcctggcaaagccccaaagctgctgatctacgctgcatctaatctggagtcaggcgtgccttctaggttctccggtagtgggtctgggaccgatttcacattgaccatttcatccctccaacccgaggatttcgctacatattactgtcagcagtccaatgaggaccctctcacctttggccagggcaccaaagttgaaattaagagactcgagatccagaaccctgatcctgccgtgtaccagctgcgggatagcaagagcagcgacaagagcgtgtgtctgttcaccgacttcgacagccagaccaacgtgtcccagagcaaggactccgacgtgtacatcaccgataagtgcgtgctggacatgcggagcatggacttcaagagcaactccgccgtggcctggtccaacaagtccgatttcgcctgcgccaacgccttcaacaacagcattatccccgaggacacattcttcccaagccccgagagcagctgcggctttaccagcgagagctaccagcagggcgtgctgagcgccaccatcctgtacgagatcctgctgggcaaggccaccctgtacgccgtgctggtgtctgccctggtgctgatggctatggtcaagcggaaggacagccggggaagggccaagcgatctggatctggagcaacaaacttctcactactcaaacaagcaggtgacgtggaggagaatcccgggcctactagtatggactggatttggcgcatccttttccttgtcggcgctgctaccggcgcgcattccttcgaagtccaacttgtggagtctggagggggcctggtgcagcccggcggctctctcagactgtcttgtgcggcaagcggctacaccttcacctcttactggatagaatgggtgaggcaggcacctggaaagggactggagtggattggagagattctgccaggagggggagatacaaattacaatgaaatcttcaaggggcgggccaccttttcagcggataccagcaagaatacagcttacctgcagatgaatagcctccgggcagaagataccgctgtttattattgcacgagacgggtgccaataagactggactattgggggcaagggactcttgtcaccgtcagttcaacgcgtgacctgaagaacgtgttcccacctgaggtggccgtgttcgagcctagcgaggccgagatcagccacacccagaaagccaccctcgtgtgcctggctaccggcttctaccccgaccatgtggaactgtcttggtgggtcaacggcaaagaggtgcacagcggcgtgtgtaccgacccccagccactgaaagaacagcccgccctgaacgacagccggtactgcctgagcagcagactgagagtgtccgccaccttctggcagaacccccggaaccacttcagatgccaggtgcagttctacggcctgagcgagaacgacgagtggacccaggacagagccaagcccgtgacccagatcgtgtctgccgaagcctggggcagagccgattgcgacgtgaagctggtggaaaagagcttcgagacagacaccaacctgaacttccagaacctgagcgtgatcggcttcagaatcctgctgctgaaagtggccggctttaacctgctgatgaccctgcggctgtggtccagc

SEQ ID NO: 5782 - DNA, 2283 bp, synthetic construct
  source 1..2283: mol_type = other DNA
atggccttaccagtgaccgccttgctcctgccgctggccttgctgctccacgccgccaggccggacatccagttgacccagtcccccagctcactcagcgccagtgtgggggaccgggtgaccattacctgtaaagccagtcagagtgtggactatgagggggatagcttcctgaattggtatcagcagaagcctggcaaagccccaaagctgctgatctacgctgcatctaatctggagtcaggcgtgccttctaggttctccggtagtgggtctgggaccgatttcacattgaccatttcatccctccaacccgaggatttcgctacatattactgtcagcagtccaatgaggaccctctcacctttggccagggcaccaaagttgaaattaagagactcgaggacctgaagaacgtgttcccacctgaggtggccgtgttcgagcctagcgaggccgagatcagccacacccagaaagccaccctcgtgtgcctggctaccggcttctaccccgaccatgtggaactgtcttggtgggtcaacggcaaagaggtgcacagcggcgtgtgtaccgacccccagccactgaaagaacagcccgccctgaacgacagccggtactgcctgagcagcagactgagagtgtccgccaccttctggcagaacccccggaaccacttcagatgccaggtgcagttctacggcctgagcgagaacgacgagtggacccaggacagagccaagcccgtgacccagatcgtgtctgccgaagcctggggcagagccgattgcgacgtgaagctggtggaaaagagcttcgagacagacaccaacctgaacttccagaacctgagcgtgatcggcttcagaatcctgctgctgaaagtggccggctttaacctgctgatgaccctgcggctgtggtccagcagggccaagcgatctggatctggagcaacaaacttctcactactcaaacaagcaggtgacgtggaggagaatcccgggcctactagtgccaccatggactggatttggcgcatccttttccttgtcggcgctgctaccggcgcccattccgggcccgaagtgcagctggttgaatctggcggaggactggttcaggctggcggatctctgagactgtcttgtgccgccagcggcagaacctttagcatgggctggtttagacaggcccctggcaaagagagagagttcgtcgccgccatcacatactctggcggcagcccttactacgccgactctgtgaagggcagattcaccatcagccgggacaacgccaagaacaccgtgtacctccagatgaacagcctgaagcctgaggacaccgccgtgtactactgcgccgccaatccaacatacggcagcgactggaacgccgagaattggggccagggaacccaagtgacagtgtctagcggatccggcggcggaggatctggcggaggcggatctgggggcggaggctctttcgaagtccaacttgtggagtctggagggggcctggtgcagcccggcggctctctcagactgtcttgtgcggcaagcggctacaccttcacctcttactggatagaatgggtgaggcaggcacctggaaagggactggagtggattggagagattctgccaggagggggagatacaaattacaatgaaatcttcaaggggcgggccaccttttcagcggataccagcaagaatacagcttacctgcagatgaatagcctccgggcagaagataccgctgtttattattgcacgagacgggtgccaataagactggactattgggggcaagggactcttgtcaccgtcagttcaacgcgtatccagaaccctgatcctgccgtgtaccagctgcgggatagcaagagcagcgacaagagcgtgtgtctgttcaccgacttcgacagccagaccaacgtgtcccagagcaaggactccgacgtgtacatcaccgataagtgcgtgctggacatgcggagcatggacttcaagagcaactccgccgtggcctggtccaacaagtccgatttcgcctgcgccaacgccttcaacaacagcattatccccgaggacacattcttcccaagccccgagagcagctgcggctttaccagcgagagctaccagcagggcgtgctgagcgccaccatcctgtacgagatcctgctgggcaaggccaccctgtacgccgtgctggtgtctgccctggtgctgatggctatggtcaagcggaaggacagccggggataa

SEQ ID NO: 5783 - DNA, 2286 bp, synthetic construct
  source 1..2286: mol_type = other DNA
atggccttaccagtgaccgccttgctcctgccgctggccttgctgctccacgccgccaggccggacatccagttgacccagtcccccagctcactcagcgccagtgtgggggaccgggtgaccattacctgtaaagccagtcagagtgtggactatgagggggatagcttcctgaattggtatcagcagaagcctggcaaagccccaaagctgctgatctacgctgcatctaatctggagtcaggcgtgccttctaggttctccggtagtgggtctgggaccgatttcacattgaccatttcatccctccaacccgaggatttcgctacatattactgtcagcagtccaatgaggaccctctcacctttggccagggcaccaaagttgaaattaagagactcgaggacctgaagaacgtgttcccacctgaggtggccgtgttcgagcctagcgaggccgagatcagccacacccagaaagccaccctcgtgtgcctggctaccggcttctaccccgaccatgtggaactgtcttggtgggtcaacggcaaagaggtgcacagcggcgtgtgtaccgacccccagccactgaaagaacagcccgccctgaacgacagccggtactgcctgagcagcagactgagagtgtccgccaccttctggcagaacccccggaaccacttcagatgccaggtgcagttctacggcctgagcgagaacgacgagtggacccaggacagagccaagcccgtgacccagatcgtgtctgccgaagcctggggcagagccgattgcgacgtgaagctggtggaaaagagcttcgagacagacaccaacctgaacttccagaacctgagcgtgatcggcttcagaatcctgctgctgaaagtggccggctttaacctgctgatgaccctgcggctgtggtccagcagggccaagcgatctggatctggagcaacaaacttctcactactcaaacaagcaggtgacgtggaggagaatcccgggcctactagtgccaccatggactggatttggcgcatccttttccttgtcggcgctgctaccggcgcccattccgggcccgaagtgcaactggtggaatctgggggcggactggtgcagccaggcggaagtctgaggctgtcttgtgccgcctccggcagcatcttcggcttcaacgacatggcctggtatcggcaggctcccggaaaacagcgcgagctggtggctctgattagcagagtgggcgtgaccagcagcgccgactctgtgaagggcagattcacaatctccagagtgaacgccaaggatacagtgtacctccagatgaactctctgaaacctgaggatacagcagtgtactattgctacatggaccagcggctggacggcagcacactggcctactggggacagggaactcaagtgacagtgtctagcggatccggcggcggaggatctggcggaggcggatctgggggcggaggctctttcgaagtccaacttgtggagtctggagggggcctggtgcagcccggcggctctctcagactgtcttgtgcggcaagcggctacaccttcacctcttactggatagaatgggtgaggcaggcacctggaaagggactggagtggattggagagattctgccaggagggggagatacaaattacaatgaaatcttcaaggggcgggccaccttttcagcggataccagcaagaatacagcttacctgcagatgaatagcctccgggcagaagataccgctgtttattattgcacgagacgggtgccaataagactggactattgggggcaagggactcttgtcaccgtcagttcaacgcgtatccagaaccctgatcctgccgtgtaccagctgcgggatagcaagagcagcgacaagagcgtgtgtctgttcaccgacttcgacagccagaccaacgtgtcccagagcaaggactccgacgtgtacatcaccgataagtgcgtgctggacatgcggagcatggacttcaagagcaactccgccgtggcctggtccaacaagtccgatttcgcctgcgccaacgccttcaacaacagcattatccccgaggacacattcttcccaagccccgagagcagctgcggctttaccagcgagagctaccagcagggcgtgctgagcgccaccatcctgtacgagatcctgctgggcaaggccaccctgtacgccgtgctggtgtctgccctggtgctgatggctatggtcaagcggaaggacagccggggataa

SEQ ID NO: 5784 - DNA, 2274 bp, synthetic construct
  source 1..2274: mol_type = other DNA
atggccttaccagtgaccgccttgctcctgccgctggccttgctgctccacgccgccaggccggacatccagttgacccagtcccccagctcactcagcgccagtgtgggggaccgggtgaccattacctgtaaagccagtcagagtgtggactatgagggggatagcttcctgaattggtatcagcagaagcctggcaaagccccaaagctgctgatctacgctgcatctaatctggagtcaggcgtgccttctaggttctccggtagtgggtctgggaccgatttcacattgaccatttcatccctccaacccgaggatttcgctacatattactgtcagcagtccaatgaggaccctctcacctttggccagggcaccaaagttgaaattaagagactcgaggacctgaagaacgtgttcccacctgaggtggccgtgttcgagcctagcgaggccgagatcagccacacccagaaagccaccctcgtgtgcctggctaccggcttctaccccgaccatgtggaactgtcttggtgggtcaacggcaaagaggtgcacagcggcgtgtgtaccgacccccagccactgaaagaacagcccgccctgaacgacagccggtactgcctgagcagcagactgagagtgtccgccaccttctggcagaacccccggaaccacttcagatgccaggtgcagttctacggcctgagcgagaacgacgagtggacccaggacagagccaagcccgtgacccagatcgtgtctgccgaagcctggggcagagccgattgcgacgtgaagctggtggaaaagagcttcgagacagacaccaacctgaacttccagaacctgagcgtgatcggcttcagaatcctgctgctgaaagtggccggctttaacctgctgatgaccctgcggctgtggtccagcagggccaagcgatctggatctggagcaacaaacttctcactactcaaacaagcaggtgacgtggaggagaatcccgggcctactagtgccaccatggactggatttggcgcatccttttccttgtcggcgctgctaccggcgcccattccgggcccgaggtgcagctggttgaatctggcggaggactggttcaggctggcggatctctgagactgtcttgtgccgccagcggctctgtgttcagcggcaatgtgatgggctggtacagacaggcccctggcaaagaaagagagtgggttgccgccattgccagcggcggcagcatctactacagagactctgtgaagggcagattcaccatcagccgggacaacgccaagaacaccgtgtacctccagatgaacagcctgaagcctgaggacaccgccgtgtactactgcaactctcaccctcctacactgccctattggggcctgggaacccaagtgacagtgtcctctggatccggcggcggaggatctggcggaggcggatctgggggcggaggctctttcgaagtccaacttgtggagtctggagggggcctggtgcagcccggcggctctctcagactgtcttgtgcggcaagcggctacaccttcacctcttactggatagaatgggtgaggcaggcacctggaaagggactggagtggattggagagattctgccaggagggggagatacaaattacaatgaaatcttcaaggggcgggccaccttttcagcggataccagcaagaatacagcttacctgcagatgaatagcctccgggcagaagataccgctgtttattattgcacgagacgggtgccaataagactggactattgggggcaagggactcttgtcaccgtcagttcaacgcgtatccagaaccctgatcctgccgtgtaccagctgcgggatagcaagagcagcgacaagagcgtgtgtctgttcaccgacttcgacagccagaccaacgtgtcccagagcaaggactccgacgtgtacatcaccgataagtgcgtgctggacatgcggagcatggacttcaagagcaactccgccgtggcctggtccaacaagtccgatttcgcctgcgccaacgccttcaacaacagcattatccccgaggacacattcttcccaagccccgagagcagctgcggctttaccagcgagagctaccagcagggcgtgctgagcgccaccatcctgtacgagatcctgctgggcaaggccaccctgtacgccgtgctggtgtctgccctggtgctgatggctatggtcaagcggaaggacagccggggataa

SEQ ID NO: 5785 - DNA, 2268 bp, synthetic construct
  source 1..2268: mol_type = other DNA
atggccttaccagtgaccgccttgctcctgccgctggccttgctgctccacgccgccaggccggacatccagttgacccagtcccccagctcactcagcgccagtgtgggggaccgggtgaccattacctgtaaagccagtcagagtgtggactatgagggggatagcttcctgaattggtatcagcagaagcctggcaaagccccaaagctgctgatctacgctgcatctaatctggagtcaggcgtgccttctaggttctccggtagtgggtctgggaccgatttcacattgaccatttcatccctccaacccgaggatttcgctacatattactgtcagcagtccaatgaggaccctctcacctttggccagggcaccaaagttgaaattaagagactcgaggacctgaagaacgtgttcccacctgaggtggccgtgttcgagcctagcgaggccgagatcagccacacccagaaagccaccctcgtgtgcctggctaccggcttctaccccgaccatgtggaactgtcttggtgggtcaacggcaaagaggtgcacagcggcgtgtgtaccgacccccagccactgaaagaacagcccgccctgaacgacagccggtactgcctgagcagcagactgagagtgtccgccaccttctggcagaacccccggaaccacttcagatgccaggtgcagttctacggcctgagcgagaacgacgagtggacccaggacagagccaagcccgtgacccagatcgtgtctgccgaagcctggggcagagccgattgcgacgtgaagctggtggaaaagagcttcgagacagacaccaacctgaacttccagaacctgagcgtgatcggcttcagaatcctgctgctgaaagtggccggctttaacctgctgatgaccctgcggctgtggtccagcagggccaagcgatctggatctggagcaacaaacttctcactactcaaacaagcaggtgacgtggaggagaatcccgggcctactagtgccaccatggactggatttggcgcatccttttccttgtcggcgctgctaccggcgcccattccgggcccgaagttcagctgctggaatctggcggaggactcgttcaacctggcggctctctgagactgagctgtgccgcttctggcttcagcttctctagctacgccctgagctgggttcgacaagctcccggaaagggccttgaatgggtgtccagcatcggcgagaatgacggcaccacagactatgccgatgccgtgaaaggccggtttaccatcagcagagacaattccaagaacacgctctatctgcaaatgaactccctgcgcgtggaagatacagccgtgtattattgcgtgaaggacggcatccactggggacagggaaccctggttacagtgtctagcggatccggcggcggaggatctggcggaggcggatctgggggcggaggctctttcgaagtccaacttgtggagtctggagggggcctggtgcagcccggcggctctctcagactgtcttgtgcggcaagcggctacaccttcacctcttactggatagaatgggtgaggcaggcacctggaaagggactggagtggattggagagattctgccaggagggggagatacaaattacaatgaaatcttcaaggggcgggccaccttttcagcggataccagcaagaatacagcttacctgcagatgaatagcctccgggcagaagataccgctgtttattattgcacgagacgggtgccaataagactggactattgggggcaagggactcttgtcaccgtcagttcaacgcgtatccagaaccctgatcctgccgtgtaccagctgcgggatagcaagagcagcgacaagagcgtgtgtctgttcaccgacttcgacagccagaccaacgtgtcccagagcaaggactccgacgtgtacatcaccgataagtgcgtgctggacatgcggagcatggacttcaagagcaactccgccgtggcctggtccaacaagtccgatttcgcctgcgccaacgccttcaacaacagcattatccccgaggacacattcttcccaagccccgagagcagctgcggctttaccagcgagagctaccagcagggcgtgctgagcgccaccatcctgtacgagatcctgctgggcaaggccaccctgtacgccgtgctggtgtctgccctggtgctgatggctatggtcaagcggaaggacagccggggataa

SEQ ID NO: 5786 - DNA, 3375 bp, synthetic construct
  source 1..3375: mol_type = other DNA
atgggacccagactgctgttttgggctctgctgtgtctgctcggcacaggacctgttgaagctggcgtgacacagagccccacacacctgattaagaccagaggccagcaggccacactgagatgcagccctatcagcggccacaccagcgtgtactggtatcagcaggctctcggactgggcctccagttcctgctttggtacgacgagggcgaagagagaaaccggggcaacttccctcctcggttttccggcagacagttccccaactacagcagcgagctgaacgtgaacgccctggaactggaagatagcgccctgtacctgtgtgcctcttctcttggtggacctcgcggactggctggactgagaggggatgagcagtttttcggccctggcaccagactgaccgtgctggaaggtaccggcggaggcggatctggcggcggagaattcgacatccagttgacccagtcccccagctcactcagcgccagtgtgggggaccgggtgaccattacctgtaaagccagtcagagtgtggactatgagggggatagcttcctgaattggtatcagcagaagcctggcaaagccccaaagctgctgatctacgctgcatctaatctggagtcaggcgtgccttctaggttctccggtagtgggtctgggaccgatttcacattgaccatttcatccctccaacccgaggatttcgctacatattactgtcagcagtccaatgaggaccctctcacctttggccagggcaccaaagttgaaattaagagactcgaggacctgaagaacgtgttcccacctgaggtggccgtgttcgagcctagcgaggccgagatcagccacacccagaaagccaccctcgtgtgcctggctaccggcttctaccccgaccatgtggaactgtcttggtgggtcaacggcaaagaggtgcacagcggcgtgtgtaccgacccccagccactgaaagaacagcccgccctgaacgacagccggtactgcctgagcagcagactgagagtgtccgccaccttctggcagaacccccggaaccacttcagatgccaggtgcagttctacggcctgagcgagaacgacgagtggacccaggacagagccaagcccgtgacccagatcgtgtctgccgaagcctggggcagagccgattgcgacgtgaagctggtggaaaagagcttcgagacagacaccaacctgaacttccagaacctgagcgtgatcggcttcagaatcctgctgctgaaagtggccggctttaacctgctgatgaccctgcggctgtggtccagcagggccaagcgatctggatctggagcaacaaacttctcactactcaaacaagcaggtgacgtggaggagaatcccgggcctactagtgccaccatggactggatttggcgcatccttttccttgtcggcgctgctaccggcgcccattccgggcccgaagtgcagctggttgaatctggcggaggactggttcaggctggcggatctctgagactgtcttgtgccgccagcggcagaacctttagcatgggctggtttagacaggcccctggcaaagagagagagttcgtcgccgccatcacatactctggcggcagcccttactacgccgactctgtgaagggcagattcaccatcagccgggacaacgccaagaacaccgtgtacctccagatgaacagcctgaagcctgaggacaccgccgtgtactactgcgccgccaatccaacatacggcagcgactggaacgccgagaattggggccagggaacccaagtgacagtgtctagcggatccggcggcggaggatctggcggaggcggatctgggggcggaggctctttcgaagtccaacttgtggagtctggagggggcctggtgcagcccggcggctctctcagactgtcttgtgcggcaagcggctacaccttcacctcttactggatagaatgggtgaggcaggcacctggaaagggactggagtggattggagagattctgccaggagggggagatacaaattacaatgaaatcttcaaggggcgggccaccttttcagcggataccagcaagaatacagcttacctgcagatgaatagcctccgggcagaagataccgctgtttattattgcacgagacgggtgccaataagactggactattgggggcaagggactcttgtcaccgtcagttcaacgcgtatccagaaccctgatcctgccgtgtaccagctgcgggatagcaagagcagcgacaagagcgtgtgtctgttcaccgacttcgacagccagaccaacgtgtcccagagcaaggactccgacgtgtacatcaccgataagtgcgtgctggacatgcggagcatggacttcaagagcaactccgccgtggcctggtccaacaagtccgatttcgcctgcgccaacgccttcaacaacagcattatccccgaggacacattcttcccaagccccgagagcagctgcggctttaccagcgagagctaccagcagggcgtgctgagcgccaccatcctgtacgagatcctgctgggcaaggccaccctgtacgccgtgctggtgtctgccctggtgctgatggctatggtcaagcggaaggacagccggggacgcgccaagagaagcggatctggcgtgaagcagaccctgaatttcgacctgctgaagctggctggcgacgtggaatccaacccaggcccttctagaggccatatgaccgagtacaagcccacggtgcgcctcgccacccgcgacgacgtccccagggccgtacgcaccctcgccgccgcgttcgccgactaccccgccacgcgccacaccgtcgatccggaccgccacatcgagcgggtcaccgagctgcaagaactcttcctcacgcgcgtcgggctcgacatcggcaaggtgtgggtcgcggacgacggcgccgcggtggcggtctggaccacgccggagagcgtcgaagcgggggcggtgttcgccgagatcggcccgcgcatggccgagttgagcggttcccggctggccgcgcagcaacagatggaaggcctcctggcgccgcaccggcccaaggagcccgcgtggttcctggccaccgtcggcgtctcgcccgaccaccagggcaagggtctgggcagcgccgtcgtgctccccggagtggaggcggccgagcgcgccggggtgcccgccttcctggagacctccgcgccccgcaacctccccttctacgagcggctcggcttcaccgtcaccgccgacgtcgaggtgcccgaaggaccgcgcacctggtgcatgacccgcaagcccggtgcctga

SEQ ID NO: 5787 - DNA, 3372 bp, synthetic construct
  source 1..3372: mol_type = other DNA
atgggacccagactgctgttttgggctctgctgtgtctgctcggcacaggacctgttgaagctggcgtgacacagagccccacacacctgattaagaccagaggccagcaggccacactgagatgcagccctatcagcggccacaccagcgtgtactggtatcagcaggctctcggactgggcctccagttcctgctttggtacgacgagggcgaagagagaaaccggggcaacttccctcctcggttttccggcagacagttccccaactacagcagcgagctgaacgtgaacgccctggaactggaagatagcgccctgtacctgtgtgccagctctctcggcggagatgaactgggagccgatggcaacgagcagttctttggccctggcaccagactgaccgtgctggaaggtaccggcggaggcggatctggcggcggaagcgaattcgacatccagttgacccagtcccccagctcactcagcgccagtgtgggggaccgggtgaccattacctgtaaagccagtcagagtgtggactatgagggggatagcttcctgaattggtatcagcagaagcctggcaaagccccaaagctgctgatctacgctgcatctaatctggagtcaggcgtgccttctaggttctccggtagtgggtctgggaccgatttcacattgaccatttcatccctccaacccgaggatttcgctacatattactgtcagcagtccaatgaggaccctctcacctttggccagggcaccaaagttgaaattaagagactcgaggacctgaagaacgtgttcccacctgaggtggccgtgttcgagcctagcgaggccgagatcagccacacccagaaagccaccctcgtgtgcctggctaccggcttctaccccgaccatgtggaactgtcttggtgggtcaacggcaaagaggtgcacagcggcgtgtgtaccgacccccagccactgaaagaacagcccgccctgaacgacagccggtactgcctgagcagcagactgagagtgtccgccaccttctggcagaacccccggaaccacttcagatgccaggtgcagttctacggcctgagcgagaacgacgagtggacccaggacagagccaagcccgtgacccagatcgtgtctgccgaagcctggggcagagccgattgcgacgtgaagctggtggaaaagagcttcgagacagacaccaacctgaacttccagaacctgagcgtgatcggcttcagaatcctgctgctgaaagtggccggctttaacctgctgatgaccctgcggctgtggtccagcagggccaagcgatctggatctggagcaacaaacttctcactactcaaacaagcaggtgacgtggaggagaatcccgggcctactagtgccaccatggactggatttggcgcatccttttccttgtcggcgctgctaccggcgcccattccgggcccgaagtgcagctggttgaatctggcggaggactggttcaggctggcggatctctgagactgtcttgtgccgccagcggcagaacctttagcatgggctggtttagacaggcccctggcaaagagagagagttcgtcgccgccatcacatactctggcggcagcccttactacgccgactctgtgaagggcagattcaccatcagccgggacaacgccaagaacaccgtgtacctccagatgaacagcctgaagcctgaggacaccgccgtgtactactgcgccgccaatccaacatacggcagcgactggaacgccgagaattggggccagggaacccaagtgacagtgtctagcggatccggcggcggaggatctggcggaggcggatctgggggcggaggctctttcgaagtccaacttgtggagtctggagggggcctggtgcagcccggcggctctctcagactgtcttgtgcggcaagcggctacaccttcacctcttactggatagaatgggtgaggcaggcacctggaaagggactggagtggattggagagattctgccaggagggggagatacaaattacaatgaaatcttcaaggggcgggccaccttttcagcggataccagcaagaatacagcttacctgcagatgaatagcctccgggcagaagataccgctgtttattattgcacgagacgggtgccaataagactggactattgggggcaagggactcttgtcaccgtcagttcaacgcgtatccagaaccctgatcctgccgtgtaccagctgcgggatagcaagagcagcgacaagagcgtgtgtctgttcaccgacttcgacagccagaccaacgtgtcccagagcaaggactccgacgtgtacatcaccgataagtgcgtgctggacatgcggagcatggacttcaagagcaactccgccgtggcctggtccaacaagtccgatttcgcctgcgccaacgccttcaacaacagcattatccccgaggacacattcttcccaagccccgagagcagctgcggctttaccagcgagagctaccagcagggcgtgctgagcgccaccatcctgtacgagatcctgctgggcaaggccaccctgtacgccgtgctggtgtctgccctggtgctgatggctatggtcaagcggaaggacagccggggacgcgccaagagaagcggatctggcgtgaagcagaccctgaatttcgacctgctgaagctggctggcgacgtggaatccaacccaggcccttctagaggccatatgaccgagtacaagcccacggtgcgcctcgccacccgcgacgacgtccccagggccgtacgcaccctcgccgccgcgttcgccgactaccccgccacgcgccacaccgtcgatccggaccgccacatcgagcgggtcaccgagctgcaagaactcttcctcacgcgcgtcgggctcgacatcggcaaggtgtgggtcgcggacgacggcgccgcggtggcggtctggaccacgccggagagcgtcgaagcgggggcggtgttcgccgagatcggcccgcgcatggccgagttgagcggttcccggctggccgcgcagcaacagatggaaggcctcctggcgccgcaccggcccaaggagcccgcgtggttcctggccaccgtcggcgtctcgcccgaccaccagggcaagggtctgggcagcgccgtcgtgctccccggagtggaggcggccgagcgcgccggggtgcccgccttcctggagacctccgcgccccgcaacctccccttctacgagcggctcggcttcaccgtcaccgccgacgtcgaggtgcccgaaggaccgcgcacctggtgcatgacccgcaagcccggtgcctga

SEQ ID NO: 5788 - DNA, 2847 bp, synthetic construct
  source 1..2847: mol_type = other DNA
atggccttaccagtgaccgccttgctcctgccgctggccttgctgctccacgccgccaggccggacatccagttgacccagtcccccagctcactcagcgccagtgtgggggaccgggtgaccattacctgtaaagccagtcagagtgtggactatgagggggatagcttcctgaattggtatcagcagaagcctggcaaagccccaaagctgctgatctacgctgcatctaatctggagtcaggcgtgccttctaggttctccggtagtgggtctgggaccgatttcacattgaccatttcatccctccaacccgaggatttcgctacatattactgtcagcagtccaatgaggaccctctcacctttggccagggcaccaaagttgaaattaagagactcgaggacctgaagaacgtgttcccacctgaggtggccgtgttcgagcctagcgaggccgagatcagccacacccagaaagccaccctcgtgtgcctggctaccggcttctaccccgaccatgtggaactgtcttggtgggtcaacggcaaagaggtgcacagcggcgtgtgtaccgacccccagccactgaaagaacagcccgccctgaacgacagccggtactgcctgagcagcagactgagagtgtccgccaccttctggcagaacccccggaaccacttcagatgccaggtgcagttctacggcctgagcgagaacgacgagtggacccaggacagagccaagcccgtgacccagatcgtgtctgccgaagcctggggcagagccgattgcgacgtgaagctggtggaaaagagcttcgagacagacaccaacctgaacttccagaacctgagcgtgatcggcttcagaatcctgctgctgaaagtggccggctttaacctgctgatgaccctgcggctgtggtccagcagggccaagcgatctggatctggagcaacaaacttctcactactcaaacaagcaggtgacgtggaggagaatcccgggcctactagtgccaccatggactggatttggcgcatccttttccttgtcggcgctgctaccggcgcccattccgggcccatgggaagctggcttgagttctaccacagactcaacgccattgacagcaggctgtgggcacttggcggaagcgaagctgaactcgccgcttttgaaaaagaaattgccgctttcgagtccgagcttcaggcttacaaaggcaaagggaatcctgaggtcgagagcctgagagatcacgctgcccacattagagagtggttgcaggcataccggcacaatggatccggcggcggaggatctggcggaggcggatctgggggcggaggctctttcgaagtccaacttgtggagtctggagggggcctggtgcagcccggcggctctctcagactgtcttgtgcggcaagcggctacaccttcacctcttactggatagaatgggtgaggcaggcacctggaaagggactggagtggattggagagattctgccaggagggggagatacaaattacaatgaaatcttcaaggggcgggccaccttttcagcggataccagcaagaatacagcttacctgcagatgaatagcctccgggcagaagataccgctgtttattattgcacgagacgggtgccaataagactggactattgggggcaagggactcttgtcaccgtcagttcaacgcgtatccagaaccctgatcctgccgtgtaccagctgcgggatagcaagagcagcgacaagagcgtgtgtctgttcaccgacttcgacagccagaccaacgtgtcccagagcaaggactccgacgtgtacatcaccgataagtgcgtgctggacatgcggagcatggacttcaagagcaactccgccgtggcctggtccaacaagtccgatttcgcctgcgccaacgccttcaacaacagcattatccccgaggacacattcttcccaagccccgagagcagctgcggctttaccagcgagagctaccagcagggcgtgctgagcgccaccatcctgtacgagatcctgctgggcaaggccaccctgtacgccgtgctggtgtctgccctggtgctgatggctatggtcaagcggaaggacagccggggacgcgccaagagaagcggatctggcgtgaagcagaccctgaatttcgacctgctgaagctggctggcgacgtggaatccaacccaggcccttctagaggccatatgaccgagtacaagcccacggtgcgcctcgccacccgcgacgacgtccccagggccgtacgcaccctcgccgccgcgttcgccgactaccccgccacgcgccacaccgtcgatccggaccgccacatcgagcgggtcaccgagctgcaagaactcttcctcacgcgcgtcgggctcgacatcggcaaggtgtgggtcgcggacgacggcgccgcggtggcggtctggaccacgccggagagcgtcgaagcgggggcggtgttcgccgagatcggcccgcgcatggccgagttgagcggttcccggctggccgcgcagcaacagatggaaggcctcctggcgccgcaccggcccaaggagcccgcgtggttcctggccaccgtcggcgtctcgcccgaccaccagggcaagggtctgggcagcgccgtcgtgctccccggagtggaggcggccgagcgcgccggggtgcccgccttcctggagacctccgcgccccgcaacctccccttctacgagcggctcggcttcaccgtcaccgccgacgtcgaggtgcccgaaggaccgcgcacctggtgcatgacccgcaagcccggtgcctga

SEQ ID NO: 5789 - DNA, 2847 bp, synthetic construct
  source 1..2847: mol_type = other DNA
atggccttaccagtgaccgccttgctcctgccgctggccttgctgctccacgccgccaggccggcatgcatgggcagttggttcgagttctacgaccggctgaatgccatcgacgccagactgtgggctctcggaggatctgaagctgagctggccgccttcgagaaagagatcgccgcctttgagagcgagctgcaagcctacaaaggcaagggcaaccccgaggtggaaaacctgagagtgcacgccgctgccatcagagaatggctccaggcttacagacacaacggtaccggcggaggcggatctggcggcggaggtagcggtggcggaggatctgaattcgacatccagttgacccagtcccccagctcactcagcgccagtgtgggggaccgggtgaccattacctgtaaagccagtcagagtgtggactatgagggggatagcttcctgaattggtatcagcagaagcctggcaaagccccaaagctgctgatctacgctgcatctaatctggagtcaggcgtgccttctaggttctccggtagtgggtctgggaccgatttcacattgaccatttcatccctccaacccgaggatttcgctacatattactgtcagcagtccaatgaggaccctctcacctttggccagggcaccaaagttgaaattaagagactcgaggacctgaagaacgtgttcccacctgaggtggccgtgttcgagcctagcgaggccgagatcagccacacccagaaagccaccctcgtgtgcctggctaccggcttctaccccgaccatgtggaactgtcttggtgggtcaacggcaaagaggtgcacagcggcgtgtgtaccgacccccagccactgaaagaacagcccgccctgaacgacagccggtactgcctgagcagcagactgagagtgtccgccaccttctggcagaacccccggaaccacttcagatgccaggtgcagttctacggcctgagcgagaacgacgagtggacccaggacagagccaagcccgtgacccagatcgtgtctgccgaagcctggggcagagccgattgcgacgtgaagctggtggaaaagagcttcgagacagacaccaacctgaacttccagaacctgagcgtgatcggcttcagaatcctgctgctgaaagtggccggctttaacctgctgatgaccctgcggctgtggtccagcagggccaagcgatctggatctggagcaacaaacttctcactactcaaacaagcaggtgacgtggaggagaatcccgggcctactagtatggactggatttggcgcatccttttccttgtcggcgctgctaccggcgcgcattccttcgaagtccaacttgtggagtctggagggggcctggtgcagcccggcggctctctcagactgtcttgtgcggcaagcggctacaccttcacctcttactggatagaatgggtgaggcaggcacctggaaagggactggagtggattggagagattctgccaggagggggagatacaaattacaatgaaatcttcaaggggcgggccaccttttcagcggataccagcaagaatacagcttacctgcagatgaatagcctccgggcagaagataccgctgtttattattgcacgagacgggtgccaataagactggactattgggggcaagggactcttgtcaccgtcagttcaacgcgtatccagaaccctgatcctgccgtgtaccagctgcgggatagcaagagcagcgacaagagcgtgtgtctgttcaccgacttcgacagccagaccaacgtgtcccagagcaaggactccgacgtgtacatcaccgataagtgcgtgctggacatgcggagcatggacttcaagagcaactccgccgtggcctggtccaacaagtccgatttcgcctgcgccaacgccttcaacaacagcattatccccgaggacacattcttcccaagccccgagagcagctgcggctttaccagcgagagctaccagcagggcgtgctgagcgccaccatcctgtacgagatcctgctgggcaaggccaccctgtacgccgtgctggtgtctgccctggtgctgatggctatggtcaagcggaaggacagccggggacgcgccaagagaagcggatctggcgtgaagcagaccctgaatttcgacctgctgaagctggctggcgacgtggaatccaacccaggcccttctagaggccatatgaccgagtacaagcccacggtgcgcctcgccacccgcgacgacgtccccagggccgtacgcaccctcgccgccgcgttcgccgactaccccgccacgcgccacaccgtcgatccggaccgccacatcgagcgggtcaccgagctgcaagaactcttcctcacgcgcgtcgggctcgacatcggcaaggtgtgggtcgcggacgacggcgccgcggtggcggtctggaccacgccggagagcgtcgaagcgggggcggtgttcgccgagatcggcccgcgcatggccgagttgagcggttcccggctggccgcgcagcaacagatggaaggcctcctggcgccgcaccggcccaaggagcccgcgtggttcctggccaccgtcggcgtctcgcccgaccaccagggcaagggtctgggcagcgccgtcgtgctccccggagtggaggcggccgagcgcgccggggtgcccgccttcctggagacctccgcgccccgcaacctccccttctacgagcggctcggcttcaccgtcaccgccgacgtcgaggtgcccgaaggaccgcgcacctggtgcatgacccgcaagcccggtgcctga

SEQ ID NO: 5790 - DNA, 3198 bp, synthetic construct
  source 1..3198: mol_type = other DNA
atggccttaccagtgaccgccttgctcctgccgctggccttgctgctccacgccgccaggccggcatgcatggaccccgacctggaaatcagagccgccttcctgcggcagagaaacacagccctgagaacagaggtggccgagctggaacaagaggtgcagcggctggaaaacgaggtgtcccagtacgagacaagatacggccctctcggaggcggaaaaggtaccggcggaggcggatctggcggcggaggtagcggtggcggaggatctgaattcgacatccagttgacccagtcccccagctcactcagcgccagtgtgggggaccgggtgaccattacctgtaaagccagtcagagtgtggactatgagggggatagcttcctgaattggtatcagcagaagcctggcaaagccccaaagctgctgatctacgctgcatctaatctggagtcaggcgtgccttctaggttctccggtagtgggtctgggaccgatttcacattgaccatttcatccctccaacccgaggatttcgctacatattactgtcagcagtccaatgaggaccctctcacctttggccagggcaccaaagttgaaattaagagactcgaggacctgaagaacgtgttcccacctgaggtggccgtgttcgagcctagcgaggccgagatcagccacacccagaaagccaccctcgtgtgcctggctaccggcttctaccccgaccatgtggaactgtcttggtgggtcaacggcaaagaggtgcacagcggcgtgtgtaccgacccccagccactgaaagaacagcccgccctgaacgacagccggtactgcctgagcagcagactgagagtgtccgccaccttctggcagaacccccggaaccacttcagatgccaggtgcagttctacggcctgagcgagaacgacgagtggacccaggacagagccaagcccgtgacccagatcgtgtctgccgaagcctggggcagagccgattgcgacgtgaagctggtggaaaagagcttcgagacagacaccaacctgaacttccagaacctgagcgtgatcggcttcagaatcctgctgctgaaagtggccggctttaacctgctgatgaccctgcggctgtggtccagcagggccaagcgatctggatctggagcaacaaacttctcactactcaaacaagcaggtgacgtggaggagaatcccgggcctactagtgccaccatggactggatttggcgcatccttttccttgtcggcgctgctaccggcgcccattccgggcccgaagtgcagctggttgaatctggcggaggactggttcaggctggcggatctctgagactgtcttgtgccgccagcggcagaacctttagcatgggctggtttagacaggcccctggcaaagagagagagttcgtcgccgccatcacatactctggcggcagcccttactacgccgactctgtgaagggcagattcaccatcagccgggacaacgccaagaacaccgtgtacctccagatgaacagcctgaagcctgaggacaccgccgtgtactactgcgccgccaatccaacatacggcagcgactggaacgccgagaattggggccagggaacccaagtgacagtgtctagcggatccggcggcggaggatctggcggaggcggatctgggggcggaggctctttcgaagtccaacttgtggagtctggagggggcctggtgcagcccggcggctctctcagactgtcttgtgcggcaagcggctacaccttcacctcttactggatagaatgggtgaggcaggcacctggaaagggactggagtggattggagagattctgccaggagggggagatacaaattacaatgaaatcttcaaggggcgggccaccttttcagcggataccagcaagaatacagcttacctgcagatgaatagcctccgggcagaagataccgctgtttattattgcacgagacgggtgccaataagactggactattgggggcaagggactcttgtcaccgtcagttcaacgcgtatccagaaccctgatcctgccgtgtaccagctgcgggatagcaagagcagcgacaagagcgtgtgtctgttcaccgacttcgacagccagaccaacgtgtcccagagcaaggactccgacgtgtacatcaccgataagtgcgtgctggacatgcggagcatggacttcaagagcaactccgccgtggcctggtccaacaagtccgatttcgcctgcgccaacgccttcaacaacagcattatccccgaggacacattcttcccaagccccgagagcagctgcggctttaccagcgagagctaccagcagggcgtgctgagcgccaccatcctgtacgagatcctgctgggcaaggccaccctgtacgccgtgctggtgtctgccctggtgctgatggctatggtcaagcggaaggacagccggggacgcgccaagagaagcggatctggcgtgaagcagaccctgaatttcgacctgctgaagctggctggcgacgtggaatccaacccaggcccttctagaggccatatgaccgagtacaagcccacggtgcgcctcgccacccgcgacgacgtccccagggccgtacgcaccctcgccgccgcgttcgccgactaccccgccacgcgccacaccgtcgatccggaccgccacatcgagcgggtcaccgagctgcaagaactcttcctcacgcgcgtcgggctcgacatcggcaaggtgtgggtcgcggacgacggcgccgcggtggcggtctggaccacgccggagagcgtcgaagcgggggcggtgttcgccgagatcggcccgcgcatggccgagttgagcggttcccggctggccgcgcagcaacagatggaaggcctcctggcgccgcaccggcccaaggagcccgcgtggttcctggccaccgtcggcgtctcgcccgaccaccagggcaagggtctgggcagcgccgtcgtgctccccggagtggaggcggccgagcgcgccggggtgcccgccttcctggagacctccgcgccccgcaacctccccttctacgagcggctcggcttcaccgtcaccgccgacgtcgaggtgcccgaaggaccgcgcacctggtgcatgacccgcaagcccggtgcctga

SEQ ID NO: 5791 - DNA, 2847 bp, synthetic construct
  source 1..2847: mol_type = other DNA
atggccttaccagtgaccgccttgctcctgccgctggccttgctgctccacgccgccaggccggacatccagttgacccagtcccccagctcactcagcgccagtgtgggggaccgggtgaccattacctgtaaagccagtcagagtgtggactatgagggggatagcttcctgaattggtatcagcagaagcctggcaaagccccaaagctgctgatctacgctgcatctaatctggagtcaggcgtgccttctaggttctccggtagtgggtctgggaccgatttcacattgaccatttcatccctccaacccgaggatttcgctacatattactgtcagcagtccaatgaggaccctctcacctttggccagggcaccaaagttgaaattaagagactcgaggacctgaagaacgtgttcccacctgaggtggccgtgttcgagcctagcgaggccgagatcagccacacccagaaagccaccctcgtgtgcctggctaccggcttctaccccgaccatgtggaactgtcttggtgggtcaacggcaaagaggtgcacagcggcgtgtgtaccgacccccagccactgaaagaacagcccgccctgaacgacagccggtactgcctgagcagcagactgagagtgtccgccaccttctggcagaacccccggaaccacttcagatgccaggtgcagttctacggcctgagcgagaacgacgagtggacccaggacagagccaagcccgtgacccagatcgtgtctgccgaagcctggggcagagccgattgcgacgtgaagctggtggaaaagagcttcgagacagacaccaacctgaacttccagaacctgagcgtgatcggcttcagaatcctgctgctgaaagtggccggctttaacctgctgatgaccctgcggctgtggtccagcagggccaagcgatctggatctggagcaacaaacttctcactactcaaacaagcaggtgacgtggaggagaatcccgggcctactagtgccaccatggactggatttggcgcatccttttccttgtcggcgctgctaccggcgcccattccgggcccatgggatcttggagcgagttttacgatcggctgcacgccattcaccaccggctgtatgctctcggaggaagcgaagctgagctggccgcttttgaaaaagaaattgccgctttcgagtccgagcttcaggcttacaaaggcaaagggaatcctgaggtcgaggccctgagagataccgccgccttcatcagaacccggttgcaggcataccggcacaacggatccggcggcggaggatctggcggaggcggatctgggggcggaggctctttcgaagtccaacttgtggagtctggagggggcctggtgcagcccggcggctctctcagactgtcttgtgcggcaagcggctacaccttcacctcttactggatagaatgggtgaggcaggcacctggaaagggactggagtggattggagagattctgccaggagggggagatacaaattacaatgaaatcttcaaggggcgggccaccttttcagcggataccagcaagaatacagcttacctgcagatgaatagcctccgggcagaagataccgctgtttattattgcacgagacgggtgccaataagactggactattgggggcaagggactcttgtcaccgtcagttcaacgcgtatccagaaccctgatcctgccgtgtaccagctgcgggatagcaagagcagcgacaagagcgtgtgtctgttcaccgacttcgacagccagaccaacgtgtcccagagcaaggactccgacgtgtacatcaccgataagtgcgtgctggacatgcggagcatggacttcaagagcaactccgccgtggcctggtccaacaagtccgatttcgcctgcgccaacgccttcaacaacagcattatccccgaggacacattcttcccaagccccgagagcagctgcggctttaccagcgagagctaccagcagggcgtgctgagcgccaccatcctgtacgagatcctgctgggcaaggccaccctgtacgccgtgctggtgtctgccctggtgctgatggctatggtcaagcggaaggacagccggggacgcgccaagagaagcggatctggcgtgaagcagaccctgaatttcgacctgctgaagctggctggcgacgtggaatccaacccaggcccttctagaggccatatgaccgagtacaagcccacggtgcgcctcgccacccgcgacgacgtccccagggccgtacgcaccctcgccgccgcgttcgccgactaccccgccacgcgccacaccgtcgatccggaccgccacatcgagcgggtcaccgagctgcaagaactcttcctcacgcgcgtcgggctcgacatcggcaaggtgtgggtcgcggacgacggcgccgcggtggcggtctggaccacgccggagagcgtcgaagcgggggcggtgttcgccgagatcggcccgcgcatggccgagttgagcggttcccggctggccgcgcagcaacagatggaaggcctcctggcgccgcaccggcccaaggagcccgcgtggttcctggccaccgtcggcgtctcgcccgaccaccagggcaagggtctgggcagcgccgtcgtgctccccggagtggaggcggccgagcgcgccggggtgcccgccttcctggagacctccgcgccccgcaacctccccttctacgagcggctcggcttcaccgtcaccgccgacgtcgaggtgcccgaaggaccgcgcacctggtgcatgacccgcaagcccggtgcctga

SEQ ID NO: 5792 - DNA, 3477 bp, synthetic construct
  source 1..3477: mol_type = other DNA
atggccttaccagtgaccgccttgctcctgccgctggccttgctgctccacgccgccaggccggacatccagttgacccagtcccccagctcactcagcgccagtgtgggggaccgggtgaccattacctgtaaagccagtcagagtgtggactatgagggggatagcttcctgaattggtatcagcagaagcctggcaaagccccaaagctgctgatctacgctgcatctaatctggagtcaggcgtgccttctaggttctccggtagtgggtctgggaccgatttcacattgaccatttcatccctccaacccgaggatttcgctacatattactgtcagcagtccaatgaggaccctctcacctttggccagggcaccaaagttgaaattaagagactcgaggacctgaagaacgtgttcccacctgaggtggccgtgttcgagcctagcgaggccgagatcagccacacccagaaagccaccctcgtgtgcctggctaccggcttctaccccgaccatgtggaactgtcttggtgggtcaacggcaaagaggtgcacagcggcgtgtgtaccgacccccagccactgaaagaacagcccgccctgaacgacagccggtactgcctgagcagcagactgagagtgtccgccaccttctggcagaacccccggaaccacttcagatgccaggtgcagttctacggcctgagcgagaacgacgagtggacccaggacagagccaagcccgtgacccagatcgtgtctgccgaagcctggggcagagccgattgcgacgtgaagctggtggaaaagagcttcgagacagacaccaacctgaacttccagaacctgagcgtgatcggcttcagaatcctgctgctgaaagtggccggctttaacctgctgatgaccctgcggctgtggtccagcagggccaagcgatctggatctggagcaacaaacttctcactactcaaacaagcaggtgacgtggaggagaatcccgggcctactagtaccatggactggatttggcgcatccttttccttgtcggcgctgctaccggcgcccattccctgttcaatcaagaggtgcagatccctctgaccgagagctactgtggcccctgtcctaagaactggatctgctacaagaacaactgctaccagttcttcgacgagagcaagaattggtacgagagccaggccagctgcatgagccagaatgccagcctgctgaaggtgtacagcaaagaggaccaggacctgctgaaactggtcaagagcgcccactggatgggccttgtgcacatccccaccaatggctcttggcagtgggaggacggcagcattctgagccctaacctgctgaccatcatcgagatgcagaagggcgactgcgccctgtacgccagcagctttaagggctacatcgagaattgcagcaccccgaacacctacatctgtatgcagagaaccgtttctggcggaggcggctctggaggaggcggaagtggcggcggaggcgacctctttaatcaagaagtccagattccactcaccgaatcctactgcggaccttgtccaaaaaattggatttgttataagaacaactgttatcaattctttgatgagtctaaaaattggtatgagtcccaggcttcctgcatgtctcagaacgcttctctgctgaaagtctactctaaagaagatcaggatctcctgaagctcgtcaagtctgcccattggatggggctcgtccacattcctaccaacggaagctggcaatgggaagatggctccatcctgtctccaaatctgctcacgattattgaaatgcagaaaggggattgtgctctctacgccagctccttcaagggatatattgagaactgtagcacgcccaatacttatatctgtatgcaacggaccgtgggatccggcggcggaggatctggcggaggcggatctgggggcggaggctctttcgaagtccaacttgtggagtctggagggggcctggtgcagcccggcggctctctcagactgtcttgtgcggcaagcggctacaccttcacctcttactggatagaatgggtgaggcaggcacctggaaagggactggagtggattggagagattctgccaggagggggagatacaaattacaatgaaatcttcaaggggcgggccaccttttcagcggataccagcaagaatacagcttacctgcagatgaatagcctccgggcagaagataccgctgtttattattgcacgagacgggtgccaataagactggactattgggggcaagggactcttgtcaccgtcagttcaacgcgtatccagaaccctgatcctgccgtgtaccagctgcgggatagcaagagcagcgacaagagcgtgtgtctgttcaccgacttcgacagccagaccaacgtgtcccagagcaaggactccgacgtgtacatcaccgataagtgcgtgctggacatgcggagcatggacttcaagagcaactccgccgtggcctggtccaacaagtccgatttcgcctgcgccaacgccttcaacaacagcattatccccgaggacacattcttcccaagccccgagagcagctgcggctttaccagcgagagctaccagcagggcgtgctgagcgccaccatcctgtacgagatcctgctgggcaaggccaccctgtacgccgtgctggtgtctgccctggtgctgatggctatggtcaagcggaaggacagccggggacgcgccaagagaagcggatctggcgtgaagcagaccctgaatttcgacctgctgaagctggctggcgacgtggaatccaacccaggcccttctagaggccatatgaccgagtacaagcccacggtgcgcctcgccacccgcgacgacgtccccagggccgtacgcaccctcgccgccgcgttcgccgactaccccgccacgcgccacaccgtcgatccggaccgccacatcgagcgggtcaccgagctgcaagaactcttcctcacgcgcgtcgggctcgacatcggcaaggtgtgggtcgcggacgacggcgccgcggtggcggtctggaccacgccggagagcgtcgaagcgggggcggtgttcgccgagatcggcccgcgcatggccgagttgagcggttcccggctggccgcgcagcaacagatggaaggcctcctggcgccgcaccggcccaaggagcccgcgtggttcctggccaccgtcggcgtctcgcccgaccaccagggcaagggtctgggcagcgccgtcgtgctccccggagtggaggcggccgagcgcgccggggtgcccgccttcctggagacctccgcgccccgcaacctccccttctacgagcggctcggcttcaccgtcaccgccgacgtcgaggtgcccgaaggaccgcgcacctggtgcatgacccgcaagcccggtgcctga

SEQ ID NO: 5793 - DNA, 1863 bp, synthetic construct
  source 1..1863: mol_type = other DNA
atggccttaccagtgaccgccttgctcctgccgctggccttgctgctccacgccgccaggccggacatccagttgacccagtcccccagctcactcagcgccagtgtgggggaccgggtgaccattacctgtaaagccagtcagagtgtggactatgagggggatagcttcctgaattggtatcagcagaagcctggcaaagccccaaagctgctgatctacgctgcatctaatctggagtcaggcgtgccttctaggttctccggtagtgggtctgggaccgatttcacattgaccatttcatccctccaacccgaggatttcgctacatattactgtcagcagtccaatgaggaccctctcacctttggccagggcaccaaagttgaaattaagagactcgaggacctgaagaacgtgttcccacctgaggtggccgtgttcgagcctagcgaggccgagatcagccacacccagaaagccaccctcgtgtgcctggctaccggcttctaccccgaccatgtggaactgtcttggtgggtcaacggcaaagaggtgcacagcggcgtgtgtaccgacccccagccactgaaagaacagcccgccctgaacgacagccggtactgcctgagcagcagactgagagtgtccgccaccttctggcagaacccccggaaccacttcagatgccaggtgcagttctacggcctgagcgagaacgacgagtggacccaggacagagccaagcccgtgacccagatcgtgtctgccgaagcctggggcagagccgattgcggctttaccagcgagagctaccagcagggcgtgctgagcgccaccaacctgagcgtgatcggcttcagaatcctgctgctgaaagtggccggctttaacctgctgatgaccctgcggctgtggtccagcagggccaagcgatctggatctggagcaacaaacttctcactactcaaacaagcaggtgacgtggaggagaatcccgggcctactagtatggactggatttggcgcatccttttccttgtcggcgctgctaccggcgcgcattccttcgaagtccaacttgtggagtctggagggggcctggtgcagcccggcggctctctcagactgtcttgtgcggcaagcggctacaccttcacctcttactggatagaatgggtgaggcaggcacctggaaagggactggagtggattggagagattctgccaggagggggagatacaaattacaatgaaatcttcaaggggcgggccaccttttcagcggataccagcaagaatacagcttacctgcagatgaatagcctccgggcagaagataccgctgtttattattgcacgagacgggtgccaataagactggactattgggggcaagggactcttgtcaccgtcagttcaacgcgtatccagaaccctgatcctgccgtgtaccagctgcgggatagcaagagcagcgacaagagcgtgtgtctgttcaccgacttcgacagccagaccaacgtgtcccagagcaaggactccgacgtgtacatcaccgataagtgcgtgctggacatgcggagcatggacttcaagagcaactccgccgtggcctggtccaacaagtccgatttcgcctgcgccaacgccttcaacaacagcattatccccgaggacacattcttcccaagccccgagagcagctgcgacgtgaagctggtggaaaagagcttcgagacagacaccaacctgaacttccagatcctgtacgagatcctgctgggcaaggccaccctgtacgccgtgctggtgtctgccctggtgctgatggctatggtcaagcggaaggacagccgggga

SEQ ID NO: 5794 - DNA, 1875 bp, synthetic construct
  source 1..1875: mol_type = other DNA
atggccttaccagtgaccgccttgctcctgccgctggccttgctgctccacgccgccaggccggacatccagttgacccagtcccccagctcactcagcgccagtgtgggggaccgggtgaccattacctgtaaagccagtcagagtgtggactatgagggggatagcttcctgaattggtatcagcagaagcctggcaaagccccaaagctgctgatctacgctgcatctaatctggagtcaggcgtgccttctaggttctccggtagtgggtctgggaccgatttcacattgaccatttcatccctccaacccgaggatttcgctacatattactgtcagcagtccaatgaggaccctctcacctttggccagggcaccaaagttgaaattaagagactcgagatccagaaccctgatcctgccgtgtaccagctgcgggatagcaagagcagcgacaagagcgtgtgtctgttcaccgacttcgacagccagaccaacgtgtcccagagcaaggactccgacgtgtacatcaccgataagtgcgtgctggacatgcggagcatggacttcaagagcaactccgccgtggcctggtccaacaagtccgatttcgcctgcgccaacgccttcaacaacagcattatccccgaggacacattcttcccaagccccgagagcagctgcgacgtgaagctggtggaaaagagcttcgagacagacaccaacctgaacttccagatcctgtacgagatcctgctgggcaaggccaccctgtacgccgtgctggtgtctgccctggtgctgatggctatggtcaagcggaaggacagccggggacgcgccaagagaagcggatctggcgtgaagcagaccctgaatttcgacctgctgaagctggctggcgacgtggaatccaacccaggccctactagtatggactggatttggcgcatccttttccttgtcggcgctgctaccggcgcgcattccttcgaagtccaacttgtggagtctggagggggcctggtgcagcccggcggctctctcagactgtcttgtgcggcaagcggctacaccttcacctcttactggatagaatgggtgaggcaggcacctggaaagggactggagtggattggagagattctgccaggagggggagatacaaattacaatgaaatcttcaaggggcgggccaccttttcagcggataccagcaagaatacagcttacctgcagatgaatagcctccgggcagaagataccgctgtttattattgcacgagacgggtgccaataagactggactattgggggcaagggactcttgtcaccgtcagttcaacgcgtgaggacctgaagaacgtgttcccacctgaggtggccgtgttcgagcctagcgaggccgagatcagccacacccagaaagccaccctcgtgtgcctggctaccggcttctaccccgaccatgtggaactgtcttggtgggtcaacggcaaagaggtgcacagcggcgtgtgtaccgacccccagccactgaaagaacagcccgccctgaacgacagccggtactgcctgagcagcagactgagagtgtccgccaccttctggcagaacccccggaaccacttcagatgccaggtgcagttctacggcctgagcgagaacgacgagtggacccaggacagagccaagcccgtgacccagatcgtgtctgccgaagcctggggcagagccgattgcggctttaccagcgagagctaccagcagggcgtgctgagcgccaccaacctgagcgtgatcggcttcagaatcctgctgctgaaagtggccggctttaacctgctgatgaccctgcggctgtggtccagc

SEQ ID NO: 5795 - DNA, 2268 bp, synthetic construct
  source 1..2268: mol_type = other DNA
atggccttaccagtgaccgccttgctcctgccgctggccttgctgctccacgccgccaggccggaagtgcagctggttgaatctggcggaggactggttcagcctggcggatctctgagactgtcttgtgccgccagcggcttcagcttcagcgacttttggatgagctgggtccgacaggcccctggcaaaggacttgaatgggtcgccacaatcagccaggccggcagcgagaaggactacgtggactctgtgaagggcagattcaccatcagccgggacaacgccaagaagtccctgtacctccagatgaacagcctgagagccgaggacaccgccgtgtactattgtgcctctggcgtgtacagcttcgactacagaggccagggcaccctggtcacagtctcttctggtaccggcggaggcggatctggcggcggaggtagcggtggcggaggatctgaattcgacatccagttgacccagtcccccagctcactcagcgccagtgtgggggaccgggtgaccattacctgtaaagccagtcagagtgtggactatgagggggatagcttcctgaattggtatcagcagaagcctggcaaagccccaaagctgctgatctacgctgcatctaatctggagtcaggcgtgccttctaggttctccggtagtgggtctgggaccgatttcacattgaccatttcatccctccaacccgaggatttcgctacatattactgtcagcagtccaatgaggaccctctcacctttggccagggcaccaaagttgaaattaagagactcgaggacctgaagaacgtgttcccacctgaggtggccgtgttcgagcctagcgaggccgagatcagccacacccagaaagccaccctcgtgtgcctggctaccggcttctaccccgaccatgtggaactgtcttggtgggtcaacggcaaagaggtgcacagcggcgtgtgtaccgacccccagccactgaaagaacagcccgccctgaacgacagccggtactgcctgagcagcagactgagagtgtccgccaccttctggcagaacccccggaaccacttcagatgccaggtgcagttctacggcctgagcgagaacgacgagtggacccaggacagagccaagcccgtgacccagatcgtgtctgccgaagcctggggcagagccgattgcggctttaccagcgagagctaccagcagggcgtgctgagcgccaccaacctgagcgtgatcggcttcagaatcctgctgctgaaagtggccggctttaacctgctgatgaccctgcggctgtggtccagcagggccaagcgatctggatctggagcaacaaacttctcactactcaaacaagcaggtgacgtggaggagaatcccgggcctactagtatggactggatttggcgcatccttttccttgtcggcgctgctaccggcgcgcattccttcgaagtccaacttgtggagtctggagggggcctggtgcagcccggcggctctctcagactgtcttgtgcggcaagcggctacaccttcacctcttactggatagaatgggtgaggcaggcacctggaaagggactggagtggattggagagattctgccaggagggggagatacaaattacaatgaaatcttcaaggggcgggccaccttttcagcggataccagcaagaatacagcttacctgcagatgaatagcctccgggcagaagataccgctgtttattattgcacgagacgggtgccaataagactggactattgggggcaagggactcttgtcaccgtcagttcaacgcgtatccagaaccctgatcctgccgtgtaccagctgcgggatagcaagagcagcgacaagagcgtgtgtctgttcaccgacttcgacagccagaccaacgtgtcccagagcaaggactccgacgtgtacatcaccgataagtgcgtgctggacatgcggagcatggacttcaagagcaactccgccgtggcctggtccaacaagtccgatttcgcctgcgccaacgccttcaacaacagcattatccccgaggacacattcttcccaagccccgagagcagctgcgacgtgaagctggtggaaaagagcttcgagacagacaccaacctgaacttccagatcctgtacgagatcctgctgggcaaggccaccctgtacgccgtgctggtgtctgccctggtgctgatggctatggtcaagcggaaggacagccgggga

SEQ ID NO: 5796 - DNA, 2280 bp, synthetic construct
  source 1..2280: mol_type = other DNA
atggccttaccagtgaccgccttgctcctgccgctggccttgctgctccacgccgccaggccggaagtgcagctggttgaatctggcggaggactggttcagcctggcggatctctgagactgtcttgtgccgccagcggcttcagcttcagcgacttttggatgagctgggtccgacaggcccctggcaaaggacttgaatgggtcgccacaatcagccaggccggcagcgagaaggactacgtggactctgtgaagggcagattcaccatcagccgggacaacgccaagaagtccctgtacctccagatgaacagcctgagagccgaggacaccgccgtgtactattgtgcctctggcgtgtacagcttcgactacagaggccagggcaccctggtcacagtctcttctggtaccggcggaggcggatctggcggcggaggtagcggtggcggaggatctgaattcgacatccagttgacccagtcccccagctcactcagcgccagtgtgggggaccgggtgaccattacctgtaaagccagtcagagtgtggactatgagggggatagcttcctgaattggtatcagcagaagcctggcaaagccccaaagctgctgatctacgctgcatctaatctggagtcaggcgtgccttctaggttctccggtagtgggtctgggaccgatttcacattgaccatttcatccctccaacccgaggatttcgctacatattactgtcagcagtccaatgaggaccctctcacctttggccagggcaccaaagttgaaattaagagactcgagatccagaaccctgatcctgccgtgtaccagctgcgggatagcaagagcagcgacaagagcgtgtgtctgttcaccgacttcgacagccagaccaacgtgtcccagagcaaggactccgacgtgtacatcaccgataagtgcgtgctggacatgcggagcatggacttcaagagcaactccgccgtggcctggtccaacaagtccgatttcgcctgcgccaacgccttcaacaacagcattatccccgaggacacattcttcccaagccccgagagcagctgcgacgtgaagctggtggaaaagagcttcgagacagacaccaacctgaacttccagatcctgtacgagatcctgctgggcaaggccaccctgtacgccgtgctggtgtctgccctggtgctgatggctatggtcaagcggaaggacagccggggacgcgccaagagaagcggatctggcgtgaagcagaccctgaatttcgacctgctgaagctggctggcgacgtggaatccaacccaggccctactagtatggactggatttggcgcatccttttccttgtcggcgctgctaccggcgcgcattccttcgaagtccaacttgtggagtctggagggggcctggtgcagcccggcggctctctcagactgtcttgtgcggcaagcggctacaccttcacctcttactggatagaatgggtgaggcaggcacctggaaagggactggagtggattggagagattctgccaggagggggagatacaaattacaatgaaatcttcaaggggcgggccaccttttcagcggataccagcaagaatacagcttacctgcagatgaatagcctccgggcagaagataccgctgtttattattgcacgagacgggtgccaataagactggactattgggggcaagggactcttgtcaccgtcagttcaacgcgtgaggacctgaagaacgtgttcccacctgaggtggccgtgttcgagcctagcgaggccgagatcagccacacccagaaagccaccctcgtgtgcctggctaccggcttctaccccgaccatgtggaactgtcttggtgggtcaacggcaaagaggtgcacagcggcgtgtgtaccgacccccagccactgaaagaacagcccgccctgaacgacagccggtactgcctgagcagcagactgagagtgtccgccaccttctggcagaacccccggaaccacttcagatgccaggtgcagttctacggcctgagcgagaacgacgagtggacccaggacagagccaagcccgtgacccagatcgtgtctgccgaagcctggggcagagccgattgcggctttaccagcgagagctaccagcagggcgtgctgagcgccaccaacctgagcgtgatcggcttcagaatcctgctgctgaaagtggccggctttaacctgctgatgaccctgcggctgtggtccagc

SEQ ID NO: 5797 - DNA, 2679 bp, synthetic construct
  source 1..2679: mol_type = other DNA
atggccttaccagtgaccgccttgctcctgccgctggccttgctgctccacgccgccaggccggaagtgcagctggttgaatctggcggaggactggttcagcctggcggatctctgagactgtcttgtgccgccagcggcttcagcttcagcgacttttggatgagctgggtccgacaggcccctggcaaaggacttgaatgggtcgccacaatcagccaggccggcagcgagaaggactacgtggactctgtgaagggcagattcaccatcagccgggacaacgccaagaagtccctgtacctccagatgaacagcctgagagccgaggacaccgccgtgtactattgtgcctctggcgtgtacagcttcgactacagaggccagggcaccctggtcacagtctcttctggtaccggcggaggcggatctggcggcggaggtagcggtggcggaggatctgaattcgacatccagttgacccagtcccccagctcactcagcgccagtgtgggggaccgggtgaccattacctgtaaagccagtcagagtgtggactatgagggggatagcttcctgaattggtatcagcagaagcctggcaaagccccaaagctgctgatctacgctgcatctaatctggagtcaggcgtgccttctaggttctccggtagtgggtctgggaccgatttcacattgaccatttcatccctccaacccgaggatttcgctacatattactgtcagcagtccaatgaggaccctctcacctttggccagggcaccaaagttgaaattaagagactcgaggacctgaagaacgtgttcccacctgaggtggccgtgttcgagcctagcgaggccgagatcagccacacccagaaagccaccctcgtgtgcctggctaccggcttctaccccgaccatgtggaactgtcttggtgggtcaacggcaaagaggtgcacagcggcgtgtgtaccgacccccagccactgaaagaacagcccgccctgaacgacagccggtactgcctgagcagcagactgagagtgtccgccaccttctggcagaacccccggaaccacttcagatgccaggtgcagttctacggcctgagcgagaacgacgagtggacccaggacagagccaagcccgtgacccagatcgtgtctgccgaagcctggggcagagccgattgcggctttaccagcgagagctaccagcagggcgtgctgagcgccaccaacctgagcgtgatcggcttcagaatcctgctgctgaaagtggccggctttaacctgctgatgaccctgcggctgtggtccagcagggccaagcgatctggatctggagcaacaaacttctcactactcaaacaagcaggtgacgtggaggagaatcccgggcctactagtatggactggatttggcgcatccttttccttgtcggcgctgctaccggcgcgcattccgggccccagctccagctgcaagagtctggacctggcctggtcaagcctagcgagacactgagcctgacctgtaccgtgtccggcgatagcatcagcagcggcgattactactggggctggatcagacagcctcctggcaaaggactggaatggatcggccacatctactacagcggcgtgacctactacaaccccagcctgaagtccagagtgaccatcagcgtggacaccagccggaaccagttctccctgaagctgtctagcgtgacagccgccgataccgccgtgtactactgcaccagagaggacagcagcaactggcggagtagaggccagggaacactggtcacagttagctctggatccggcggaggcggaagtggaggcggaggatctggcggcggaggctctttcgaagtccaacttgtggagtctggagggggcctggtgcagcccggcggctctctcagactgtcttgtgcggcaagcggctacaccttcacctcttactggatagaatgggtgaggcaggcacctggaaagggactggagtggattggagagattctgccaggagggggagatacaaattacaatgaaatcttcaaggggcgggccaccttttcagcggataccagcaagaatacagcttacctgcagatgaatagcctccgggcagaagataccgctgtttattattgcacgagacgggtgccaataagactggactattgggggcaagggactcttgtcaccgtcagttcaacgcgtatccagaaccctgatcctgccgtgtaccagctgcgggatagcaagagcagcgacaagagcgtgtgtctgttcaccgacttcgacagccagaccaacgtgtcccagagcaaggactccgacgtgtacatcaccgataagtgcgtgctggacatgcggagcatggacttcaagagcaactccgccgtggcctggtccaacaagtccgatttcgcctgcgccaacgccttcaacaacagcattatccccgaggacacattcttcccaagccccgagagcagctgcgacgtgaagctggtggaaaagagcttcgagacagacaccaacctgaacttccagatcctgtacgagatcctgctgggcaaggccaccctgtacgccgtgctggtgtctgccctggtgctgatggctatggtcaagcggaaggacagccgggga

SEQ ID NO: 5798 - DNA, 2691 bp, synthetic construct
  source 1..2691: mol_type = other DNA
atggccttaccagtgaccgccttgctcctgccgctggccttgctgctccacgccgccaggccggaagtgcagctggttgaatctggcggaggactggttcagcctggcggatctctgagactgtcttgtgccgccagcggcttcagcttcagcgacttttggatgagctgggtccgacaggcccctggcaaaggacttgaatgggtcgccacaatcagccaggccggcagcgagaaggactacgtggactctgtgaagggcagattcaccatcagccgggacaacgccaagaagtccctgtacctccagatgaacagcctgagagccgaggacaccgccgtgtactattgtgcctctggcgtgtacagcttcgactacagaggccagggcaccctggtcacagtctcttctggtaccggcggaggcggatctggcggcggaggtagcggtggcggaggatctgaattcgacatccagttgacccagtcccccagctcactcagcgccagtgtgggggaccgggtgaccattacctgtaaagccagtcagagtgtggactatgagggggatagcttcctgaattggtatcagcagaagcctggcaaagccccaaagctgctgatctacgctgcatctaatctggagtcaggcgtgccttctaggttctccggtagtgggtctgggaccgatttcacattgaccatttcatccctccaacccgaggatttcgctacatattactgtcagcagtccaatgaggaccctctcacctttggccagggcaccaaagttgaaattaagagactcgagatccagaaccctgatcctgccgtgtaccagctgcgggatagcaagagcagcgacaagagcgtgtgtctgttcaccgacttcgacagccagaccaacgtgtcccagagcaaggactccgacgtgtacatcaccgataagtgcgtgctggacatgcggagcatggacttcaagagcaactccgccgtggcctggtccaacaagtccgatttcgcctgcgccaacgccttcaacaacagcattatccccgaggacacattcttcccaagccccgagagcagctgcgacgtgaagctggtggaaaagagcttcgagacagacaccaacctgaacttccagatcctgtacgagatcctgctgggcaaggccaccctgtacgccgtgctggtgtctgccctggtgctgatggctatggtcaagcggaaggacagccggggacgcgccaagagaagcggatctggcgtgaagcagaccctgaatttcgacctgctgaagctggctggcgacgtggaatccaacccaggccctactagtatggactggatttggcgcatccttttccttgtcggcgctgctaccggcgcgcattccgggccccagctccagctgcaagagtctggacctggcctggtcaagcctagcgagacactgagcctgacctgtaccgtgtccggcgatagcatcagcagcggcgattactactggggctggatcagacagcctcctggcaaaggactggaatggatcggccacatctactacagcggcgtgacctactacaaccccagcctgaagtccagagtgaccatcagcgtggacaccagccggaaccagttctccctgaagctgtctagcgtgacagccgccgataccgccgtgtactactgcaccagagaggacagcagcaactggcggagtagaggccagggaacactggtcacagttagctctggatccggcggaggcggaagtggaggcggaggatctggcggcggaggctctttcgaagtccaacttgtggagtctggagggggcctggtgcagcccggcggctctctcagactgtcttgtgcggcaagcggctacaccttcacctcttactggatagaatgggtgaggcaggcacctggaaagggactggagtggattggagagattctgccaggagggggagatacaaattacaatgaaatcttcaaggggcgggccaccttttcagcggataccagcaagaatacagcttacctgcagatgaatagcctccgggcagaagataccgctgtttattattgcacgagacgggtgccaataagactggactattgggggcaagggactcttgtcaccgtcagttcaacgcgtgaggacctgaagaacgtgttcccacctgaggtggccgtgttcgagcctagcgaggccgagatcagccacacccagaaagccaccctcgtgtgcctggctaccggcttctaccccgaccatgtggaactgtcttggtgggtcaacggcaaagaggtgcacagcggcgtgtgtaccgacccccagccactgaaagaacagcccgccctgaacgacagccggtactgcctgagcagcagactgagagtgtccgccaccttctggcagaacccccggaaccacttcagatgccaggtgcagttctacggcctgagcgagaacgacgagtggacccaggacagagccaagcccgtgacccagatcgtgtctgccgaagcctggggcagagccgattgcggctttaccagcgagagctaccagcagggcgtgctgagcgccaccaacctgagcgtgatcggcttcagaatcctgctgctgaaagtggccggctttaacctgctgatgaccctgcggctgtggtccagc

SEQ ID NO: 5799 - DNA, 2175 bp, synthetic construct
  source 1..2175: mol_type = other DNA
atggccttaccagtgaccgccttgctcctgccgctggccttgctgctccacgccgccaggccggacatccagttgacccagtcccccagctcactcagcgccagtgtgggggaccgggtgaccattacctgtaaagccagtcagagtgtggactatgagggggatagcttcctgaattggtatcagcagaagcctggcaaagccccaaagctgctgatctacgctgcatctaatctggagtcaggcgtgccttctaggttctccggtagtgggtctgggaccgatttcacattgaccatttcatccctccaacccgaggatttcgctacatattactgtcagcagtccaatgaggaccctctcacctttggccagggcaccaaagttgaaattaagagactcgaggacctgaagaacgtgttcccacctgaggtggccgtgttcgagcctagcgaggccgagatcagccacacccagaaagccaccctcgtgtgcctggctaccggcttctaccccgaccatgtggaactgtcttggtgggtcaacggcaaagaggtgcacagcggcgtgtgtaccgacccccagccactgaaagaacagcccgccctgaacgacagccggtactgcctgagcagcagactgagagtgtccgccaccttctggcagaacccccggaaccacttcagatgccaggtgcagttctacggcctgagcgagaacgacgagtggacccaggacagagccaagcccgtgacccagatcgtgtctgccgaagcctggggcagagccgatgatgtgattaagatccactggcaggaaaagaagtccaacaccatcctgggcagccaggaaggcaacaccatgaagaccaacgacacctacatgaagttcagctggctgaccgtgcccgagaagtccctggacaaagaacacagatgcatcgtgcggcacgaaaacaacaagaacggcgtggaccaggaaatcatcttcccacccatcaagaccgatgtgattacaatggaccccaaggacaactgctccaaggacgccaacgataccctgctgctccagctgaccaacaccagcgcctactacatgtacttgttgctgctgctgaagtccgtggtgtacttcgccatcatcacatgctgcctgctgatggctatggtcaagcggaaggacagccggggaagggccaagcgatctggatctggagcaacaaacttctcactactcaaacaagcaggtgacgtggaggagaatcccgggcctactagtatggactggatttggcgcatccttttccttgtcggcgctgctaccggcgcgcattccttcgaagtccaacttgtggagtctggagggggcctggtgcagcccggcggctctctcagactgtcttgtgcggcaagcggctacaccttcacctcttactggatagaatgggtgaggcaggcacctggaaagggactggagtggattggagagattctgccaggagggggagatacaaattacaatgaaatcttcaaggggcgggccaccttttcagcggataccagcaagaatacagcttacctgcagatgaatagcctccgggcagaagataccgctgtttattattgcacgagacgggtgccaataagactggactattgggggcaagggactcttgtcaccgtcagttcaacgcgtatccagaaccctgatcctgccgtgtaccagctgcgggatagcaagagcagcgacaagagcgtgtgtctgttcaccgacttcgacagccagaccaacgtgtcccagagcaaggactccgacgtgtacatcaccgataagtgcgtgctggacatgcggagcatggacttcaagagcaactccgccgtggcctggtccaacaagtccgatttcgcctgcgccaacgccttcaacaacagcattatccccgaggacacattcttcccaagccccgagagcagcgactccaccgaccacgtgaagcccaaagagacagagaacaccaagcagcccagcaagagctgccacaagcccaaggccatcgtgcacaccgagaaagtgaacatgatgagcctgaccgtgctgggcctgcggatgctgttcgccaaaaccgtggccgtgaacttcctgctgaccgccaagctgttcttcctcctcaccgcc

SEQ ID NO: 5800 - DNA, 2187 bp, synthetic construct
  source 1..2187: mol_type = other DNA
atggccttaccagtgaccgccttgctcctgccgctggccttgctgctccacgccgccaggccggacatccagttgacccagtcccccagctcactcagcgccagtgtgggggaccgggtgaccattacctgtaaagccagtcagagtgtggactatgagggggatagcttcctgaattggtatcagcagaagcctggcaaagccccaaagctgctgatctacgctgcatctaatctggagtcaggcgtgccttctaggttctccggtagtgggtctgggaccgatttcacattgaccatttcatccctccaacccgaggatttcgctacatattactgtcagcagtccaatgaggaccctctcacctttggccagggcaccaaagttgaaattaagagactcgagatccagaaccctgatcctgccgtgtaccagctgcgggatagcaagagcagcgacaagagcgtgtgtctgttcaccgacttcgacagccagaccaacgtgtcccagagcaaggactccgacgtgtacatcaccgataagtgcgtgctggacatgcggagcatggacttcaagagcaactccgccgtggcctggtccaacaagtccgatttcgcctgcgccaacgccttcaacaacagcattatccccgaggacacattcttcccaagccccgagagcagcgactccaccgaccacgtgaagcccaaagagacagagaacaccaagcagcccagcaagagctgccacaagcccaaggccatcgtgcacaccgagaaagtgaacatgatgagcctgaccgtgctgggcctgcggatgctgttcgccaaaaccgtggccgtgaacttcctgctgaccgccaagctgttcttcctcctcaccgcccgcgccaagagaagcggatctggcgtgaagcagaccctgaatttcgacctgctgaagctggctggcgacgtggaatccaacccaggccctactagtatggactggatttggcgcatccttttccttgtcggcgctgctaccggcgcgcattccttcgaagtccaacttgtggagtctggagggggcctggtgcagcccggcggctctctcagactgtcttgtgcggcaagcggctacaccttcacctcttactggatagaatgggtgaggcaggcacctggaaagggactggagtggattggagagattctgccaggagggggagatacaaattacaatgaaatcttcaaggggcgggccaccttttcagcggataccagcaagaatacagcttacctgcagatgaatagcctccgggcagaagataccgctgtttattattgcacgagacgggtgccaataagactggactattgggggcaagggactcttgtcaccgtcagttcaacgcgtgaggacctgaagaacgtgttcccacctgaggtggccgtgttcgagcctagcgaggccgagatcagccacacccagaaagccaccctcgtgtgcctggctaccggcttctaccccgaccatgtggaactgtcttggtgggtcaacggcaaagaggtgcacagcggcgtgtgtaccgacccccagccactgaaagaacagcccgccctgaacgacagccggtactgcctgagcagcagactgagagtgtccgccaccttctggcagaacccccggaaccacttcagatgccaggtgcagttctacggcctgagcgagaacgacgagtggacccaggacagagccaagcccgtgacccagatcgtgtctgccgaagcctggggcagagccgatgatgtgattaagatccactggcaggaaaagaagtccaacaccatcctgggcagccaggaaggcaacaccatgaagaccaacgacacctacatgaagttcagctggctgaccgtgcccgagaagtccctggacaaagaacacagatgcatcgtgcggcacgaaaacaacaagaacggcgtggaccaggaaatcatcttcccacccatcaagaccgatgtgattacaatggaccccaaggacaactgctccaaggacgccaacgataccctgctgctccagctgaccaacaccagcgcctactacatgtacttgttgctgctgctgaagtccgtggtgtacttcgccatcatcacatgctgcctgctgatggctatggtcaagcggaaggacagccgggga

SEQ ID NO: 5801 - DNA, 2580 bp, synthetic construct
  source 1..2580: mol_type = other DNA
atggccttaccagtgaccgccttgctcctgccgctggccttgctgctccacgccgccaggccggaagtgcagctggttgaatctggcggaggactggttcagcctggcggatctctgagactgtcttgtgccgccagcggcttcagcttcagcgacttttggatgagctgggtccgacaggcccctggcaaaggacttgaatgggtcgccacaatcagccaggccggcagcgagaaggactacgtggactctgtgaagggcagattcaccatcagccgggacaacgccaagaagtccctgtacctccagatgaacagcctgagagccgaggacaccgccgtgtactattgtgcctctggcgtgtacagcttcgactacagaggccagggcaccctggtcacagtctcttctggtaccggcggaggcggatctggcggcggaggtagcggtggcggaggatctgaattcgacatccagttgacccagtcccccagctcactcagcgccagtgtgggggaccgggtgaccattacctgtaaagccagtcagagtgtggactatgagggggatagcttcctgaattggtatcagcagaagcctggcaaagccccaaagctgctgatctacgctgcatctaatctggagtcaggcgtgccttctaggttctccggtagtgggtctgggaccgatttcacattgaccatttcatccctccaacccgaggatttcgctacatattactgtcagcagtccaatgaggaccctctcacctttggccagggcaccaaagttgaaattaagagactcgaggacctgaagaacgtgttcccacctgaggtggccgtgttcgagcctagcgaggccgagatcagccacacccagaaagccaccctcgtgtgcctggctaccggcttctaccccgaccatgtggaactgtcttggtgggtcaacggcaaagaggtgcacagcggcgtgtgtaccgacccccagccactgaaagaacagcccgccctgaacgacagccggtactgcctgagcagcagactgagagtgtccgccaccttctggcagaacccccggaaccacttcagatgccaggtgcagttctacggcctgagcgagaacgacgagtggacccaggacagagccaagcccgtgacccagatcgtgtctgccgaagcctggggcagagccgatgatgtgattaagatccactggcaggaaaagaagtccaacaccatcctgggcagccaggaaggcaacaccatgaagaccaacgacacctacatgaagttcagctggctgaccgtgcccgagaagtccctggacaaagaacacagatgcatcgtgcggcacgaaaacaacaagaacggcgtggaccaggaaatcatcttcccacccatcaagaccgatgtgattacaatggaccccaaggacaactgctccaaggacgccaacgataccctgctgctccagctgaccaacaccagcgcctactacatgtacttgttgctgctgctgaagtccgtggtgtacttcgccatcatcacatgctgcctgctgatggctatggtcaagcggaaggacagccggggaagggccaagcgatctggatctggagcaacaaacttctcactactcaaacaagcaggtgacgtggaggagaatcccgggcctactagtatggactggatttggcgcatccttttccttgtcggcgctgctaccggcgcgcattccttcgaagtccaacttgtggagtctggagggggcctggtgcagcccggcggctctctcagactgtcttgtgcggcaagcggctacaccttcacctcttactggatagaatgggtgaggcaggcacctggaaagggactggagtggattggagagattctgccaggagggggagatacaaattacaatgaaatcttcaaggggcgggccaccttttcagcggataccagcaagaatacagcttacctgcagatgaatagcctccgggcagaagataccgctgtttattattgcacgagacgggtgccaataagactggactattgggggcaagggactcttgtcaccgtcagttcaacgcgtatccagaaccctgatcctgccgtgtaccagctgcgggatagcaagagcagcgacaagagcgtgtgtctgttcaccgacttcgacagccagaccaacgtgtcccagagcaaggactccgacgtgtacatcaccgataagtgcgtgctggacatgcggagcatggacttcaagagcaactccgccgtggcctggtccaacaagtccgatttcgcctgcgccaacgccttcaacaacagcattatccccgaggacacattcttcccaagccccgagagcagcgactccaccgaccacgtgaagcccaaagagacagagaacaccaagcagcccagcaagagctgccacaagcccaaggccatcgtgcacaccgagaaagtgaacatgatgagcctgaccgtgctgggcctgcggatgctgttcgccaaaaccgtggccgtgaacttcctgctgaccgccaagctgttcttcctcctcaccgcc

SEQ ID NO: 5802 - DNA, 2592 bp, synthetic construct
  source 1..2592: mol_type = other DNA
atggccttaccagtgaccgccttgctcctgccgctggccttgctgctccacgccgccaggccggaagtgcagctggttgaatctggcggaggactggttcagcctggcggatctctgagactgtcttgtgccgccagcggcttcagcttcagcgacttttggatgagctgggtccgacaggcccctggcaaaggacttgaatgggtcgccacaatcagccaggccggcagcgagaaggactacgtggactctgtgaagggcagattcaccatcagccgggacaacgccaagaagtccctgtacctccagatgaacagcctgagagccgaggacaccgccgtgtactattgtgcctctggcgtgtacagcttcgactacagaggccagggcaccctggtcacagtctcttctggtaccggcggaggcggatctggcggcggaggtagcggtggcggaggatctgaattcgacatccagttgacccagtcccccagctcactcagcgccagtgtgggggaccgggtgaccattacctgtaaagccagtcagagtgtggactatgagggggatagcttcctgaattggtatcagcagaagcctggcaaagccccaaagctgctgatctacgctgcatctaatctggagtcaggcgtgccttctaggttctccggtagtgggtctgggaccgatttcacattgaccatttcatccctccaacccgaggatttcgctacatattactgtcagcagtccaatgaggaccctctcacctttggccagggcaccaaagttgaaattaagagactcgagatccagaaccctgatcctgccgtgtaccagctgcgggatagcaagagcagcgacaagagcgtgtgtctgttcaccgacttcgacagccagaccaacgtgtcccagagcaaggactccgacgtgtacatcaccgataagtgcgtgctggacatgcggagcatggacttcaagagcaactccgccgtggcctggtccaacaagtccgatttcgcctgcgccaacgccttcaacaacagcattatccccgaggacacattcttcccaagccccgagagcagcgactccaccgaccacgtgaagcccaaagagacagagaacaccaagcagcccagcaagagctgccacaagcccaaggccatcgtgcacaccgagaaagtgaacatgatgagcctgaccgtgctgggcctgcggatgctgttcgccaaaaccgtggccgtgaacttcctgctgaccgccaagctgttcttcctcctcaccgcccgcgccaagagaagcggatctggcgtgaagcagaccctgaatttcgacctgctgaagctggctggcgacgtggaatccaacccaggccctactagtatggactggatttggcgcatccttttccttgtcggcgctgctaccggcgcgcattccttcgaagtccaacttgtggagtctggagggggcctggtgcagcccggcggctctctcagactgtcttgtgcggcaagcggctacaccttcacctcttactggatagaatgggtgaggcaggcacctggaaagggactggagtggattggagagattctgccaggagggggagatacaaattacaatgaaatcttcaaggggcgggccaccttttcagcggataccagcaagaatacagcttacctgcagatgaatagcctccgggcagaagataccgctgtttattattgcacgagacgggtgccaataagactggactattgggggcaagggactcttgtcaccgtcagttcaacgcgtgaggacctgaagaacgtgttcccacctgaggtggccgtgttcgagcctagcgaggccgagatcagccacacccagaaagccaccctcgtgtgcctggctaccggcttctaccccgaccatgtggaactgtcttggtgggtcaacggcaaagaggtgcacagcggcgtgtgtaccgacccccagccactgaaagaacagcccgccctgaacgacagccggtactgcctgagcagcagactgagagtgtccgccaccttctggcagaacccccggaaccacttcagatgccaggtgcagttctacggcctgagcgagaacgacgagtggacccaggacagagccaagcccgtgacccagatcgtgtctgccgaagcctggggcagagccgatgatgtgattaagatccactggcaggaaaagaagtccaacaccatcctgggcagccaggaaggcaacaccatgaagaccaacgacacctacatgaagttcagctggctgaccgtgcccgagaagtccctggacaaagaacacagatgcatcgtgcggcacgaaaacaacaagaacggcgtggaccaggaaatcatcttcccacccatcaagaccgatgtgattacaatggaccccaaggacaactgctccaaggacgccaacgataccctgctgctccagctgaccaacaccagcgcctactacatgtacttgttgctgctgctgaagtccgtggtgtacttcgccatcatcacatgctgcctgctgatggctatggtcaagcggaaggacagccgggga

SEQ ID NO: 5803 - DNA, 2991 bp, synthetic construct
  source 1..2991: mol_type = other DNA
atggccttaccagtgaccgccttgctcctgccgctggccttgctgctccacgccgccaggccggaagtgcagctggttgaatctggcggaggactggttcagcctggcggatctctgagactgtcttgtgccgccagcggcttcagcttcagcgacttttggatgagctgggtccgacaggcccctggcaaaggacttgaatgggtcgccacaatcagccaggccggcagcgagaaggactacgtggactctgtgaagggcagattcaccatcagccgggacaacgccaagaagtccctgtacctccagatgaacagcctgagagccgaggacaccgccgtgtactattgtgcctctggcgtgtacagcttcgactacagaggccagggcaccctggtcacagtctcttctggtaccggcggaggcggatctggcggcggaggtagcggtggcggaggatctgaattcgacatccagttgacccagtcccccagctcactcagcgccagtgtgggggaccgggtgaccattacctgtaaagccagtcagagtgtggactatgagggggatagcttcctgaattggtatcagcagaagcctggcaaagccccaaagctgctgatctacgctgcatctaatctggagtcaggcgtgccttctaggttctccggtagtgggtctgggaccgatttcacattgaccatttcatccctccaacccgaggatttcgctacatattactgtcagcagtccaatgaggaccctctcacctttggccagggcaccaaagttgaaattaagagactcgaggacctgaagaacgtgttcccacctgaggtggccgtgttcgagcctagcgaggccgagatcagccacacccagaaagccaccctcgtgtgcctggctaccggcttctaccccgaccatgtggaactgtcttggtgggtcaacggcaaagaggtgcacagcggcgtgtgtaccgacccccagccactgaaagaacagcccgccctgaacgacagccggtactgcctgagcagcagactgagagtgtccgccaccttctggcagaacccccggaaccacttcagatgccaggtgcagttctacggcctgagcgagaacgacgagtggacccaggacagagccaagcccgtgacccagatcgtgtctgccgaagcctggggcagagccgatgatgtgattaagatccactggcaggaaaagaagtccaacaccatcctgggcagccaggaaggcaacaccatgaagaccaacgacacctacatgaagttcagctggctgaccgtgcccgagaagtccctggacaaagaacacagatgcatcgtgcggcacgaaaacaacaagaacggcgtggaccaggaaatcatcttcccacccatcaagaccgatgtgattacaatggaccccaaggacaactgctccaaggacgccaacgataccctgctgctccagctgaccaacaccagcgcctactacatgtacttgttgctgctgctgaagtccgtggtgtacttcgccatcatcacatgctgcctgctgatggctatggtcaagcggaaggacagccggggaagggccaagcgatctggatctggagcaacaaacttctcactactcaaacaagcaggtgacgtggaggagaatcccgggcctactagtatggactggatttggcgcatccttttccttgtcggcgctgctaccggcgcgcattccgggccccagctccagctgcaagagtctggacctggcctggtcaagcctagcgagacactgagcctgacctgtaccgtgtccggcgatagcatcagcagcggcgattactactggggctggatcagacagcctcctggcaaaggactggaatggatcggccacatctactacagcggcgtgacctactacaaccccagcctgaagtccagagtgaccatcagcgtggacaccagccggaaccagttctccctgaagctgtctagcgtgacagccgccgataccgccgtgtactactgcaccagagaggacagcagcaactggcggagtagaggccagggaacactggtcacagttagctctggatccggcggaggcggaagtggaggcggaggatctggcggcggaggctctttcgaagtccaacttgtggagtctggagggggcctggtgcagcccggcggctctctcagactgtcttgtgcggcaagcggctacaccttcacctcttactggatagaatgggtgaggcaggcacctggaaagggactggagtggattggagagattctgccaggagggggagatacaaattacaatgaaatcttcaaggggcgggccaccttttcagcggataccagcaagaatacagcttacctgcagatgaatagcctccgggcagaagataccgctgtttattattgcacgagacgggtgccaataagactggactattgggggcaagggactcttgtcaccgtcagttcaacgcgtatccagaaccctgatcctgccgtgtaccagctgcgggatagcaagagcagcgacaagagcgtgtgtctgttcaccgacttcgacagccagaccaacgtgtcccagagcaaggactccgacgtgtacatcaccgataagtgcgtgctggacatgcggagcatggacttcaagagcaactccgccgtggcctggtccaacaagtccgatttcgcctgcgccaacgccttcaacaacagcattatccccgaggacacattcttcccaagccccgagagcagcgactccaccgaccacgtgaagcccaaagagacagagaacaccaagcagcccagcaagagctgccacaagcccaaggccatcgtgcacaccgagaaagtgaacatgatgagcctgaccgtgctgggcctgcggatgctgttcgccaaaaccgtggccgtgaacttcctgctgaccgccaagctgttcttcctcctcaccgcc

SEQ ID NO: 5804 - DNA, 3003 bp, synthetic construct
  source 1..3003: mol_type = other DNA
atggccttaccagtgaccgccttgctcctgccgctggccttgctgctccacgccgccaggccggaagtgcagctggttgaatctggcggaggactggttcagcctggcggatctctgagactgtcttgtgccgccagcggcttcagcttcagcgacttttggatgagctgggtccgacaggcccctggcaaaggacttgaatgggtcgccacaatcagccaggccggcagcgagaaggactacgtggactctgtgaagggcagattcaccatcagccgggacaacgccaagaagtccctgtacctccagatgaacagcctgagagccgaggacaccgccgtgtactattgtgcctctggcgtgtacagcttcgactacagaggccagggcaccctggtcacagtctcttctggtaccggcggaggcggatctggcggcggaggtagcggtggcggaggatctgaattcgacatccagttgacccagtcccccagctcactcagcgccagtgtgggggaccgggtgaccattacctgtaaagccagtcagagtgtggactatgagggggatagcttcctgaattggtatcagcagaagcctggcaaagccccaaagctgctgatctacgctgcatctaatctggagtcaggcgtgccttctaggttctccggtagtgggtctgggaccgatttcacattgaccatttcatccctccaacccgaggatttcgctacatattactgtcagcagtccaatgaggaccctctcacctttggccagggcaccaaagttgaaattaagagactcgagatccagaaccctgatcctgccgtgtaccagctgcgggatagcaagagcagcgacaagagcgtgtgtctgttcaccgacttcgacagccagaccaacgtgtcccagagcaaggactccgacgtgtacatcaccgataagtgcgtgctggacatgcggagcatggacttcaagagcaactccgccgtggcctggtccaacaagtccgatttcgcctgcgccaacgccttcaacaacagcattatccccgaggacacattcttcccaagccccgagagcagcgactccaccgaccacgtgaagcccaaagagacagagaacaccaagcagcccagcaagagctgccacaagcccaaggccatcgtgcacaccgagaaagtgaacatgatgagcctgaccgtgctgggcctgcggatgctgttcgccaaaaccgtggccgtgaacttcctgctgaccgccaagctgttcttcctcctcaccgcccgcgccaagagaagcggatctggcgtgaagcagaccctgaatttcgacctgctgaagctggctggcgacgtggaatccaacccaggccctactagtatggactggatttggcgcatccttttccttgtcggcgctgctaccggcgcgcattccgggccccagctccagctgcaagagtctggacctggcctggtcaagcctagcgagacactgagcctgacctgtaccgtgtccggcgatagcatcagcagcggcgattactactggggctggatcagacagcctcctggcaaaggactggaatggatcggccacatctactacagcggcgtgacctactacaaccccagcctgaagtccagagtgaccatcagcgtggacaccagccggaaccagttctccctgaagctgtctagcgtgacagccgccgataccgccgtgtactactgcaccagagaggacagcagcaactggcggagtagaggccagggaacactggtcacagttagctctggatccggcggaggcggaagtggaggcggaggatctggcggcggaggctctttcgaagtccaacttgtggagtctggagggggcctggtgcagcccggcggctctctcagactgtcttgtgcggcaagcggctacaccttcacctcttactggatagaatgggtgaggcaggcacctggaaagggactggagtggattggagagattctgccaggagggggagatacaaattacaatgaaatcttcaaggggcgggccaccttttcagcggataccagcaagaatacagcttacctgcagatgaatagcctccgggcagaagataccgctgtttattattgcacgagacgggtgccaataagactggactattgggggcaagggactcttgtcaccgtcagttcaacgcgtgaggacctgaagaacgtgttcccacctgaggtggccgtgttcgagcctagcgaggccgagatcagccacacccagaaagccaccctcgtgtgcctggctaccggcttctaccccgaccatgtggaactgtcttggtgggtcaacggcaaagaggtgcacagcggcgtgtgtaccgacccccagccactgaaagaacagcccgccctgaacgacagccggtactgcctgagcagcagactgagagtgtccgccaccttctggcagaacccccggaaccacttcagatgccaggtgcagttctacggcctgagcgagaacgacgagtggacccaggacagagccaagcccgtgacccagatcgtgtctgccgaagcctggggcagagccgatgatgtgattaagatccactggcaggaaaagaagtccaacaccatcctgggcagccaggaaggcaacaccatgaagaccaacgacacctacatgaagttcagctggctgaccgtgcccgagaagtccctggacaaagaacacagatgcatcgtgcggcacgaaaacaacaagaacggcgtggaccaggaaatcatcttcccacccatcaagaccgatgtgattacaatggaccccaaggacaactgctccaaggacgccaacgataccctgctgctccagctgaccaacaccagcgcctactacatgtacttgttgctgctgctgaagtccgtggtgtacttcgccatcatcacatgctgcctgctgatggctatggtcaagcggaaggacagccgggga

SEQ ID NO: 5805 - DNA, 2169 bp, synthetic construct
  source 1..2169: mol_type = other DNA
atggccttaccagtgaccgccttgctcctgccgctggccttgctgctccacgccgccaggccggacatccagttgacccagtcccccagctcactcagcgccagtgtgggggaccgggtgaccattacctgtaaagccagtcagagtgtggactatgagggggatagcttcctgaattggtatcagcagaagcctggcaaagccccaaagctgctgatctacgctgcatctaatctggagtcaggcgtgccttctaggttctccggtagtgggtctgggaccgatttcacattgaccatttcatccctccaacccgaggatttcgctacatattactgtcagcagtccaatgaggaccctctcacctttggccagggcaccaaagttgaaattaagagactcgaggacctgaagaacgtgttcccacctgaggtggccgtgttcgagcctagcgaggccgagatcagccacacccagaaagccaccctcgtgtgcctggctaccggcttctaccccgaccatgtggaactgtcttggtgggtcaacggcaaagaggtgcacagcggcgtgtgtaccgacccccagccactgaaagaacagcccgccctgaacgacagccggtactgcctgagcagcagactgagagtgtccgccaccttctggcagaacccccggaaccacttcagatgccaggtgcagttctacggcctgagcgagaacgacgagtggacccaggacagagccaagcccgtgacccagatcgtgtctgccgaagcctggggcagagccgatgatgtgattaagatccactggcaggaaaagaagtccaacaccatcctgggcagccaggaaggcaacaccatgaagaccaacgacacctacatgaagttcagctggctgaccgtgcccgagaagtccctggacaaagaacacagatgcatcgtgcggcacgaaaacaacaagaacggcgtggaccaggaaatcatcttcccacccatcaagaccgatgtgattacaatggaccccaaggacaactgctccaaggacgccaacgataccctgctgctccagctgaccaacaccagcgcctactacatgtacttgttgctgctgctgaagtccgtggtgtacttcgccatcatcacatgctgcctgctgcggagaaccgccttctgctgcaacggcgagaagtctagggccaagcgatctggatctggagcaacaaacttctcactactcaaacaagcaggtgacgtggaggagaatcccgggcctactagtatggactggatttggcgcatccttttccttgtcggcgctgctaccggcgcgcattccttcgaagtccaacttgtggagtctggagggggcctggtgcagcccggcggctctctcagactgtcttgtgcggcaagcggctacaccttcacctcttactggatagaatgggtgaggcaggcacctggaaagggactggagtggattggagagattctgccaggagggggagatacaaattacaatgaaatcttcaaggggcgggccaccttttcagcggataccagcaagaatacagcttacctgcagatgaatagcctccgggcagaagataccgctgtttattattgcacgagacgggtgccaataagactggactattgggggcaagggactcttgtcaccgtcagttcaacgcgtatccagaaccctgatcctgccgtgtaccagctgcgggatagcaagagcagcgacaagagcgtgtgtctgttcaccgacttcgacagccagaccaacgtgtcccagagcaaggactccgacgtgtacatcaccgataagtgcgtgctggacatgcggagcatggacttcaagagcaactccgccgtggcctggtccaacaagtccgatttcgcctgcgccaacgccttcaacaacagcattatccccgaggacacattcttcccaagccccgagagcagcgactccaccgaccacgtgaagcccaaagagacagagaacaccaagcagcccagcaagagctgccacaagcccaaggccatcgtgcacaccgagaaagtgaacatgatgagcctgaccgtgctgggcctgcggatgctgttcgccaaaaccgtggccgtgaacttcctgctgaccgccaagctgttcttcctc

SEQ ID NO: 5806 - DNA, 2181 bp, synthetic construct
  source 1..2181: mol_type = other DNA
atggccttaccagtgaccgccttgctcctgccgctggccttgctgctccacgccgccaggccggacatccagttgacccagtcccccagctcactcagcgccagtgtgggggaccgggtgaccattacctgtaaagccagtcagagtgtggactatgagggggatagcttcctgaattggtatcagcagaagcctggcaaagccccaaagctgctgatctacgctgcatctaatctggagtcaggcgtgccttctaggttctccggtagtgggtctgggaccgatttcacattgaccatttcatccctccaacccgaggatttcgctacatattactgtcagcagtccaatgaggaccctctcacctttggccagggcaccaaagttgaaattaagagactcgagatccagaaccctgatcctgccgtgtaccagctgcgggatagcaagagcagcgacaagagcgtgtgtctgttcaccgacttcgacagccagaccaacgtgtcccagagcaaggactccgacgtgtacatcaccgataagtgcgtgctggacatgcggagcatggacttcaagagcaactccgccgtggcctggtccaacaagtccgatttcgcctgcgccaacgccttcaacaacagcattatccccgaggacacattcttcccaagccccgagagcagcgactccaccgaccacgtgaagcccaaagagacagagaacaccaagcagcccagcaagagctgccacaagcccaaggccatcgtgcacaccgagaaagtgaacatgatgagcctgaccgtgctgggcctgcggatgctgttcgccaaaaccgtggccgtgaacttcctgctgaccgccaagctgttcttcctccgcgccaagagaagcggatctggcgtgaagcagaccctgaatttcgacctgctgaagctggctggcgacgtggaatccaacccaggccctactagtatggactggatttggcgcatccttttccttgtcggcgctgctaccggcgcgcattccttcgaagtccaacttgtggagtctggagggggcctggtgcagcccggcggctctctcagactgtcttgtgcggcaagcggctacaccttcacctcttactggatagaatgggtgaggcaggcacctggaaagggactggagtggattggagagattctgccaggagggggagatacaaattacaatgaaatcttcaaggggcgggccaccttttcagcggataccagcaagaatacagcttacctgcagatgaatagcctccgggcagaagataccgctgtttattattgcacgagacgggtgccaataagactggactattgggggcaagggactcttgtcaccgtcagttcaacgcgtgaggacctgaagaacgtgttcccacctgaggtggccgtgttcgagcctagcgaggccgagatcagccacacccagaaagccaccctcgtgtgcctggctaccggcttctaccccgaccatgtggaactgtcttggtgggtcaacggcaaagaggtgcacagcggcgtgtgtaccgacccccagccactgaaagaacagcccgccctgaacgacagccggtactgcctgagcagcagactgagagtgtccgccaccttctggcagaacccccggaaccacttcagatgccaggtgcagttctacggcctgagcgagaacgacgagtggacccaggacagagccaagcccgtgacccagatcgtgtctgccgaagcctggggcagagccgatgatgtgattaagatccactggcaggaaaagaagtccaacaccatcctgggcagccaggaaggcaacaccatgaagaccaacgacacctacatgaagttcagctggctgaccgtgcccgagaagtccctggacaaagaacacagatgcatcgtgcggcacgaaaacaacaagaacggcgtggaccaggaaatcatcttcccacccatcaagaccgatgtgattacaatggaccccaaggacaactgctccaaggacgccaacgataccctgctgctccagctgaccaacaccagcgcctactacatgtacttgttgctgctgctgaagtccgtggtgtacttcgccatcatcacatgctgcctgctgcggagaaccgccttctgctgcaacggcgagaagtct

SEQ ID NO: 5807 - DNA, 2574 bp, synthetic construct
  source 1..2574: mol_type = other DNA
atggccttaccagtgaccgccttgctcctgccgctggccttgctgctccacgccgccaggccggaagtgcagctggttgaatctggcggaggactggttcagcctggcggatctctgagactgtcttgtgccgccagcggcttcagcttcagcgacttttggatgagctgggtccgacaggcccctggcaaaggacttgaatgggtcgccacaatcagccaggccggcagcgagaaggactacgtggactctgtgaagggcagattcaccatcagccgggacaacgccaagaagtccctgtacctccagatgaacagcctgagagccgaggacaccgccgtgtactattgtgcctctggcgtgtacagcttcgactacagaggccagggcaccctggtcacagtctcttctggtaccggcggaggcggatctggcggcggaggtagcggtggcggaggatctgaattcgacatccagttgacccagtcccccagctcactcagcgccagtgtgggggaccgggtgaccattacctgtaaagccagtcagagtgtggactatgagggggatagcttcctgaattggtatcagcagaagcctggcaaagccccaaagctgctgatctacgctgcatctaatctggagtcaggcgtgccttctaggttctccggtagtgggtctgggaccgatttcacattgaccatttcatccctccaacccgaggatttcgctacatattactgtcagcagtccaatgaggaccctctcacctttggccagggcaccaaagttgaaattaagagactcgaggacctgaagaacgtgttcccacctgaggtggccgtgttcgagcctagcgaggccgagatcagccacacccagaaagccaccctcgtgtgcctggctaccggcttctaccccgaccatgtggaactgtcttggtgggtcaacggcaaagaggtgcacagcggcgtgtgtaccgacccccagccactgaaagaacagcccgccctgaacgacagccggtactgcctgagcagcagactgagagtgtccgccaccttctggcagaacccccggaaccacttcagatgccaggtgcagttctacggcctgagcgagaacgacgagtggacccaggacagagccaagcccgtgacccagatcgtgtctgccgaagcctggggcagagccgatgatgtgattaagatccactggcaggaaaagaagtccaacaccatcctgggcagccaggaaggcaacaccatgaagaccaacgacacctacatgaagttcagctggctgaccgtgcccgagaagtccctggacaaagaacacagatgcatcgtgcggcacgaaaacaacaagaacggcgtggaccaggaaatcatcttcccacccatcaagaccgatgtgattacaatggaccccaaggacaactgctccaaggacgccaacgataccctgctgctccagctgaccaacaccagcgcctactacatgtacttgttgctgctgctgaagtccgtggtgtacttcgccatcatcacatgctgcctgctgcggagaaccgccttctgctgcaacggcgagaagtctagggccaagcgatctggatctggagcaacaaacttctcactactcaaacaagcaggtgacgtggaggagaatcccgggcctactagtatggactggatttggcgcatccttttccttgtcggcgctgctaccggcgcgcattccttcgaagtccaacttgtggagtctggagggggcctggtgcagcccggcggctctctcagactgtcttgtgcggcaagcggctacaccttcacctcttactggatagaatgggtgaggcaggcacctggaaagggactggagtggattggagagattctgccaggagggggagatacaaattacaatgaaatcttcaaggggcgggccaccttttcagcggataccagcaagaatacagcttacctgcagatgaatagcctccgggcagaagataccgctgtttattattgcacgagacgggtgccaataagactggactattgggggcaagggactcttgtcaccgtcagttcaacgcgtatccagaaccctgatcctgccgtgtaccagctgcgggatagcaagagcagcgacaagagcgtgtgtctgttcaccgacttcgacagccagaccaacgtgtcccagagcaaggactccgacgtgtacatcaccgataagtgcgtgctggacatgcggagcatggacttcaagagcaactccgccgtggcctggtccaacaagtccgatttcgcctgcgccaacgccttcaacaacagcattatccccgaggacacattcttcccaagccccgagagcagcgactccaccgaccacgtgaagcccaaagagacagagaacaccaagcagcccagcaagagctgccacaagcccaaggccatcgtgcacaccgagaaagtgaacatgatgagcctgaccgtgctgggcctgcggatgctgttcgccaaaaccgtggccgtgaacttcctgctgaccgccaagctgttcttcctc

SEQ ID NO: 5808 - DNA, 2985 bp, synthetic construct
  source 1..2985: mol_type = other DNA
atggccttaccagtgaccgccttgctcctgccgctggccttgctgctccacgccgccaggccggaagtgcagctggttgaatctggcggaggactggttcagcctggcggatctctgagactgtcttgtgccgccagcggcttcagcttcagcgacttttggatgagctgggtccgacaggcccctggcaaaggacttgaatgggtcgccacaatcagccaggccggcagcgagaaggactacgtggactctgtgaagggcagattcaccatcagccgggacaacgccaagaagtccctgtacctccagatgaacagcctgagagccgaggacaccgccgtgtactattgtgcctctggcgtgtacagcttcgactacagaggccagggcaccctggtcacagtctcttctggtaccggcggaggcggatctggcggcggaggtagcggtggcggaggatctgaattcgacatccagttgacccagtcccccagctcactcagcgccagtgtgggggaccgggtgaccattacctgtaaagccagtcagagtgtggactatgagggggatagcttcctgaattggtatcagcagaagcctggcaaagccccaaagctgctgatctacgctgcatctaatctggagtcaggcgtgccttctaggttctccggtagtgggtctgggaccgatttcacattgaccatttcatccctccaacccgaggatttcgctacatattactgtcagcagtccaatgaggaccctctcacctttggccagggcaccaaagttgaaattaagagactcgaggacctgaagaacgtgttcccacctgaggtggccgtgttcgagcctagcgaggccgagatcagccacacccagaaagccaccctcgtgtgcctggctaccggcttctaccccgaccatgtggaactgtcttggtgggtcaacggcaaagaggtgcacagcggcgtgtgtaccgacccccagccactgaaagaacagcccgccctgaacgacagccggtactgcctgagcagcagactgagagtgtccgccaccttctggcagaacccccggaaccacttcagatgccaggtgcagttctacggcctgagcgagaacgacgagtggacccaggacagagccaagcccgtgacccagatcgtgtctgccgaagcctggggcagagccgatgatgtgattaagatccactggcaggaaaagaagtccaacaccatcctgggcagccaggaaggcaacaccatgaagaccaacgacacctacatgaagttcagctggctgaccgtgcccgagaagtccctggacaaagaacacagatgcatcgtgcggcacgaaaacaacaagaacggcgtggaccaggaaatcatcttcccacccatcaagaccgatgtgattacaatggaccccaaggacaactgctccaaggacgccaacgataccctgctgctccagctgaccaacaccagcgcctactacatgtacttgttgctgctgctgaagtccgtggtgtacttcgccatcatcacatgctgcctgctgcggagaaccgccttctgctgcaacggcgagaagtctagggccaagcgatctggatctggagcaacaaacttctcactactcaaacaagcaggtgacgtggaggagaatcccgggcctactagtatggactggatttggcgcatccttttccttgtcggcgctgctaccggcgcgcattccgggccccagctccagctgcaagagtctggacctggcctggtcaagcctagcgagacactgagcctgacctgtaccgtgtccggcgatagcatcagcagcggcgattactactggggctggatcagacagcctcctggcaaaggactggaatggatcggccacatctactacagcggcgtgacctactacaaccccagcctgaagtccagagtgaccatcagcgtggacaccagccggaaccagttctccctgaagctgtctagcgtgacagccgccgataccgccgtgtactactgcaccagagaggacagcagcaactggcggagtagaggccagggaacactggtcacagttagctctggatccggcggaggcggaagtggaggcggaggatctggcggcggaggctctttcgaagtccaacttgtggagtctggagggggcctggtgcagcccggcggctctctcagactgtcttgtgcggcaagcggctacaccttcacctcttactggatagaatgggtgaggcaggcacctggaaagggactggagtggattggagagattctgccaggagggggagatacaaattacaatgaaatcttcaaggggcgggccaccttttcagcggataccagcaagaatacagcttacctgcagatgaatagcctccgggcagaagataccgctgtttattattgcacgagacgggtgccaataagactggactattgggggcaagggactcttgtcaccgtcagttcaacgcgtatccagaaccctgatcctgccgtgtaccagctgcgggatagcaagagcagcgacaagagcgtgtgtctgttcaccgacttcgacagccagaccaacgtgtcccagagcaaggactccgacgtgtacatcaccgataagtgcgtgctggacatgcggagcatggacttcaagagcaactccgccgtggcctggtccaacaagtccgatttcgcctgcgccaacgccttcaacaacagcattatccccgaggacacattcttcccaagccccgagagcagcgactccaccgaccacgtgaagcccaaagagacagagaacaccaagcagcccagcaagagctgccacaagcccaaggccatcgtgcacaccgagaaagtgaacatgatgagcctgaccgtgctgggcctgcggatgctgttcgccaaaaccgtggccgtgaacttcctgctgaccgccaagctgttcttcctc

SEQ ID NO: 5809 - DNA, 1863 bp, synthetic construct
  source 1..1863: mol_type = other DNA
atggccttaccagtgaccgccttgctcctgccgctggccttgctgctccacgccgccaggccggacatccagttgacccagtcccccagctcactcagcgccagtgtgggggaccgggtgaccattacctgtaaagccagtcagagtgtggactatgagggggatagcttcctgaattggtatcagcagaagcctggcaaagccccaaagctgctgatctacgctgcatctaatctggagtcaggcgtgccttctaggttctccggtagtgggtctgggaccgatttcacattgaccatttcatccctccaacccgaggatttcgctacatattactgtcagcagtccaatgaggaccctctcacctttggccagggcaccaaagttgaaattaagagactcgaggacctgaagaacgtgttcccacctgaggtggccgtgttcgagcctagcgaggccgagatcagccacacccagaaagccaccctcgtgtgcctggctaccggcttctaccccgaccatgtggaactgtcttggtgggtcaacggcaaagaggtgcacagcggcgtgtctaccgacccccagccactgaaagaacagcccgccctgaacgacagccggtactgcctgagcagcagactgagagtgtccgccaccttctggcagaacccccggaaccacttcagatgccaggtgcagttctacggcctgagcgagaacgacgagtggacccaggacagagccaagcccgtgacccagatcgtgtctgccgaagcctggggcagagccgattgcgacgtgaagctggtggaaaagagcttcgagacagacaccaacctgaacttccagaacctgagcgtgatcggcttcagaatcctgctgctgaaagtggccggctttaacctgctgatgaccctgcggctgtggtccagcagggccaagcgatctggatctggagcaacaaacttctcactactcaaacaagcaggtgacgtggaggagaatcccgggcctactagtatggactggatttggcgcatccttttccttgtcggcgctgctaccggcgcgcattccttcgaagtccaacttgtggagtctggagggggcctggtgcagcccggcggctctctcagactgtcttgtgcggcaagcggctacaccttcacctcttactggatagaatgggtgaggcaggcacctggaaagggactggagtggattggagagattctgccaggagggggagatacaaattacaatgaaatcttcaaggggcgggccaccttttcagcggataccagcaagaatacagcttacctgcagatgaatagcctccgggcagaagataccgctgtttattattgcacgagacgggtgccaataagactggactattgggggcaagggactcttgtcaccgtcagttcaacgcgtatccagaaccctgatcctgccgtgtaccagctgcgggatagcaagagcagcgacaagagcgtgtgtctgttcaccgacttcgacagccagaccaacgtgtcccagagcaaggactccgacgtgtacatcaccgataagaccgtgctggacatgcggagcatggacttcaagagcaactccgccgtggcctggtccaacaagtccgatttcgcctgcgccaacgccttcaacaacagcattatccccgaggacacattcttcccaagccccgagagcagctgcggctttaccagcgagagctaccagcagggcgtgctgagcgccaccatcctgtacgagatcctgctgggcaaggccaccctgtacgccgtgctggtgtctgccctggtgctgatggctatggtcaagcggaaggacagccgggga

SEQ ID NO: 5810 - DNA, 1863 bp, synthetic construct
  source 1..1863: mol_type = other DNA
atggccttaccagtgaccgccttgctcctgccgctggccttgctgctccacgccgccaggccggacatccagttgacccagtcccccagctcactcagcgccagtgtgggggaccgggtgaccattacctgtaaagccagtcagagtgtggactatgagggggatagcttcctgaattggtatcagcagaagcctggcaaagccccaaagctgctgatctacgctgcatctaatctggagtcaggcgtgccttctaggttctccggtagtgggtctgggaccgatttcacattgaccatttcatccctccaacccgaggatttcgctacatattactgtcagcagtccaatgaggaccctctcacctttggccagggcaccaaagttgaaattaagagactcgaggacctgaagaacgtgttcccacctgaggtggccgtgttcgagcctagcgaggccgagatcagccacacccagaaagccaccctcgtgtgcctggctaccggcttctaccccgaccatgtggaactgtcttggtgggtcaacggcaaagaggtgcacagcggcgtgtctaccgacccccagccactgaaagaacagcccgccctgaacgacagccggtactgcctgagcagcagactgagagtgtccgccaccttctggcagaacccccggaaccacttcagatgccaggtgcagttctacggcctgagcgagaacgacgagtggacccaggacagagccaagcccgtgacccagatcgtgtctgccgaagcctggggcagagccgattgcggctttaccagcgagagctaccagcagggcgtgctgagcgccaccaacctgagcgtgatcggcttcagaatcctgctgctgaaagtggccggctttaacctgctgatgaccctgcggctgtggtccagcagggccaagcgatctggatctggagcaacaaacttctcactactcaaacaagcaggtgacgtggaggagaatcccgggcctactagtatggactggatttggcgcatccttttccttgtcggcgctgctaccggcgcgcattccttcgaagtccaacttgtggagtctggagggggcctggtgcagcccggcggctctctcagactgtcttgtgcggcaagcggctacaccttcacctcttactggatagaatgggtgaggcaggcacctggaaagggactggagtggattggagagattctgccaggagggggagatacaaattacaatgaaatcttcaaggggcgggccaccttttcagcggataccagcaagaatacagcttacctgcagatgaatagcctccgggcagaagataccgctgtttattattgcacgagacgggtgccaataagactggactattgggggcaagggactcttgtcaccgtcagttcaacgcgtatccagaaccctgatcctgccgtgtaccagctgcgggatagcaagagcagcgacaagagcgtgtgtctgttcaccgacttcgacagccagaccaacgtgtcccagagcaaggactccgacgtgtacatcaccgataagaccgtgctggacatgcggagcatggacttcaagagcaactccgccgtggcctggtccaacaagtccgatttcgcctgcgccaacgccttcaacaacagcattatccccgaggacacattcttcccaagccccgagagcagctgcgacgtgaagctggtggaaaagagcttcgagacagacaccaacctgaacttccagatcctgtacgagatcctgctgggcaaggccaccctgtacgccgtgctggtgtctgccctggtgctgatggctatggtcaagcggaaggacagccgggga

SEQ ID NO: 5811 - DNA, 2175 bp, synthetic construct
  source 1..2175: mol_type = other DNA
atggccttaccagtgaccgccttgctcctgccgctggccttgctgctccacgccgccaggccggacatccagttgacccagtcccccagctcactcagcgccagtgtgggggaccgggtgaccattacctgtaaagccagtcagagtgtggactatgagggggatagcttcctgaattggtatcagcagaagcctggcaaagccccaaagctgctgatctacgctgcatctaatctggagtcaggcgtgccttctaggttctccggtagtgggtctgggaccgatttcacattgaccatttcatccctccaacccgaggatttcgctacatattactgtcagcagtccaatgaggaccctctcacctttggccagggcaccaaagttgaaattaagagactcgaggacctgaagaacgtgttcccacctgaggtggccgtgttcgagcctagcgaggccgagatcagccacacccagaaagccaccctcgtgtgcctggctaccggcttctaccccgaccatgtggaactgtcttggtgggtcaacggcaaagaggtgcacagcggcgtgtctaccgacccccagccactgaaagaacagcccgccctgaacgacagccggtactgcctgagcagcagactgagagtgtccgccaccttctggcagaacccccggaaccacttcagatgccaggtgcagttctacggcctgagcgagaacgacgagtggacccaggacagagccaagcccgtgacccagatcgtgtctgccgaagcctggggcagagccgatgatgtgattaagatccactggcaggaaaagaagtccaacaccatcctgggcagccaggaaggcaacaccatgaagaccaacgacacctacatgaagttcagctggctgaccgtgcccgagaagtccctggacaaagaacacagatgcatcgtgcggcacgaaaacaacaagaacggcgtggaccaggaaatcatcttcccacccatcaagaccgatgtgattacaatggaccccaaggacaactgctccaaggacgccaacgataccctgctgctccagctgaccaacaccagcgcctactacatgtacttgttgctgctgctgaagtccgtggtgtacttcgccatcatcacatgctgcctgctgatggctatggtcaagcggaaggacagccggggaagggccaagcgatctggatctggagcaacaaacttctcactactcaaacaagcaggtgacgtggaggagaatcccgggcctactagtatggactggatttggcgcatccttttccttgtcggcgctgctaccggcgcgcattccttcgaagtccaacttgtggagtctggagggggcctggtgcagcccggcggctctctcagactgtcttgtgcggcaagcggctacaccttcacctcttactggatagaatgggtgaggcaggcacctggaaagggactggagtggattggagagattctgccaggagggggagatacaaattacaatgaaatcttcaaggggcgggccaccttttcagcggataccagcaagaatacagcttacctgcagatgaatagcctccgggcagaagataccgctgtttattattgcacgagacgggtgccaataagactggactattgggggcaagggactcttgtcaccgtcagttcaacgcgtatccagaaccctgatcctgccgtgtaccagctgcgggatagcaagagcagcgacaagagcgtgtgtctgttcaccgacttcgacagccagaccaacgtgtcccagagcaaggactccgacgtgtacatcaccgataagaccgtgctggacatgcggagcatggacttcaagagcaactccgccgtggcctggtccaacaagtccgatttcgcctgcgccaacgccttcaacaacagcattatccccgaggacacattcttcccaagccccgagagcagcgactccaccgaccacgtgaagcccaaagagacagagaacaccaagcagcccagcaagagctgccacaagcccaaggccatcgtgcacaccgagaaagtgaacatgatgagcctgaccgtgctgggcctgcggatgctgttcgccaaaaccgtggccgtgaacttcctgctgaccgccaagctgttcttcctcctcaccgcc

SEQ ID NO: 5812 - DNA, 2169 bp, synthetic construct
  source 1..2169: mol_type = other DNA
atggccttaccagtgaccgccttgctcctgccgctggccttgctgctccacgccgccaggccggacatccagttgacccagtcccccagctcactcagcgccagtgtgggggaccgggtgaccattacctgtaaagccagtcagagtgtggactatgagggggatagcttcctgaattggtatcagcagaagcctggcaaagccccaaagctgctgatctacgctgcatctaatctggagtcaggcgtgccttctaggttctccggtagtgggtctgggaccgatttcacattgaccatttcatccctccaacccgaggatttcgctacatattactgtcagcagtccaatgaggaccctctcacctttggccagggcaccaaagttgaaattaagagactcgaggacctgaagaacgtgttcccacctgaggtggccgtgttcgagcctagcgaggccgagatcagccacacccagaaagccaccctcgtgtgcctggctaccggcttctaccccgaccatgtggaactgtcttggtgggtcaacggcaaagaggtgcacagcggcgtgtctaccgacccccagccactgaaagaacagcccgccctgaacgacagccggtactgcctgagcagcagactgagagtgtccgccaccttctggcagaacccccggaaccacttcagatgccaggtgcagttctacggcctgagcgagaacgacgagtggacccaggacagagccaagcccgtgacccagatcgtgtctgccgaagcctggggcagagccgatgatgtgattaagatccactggcaggaaaagaagtccaacaccatcctgggcagccaggaaggcaacaccatgaagaccaacgacacctacatgaagttcagctggctgaccgtgcccgagaagtccctggacaaagaacacagatgcatcgtgcggcacgaaaacaacaagaacggcgtggaccaggaaatcatcttcccacccatcaagaccgatgtgattacaatggaccccaaggacaactgctccaaggacgccaacgataccctgctgctccagctgaccaacaccagcgcctactacatgtacttgttgctgctgctgaagtccgtggtgtacttcgccatcatcacatgctgcctgctgcggagaaccgccttctgctgcaacggcgagaagtctagggccaagcgatctggatctggagcaacaaacttctcactactcaaacaagcaggtgacgtggaggagaatcccgggcctactagtatggactggatttggcgcatccttttccttgtcggcgctgctaccggcgcgcattccttcgaagtccaacttgtggagtctggagggggcctggtgcagcccggcggctctctcagactgtcttgtgcggcaagcggctacaccttcacctcttactggatagaatgggtgaggcaggcacctggaaagggactggagtggattggagagattctgccaggagggggagatacaaattacaatgaaatcttcaaggggcgggccaccttttcagcggataccagcaagaatacagcttacctgcagatgaatagcctccgggcagaagataccgctgtttattattgcacgagacgggtgccaataagactggactattgggggcaagggactcttgtcaccgtcagttcaacgcgtatccagaaccctgatcctgccgtgtaccagctgcgggatagcaagagcagcgacaagagcgtgtgtctgttcaccgacttcgacagccagaccaacgtgtcccagagcaaggactccgacgtgtacatcaccgataagaccgtgctggacatgcggagcatggacttcaagagcaactccgccgtggcctggtccaacaagtccgatttcgcctgcgccaacgccttcaacaacagcattatccccgaggacacattcttcccaagccccgagagcagcgactccaccgaccacgtgaagcccaaagagacagagaacaccaagcagcccagcaagagctgccacaagcccaaggccatcgtgcacaccgagaaagtgaacatgatgagcctgaccgtgctgggcctgcggatgctgttcgccaaaaccgtggccgtgaacttcctgctgaccgccaagctgttcttcctc

SEQ ID NO: 5813 - DNA, 2604 bp, synthetic construct
  source 1..2604: mol_type = other DNA
atggccttaccagtgaccgccttgctcctgccgctggccttgctgctccacgccgccaggccgctcgaggaggacctgaagaacgtgttcccacctgaggtggccgtgttcgagcctagcgaggccgagatcagccacacccagaaagccaccctcgtgtgcctggctaccggcttctaccccgaccatgtggaactgtcttggtgggtcaacggcaaagaggtgcacagcggcgtgtgtaccgacccccagccactgaaagaacagcccgccctgaacgacagccggtactgcctgagcagcagactgagagtgtccgccaccttctggcagaacccccggaaccacttcagatgccaggtgcagttctacggcctgagcgagaacgacgagtggacccaggacagagccaagcccgtgacccagatcgtgtctgccgaagcctggggcagagccgattgcggctttaccagcgagagctaccagcagggcgtgctgagcgccaccaacctgagcgtgatcggcttcagaatcctgctgctgaaagtggccggctttaacctgctgatgaccctgcggctgtggtccagcagggccaagcgatctggatctggagcaacaaacttctcactactcaaacaagcaggtgacgtggaggagaatcccgggcctactagcatggccttaccagtgaccgccttgctcctgccgctggccttgctgctccacgccgccaggccggacatccagttgacccagtcccccagctcactcagcgccagtgtgggggaccgggtgaccattacctgtaaagccagtcagagtgtggactatgagggggatagcttcctgaattggtatcagcagaagcctggcaaagccccaaagctgctgatctacgctgcatctaatctggagtcaggcgtgccttctaggttctccggtagtgggtctgggaccgatttcacattgaccatttcatccctccaacccgaggatttcgctacatattactgtcagcagtccaatgaggaccctctcacctttggccagggcaccaaagttgaaattaagagaggcggaggcggaagtggaggcggaggatctggcggcggaggctctgaagtccaacttgtggagtctggagggggcctggtgcagcccggcggctctctcagactgtcttgtgcggcaagcggctacaccttcacctcttactggatagaatgggtgaggcaggcacctggaaagggactggagtggattggagagattctgccaggagggggagatacaaattacaatgaaatcttcaaggggcgggccaccttttcagcggataccagcaagaatacagcttacctgcagatgaatagcctccgggcagaagataccgctgtttattattgcacgagacgggtgccaataagactggactattgggggcaagggactcttgtcaccgtcagttcaacgcgtatccagaaccctgatcctgccgtgtaccagctgcgggatagcaagagcagcgacaagagcgtgtgtctgttcaccgacttcgacagccagaccaacgtgtcccagagcaaggactccgacgtgtacatcaccgataagtgcgtgctggacatgcggagcatggacttcaagagcaactccgccgtggcctggtccaacaagtccgatttcgcctgcgccaacgccttcaacaacagcattatccccgaggacacattcttcccaagccccgagagcagctgcgacgtgaagctggtggaaaagagcttcgagacagacaccaacctgaacttccagatcctgtacgaggtgatcggcttcagaatcctgctgctgaaagtggccggctttaacctgctgatgaccctgcggctgtggtccagccgcgccaagagaagcggatctggcgtgaagcagaccctgaatttcgacctgctgaagctggctggcgacgtggaatccaacccaggcccttctagaggccatatgaccgagtacaagcccacggtgcgcctcgccacccgcgacgacgtccccagggccgtacgcaccctcgccgccgcgttcgccgactaccccgccacgcgccacaccgtcgatccggaccgccacatcgagcgggtcaccgagctgcaagaactcttcctcacgcgcgtcgggctcgacatcggcaaggtgtgggtcgcggacgacggcgccgcggtggcggtctggaccacgccggagagcgtcgaagcgggggcggtgttcgccgagatcggcccgcgcatggccgagttgagcggttcccggctggccgcgcagcaacagatggaaggcctcctggcgccgcaccggcccaaggagcccgcgtggttcctggccaccgtcggcgtctcgcccgaccaccagggcaagggtctgggcagcgccgtcgtgctccccggagtggaggcggccgagcgcgccggggtgcccgccttcctggagacctccgcgccccgcaacctccccttctacgagcggctcggcttcaccgtcaccgccgacgtcgaggtgcccgaaggaccgcgcacctggtgcatgacccgcaagcccggtgcctga

SEQ ID NO: 5814 - DNA, 2604 bp, synthetic construct
  source 1..2604: mol_type = other DNA
atggccttaccagtgaccgccttgctcctgccgctggccttgctgctccacgccgccaggccgctcgagatccagaaccctgatcctgccgtgtaccagctgcgggatagcaagagcagcgacaagagcgtgtgtctgttcaccgacttcgacagccagaccaacgtgtcccagagcaaggactccgacgtgtacatcaccgataagtgcgtgctggacatgcggagcatggacttcaagagcaactccgccgtggcctggtccaacaagtccgatttcgcctgcgccaacgccttcaacaacagcattatccccgaggacacattcttcccaagccccgagagcagctgcgacgtgaagctggtggaaaagagcttcgagacagacaccaacctgaacttccagatcctgtacgaggtgatcggcttcagaatcctgctgctgaaagtggccggctttaacctgctgatgaccctgcggctgtggtccagcagggccaagcgatctggatctggagcaacaaacttctcactactcaaacaagcaggtgacgtggaggagaatcccgggcctactagcatggccttaccagtgaccgccttgctcctgccgctggccttgctgctccacgccgccaggccggacatccagttgacccagtcccccagctcactcagcgccagtgtgggggaccgggtgaccattacctgtaaagccagtcagagtgtggactatgagggggatagcttcctgaattggtatcagcagaagcctggcaaagccccaaagctgctgatctacgctgcatctaatctggagtcaggcgtgccttctaggttctccggtagtgggtctgggaccgatttcacattgaccatttcatccctccaacccgaggatttcgctacatattactgtcagcagtccaatgaggaccctctcacctttggccagggcaccaaagttgaaattaagagaggcggaggcggaagtggaggcggaggatctggcggcggaggctctgaagtccaacttgtggagtctggagggggcctggtgcagcccggcggctctctcagactgtcttgtgcggcaagcggctacaccttcacctcttactggatagaatgggtgaggcaggcacctggaaagggactggagtggattggagagattctgccaggagggggagatacaaattacaatgaaatcttcaaggggcgggccaccttttcagcggataccagcaagaatacagcttacctgcagatgaatagcctccgggcagaagataccgctgtttattattgcacgagacgggtgccaataagactggactattgggggcaagggactcttgtcaccgtcagttcaacgcgtgaggacctgaagaacgtgttcccacctgaggtggccgtgttcgagcctagcgaggccgagatcagccacacccagaaagccaccctcgtgtgcctggctaccggcttctaccccgaccatgtggaactgtcttggtgggtcaacggcaaagaggtgcacagcggcgtgtgtaccgacccccagccactgaaagaacagcccgccctgaacgacagccggtactgcctgagcagcagactgagagtgtccgccaccttctggcagaacccccggaaccacttcagatgccaggtgcagttctacggcctgagcgagaacgacgagtggacccaggacagagccaagcccgtgacccagatcgtgtctgccgaagcctggggcagagccgattgcggctttaccagcgagagctaccagcagggcgtgctgagcgccaccaacctgagcgtgatcggcttcagaatcctgctgctgaaagtggccggctttaacctgctgatgaccctgcggctgtggtccagccgcgccaagagaagcggatctggcgtgaagcagaccctgaatttcgacctgctgaagctggctggcgacgtggaatccaacccaggcccttctagaggccatatgaccgagtacaagcccacggtgcgcctcgccacccgcgacgacgtccccagggccgtacgcaccctcgccgccgcgttcgccgactaccccgccacgcgccacaccgtcgatccggaccgccacatcgagcgggtcaccgagctgcaagaactcttcctcacgcgcgtcgggctcgacatcggcaaggtgtgggtcgcggacgacggcgccgcggtggcggtctggaccacgccggagagcgtcgaagcgggggcggtgttcgccgagatcggcccgcgcatggccgagttgagcggttcccggctggccgcgcagcaacagatggaaggcctcctggcgccgcaccggcccaaggagcccgcgtggttcctggccaccgtcggcgtctcgcccgaccaccagggcaagggtctgggcagcgccgtcgtgctccccggagtggaggcggccgagcgcgccggggtgcccgccttcctggagacctccgcgccccgcaacctccccttctacgagcggctcggcttcaccgtcaccgccgacgtcgaggtgcccgaaggaccgcgcacctggtgcatgacccgcaagcccggtgcctga

SEQ ID NO: 5815 - DNA, 2604 bp, synthetic construct; identical to SEQ ID NO: 5813
  source 1..2604: mol_type = other DNA

SEQ ID NO: 5816 - DNA, 2928 bp, synthetic construct
  source 1..2928: mol_type = other DNA
atggccttaccagtgaccgccttgctcctgccgctggccttgctgctccacgccgccaggccgctcgaggaggacctgaagaacgtgttcccacctgaggtggccgtgttcgagcctagcgaggccgagatcagccacacccagaaagccaccctcgtgtgcctggctaccggcttctaccccgaccatgtggaactgtcttggtgggtcaacggcaaagaggtgcacagcggcgtgtctaccgacccccagccactgaaagaacagcccgccctgaacgacagccggtactgcctgagcagcagactgagagtgtccgccaccttctggcagaacccccggaaccacttcagatgccaggtgcagttctacggcctgagcgagaacgacgagtggacccaggacagagccaagcccgtgacccagatcgtgtctgccgaagcctggggcagagccgatgatgtgattaagatccactggcaggaaaagaagtccaacaccatcctgggcagccaggaaggcaacaccatgaagaccaacgacacctacatgaagttcagctggctgaccgtgcccgagaagtccctggacaaagaacacagatgcatcgtgcggcacgaaaacaacaagaacggcgtggaccaggaaatcatcttcccacccatcaagaccgatgtgattacaatggaccccaaggacaactgctccaaggacgccaacgataccctgctgctccagctgaccaacaccagcgcctactacatgtacttgttgctgctgctgaagtccgtggtgtacttcgccatcatcacatgctgcctgctgatggctatggtcaagcggaaggacagccggggaagggccaagcgatctggatctggagcaacaaacttctcactactcaaacaagcaggtgacgtggaggagaatcccgggcctactagcatggccttaccagtgaccgccttgctcctgccgctggccttgctgctccacgccgccaggccggacatccagttgacccagtcccccagctcactcagcgccagtgtgggggaccgggtgaccattacctgtaaagccagtcagagtgtggactatgagggggatagcttcctgaattggtatcagcagaagcctggcaaagccccaaagctgctgatctacgctgcatctaatctggagtcaggcgtgccttctaggttctccggtagtgggtctgggaccgatttcacattgaccatttcatccctccaacccgaggatttcgctacatattactgtcagcagtccaatgaggaccctctcacctttggccagggcaccaaagttgaaattaagagaggcggaggcggaagtggaggcggaggatctggcggcggaggctctgaagtccaacttgtggagtctggagggggcctggtgcagcccggcggctctctcagactgtcttgtgcggcaagcggctacaccttcacctcttactggatagaatgggtgaggcaggcacctggaaagggactggagtggattggagagattctgccaggagggggagatacaaattacaatgaaatcttcaaggggcgggccaccttttcagcggataccagcaagaatacagcttacctgcagatgaatagcctccgggcagaagataccgctgtttattattgcacgagacgggtgccaataagactggactattgggggcaagggactcttgtcaccgtcagttcaacgcgtatccagaaccctgatcctgccgtgtaccagctgcgggatagcaagagcagcgacaagagcgtgtgtctgttcaccgacttcgacagccagaccaacgtgtcccagagcaaggactccgacgtgtacatcaccgataagaccgtgctggacatgcggagcatggacttcaagagcaactccgccgtggcctggtccaacaagtccgatttcgcctgcgccaacgccttcaacaacagcattatccccgaggacacattcttcccaagccccgagagcagcgactccaccgaccacgtgaagcccaaagagacagagaacaccaagcagcccagcaagagctgccacaagcccaaggccatcgtgcacaccgagaaagtgaacatgatgagcctgaccgtgctgggcctgcggatgctgttcgccaaaaccgtggccgtgaacttcctgctgaccgccaagctgttcttcctcctcaccgcccgcgccaagagaagcggatctggcgtgaagcagaccctgaatttcgacctgctgaagctggctggcgacgtggaatccaacccaggcccttctagaggccatatgaccgagtacaagcccacggtgcgcctcgccacccgcgacgacgtccccagggccgtacgcaccctcgccgccgcgttcgccgactaccccgccacgcgccacaccgtcgatccggaccgccacatcgagcgggtcaccgagctgcaagaactcttcctcacgcgcgtcgggctcgacatcggcaaggtgtgggtcgcggacgacggcgccgcggtggcggtctggaccacgccggagagcgtcgaagcgggggcggtgttcgccgagatcggcccgcgcatggccgagttgagcggttcccggctggccgcgcagcaacagatggaaggcctcctggcgccgcaccggcccaaggagcccgcgtggttcctggccaccgtcggcgtctcgcccgaccaccagggcaagggtctgggcagcgccgtcgtgctccccggagtggaggcggccgagcgcgccggggtgcccgccttcctggagacctccgcgccccgcaacctccccttctacgagcggctcggcttcaccgtcaccgccgacgtcgaggtgcccgaaggaccgcgcacctggtgcatgacccgcaagcccggtgcctga

SEQ ID NO: 5817 - DNA, 2928 bp, synthetic construct
  source 1..2928: mol_type = other DNA
atggccttaccagtgaccgccttgctcctgccgctggccttgctgctccacgccgccaggccgctcgagatccagaaccctgatcctgccgtgtaccagctgcgggatagcaagagcagcgacaagagcgtgtgtctgttcaccgacttcgacagccagaccaacgtgtcccagagcaaggactccgacgtgtacatcaccgataagaccgtgctggacatgcggagcatggacttcaagagcaactccgccgtggcctggtccaacaagtccgatttcgcctgcgccaacgccttcaacaacagcattatccccgaggacacattcttcccaagccccgagagcagcgactccaccgaccacgtgaagcccaaagagacagagaacaccaagcagcccagcaagagctgccacaagcccaaggccatcgtgcacaccgagaaagtgaacatgatgagcctgaccgtgctgggcctgcggatgctgttcgccaaaaccgtggccgtgaacttcctgctgaccgccaagctgttcttcctcctcaccgccagggccaagcgatctggatctggagcaacaaacttctcactactcaaacaagcaggtgacgtggaggagaatcccgggcctactagcatggccttaccagtgaccgccttgctcctgccgctggccttgctgctccacgccgccaggccggacatccagttgacccagtcccccagctcactcagcgccagtgtgggggaccgggtgaccattacctgtaaagccagtcagagtgtggactatgagggggatagcttcctgaattggtatcagcagaagcctggcaaagccccaaagctgctgatctacgctgcatctaatctggagtcaggcgtgccttctaggttctccggtagtgggtctgggaccgatttcacattgaccatttcatccctccaacccgaggatttcgctacatattactgtcagcagtccaatgaggaccctctcacctttggccagggcaccaaagttgaaattaagagaggcggaggcggaagtggaggcggaggatctggcggcggaggctctgaagtccaacttgtggagtctggagggggcctggtgcagcccggcggctctctcagactgtcttgtgcggcaagcggctacaccttcacctcttactggatagaatgggtgaggcaggcacctggaaagggactggagtggattggagagattctgccaggagggggagatacaaattacaatgaaatcttcaaggggcgggccaccttttcagcggataccagcaagaatacagcttacctgcagatgaatagcctccgggcagaagataccgctgtttattattgcacgagacgggtgccaataagactggactattgggggcaagggactcttgtcaccgtcagttcaacgcgtgaggacctgaagaacgtgttcccacctgaggtggccgtgttcgagcctagcgaggccgagatcagccacacccagaaagccaccctcgtgtgcctggctaccggcttctaccccgaccatgtggaactgtcttggtgggtcaacggcaaagaggtgcacagcggcgtgtctaccgacccccagccactgaaagaacagcccgccctgaacgacagccggtactgcctgagcagcagactgagagtgtccgccaccttctggcagaacccccggaaccacttcagatgccaggtgcagttctacggcctgagcgagaacgacgagtggacccaggacagagccaagcccgtgacccagatcgtgtctgccgaagcctggggcagagccgatgatgtgattaagatccactggcaggaaaagaagtccaacaccatcctgggcagccaggaaggcaacaccatgaagaccaacgacacctacatgaagttcagctggctgaccgtgcccgagaagtccctggacaaagaacacagatgcatcgtgcggcacgaaaacaacaagaacggcgtggaccaggaaatcatcttcccacccatcaagaccgatgtgattacaatggaccccaaggacaactgctccaaggacgccaacgataccctgctgctccagctgaccaacaccagcgcctactacatgtacttgttgctgctgctgaagtccgtggtgtacttcgccatcatcacatgctgcctgctgatggctatggtcaagcggaaggacagccggggacgcgccaagagaagcggatctggcgtgaagcagaccctgaatttcgacctgctgaagctggctggcgacgtggaatccaacccaggcccttctagaggccatatgaccgagtacaagcccacggtgcgcctcgccacccgcgacgacgtccccagggccgtacgcaccctcgccgccgcgttcgccgactaccccgccacgcgccacaccgtcgatccggaccgccacatcgagcgggtcaccgagctgcaagaactcttcctcacgcgcgtcgggctcgacatcggcaaggtgtgggtcgcggacgacggcgccgcggtggcggtctggaccacgccggagagcgtcgaagcgggggcggtgttcgccgagatcggcccgcgcatggccgagttgagcggttcccggctggccgcgcagcaacagatggaaggcctcctggcgccgcaccggcccaaggagcccgcgtggttcctggccaccgtcggcgtctcgcccgaccaccagggcaagggtctgggcagcgccgtcgtgctccccggagtggaggcggccgagcgcgccggggtgcccgccttcctggagacctccgcgccccgcaacctccccttctacgagcggctcggcttcaccgtcaccgccgacgtcgaggtgcccgaaggaccgcgcacctggtgcatgacccgcaagcccggtgcctga

SEQ ID NO: 5818 - DNA, 2922 bp, synthetic construct
  source 1..2922: mol_type = other DNA
atggccttaccagtgaccgccttgctcctgccgctggccttgctgctccacgccgccaggccgctcgaggaggacctgaagaacgtgttcccacctgaggtggccgtgttcgagcctagcgaggccgagatcagccacacccagaaagccaccctcgtgtgcctggctaccggcttctaccccgaccatgtggaactgtcttggtgggtcaacggcaaagaggtgcacagcggcgtgtgtaccgacccccagccactgaaagaacagcccgccctgaacgacagccggtactgcctgagcagcagactgagagtgtccgccaccttctggcagaacccccggaaccacttcagatgccaggtgcagttctacggcctgagcgagaacgacgagtggacccaggacagagccaagcccgtgacccagatcgtgtctgccgaagcctggggcagagccgatgatgtgattaagatccactggcaggaaaagaagtccaacaccatcctgggcagccaggaaggcaacaccatgaagaccaacgacacctacatgaagttcagctggctgaccgtgcccgagaagtccctggacaaagaacacagatgcatcgtgcggcacgaaaacaacaagaacggcgtggaccaggaaatcatcttcccacccatcaagaccgatgtgattacaatggaccccaaggacaactgctccaaggacgccaacgataccctgctgctccagctgaccaacaccagcgcctactacatgtacttgttgctgctgctgaagtccgtggtgtacttcgccatcatcacatgctgcctgctgcggagaaccgccttctgctgcaacggcgagaagtctagggccaagcgatctggatctggagcaacaaacttctcactactcaaacaagcaggtgacgtggaggagaatcccgggcctactagcatggccttaccagtgaccgccttgctcctgccgctggccttgctgctccacgccgccaggccggacatccagttgacccagtcccccagctcactcagcgccagtgtgggggaccgggtgaccattacctgtaaagccagtcagagtgtggactatgagggggatagcttcctgaattggtatcagcagaagcctggcaaagccccaaagctgctgatctacgctgcatctaatctggagtcaggcgtgccttctaggttctccggtagtgggtctgggaccgatttcacattgaccatttcatccctccaacccgaggatttcgctacatattactgtcagcagtccaatgaggaccctctcacctttggccagggcaccaaagttgaaattaagagaggcggaggcggaagtggaggcggaggatctggcggcggaggctctgaagtccaacttgtggagtctggagggggcctggtgcagcccggcggctctctcagactgtcttgtgcggcaagcggctacaccttcacctcttactggatagaatgggtgaggcaggcacctggaaagggactggagtggattggagagattctgccaggagggggagatacaaattacaatgaaatcttcaaggggcgggccaccttttcagcggataccagcaagaatacagcttacctgcagatgaatagcctccgggcagaagataccgctgtttattattgcacgagacgggtgccaataagactggactattgggggcaagggactcttgtcaccgtcagttcaacgcgtatccagaaccctgatcctgccgtgtaccagctgcgggatagcaagagcagcgacaagagcgtgtgtctgttcaccgacttcgacagccagaccaacgtgtcccagagcaaggactccgacgtgtacatcaccgataagtgcgtgctggacatgcggagcatggacttcaagagcaactccgccgtggcctggtccaacaagtccgatttcgcctgcgccaacgccttcaacaacagcattatccccgaggacacattcttcccaagccccgagagcagcgactccaccgaccacgtgaagcccaaagagacagagaacaccaagcagcccagcaagagctgccacaagcccaaggccatcgtgcacaccgagaaagtgaacatgatgagcctgaccgtgctgggcctgcggatgctgttcgccaaaaccgtggccgtgaacttcctgctgaccgccaagctgttcttcctccgcgccaagagaagcggatctggcgtgaagcagaccctgaatttcgacctgctgaagctggctggcgacgtggaatccaacccaggcccttctagaggccatatgaccgagtacaagcccacggtgcgcctcgccacccgcgacgacgtccccagggccgtacgcaccctcgccgccgcgttcgccgactaccccgccacgcgccacaccgtcgatccggaccgccacatcgagcgggtcaccgagctgcaagaactcttcctcacgcgcgtcgggctcgacatcggcaaggtgtgggtcgcggacgacggcgccgcggtggcggtctggaccacgccggagagcgtcgaagcgggggcggtgttcgccgagatcggcccgcgcatggccgagttgagcggttcccggctggccgcgcagcaacagatggaaggcctcctggcgccgcaccggcccaaggagcccgcgtggttcctggccaccgtcggcgtctcgcccgaccaccagggcaagggtctgggcagcgccgtcgtgctccccggagtggaggcggccgagcgcgccggggtgcccgccttcctggagacctccgcgccccgcaacctccccttctacgagcggctcggcttcaccgtcaccgccgacgtcgaggtgcccgaaggaccgcgcacctggtgcatgacccgcaagcccggtgcctga

SEQ ID NO: 5819 - DNA, 2922 bp, synthetic construct
  source 1..2922: mol_type = other DNA
atggccttaccagtgaccgccttgctcctgccgctggccttgctgctccacgccgccaggccgctcgagatccagaaccctgatcctgccgtgtaccagctgcgggatagcaagagcagcgacaagagcgtgtgtctgttcaccgacttcgacagccagaccaacgtgtcccagagcaaggactccgacgtgtacatcaccgataagtgcgtgctggacatgcggagcatggacttcaagagcaactccgccgtggcctggtccaacaagtccgatttcgcctgcgccaacgccttcaacaacagcattatccccgaggacacattcttcccaagccccgagagcagcgactccaccgaccacgtgaagcccaaagagacagagaacaccaagcagcccagcaagagctgccacaagcccaaggccatcgtgcacaccgagaaagtgaacatgatgagcctgaccgtgctgggcctgcggatgctgttcgccaaaaccgtggccgtgaacttcctgctgaccgccaagctgttcttcctcagggccaagcgatctggatctggagcaacaaacttctcactactcaaacaagcaggtgacgtggaggagaatcccgggcctactagcatggccttaccagtgaccgccttgctcctgccgctggccttgctgctccacgccgccaggccggacatccagttgacccagtcccccagctcactcagcgccagtgtgggggaccgggtgaccattacctgtaaagccagtcagagtgtggactatgagggggatagcttcctgaattggtatcagcagaagcctggcaaagccccaaagctgctgatctacgctgcatctaatctggagtcaggcgtgccttctaggttctccggtagtgggtctgggaccgatttcacattgaccatttcatccctccaacccgaggatttcgctacatattactgtcagcagtccaatgaggaccctctcacctttggccagggcaccaaagttgaaattaagagaggcggaggcggaagtggaggcggaggatctggcggcggaggctctgaagtccaacttgtggagtctggagggggcctggtgcagcccggcggctctctcagactgtcttgtgcggcaagcggctacaccttcacctcttactggatagaatgggtgaggcaggcacctggaaagggactggagtggattggagagattctgccaggagggggagatacaaattacaatgaaatcttcaaggggcgggccaccttttcagcggataccagcaagaatacagcttacctgcagatgaatagcctccgggcagaagataccgctgtttattattgcacgagacgggtgccaataagactggactattgggggcaagggactcttgtcaccgtcagttcaacgcgtgaggacctgaagaacgtgttcccacctgaggtggccgtgttcgagcctagcgaggccgagatcagccacacccagaaagccaccctcgtgtgcctggctaccggcttctaccccgaccatgtggaactgtcttggtgggtcaacggcaaagaggtgcacagcggcgtgtgtaccgacccccagccactgaaagaacagcccgccctgaacgacagccggtactgcctgagcagcagactgagagtgtccgccaccttctggcagaacccccggaaccacttcagatgccaggtgcagttctacggcctgagcgagaacgacgagtggacccaggacagagccaagcccgtgacccagatcgtgtctgccgaagcctggggcagagccgatgatgtgattaagatccactggcaggaaaagaagtccaacaccatcctgggcagccaggaaggcaacaccatgaagaccaacgacacctacatgaagttcagctggctgaccgtgcccgagaagtccctggacaaagaacacagatgcatcgtgcggcacgaaaacaacaagaacggcgtggaccaggaaatcatcttcccacccatcaagaccgatgtgattacaatggaccccaaggacaactgctccaaggacgccaacgataccctgctgctccagctgaccaacaccagcgcctactacatgtacttgttgctgctgctgaagtccgtggtgtacttcgccatcatcacatgctgcctgctgcggagaaccgccttctgctgcaacggcgagaagtctcgcgccaagagaagcggatctggcgtgaagcagaccctgaatttcgacctgctgaagctggctggcgacgtggaatccaacccaggcccttctagaggccatatgaccgagtacaagcccacggtgcgcctcgccacccgcgacgacgtccccagggccgtacgcaccctcgccgccgcgttcgccgactaccccgccacgcgccacaccgtcgatccggaccgccacatcgagcgggtcaccgagctgcaagaactcttcctcacgcgcgtcgggctcgacatcggcaaggtgtgggtcgcggacgacggcgccgcggtggcggtctggaccacgccggagagcgtcgaagcgggggcggtgttcgccgagatcggcccgcgcatggccgagttgagcggttcccggctggccgcgcagcaacagatggaaggcctcctggcgccgcaccggcccaaggagcccgcgtggttcctggccaccgtcggcgtctcgcccgaccaccagggcaagggtctgggcagcgccgtcgtgctccccggagtggaggcggccgagcgcgccggggtgcccgccttcctggagacctccgcgccccgcaacctccccttctacgagcggctcggcttcaccgtcaccgccgacgtcgaggtgcccgaaggaccgcgcacctggtgcatgacccgcaagcccggtgcctga

SEQ ID NO: 5820 - DNA, 2922 bp, synthetic construct
  source 1..2922: mol_type = other DNA
atggccttaccagtgaccgccttgctcctgccgctggccttgctgctccacgccgccaggccgctcgaggaggacctgaagaacgtgttcccacctgaggtggccgtgttcgagcctagcgaggccgagatcagccacacccagaaagccaccctcgtgtgcctggctaccggcttctaccccgaccatgtggaactgtcttggtgggtcaacggcaaagaggtgcacagcggcgtgtctaccgacccccagccactgaaagaacagcccgccctgaacgacagccggtactgcctgagcagcagactgagagtgtccgccaccttctggcagaacccccggaaccacttcagatgccaggtgcagttctacggcctgagcgagaacgacgagtggacccaggacagagccaagcccgtgacccagatcgtgtctgccgaagcctggggcagagccgatgatgtgattaagatccactggcaggaaaagaagtccaacaccatcctgggcagccaggaaggcaacaccatgaagaccaacgacacctacatgaagttcagctggctgaccgtgcccgagaagtccctggacaaagaacacagatgcatcgtgcggcacgaaaacaacaagaacggcgtggaccaggaaatcatcttcccacccatcaagaccgatgtgattacaatggaccccaaggacaactgctccaaggacgccaacgataccctgctgctccagctgaccaacaccagcgcctactacatgtacttgttgctgctgctgaagtccgtggtgtacttcgccatcatcacatgctgcctgctgcggagaaccgccttctgctgcaacggcgagaagtctagggccaagcgatctggatctggagcaacaaacttctcactactcaaacaagcaggtgacgtggaggagaatcccgggcctactagcatggccttaccagtgaccgccttgctcctgccgctggccttgctgctccacgccgccaggccggacatccagttgacccagtcccccagctcactcagcgccagtgtgggggaccgggtgaccattacctgtaaagccagtcagagtgtggactatgagggggatagcttcctgaattggtatcagcagaagcctggcaaagccccaaagctgctgatctacgctgcatctaatctggagtcaggcgtgccttctaggttctccggtagtgggtctgggaccgatttcacattgaccatttcatccctccaacccgaggatttcgctacatattactgtcagcagtccaatgaggaccctctcacctttggccagggcaccaaagttgaaattaagagaggcggaggcggaagtggaggcggaggatctggcggcggaggctctgaagtccaacttgtggagtctggagggggcctggtgcagcccggcggctctctcagactgtcttgtgcggcaagcggctacaccttcacctcttactggatagaatgggtgaggcaggcacctggaaagggactggagtggattggagagattctgccaggagggggagatacaaattacaatgaaatcttcaaggggcgggccaccttttcagcggataccagcaagaatacagcttacctgcagatgaatagcctccgggcagaagataccgctgtttattattgcacgagacgggtgccaataagactggactattgggggcaagggactcttgtcaccgtcagttcaacgcgtatccagaaccctgatcctgccgtgtaccagctgcgggatagcaagagcagcgacaagagcgtgtgtctgttcaccgacttcgacagccagaccaacgtgtcccagagcaaggactccgacgtgtacatcaccgataagaccgtgctggacatgcggagcatggacttcaagagcaactccgccgtggcctggtccaacaagtccgatttcgcctgcgccaacgccttcaacaacagcattatccccgaggacacattcttcccaagccccgagagcagcgactccaccgaccacgtgaagcccaaagagacagagaacaccaagcagcccagcaagagctgccacaagcccaaggccatcgtgcacaccgagaaagtgaacatgatgagcctgaccgtgctgggcctgcggatgctgttcgccaaaaccgtggccgtgaacttcctgctgaccgccaagctgttcttcctccgcgccaagagaagcggatctggcgtgaagcagaccctgaatttcgacctgctgaagctggctggcgacgtggaatccaacccaggcccttctagaggccatatgaccgagtacaagcccacggtgcgcctcgccacccgcgacgacgtccccagggccgtacgcaccctcgccgccgcgttcgccgactaccccgccacgcgccacaccgtcgatccggaccgccacatcgagcgggtcaccgagctgcaagaactcttcctcacgcgcgtcgggctcgacatcggcaaggtgtgggtcgcggacgacggcgccgcggtggcggtctggaccacgccggagagcgtcgaagcgggggcggtgttcgccgagatcggcccgcgcatggccgagttgagcggttcccggctggccgcgcagcaacagatggaaggcctcctggcgccgcaccggcccaaggagcccgcgtggttcctggccaccgtcggcgtctcgcccgaccaccagggcaagggtctgggcagcgccgtcgtgctccccggagtggaggcggccgagcgcgccggggtgcccgccttcctggagacctccgcgccccgcaacctccccttctacgagcggctcggcttcaccgtcaccgccgacgtcgaggtgcccgaaggaccgcgcacctggtgcatgacccgcaagcccggtgcctga

SEQ ID NO: 5821 - DNA, 2922 bp, synthetic construct
  source 1..2922: mol_type = other DNA
atggccttaccagtgaccgccttgctcctgccgctggccttgctgctccacgccgccaggccgctcgagatccagaaccctgatcctgccgtgtaccagctgcgggatagcaagagcagcgacaagagcgtgtgtctgttcaccgacttcgacagccagaccaacgtgtcccagagcaaggactccgacgtgtacatcaccgataagaccgtgctggacatgcggagcatggacttcaagagcaactccgccgtggcctggtccaacaagtccgatttcgcctgcgccaacgccttcaacaacagcattatccccgaggacacattcttcccaagccccgagagcagcgactccaccgaccacgtgaagcccaaagagacagagaacaccaagcagcccagcaagagctgccacaagcccaaggccatcgtgcacaccgagaaagtgaacatgatgagcctgaccgtgctgggcctgcggatgctgttcgccaaaaccgtggccgtgaacttcctgctgaccgccaagctgttcttcctcagggccaagcgatctggatctggagcaacaaacttctcactactcaaacaagcaggtgacgtggaggagaatcccgggcctactagcatggccttaccagtgaccgccttgctcctgccgctggccttgctgctccacgccgccaggccggacatccagttgacccagtcccccagctcactcagcgccagtgtgggggaccgggtgaccattacctgtaaagccagtcagagtgtggactatgagggggatagcttcctgaattggtatcagcagaagcctggcaaagccccaaagctgctgatctacgctgcatctaatctggagtcaggcgtgccttctaggttctccggtagtgggtctgggaccgatttcacattgaccatttcatccctccaacccgaggatttcgctacatattactgtcagcagtccaatgaggaccctctcacctttggccagggcaccaaagttgaaattaagagaggcggaggcggaagtggaggcggaggatctggcggcggaggctctgaagtccaacttgtggagtctggagggggcctggtgcagcccggcggctctctcagactgtcttgtgcggcaagcggctacaccttcacctcttactggatagaatgggtgaggcaggcacctggaaagggactggagtggattggagagattctgccaggagggggagatacaaattacaatgaaatcttcaaggggcgggccaccttttcagcggataccagcaagaatacagcttacctgcagatgaatagcctccgggcagaagataccgctgtttattattgcacgagacgggtgccaataagactggactattgggggcaagggactcttgtcaccgtcagttcaacgcgtgaggacctgaagaacgtgttcccacctgaggtggccgtgttcgagcctagcgaggccgagatcagccacacccagaaagccaccctcgtgtgcctggctaccggcttctaccccgaccatgtggaactgtcttggtgggtcaacggcaaagaggtgcacagcggcgtgtctaccgacccccagccactgaaagaacagcccgccctgaacgacagccggtactgcctgagcagcagactgagagtgtccgccaccttctggcagaacccccggaaccacttcagatgccaggtgcagttctacggcctgagcgagaacgacgagtggacccaggacagagccaagcccgtgacccagatcgtgtctgccgaagcctggggcagagccgatgatgtgattaagatccactggcaggaaaagaagtccaacaccatcctgggcagccaggaaggcaacaccatgaagaccaacgacacctacatgaagttcagctggctgaccgtgcccgagaagtccctggacaaagaacacagatgcatcgtgcggcacgaaaacaacaagaacggcgtggaccaggaaatcatcttcccacccatcaagaccgatgtgattacaatggaccccaaggacaactgctccaaggacgccaacgataccctgctgctccagctgaccaacaccagcgcctactacatgtacttgttgctgctgctgaagtccgtggtgtacttcgccatcatcacatgctgcctgctgcggagaaccgccttctgctgcaacggcgagaagtctcgcgccaagagaagcggatctggcgtgaagcagaccctgaatttcgacctgctgaagctggctggcgacgtggaatccaacccaggcccttctagaggccatatgaccgagtacaagcccacggtgcgcctcgccacccgcgacgacgtccccagggccgtacgcaccctcgccgccgcgttcgccgactaccccgccacgcgccacaccgtcgatccggaccgccacatcgagcgggtcaccgagctgcaagaactcttcctcacgcgcgtcgggctcgacatcggcaaggtgtgggtcgcggacgacggcgccgcggtggcggtctggaccacgccggagagcgtcgaagcgggggcggtgttcgccgagatcggcccgcgcatggccgagttgagcggttcccggctggccgcgcagcaacagatggaaggcctcctggcgccgcaccggcccaaggagcccgcgtggttcctggccaccgtcggcgtctcgcccgaccaccagggcaagggtctgggcagcgccgtcgtgctccccggagtggaggcggccgagcgcgccggggtgcccgccttcctggagacctccgcgccccgcaacctccccttctacgagcggctcggcttcaccgtcaccgccgacgtcgaggtgcccgaaggaccgcgcacctggtgcatgacccgcaagcccggtgcctga

SEQ ID NO: 5822 - DNA, 2616 bp, synthetic construct
  source 1..2616: mol_type = other DNA
atggccttaccagtgaccgccttgctcctgccgctggccttgctgctccacgccgccaggccgctcgaggaggacctgaagaacgtgttcccacctgaggtggccgtgttcgagcctagcaaggccgagatcgcccacacccagaaagccaccctcgtgtgcctggctaccggcttctaccccgaccatgtggaactgtcttggtgggtcaacggcaaagaggtgcacagcggcgtgtgtaccgacccccagccactgaaagaacagcccgccctgaacgacagccggtactgcctgagcagcagactgagagtgtccgccaccttctggcagaacccccggaaccacttcagatgccaggtgcagttctacggcctgagcgagaacgacgagtggacccaggacagagccaagcccgtgacccagatcgtgtctgccgaagcctggggcagagccgattgcggcatcaccagcgccagctaccaccagggcgtgctgagcgccaccatcctgtacgagatcctgctgggcaaggccaccctgtacgccgtgctggtgtctgccctggtgctgatggctatggtcaagcggaaggacagccggggaagggccaagcgatctggatctggagcaacaaacttctcactactcaaacaagcaggtgacgtggaggagaatcccgggcctactagcatggccttaccagtgaccgccttgctcctgccgctggccttgctgctccacgccgccaggccggacatccagttgacccagtcccccagctcactcagcgccagtgtgggggaccgggtgaccattacctgtaaagccagtcagagtgtggactatgagggggatagcttcctgaattggtatcagcagaagcctggcaaagccccaaagctgctgatctacgctgcatctaatctggagtcaggcgtgccttctaggttctccggtagtgggtctgggaccgatttcacattgaccatttcatccctccaacccgaggatttcgctacatattactgtcagcagtccaatgaggaccctctcacctttggccagggcaccaaagttgaaattaagagaggcggaggcggaagtggaggcggaggatctggcggcggaggctctgaagtccaacttgtggagtctggagggggcctggtgcagcccggcggctctctcagactgtcttgtgcggcaagcggctacaccttcacctcttactggatagaatgggtgaggcaggcacctggaaagggactggagtggattggagagattctgccaggagggggagatacaaattacaatgaaatcttcaaggggcgggccaccttttcagcggataccagcaagaatacagcttacctgcagatgaatagcctccgggcagaagataccgctgtttattattgcacgagacgggtgccaataagactggactattgggggcaagggactcttgtcaccgtcagttcaacgcgtatccagaaccctgatcctgccgtgtaccagctgcgggatagcaagagcagcgacaagagcgtgtgtctgttcaccgacttcgacagccagaccaacgtgtcccagagcaaggactccgacgtgtacatcaccgataagtgcgtgctggacatgcggagcatggacttcaagagcaactccgccgtggcctggtccaacaagtccgatttcgcctgcgccaacgccttcaacaacagcattatccccgaggacacattcttcccaagcagcgacgtgccctgcgacgtgaagctggtggaaaagagcttcgagacagacaccaacctgaacttccagaacctgagcgtgatcggcttcagaatcctgctgctgaaagtggccggctttaacctgctgatgaccctgcggctgtggtccagccgcgccaagagaagcggatctggcgtgaagcagaccctgaatttcgacctgctgaagctggctggcgacgtggaatccaacccaggcccttctagaggccatatgaccgagtacaagcccacggtgcgcctcgccacccgcgacgacgtccccagggccgtacgcaccctcgccgccgcgttcgccgactaccccgccacgcgccacaccgtcgatccggaccgccacatcgagcgggtcaccgagctgcaagaactcttcctcacgcgcgtcgggctcgacatcggcaaggtgtgggtcgcggacgacggcgccgcggtggcggtctggaccacgccggagagcgtcgaagcgggggcggtgttcgccgagatcggcccgcgcatggccgagttgagcggttcccggctggccgcgcagcaacagatggaaggcctcctggcgccgcaccggcccaaggagcccgcgtggttcctggccaccgtcggcgtctcgcccgaccaccagggcaagggtctgggcagcgccgtcgtgctccccggagtggaggcggccgagcgcgccggggtgcccgccttcctggagacctccgcgccccgcaacctccccttctacgagcggctcggcttcaccgtcaccgccgacgtcgaggtgcccgaaggaccgcgcacctggtgcatgacccgcaagcccggtgcctga

SEQ ID NO: 5823 - DNA, 2616 bp, synthetic construct
  source 1..2616: mol_type = other DNA
atggccttaccagtgaccgccttgctcctgccgctggccttgctgctccacgccgccaggccgctcgagatccagaaccctgatcctgccgtgtaccagctgcgggatagcaagagcagcgacaagagcgtgtgtctgttcaccgacttcgacagccagaccaacgtgtcccagagcaaggactccgacgtgtacatcaccgataagtgcgtgctggacatgcggagcatggacttcaagagcaactccgccgtggcctggtccaacaagtccgatttcgcctgcgccaacgccttcaacaacagcattatccccgaggacacattcttcccaagcagcgacgtgccctgcgacgtgaagctggtggaaaagagcttcgagacagacaccaacctgaacttccagaacctgagcgtgatcggcttcagaatcctgctgctgaaagtggccggctttaacctgctgatgaccctgcggctgtggtccagcagggccaagcgatctggatctggagcaacaaacttctcactactcaaacaagcaggtgacgtggaggagaatcccgggcctactagcatggccttaccagtgaccgccttgctcctgccgctggccttgctgctccacgccgccaggccggacatccagttgacccagtcccccagctcactcagcgccagtgtgggggaccgggtgaccattacctgtaaagccagtcagagtgtggactatgagggggatagcttcctgaattggtatcagcagaagcctggcaaagccccaaagctgctgatctacgctgcatctaatctggagtcaggcgtgccttctaggttctccggtagtgggtctgggaccgatttcacattgaccatttcatccctccaacccgaggatttcgctacatattactgtcagcagtccaatgaggaccctctcacctttggccagggcaccaaagttgaaattaagagaggcggaggcggaagtggaggcggaggatctggcggcggaggctctgaagtccaacttgtggagtctggagggggcctggtgcagcccggcggctctctcagactgtcttgtgcggcaagcggctacaccttcacctcttactggatagaatgggtgaggcaggcacctggaaagggactggagtggattggagagattctgccaggagggggagatacaaattacaatgaaatcttcaaggggcgggccaccttttcagcggataccagcaagaatacagcttacctgcagatgaatagcctccgggcagaagataccgctgtttattattgcacgagacgggtgccaataagactggactattgggggcaagggactcttgtcaccgtcagttcaacgcgtgaggacctgaagaacgtgttcccacctgaggtggccgtgttcgagcctagcaaggccgagatcgcccacacccagaaagccaccctcgtgtgcctggctaccggcttctaccccgaccatgtggaactgtcttggtgggtcaacggcaaagaggtgcacagcggcgtgtgtaccgacccccagccactgaaagaacagcccgccctgaacgacagccggtactgcctgagcagcagactgagagtgtccgccaccttctggcagaacccccggaaccacttcagatgccaggtgcagttctacggcctgagcgagaacgacgagtggacccaggacagagccaagcccgtgacccagatcgtgtctgccgaagcctggggcagagccgattgcggcatcaccagcgccagctaccaccagggcgtgctgagcgccaccatcctgtacgagatcctgctgggcaaggccaccctgtacgccgtgctggtgtctgccctggtgctgatggctatggtcaagcggaaggacagccggggacgcgccaagagaagcggatctggcgtgaagcagaccctgaatttcgacctgctgaagctggctggcgacgtggaatccaacccaggcccttctagaggccatatgaccgagtacaagcccacggtgcgcctcgccacccgcgacgacgtccccagggccgtacgcaccctcgccgccgcgttcgccgactaccccgccacgcgccacaccgtcgatccggaccgccacatcgagcgggtcaccgagctgcaagaactcttcctcacgcgcgtcgggctcgacatcggcaaggtgtgggtcgcggacgacggcgccgcggtggcggtctggaccacgccggagagcgtcgaagcgggggcggtgttcgccgagatcggcccgcgcatggccgagttgagcggttcccggctggccgcgcagcaacagatggaaggcctcctggcgccgcaccggcccaaggagcccgcgtggttcctggccaccgtcggcgtctcgcccgaccaccagggcaagggtctgggcagcgccgtcgtgctccccggagtggaggcggccgagcgcgccggggtgcccgccttcctggagacctccgcgccccgcaacctccccttctacgagcggctcggcttcaccgtcaccgccgacgtcgaggtgcccgaaggaccgcgcacctggtgcatgacccgcaagcccggtgcctga

SEQ ID NO: 5824 - DNA, 2295 bp, synthetic construct
  source 1..2295: mol_type = other DNA
atggccttaccagtgaccgccttgctcctgccgctggccttgctgctccacgccgccaggccgctcgagcagagttttgggttgttggaccctaaattgtgctatctgttggacggaatcctgttcatttacggagtgatcctgaccgcattgttcctgcgggttaagttttccagatccgcagacgcacccgcttaccaacaagggcagaaccaactctacaatgaacttaatttggggcggagggaagagtacgacgttctggacaaaaggaggggacgagatcccgagatgggcggaaagcctcagcgaaggaagaatccgcaagaggggctttataacgaactccagaaagataaaatggcagaagcctatagtgagattgggatgaagggagaaaggaggaggggtaaaggtcacgatgggttgtaccaaggattgagcacagccactaaagatacctatgatgcgctccacatgcaggccctgccgccaagaagggccaagcgatctggatctggagcaacaaacttctcactactcaaacaagcaggtgacgtggaggagaatcccgggcctactagcatggccttaccagtgaccgccttgctcctgccgctggccttgctgctccacgccgccaggccggacatccagttgacccagtcccccagctcactcagcgccagtgtgggggaccgggtgaccattacctgtaaagccagtcagagtgtggactatgagggggatagcttcctgaattggtatcagcagaagcctggcaaagccccaaagctgctgatctacgctgcatctaatctggagtcaggcgtgccttctaggttctccggtagtgggtctgggaccgatttcacattgaccatttcatccctccaacccgaggatttcgctacatattactgtcagcagtccaatgaggaccctctcacctttggccagggcaccaaagttgaaattaagagaggcggaggcggaagtggaggcggaggatctggcggcggaggctctgaagtccaacttgtggagtctggagggggcctggtgcagcccggcggctctctcagactgtcttgtgcggcaagcggctacaccttcacctcttactggatagaatgggtgaggcaggcacctggaaagggactggagtggattggagagattctgccaggagggggagatacaaattacaatgaaatcttcaaggggcgggccaccttttcagcggataccagcaagaatacagcttacctgcagatgaatagcctccgggcagaagataccgctgtttattattgcacgagacgggtgccaataagactggactattgggggcaagggactcttgtcaccgtcagttcaacgcgtgagctgggagagcctcagctgtgctatatcctggacgccatcctgtttctgtacggcatcgtgctgaccctgctgtactgccggctgaagatccaagtgcggaaggccgccatcaccagctacgagaaatccgacggcgtgtacaccggcctgagcaccagaaatcaagagacatacgagacactgaagcacgaaaagcctccacaacgcgccaagagaagcggatctggcgtgaagcagaccctgaatttcgacctgctgaagctggctggcgacgtggaatccaacccaggcccttctagaggccatatgaccgagtacaagcccacggtgcgcctcgccacccgcgacgacgtccccagggccgtacgcaccctcgccgccgcgttcgccgactaccccgccacgcgccacaccgtcgatccggaccgccacatcgagcgggtcaccgagctgcaagaactcttcctcacgcgcgtcgggctcgacatcggcaaggtgtgggtcgcggacgacggcgccgcggtggcggtctggaccacgccggagagcgtcgaagcgggggcggtgttcgccgagatcggcccgcgcatggccgagttgagcggttcccggctggccgcgcagcaacagatggaaggcctcctggcgccgcaccggcccaaggagcccgcgtggttcctggccaccgtcggcgtctcgcccgaccaccagggcaagggtctgggcagcgccgtcgtgctccccggagtggaggcggccgagcgcgccggggtgcccgccttcctggagacctccgcgccccgcaacctccccttctacgagcggctcggcttcaccgtcaccgccgacgtcgaggtgcccgaaggaccgcgcacctggtgcatgacccgcaagcccggtgcctga

SEQ ID NO: 5825 - DNA, 2928 bp, synthetic construct; identical to SEQ ID NO: 5816
  source 1..2928: mol_type = other DNA

SEQ ID NO: 5826 - DNA, 2928 bp, synthetic construct; identical to SEQ ID NO: 5817
  source 1..2928: mol_type = other DNA

SEQ ID NO: 5827 - DNA, 2925 bp, synthetic construct
  source 1..2925: mol_type = other DNA
atggccttaccagtgaccgccttgctcctgccgctggccttgctgctccacgccgccaggccgctcgaggaggaggacctgaagaacgtgttcccacctgaggtggccgtgttcgagcctagcgaggccgagatcagccacacccagaaagccaccctcgtgtgcctggctaccggcttctaccccgaccatgtggaactgtcttggtgggtcaacggcaaagaggtgcacagcggcgtgtgtaccgacccccagccactgaaagaacagcccgccctgaacgacagccggtactgcctgagcagcagactgagagtgtccgccaccttctggcagaacccccggaaccacttcagatgccaggtgcagttctacggcctgagcgagaacgacgagtggacccaggacagagccaagcccgtgacccagatcgtgtctgccgaagcctggggcagagccgatgatgtgattaagatccactggcaggaaaagaagtccaacaccatcctgggcagccaggaaggcaacaccatgaagaccaacgacacctacatgaagttcagctggctgaccgtgcccgagaagtccctggacaaagaacacagatgcatcgtgcggcacgaaaacaacaagaacggcgtggaccaggaaatcatcttcccacccatcaagaccgatgtgattacaatggaccccaaggacaactgctccaaggacgccaacgataccctgctgctccagctgaccaacaccagcgcctactacatgtacttgttgctgctgctgaagtccgtggtgtacttcgccatcatcacatgctgcctgctgcggagaaccgccttctgctgcaacggcgagaagtctagggccaagcgatctggatctggagcaacaaacttctcactactcaaacaagcaggtgacgtggaggagaatcccgggcctactagcatggccttaccagtgaccgccttgctcctgccgctggccttgctgctccacgccgccaggccggacatccagttgacccagtcccccagctcactcagcgccagtgtgggggaccgggtgaccattacctgtaaagccagtcagagtgtggactatgagggggatagcttcctgaattggtatcagcagaagcctggcaaagccccaaagctgctgatctacgctgcatctaatctggagtcaggcgtgccttctaggttctccggtagtgggtctgggaccgatttcacattgaccatttcatccctccaacccgaggatttcgctacatattactgtcagcagtccaatgaggaccctctcacctttggccagggcaccaaagttgaaattaagagaggcggaggcggaagtggaggcggaggatctggcggcggaggctctgaagtccaacttgtggagtctggagggggcctggtgcagcccggcggctctctcagactgtcttgtgcggcaagcggctacaccttcacctcttactggatagaatgggtgaggcaggcacctggaaagggactggagtggattggagagattctgccaggagggggagatacaaattacaatgaaatcttcaaggggcgggccaccttttcagcggataccagcaagaatacagcttacctgcagatgaatagcctccgggcagaagataccgctgtttattattgcacgagacgggtgccaataagactggactattgggggcaagggactcttgtcaccgtcagttcaacgcgtatccagaaccctgatcctgccgtgtaccagctgcgggatagcaagagcagcgacaagagcgtgtgtctgttcaccgacttcgacagccagaccaacgtgtcccagagcaaggactccgacgtgtacatcaccgataagtgcgtgctggacatgcggagcatggacttcaagagcaactccgccgtggcctggtccaacaagtccgatttcgcctgcgccaacgccttcaacaacagcattatccccgaggacacattcttcccaagccccgagagcagcgactccaccgaccacgtgaagcccaaagagacagagaacaccaagcagcccagcaagagctgccacaagcccaaggccatcgtgcacaccgagaaagtgaacatgatgagcctgaccgtgctgggcctgcggatgctgttcgccaaaaccgtggccgtgaacttcctgctgaccgccaagctgttcttcctccgcgccaagagaagcggatctggcgtgaagcagaccctgaatttcgacctgctgaagctggctggcgacgtggaatccaacccaggcccttctagaggccatatgaccgagtacaagcccacggtgcgcctcgccacccgcgacgacgtccccagggccgtacgcaccctcgccgccgcgttcgccgactaccccgccacgcgccacaccgtcgatccggaccgccacatcgagcgggtcaccgagctgcaagaactcttcctcacgcgcgtcgggctcgacatcggcaaggtgtgggtcgcggacgacggcgccgcggtggcggtctggaccacgccggagagcgtcgaagcgggggcggtgttcgccgagatcggcccgcgcatggccgagttgagcggttcccggctggccgcgcagcaacagatggaaggcctcctggcgccgcaccggcccaaggagcccgcgtggttcctggccaccgtcggcgtctcgcccgaccaccagggcaagggtctgggcagcgccgtcgtgctccccggagtggaggcggccgagcgcgccggggtgcccgccttcctggagacctccgcgccccgcaacctccccttctacgagcggctcggcttcaccgtcaccgccgacgtcgaggtgcccgaaggaccgcgcacctggtgcatgacccgcaagcccggtgcctga

SEQ ID NO: 5828 - DNA, 2925 bp, synthetic construct
  source 1..2925: mol_type = other DNA
atggccttaccagtgaccgccttgctcctgccgctggccttgctgctccacgccgccaggccgctcgagatccagaaccctgatcctgccgtgtaccagctgcgggatagcaagagcagcgacaagagcgtgtgtctgttcaccgacttcgacagccagaccaacgtgtcccagagcaaggactccgacgtgtacatcaccgataagtgcgtgctggacatgcggagcatggacttcaagagcaactccgccgtggcctggtccaacaagtccgatttcgcctgcgccaacgccttcaacaacagcattatccccgaggacacattcttcccaagccccgagagcagcgactccaccgaccacgtgaagcccaaagagacagagaacaccaagcagcccagcaagagctgccacaagcccaaggccatcgtgcacaccgagaaagtgaacatgatgagcctgaccgtgctgggcctgcggatgctgttcgccaaaaccgtggccgtgaacttcctgctgaccgccaagctgttcttcctcagggccaagcgatctggatctggagcaacaaacttctcactactcaaacaagcaggtgacgtggaggagaatcccgggcctactagcatggccttaccagtgaccgccttgctcctgccgctggccttgctgctccacgccgccaggccggacatccagttgacccagtcccccagctcactcagcgccagtgtgggggaccgggtgaccattacctgtaaagccagtcagagtgtggactatgagggggatagcttcctgaattggtatcagcagaagcctggcaaagccccaaagctgctgatctacgctgcatctaatctggagtcaggcgtgccttctaggttctccggtagtgggtctgggaccgatttcacattgaccatttcatccctccaacccgaggatttcgctacatattactgtcagcagtccaatgaggaccctctcacctttggccagggcaccaaagttgaaattaagagaggcggaggcggaagtggaggcggaggatctggcggcggaggctctgaagtccaacttgtggagtctggagggggcctggtgcagcccggcggctctctcagactgtcttgtgcggcaagcggctacaccttcacctcttactggatagaatgggtgaggcaggcacctggaaagggactggagtggattggagagattctgccaggagggggagatacaaattacaatgaaatcttcaaggggcgggccaccttttcagcggataccagcaagaatacagcttacctgcagatgaatagcctccgggcagaagataccgctgtttattattgcacgagacgggtgccaataagactggactattgggggcaagggactcttgtcaccgtcagttcaacgcgtgaggaggacctgaagaacgtgttcccacctgaggtggccgtgttcgagcctagcgaggccgagatcagccacacccagaaagccaccctcgtgtgcctggctaccggcttctaccccgaccatgtggaactgtcttggtgggtcaacggcaaagaggtgcacagcggcgtgtgtaccgacccccagccactgaaagaacagcccgccctgaacgacagccggtactgcctgagcagcagactgagagtgtccgccaccttctggcagaacccccggaaccacttcagatgccaggtgcagttctacggcctgagcgagaacgacgagtggacccaggacagagccaagcccgtgacccagatcgtgtctgccgaagcctggggcagagccgatgatgtgattaagatccactggcaggaaaagaagtccaacaccatcctgggcagccaggaaggcaacaccatgaagaccaacgacacctacatgaagttcagctggctgaccgtgcccgagaagtccctggacaaagaacacagatgcatcgtgcggcacgaaaacaacaagaacggcgtggaccaggaaatcatcttcccacccatcaagaccgatgtgattacaatggaccccaaggacaactgctccaaggacgccaacgataccctgctgctccagctgaccaacaccagcgcctactacatgtacttgttgctgctgctgaagtccgtggtgtacttcgccatcatcacatgctgcctgctgcggagaaccgccttctgctgcaacggcgagaagtctcgcgccaagagaagcggatctggcgtgaagcagaccctgaatttcgacctgctgaagctggctggcgacgtggaatccaacccaggcccttctagaggccatatgaccgagtacaagcccacggtgcgcctcgccacccgcgacgacgtccccagggccgtacgcaccctcgccgccgcgttcgccgactaccccgccacgcgccacaccgtcgatccggaccgccacatcgagcgggtcaccgagctgcaagaactcttcctcacgcgcgtcgggctcgacatcggcaaggtgtgggtcgcggacgacggcgccgcggtggcggtctggaccacgccggagagcgtcgaagcgggggcggtgttcgccgagatcggcccgcgcatggccgagttgagcggttcccggctggccgcgcagcaacagatggaaggcctcctggcgccgcaccggcccaaggagcccgcgtggttcctggccaccgtcggcgtctcgcccgaccaccagggcaagggtctgggcagcgccgtcgtgctccccggagtggaggcggccgagcgcgccggggtgcccgccttcctggagacctccgcgccccgcaacctccccttctacgagcggctcggcttcaccgtcaccgccgacgtcgaggtgcccgaaggaccgcgcacctggtgcatgacccgcaagcccggtgcctga

SEQ ID NO: 5829 - DNA, 2616 bp, synthetic construct
  source 1..2616: mol_type = other DNA
atggccttaccagtgaccgccttgctcctgccgctggccttgctgctccacgccgccaggccgctcgaggaggacctgaagaacgtgttcccacctgaggtggccgtgttcgagcctagcgaggccgagatcagccacacccagaaagccaccctcgtgtgcctggctaccggcttctaccccgaccatgtggaactgtcttggtgggtcaacggcaaagaggtgcacagcggcgtgtctaccgacccccagccactgaaagaacagcccgccctgaacgacagccggtactgcctgagcagcagactgagagtgtccgccaccttctggcagaacccccggaaccacttcagatgccaggtgcagttctacggcctgagcgagaacgacgagtggacccaggacagagccaagcccgtgacccagatcgtgtctgccgaagcctggggcagagccgattgcggctttaccagcgagagctaccagcagggcgtgctgagcgccaccaacctgagcgtgatcggcttcagaatcctgctgctgaaagtggccggctttaacctgctgatgaccctgcggctgtggtccagcagggccaagcgatctggatctggagcaacaaacttctcactactcaaacaagcaggtgacgtggaggagaatcccgggcctactagcatggccttaccagtgaccgccttgctcctgccgctggccttgctgctccacgccgccaggccggacatccagttgacccagtcccccagctcactcagcgccagtgtgggggaccgggtgaccattacctgtaaagccagtcagagtgtggactatgagggggatagcttcctgaattggtatcagcagaagcctggcaaagccccaaagctgctgatctacgctgcatctaatctggagtcaggcgtgccttctaggttctccggtagtgggtctgggaccgatttcacattgaccatttcatccctccaacccgaggatttcgctacatattactgtcagcagtccaatgaggaccctctcacctttggccagggcaccaaagttgaaattaagagaggcggaggcggaagtggaggcggaggatctggcggcggaggctctgaagtccaacttgtggagtctggagggggcctggtgcagcccggcggctctctcagactgtcttgtgcggcaagcggctacaccttcacctcttactggatagaatgggtgaggcaggcacctggaaagggactggagtggattggagagattctgccaggagggggagatacaaattacaatgaaatcttcaaggggcgggccaccttttcagcggataccagcaagaatacagcttacctgcagatgaatagcctccgggcagaagataccgctgtttattattgcacgagacgggtgccaataagactggactattgggggcaagggactcttgtcaccgtcagttcaacgcgtatccagaaccctgatcctgccgtgtaccagctgcgggatagcaagagcagcgacaagagcgtgtgtctgttcaccgacttcgacagccagaccaacgtgtcccagagcaaggactccgacgtgtacatcaccgataagaccgtgctggacatgcggagcatggacttcaagagcaactccgccgtggcctggtccaacaagtccgatttcgcctgcgccaacgccttcaacaacagcattatccccgaggacacattcttcccaagccccgagagcagctgcgacgtgaagctggtggaaaagagcttcgagacagacaccaacctgaacttccagatcctgtacgagatcctgctgggcaaggccaccctgtacgccgtgctggtgtctgccctggtgctgatggctatggtcaagcggaaggacagccggggacgcgccaagagaagcggatctggcgtgaagcagaccctgaatttcgacctgctgaagctggctggcgacgtggaatccaacccaggcccttctagaggccatatgaccgagtacaagcccacggtgcgcctcgccacccgcgacgacgtccccagggccgtacgcaccctcgccgccgcgttcgccgactaccccgccacgcgccacaccgtcgatccggaccgccacatcgagcgggtcaccgagctgcaagaactcttcctcacgcgcgtcgggctcgacatcggcaaggtgtgggtcgcggacgacggcgccgcggtggcggtctggaccacgccggagagcgtcgaagcgggggcggtgttcgccgagatcggcccgcgcatggccgagttgagcggttcccggctggccgcgcagcaacagatggaaggcctcctggcgccgcaccggcccaaggagcccgcgtggttcctggccaccgtcggcgtctcgcccgaccaccagggcaagggtctgggcagcgccgtcgtgctccccggagtggaggcggccgagcgcgccggggtgcccgccttcctggagacctccgcgccccgcaacctccccttctacgagcggctcggcttcaccgtcaccgccgacgtcgaggtgcccgaaggaccgcgcacctggtgcatgacccgcaagcccggtgcctga

SEQ ID NO: 5830 - DNA, 2616 bp, synthetic construct
  source 1..2616: mol_type = other DNA
atggccttaccagtgaccgccttgctcctgccgctggccttgctgctccacgccgccaggccgctcgagatccagaaccctgatcctgccgtgtaccagctgcgggatagcaagagcagcgacaagagcgtgtgtctgttcaccgacttcgacagccagaccaacgtgtcccagagcaaggactccgacgtgtacatcaccgataagaccgtgctggacatgcggagcatggacttcaagagcaactccgccgtggcctggtccaacaagtccgatttcgcctgcgccaacgccttcaacaacagcattatccccgaggacacattcttcccaagccccgagagcagctgcgacgtgaagctggtggaaaagagcttcgagacagacaccaacctgaacttccagatcctgtacgagatcctgctgggcaaggccaccctgtacgccgtgctggtgtctgccctggtgctgatggctatggtcaagcggaaggacagccggggaagggccaagcgatctggatctggagcaacaaacttctcactactcaaacaagcaggtgacgtggaggagaatcccgggcctactagcatggccttaccagtgaccgccttgctcctgccgctggccttgctgctccacgccgccaggccggacatccagttgacccagtcccccagctcactcagcgccagtgtgggggaccgggtgaccattacctgtaaagccagtcagagtgtggactatgagggggatagcttcctgaattggtatcagcagaagcctggcaaagccccaaagctgctgatctacgctgcatctaatctggagtcaggcgtgccttctaggttctccggtagtgggtctgggaccgatttcacattgaccatttcatccctccaacccgaggatttcgctacatattactgtcagcagtccaatgaggaccctctcacctttggccagggcaccaaagttgaaattaagagaggcggaggcggaagtggaggcggaggatctggcggcggaggctctgaagtccaacttgtggagtctggagggggcctggtgcagcccggcggctctctcagactgtcttgtgcggcaagcggctacaccttcacctcttactggatagaatgggtgaggcaggcacctggaaagggactggagtggattggagagattctgccaggagggggagatacaaattacaatgaaatcttcaaggggcgggccaccttttcagcggataccagcaagaatacagcttacctgcagatgaatagcctccgggcagaagataccgctgtttattattgcacgagacgggtgccaataagactggactattgggggcaagggactcttgtcaccgtcagttcaacgcgtgaggacctgaagaacgtgttcccacctgaggtggccgtgttcgagcctagcgaggccgagatcagccacacccagaaagccaccctcgtgtgcctggctaccggcttctaccccgaccatgtggaactgtcttggtgggtcaacggcaaagaggtgcacagcggcgtgtctaccgacccccagccactgaaagaacagcccgccctgaacgacagccggtactgcctgagcagcagactgagagtgtccgccaccttctggcagaacccccggaaccacttcagatgccaggtgcagttctacggcctgagcgagaacgacgagtggacccaggacagagccaagcccgtgacccagatcgtgtctgccgaagcctggggcagagccgattgcggctttaccagcgagagctaccagcagggcgtgctgagcgccaccaacctgagcgtgatcggcttcagaatcctgctgctgaaagtggccggctttaacctgctgatgaccctgcggctgtggtccagccgcgccaagagaagcggatctggcgtgaagcagaccctgaatttcgacctgctgaagctggctggcgacgtggaatccaacccaggcccttctagaggccatatgaccgagtacaagcccacggtgcgcctcgccacccgcgacgacgtccccagggccgtacgcaccctcgccgccgcgttcgccgactaccccgccacgcgccacaccgtcgatccggaccgccacatcgagcgggtcaccgagctgcaagaactcttcctcacgcgcgtcgggctcgacatcggcaaggtgtgggtcgcggacgacggcgccgcggtggcggtctggaccacgccggagagcgtcgaagcgggggcggtgttcgccgagatcggcccgcgcatggccgagttgagcggttcccggctggccgcgcagcaacagatggaaggcctcctggcgccgcaccggcccaaggagcccgcgtggttcctggccaccgtcggcgtctcgcccgaccaccagggcaagggtctgggcagcgccgtcgtgctccccggagtggaggcggccgagcgcgccggggtgcccgccttcctggagacctccgcgccccgcaacctccccttctacgagcggctcggcttcaccgtcaccgccgacgtcgaggtgcccgaaggaccgcgcacctggtgcatgacccgcaagcccggtgcctga

SEQ ID NO: 5831 - DNA, 2616 bp, synthetic construct
  source 1..2616: mol_type = other DNA
atggccttaccagtgaccgccttgctcctgccgctggccttgctgctccacgccgccaggccgctcgaggaggacctgaagaacgtgttcccacctgaggtggccgtgttcgagcctagcgaggccgagatcagccacacccagaaagccaccctcgtgtgcctggctaccggcttctaccccgaccatgtggaactgtcttggtgggtcaacggcaaagaggtgcacagcggcgtgtgtaccgacccccagccactgaaagaacagcccgccctgaacgacagccggtactgcctgagcagcagactgagagtgtccgccaccttctggcagaacccccggaaccacttcagatgccaggtgcagttctacggcctgagcgagaacgacgagtggacccaggacagagccaagcccgtgacccagatcgtgtctgccgaagcctggggcagagccgattgcgacgtgaagctggtggaaaagagcttcgagacagacaccaacctgaacttccagaacctgagcgtgatcggcttcagaatcctgctgctgaaagtggccggctttaacctgctgatgaccctgcggctgtggtccagcagggccaagcgatctggatctggagcaacaaacttctcactactcaaacaagcaggtgacgtggaggagaatcccgggcctactagcatggccttaccagtgaccgccttgctcctgccgctggccttgctgctccacgccgccaggccggacatccagttgacccagtcccccagctcactcagcgccagtgtgggggaccgggtgaccattacctgtaaagccagtcagagtgtggactatgagggggatagcttcctgaattggtatcagcagaagcctggcaaagccccaaagctgctgatctacgctgcatctaatctggagtcaggcgtgccttctaggttctccggtagtgggtctgggaccgatttcacattgaccatttcatccctccaacccgaggatttcgctacatattactgtcagcagtccaatgaggaccctctcacctttggccagggcaccaaagttgaaattaagagaggcggaggcggaagtggaggcggaggatctggcggcggaggctctgaagtccaacttgtggagtctggagggggcctggtgcagcccggcggctctctcagactgtcttgtgcggcaagcggctacaccttcacctcttactggatagaatgggtgaggcaggcacctggaaagggactggagtggattggagagattctgccaggagggggagatacaaattacaatgaaatcttcaaggggcgggccaccttttcagcggataccagcaagaatacagcttacctgcagatgaatagcctccgggcagaagataccgctgtttattattgcacgagacgggtgccaataagactggactattgggggcaagggactcttgtcaccgtcagttcaacgcgtatccagaaccctgatcctgccgtgtaccagctgcgggatagcaagagcagcgacaagagcgtgtgtctgttcaccgacttcgacagccagaccaacgtgtcccagagcaaggactccgacgtgtacatcaccgataagtgcgtgctggacatgcggagcatggacttcaagagcaactccgccgtggcctggtccaacaagtccgatttcgcctgcgccaacgccttcaacaacagcattatccccgaggacacattcttcccaagccccgagagcagctgcggctttaccagcgagagctaccagcagggcgtgctgagcgccaccatcctgtacgagatcctgctgggcaaggccaccctgtacgccgtgctggtgtctgccctggtgctgatggctatggtcaagcggaaggacagccggggacgcgccaagagaagcggatctggcgtgaagcagaccctgaatttcgacctgctgaagctggctggcgacgtggaatccaacccaggcccttctagaggccatatgaccgagtacaagcccacggtgcgcctcgccacccgcgacgacgtccccagggccgtacgcaccctcgccgccgcgttcgccgactaccccgccacgcgccacaccgtcgatccggaccgccacatcgagcgggtcaccgagctgcaagaactcttcctcacgcgcgtcgggctcgacatcggcaaggtgtgggtcgcggacgacggcgccgcggtggcggtctggaccacgccggagagcgtcgaagcgggggcggtgttcgccgagatcggcccgcgcatggccgagttgagcggttcccggctggccgcgcagcaacagatggaaggcctcctggcgccgcaccggcccaaggagcccgcgtggttcctggccaccgtcggcgtctcgcccgaccaccagggcaagggtctgggcagcgccgtcgtgctccccggagtggaggcggccgagcgcgccggggtgcccgccttcctggagacctccgcgccccgcaacctccccttctacgagcggctcggcttcaccgtcaccgccgacgtcgaggtgcccgaaggaccgcgcacctggtgcatgacccgcaagcccggtgcctga

SEQ ID NO: 5832 - DNA, 2616 bp, synthetic construct
  source 1..2616: mol_type = other DNA
atggccttaccagtgaccgccttgctcctgccgctggccttgctgctccacgccgccaggccgctcgaggaggacctgaagaacgtgttcccacctgaggtggccgtgttcgagcctagcgaggccgagatcagccacacccagaaagccaccctcgtgtgcctggctaccggcttctaccccgaccatgtggaactgtcttggtgggtcaacggcaaagaggtgcacagcggcgtgtctaccgacccccagccactgaaagaacagcccgccctgaacgacagccggtactgcctgagcagcagactgagagtgtccgccaccttctggcagaacccccggaaccacttcagatgccaggtgcagttctacggcctgagcgagaacgacgagtggacccaggacagagccaagcccgtgacccagatcgtgtctgccgaagcctggggcagagccgattgcgacgtgaagctggtggaaaagagcttcgagacagacaccaacctgaacttccagaacctgagcgtgatcggcttcagaatcctgctgctgaaagtggccggctttaacctgctgatgaccctgcggctgtggtccagcagggccaagcgatctggatctggagcaacaaacttctcactactcaaacaagcaggtgacgtggaggagaatcccgggcctactagcatggccttaccagtgaccgccttgctcctgccgctggccttgctgctccacgccgccaggccggacatccagttgacccagtcccccagctcactcagcgccagtgtgggggaccgggtgaccattacctgtaaagccagtcagagtgtggactatgagggggatagcttcctgaattggtatcagcagaagcctggcaaagccccaaagctgctgatctacgctgcatctaatctggagtcaggcgtgccttctaggttctccggtagtgggtctgggaccgatttcacattgaccatttcatccctccaacccgaggatttcgctacatattactgtcagcagtccaatgaggaccctctcacctttggccagggcaccaaagttgaaattaagagaggcggaggcggaagtggaggcggaggatctggcggcggaggctctgaagtccaacttgtggagtctggagggggcctggtgcagcccggcggctctctcagactgtcttgtgcggcaagcggctacaccttcacctcttactggatagaatgggtgaggcaggcacctggaaagggactggagtggattggagagattctgccaggagggggagatacaaattacaatgaaatcttcaaggggcgggccaccttttcagcggataccagcaagaatacagcttacctgcagatgaatagcctccgggcagaagataccgctgtttattattgcacgagacgggtgccaataagactggactattgggggcaagggactcttgtcaccgtcagttcaacgcgtatccagaaccctgatcctgccgtgtaccagctgcgggatagcaagagcagcgacaagagcgtgtgtctgttcaccgacttcgacagccagaccaacgtgtcccagagcaaggactccgacgtgtacatcaccgataagaccgtgctggacatgcggagcatggacttcaagagcaactccgccgtggcctggtccaacaagtccgatttcgcctgcgccaacgccttcaacaacagcattatccccgaggacacattcttcccaagccccgagagcagctgcggctttaccagcgagagctaccagcagggcgtgctgagcgccaccatcctgtacgagatcctgctgggcaaggccaccctgtacgccgtgctggtgtctgccctggtgctgatggctatggtcaagcggaaggacagccggggacgcgccaagagaagcggatctggcgtgaagcagaccctgaatttcgacctgctgaagctggctggcgacgtggaatccaacccaggcccttctagaggccatatgaccgagtacaagcccacggtgcgcctcgccacccgcgacgacgtccccagggccgtacgcaccctcgccgccgcgttcgccgactaccccgccacgcgccacaccgtcgatccggaccgccacatcgagcgggtcaccgagctgcaagaactcttcctcacgcgcgtcgggctcgacatcggcaaggtgtgggtcgcggacgacggcgccgcggtggcggtctggaccacgccggagagcgtcgaagcgggggcggtgttcgccgagatcggcccgcgcatggccgagttgagcggttcccggctggccgcgcagcaacagatggaaggcctcctggcgccgcaccggcccaaggagcccgcgtggttcctggccaccgtcggcgtctcgcccgaccaccagggcaagggtctgggcagcgccgtcgtgctccccggagtggaggcggccgagcgcgccggggtgcccgccttcctggagacctccgcgccccgcaacctccccttctacgagcggctcggcttcaccgtcaccgccgacgtcgaggtgcccgaaggaccgcgcacctggtgcatgacccgcaagcccggtgcctga

SEQ ID NO: 5833 - DNA, 2925 bp, synthetic construct
  source 1..2925: mol_type = other DNA
atggccttaccagtgaccgccttgctcctgccgctggccttgctgctccacgccgccaggccgctcgaggaggaggacctgaagaacgtgttcccacctgaggtggccgtgttcgagcctagcgaggccgagatcagccacacccagaaagccaccctcgtgtgcctggctaccggcttctaccccgaccatgtggaactgtcttggtgggtcaacggcaaagaggtgcacagcggcgtgtctaccgacccccagccactgaaagaacagcccgccctgaacgacagccggtactgcctgagcagcagactgagagtgtccgccaccttctggcagaacccccggaaccacttcagatgccaggtgcagttctacggcctgagcgagaacgacgagtggacccaggacagagccaagcccgtgacccagatcgtgtctgccgaagcctggggcagagccgatgatgtgattaagatccactggcaggaaaagaagtccaacaccatcctgggcagccaggaaggcaacaccatgaagaccaacgacacctacatgaagttcagctggctgaccgtgcccgagaagtccctggacaaagaacacagatgcatcgtgcggcacgaaaacaacaagaacggcgtggaccaggaaatcatcttcccacccatcaagaccgatgtgattacaatggaccccaaggacaactgctccaaggacgccaacgataccctgctgctccagctgaccaacaccagcgcctactacatgtacttgttgctgctgctgaagtccgtggtgtacttcgccatcatcacatgctgcctgctgcggagaaccgccttctgctgcaacggcgagaagtctagggccaagcgatctggatctggagcaacaaacttctcactactcaaacaagcaggtgacgtggaggagaatcccgggcctactagcatggccttaccagtgaccgccttgctcctgccgctggccttgctgctccacgccgccaggccggacatccagttgacccagtcccccagctcactcagcgccagtgtgggggaccgggtgaccattacctgtaaagccagtcagagtgtggactatgagggggatagcttcctgaattggtatcagcagaagcctggcaaagccccaaagctgctgatctacgctgcatctaatctggagtcaggcgtgccttctaggttctccggtagtgggtctgggaccgatttcacattgaccatttcatccctccaacccgaggatttcgctacatattactgtcagcagtccaatgaggaccctctcacctttggccagggcaccaaagttgaaattaagagaggcggaggcggaagtggaggcggaggatctggcggcggaggctctgaagtccaacttgtggagtctggagggggcctggtgcagcccggcggctctctcagactgtcttgtgcggcaagcggctacaccttcacctcttactggatagaatgggtgaggcaggcacctggaaagggactggagtggattggagagattctgccaggagggggagatacaaattacaatgaaatcttcaaggggcgggccaccttttcagcggataccagcaagaatacagcttacctgcagatgaatagcctccgggcagaagataccgctgtttattattgcacgagacgggtgccaataagactggactattgggggcaagggactcttgtcaccgtcagttcaacgcgtatccagaaccctgatcctgccgtgtaccagctgcgggatagcaagagcagcgacaagagcgtgtgtctgttcaccgacttcgacagccagaccaacgtgtcccagagcaaggactccgacgtgtacatcaccgataagaccgtgctggacatgcggagcatggacttcaagagcaactccgccgtggcctggtccaacaagtccgatttcgcctgcgccaacgccttcaacaacagcattatccccgaggacacattcttcccaagccccgagagcagcgactccaccgaccacgtgaagcccaaagagacagagaacaccaagcagcccagcaagagctgccacaagcccaaggccatcgtgcacaccgagaaagtgaacatgatgagcctgaccgtgctgggcctgcggatgctgttcgccaaaaccgtggccgtgaacttcctgctgaccgccaagctgttcttcctccgcgccaagagaagcggatctggcgtgaagcagaccctgaatttcgacctgctgaagctggctggcgacgtggaatccaacccaggcccttctagaggccatatgaccgagtacaagcccacggtgcgcctcgccacccgcgacgacgtccccagggccgtacgcaccctcgccgccgcgttcgccgactaccccgccacgcgccacaccgtcgatccggaccgccacatcgagcgggtcaccgagctgcaagaactcttcctcacgcgcgtcgggctcgacatcggcaaggtgtgggtcgcggacgacggcgccgcggtggcggtctggaccacgccggagagcgtcgaagcgggggcggtgttcgccgagatcggcccgcgcatggccgagttgagcggttcccggctggccgcgcagcaacagatggaaggcctcctggcgccgcaccggcccaaggagcccgcgtggttcctggccaccgtcggcgtctcgcccgaccaccagggcaagggtctgggcagcgccgtcgtgctccccggagtggaggcggccgagcgcgccggggtgcccgccttcctggagacctccgcgccccgcaacctccccttctacgagcggctcggcttcaccgtcaccgccgacgtcgaggtgcccgaaggaccgcgcacctggtgcatgacccgcaagcccggtgcctga

SEQ ID NO: 5834 - DNA, 2616 bp, synthetic construct
  source 1..2616: mol_type = other DNA
atggccttaccagtgaccgccttgctcctgccgctggccttgctgctccacgccgccaggccgctcgaggaggacctgaagaacgtgttcccacctgaggtggccgtgttcgagcctagcgaggccgagatcagccacacccagaaagccaccctcgtgtgcctggctaccggcttctaccccgaccatgtggaactgtcttggtgggtcaacggcaaagaggtgcacagcggcgtgtgtaccgacccccagccactgaaagaacagcccgccctgaacgacagccggtactgcctgagcagcagactgagagtgtccgccaccttctggcagaacccccggaaccacttcagatgccaggtgcagttctacggcctgagcgagaacgacgagtggacccaggacagagccaagcccgtgacccagatcgtgtctgccgaagcctggggcagagccgattgcggctttaccagcgagagctaccagcagggcgtgctgagcgccaccaacctgagcgtgatcggcttcagaatcctgctgctgaaagtggccggctttaacctgctgatgaccctgcggctgtggtccagcagggccaagcgatctggatctggagcaacaaacttctcactactcaaacaagcaggtgacgtggaggagaatcccgggcctactagcatggccttaccagtgaccgccttgctcctgccgctggccttgctgctccacgccgccaggccggacatccagttgacccagtcccccagctcactcagcgccagtgtgggggaccgggtgaccattacctgtaaagccagtcagagtgtggactatgagggggatagcttcctgaattggtatcagcagaagcctggcaaagccccaaagctgctgatctacgctgcatctaatctggagtcaggcgtgccttctaggttctccggtagtgggtctgggaccgatttcacattgaccatttcatccctccaacccgaggatttcgctacatattactgtcagcagtccaatgaggaccctctcacctttggccagggcaccaaagttgaaattaagagaggcggaggcggaagtggaggcggaggatctggcggcggaggctctgaagtccaacttgtggagtctggagggggcctggtgcagcccggcggctctctcagactgtcttgtgcggcaagcggctacaccttcacctcttactggatagaatgggtgaggcaggcacctggaaagggactggagtggattggagagattctgccaggagggggagatacaaattacaatgaaatcttcaaggggcgggccaccttttcagcggataccagcaagaatacagcttacctgcagatgaatagcctccgggcagaagataccgctgtttattattgcacgagacgggtgccaataagactggactattgggggcaagggactcttgtcaccgtcagttcaacgcgtatccagaaccctgatcctgccgtgtaccagctgcgggatagcaagagcagcgacaagagcgtgtgtctgttcaccgacttcgacagccagaccaacgtgtcccagagcaaggactccgacgtgtacatcaccgataagtgcgtgctggacatgcggagcatggacttcaagagcaactccgccgtggcctggtccaacaagtccgatttcgcctgcgccaacgccttcaacaacagcattatccccgaggacacattcttcccaagccccgagagcagctgcgacgtgaagctggtggaaaagagcttcgagacagacaccaacctgaacttccagatcctgtacgagatcctgctgggcaaggccaccctgtacgccgtgctggtgtctgccctggtgctgatggctatggtcaagcggaaggacagccggggacgcgccaagagaagcggatctggcgtgaagcagaccctgaatttcgacctgctgaagctggctggcgacgtggaatccaacccaggcccttctagaggccatatgaccgagtacaagcccacggtgcgcctcgccacccgcgacgacgtccccagggccgtacgcaccctcgccgccgcgttcgccgactaccccgccacgcgccacaccgtcgatccggaccgccacatcgagcgggtcaccgagctgcaagaactcttcctcacgcgcgtcgggctcgacatcggcaaggtgtgggtcgcggacgacggcgccgcggtggcggtctggaccacgccggagagcgtcgaagcgggggcggtgttcgccgagatcggcccgcgcatggccgagttgagcggttcccggctggccgcgcagcaacagatggaaggcctcctggcgccgcaccggcccaaggagcccgcgtggttcctggccaccgtcggcgtctcgcccgaccaccagggcaagggtctgggcagcgccgtcgtgctccccggagtggaggcggccgagcgcgccggggtgcccgccttcctggagacctccgcgccccgcaacctccccttctacgagcggctcggcttcaccgtcaccgccgacgtcgaggtgcccgaaggaccgcgcacctggtgcatgacccgcaagcccggtgcctga

SEQ ID NO: 5835 - DNA, 2703 bp, synthetic construct
  source 1..2703: mol_type = other DNA
atggccttaccagtgaccgccttgctcctgccgctggccttgctgctccacgccgccaggccgctcgaggaggaggacctgaagaacgtgttcccacctgaggtggccgtgttcgagcctagcgaggccgagatcagccacacccagaaagccaccctcgtgtgcctggctaccggcttctaccccgaccatgtggaactgtcttggtgggtcaacggcaaagaggtgcacagcggcgtgtgtaccgacccccagccactgaaagaacagcccgccctgaacgacagccggtactgcctgagcagcagactgagagtgtccgccaccttctggcagaacccccggaaccacttcagatgccaggtgcagttctacggcctgagcgagaacgacgagtggacccaggacagagccaagcccgtgacccagatcgtgtctgccgaagcctggggcagagccgattgcggctttaccagcgagagctaccagcagggcgtgctgagcgccaccaacctgagcgtgatcggcttcagaatcctgctgctgaaagtggccggctttaacctgctgatgaccctgcggctgtggtccagcagggccaagcgatctggatctggagcaacaaacttctcactactcaaacaagcaggtgacgtggaggagaatcccgggcctactagcatggccttaccagtgaccgccttgctcctgccgctggccttgctgctccacgccgccaggccggacatccagttgacccagtcccccagctcactcagcgccagtgtgggggaccgggtgaccattacctgtaaagccagtcagagtgtggactatgagggggatagcttcctgaattggtatcagcagaagcctggcaaagccccaaagctgctgatctacgctgcatctaatctggagtcaggcgtgccttctaggttctccggtagtgggtctgggaccgatttcacattgaccatttcatccctccaacccgaggatttcgctacatattactgtcagcagtccaatgaggaccctctcacctttggccagggcaccaaagttgaaattaagagaggcggaggcggaagtggaggcggaggatctggcggcggaggctctgaagtccaacttgtggagtctggagggggcctggtgcagcccggcggctctctcagactgtcttgtgcggcaagcggctacaccttcacctcttactggatagaatgggtgaggcaggcacctggaaagggactggagtggattggagagattctgccaggagggggagatacaaattacaatgaaatcttcaaggggcgggccaccttttcagcggataccagcaagaatacagcttacctgcagatgaatagcctccgggcagaagataccgctgtttattattgcacgagacgggtgccaataagactggactattgggggcaagggactcttgtcaccgtcagttcaacgcgtggacagcctaaggccaatcctaccgtgacactgttccctccaagcagcgaagaactccaggccaacaaggccacacttgtgtgcctgatctccgacttctaccctggggctgtgacagtggcttggaaggccgatggatctcctgtgaaagccggcgtggaaaccaccaagccatccaagcagagcaacaacaaatacgccgccagctcctacctgagcctgacacctgagcagtggaagtcccacagatcctacagctgccaagtgacccacgaaggcagcaccgtggaaaagacagtggcccctacagagtgcagccccatcaagaccgatgtgattacaatggaccccaaggacaactgctccaaggacgccaacgataccctgctgctccagctgaccaacaccagcgcctactacatgtacttgttgctgctgctgaagtccgtggtgtacttcgccatcatcacatgctgcctgctgcggagaaccgccttctgctgcaacggcgagaagtctcgcgccaagagaagcggatctggcgtgaagcagaccctgaatttcgacctgctgaagctggctggcgacgtggaatccaacccaggcccttctagaggccatatgaccgagtacaagcccacggtgcgcctcgccacccgcgacgacgtccccagggccgtacgcaccctcgccgccgcgttcgccgactaccccgccacgcgccacaccgtcgatccggaccgccacatcgagcgggtcaccgagctgcaagaactcttcctcacgcgcgtcgggctcgacatcggcaaggtgtgggtcgcggacgacggcgccgcggtggcggtctggaccacgccggagagcgtcgaagcgggggcggtgttcgccgagatcggcccgcgcatggccgagttgagcggttcccggctggccgcgcagcaacagatggaaggcctcctggcgccgcaccggcccaaggagcccgcgtggttcctggccaccgtcggcgtctcgcccgaccaccagggcaagggtctgggcagcgccgtcgtgctccccggagtggaggcggccgagcgcgccggggtgcccgccttcctggagacctccgcgccccgcaacctccccttctacgagcggctcggcttcaccgtcaccgccgacgtcgaggtgcccgaaggaccgcgcacctggtgcatgacccgcaagcccggtgcctga

SEQ ID NO: 5836 - DNA, 2703 bp, synthetic construct
  source 1..2703: mol_type = other DNA
atggccttaccagtgaccgccttgctcctgccgctggccttgctgctccacgccgccaggccgctcgagggacagcctaaggccaatcctaccgtgacactgttccctccaagcagcgaagaactccaggccaacaaggccacacttgtgtgcctgatctccgacttctaccctggggctgtgacagtggcttggaaggccgatggatctcctgtgaaagccggcgtggaaaccaccaagccatccaagcagagcaacaacaaatacgccgccagctcctacctgagcctgacacctgagcagtggaagtcccacagatcctacagctgccaagtgacccacgaaggcagcaccgtggaaaagacagtggcccctacagagtgcagccccatcaagaccgatgtgattacaatggaccccaaggacaactgctccaaggacgccaacgataccctgctgctccagctgaccaacaccagcgcctactacatgtacttgttgctgctgctgaagtccgtggtgtacttcgccatcatcacatgctgcctgctgcggagaaccgccttctgctgcaacggcgagaagtctagggccaagcgatctggatctggagcaacaaacttctcactactcaaacaagcaggtgacgtggaggagaatcccgggcctactagcatggccttaccagtgaccgccttgctcctgccgctggccttgctgctccacgccgccaggccggacatccagttgacccagtcccccagctcactcagcgccagtgtgggggaccgggtgaccattacctgtaaagccagtcagagtgtggactatgagggggatagcttcctgaattggtatcagcagaagcctggcaaagccccaaagctgctgatctacgctgcatctaatctggagtcaggcgtgccttctaggttctccggtagtgggtctgggaccgatttcacattgaccatttcatccctccaacccgaggatttcgctacatattactgtcagcagtccaatgaggaccctctcacctttggccagggcaccaaagttgaaattaagagaggcggaggcggaagtggaggcggaggatctggcggcggaggctctgaagtccaacttgtggagtctggagggggcctggtgcagcccggcggctctctcagactgtcttgtgcggcaagcggctacaccttcacctcttactggatagaatgggtgaggcaggcacctggaaagggactggagtggattggagagattctgccaggagggggagatacaaattacaatgaaatcttcaaggggcgggccaccttttcagcggataccagcaagaatacagcttacctgcagatgaatagcctccgggcagaagataccgctgtttattattgcacgagacgggtgccaataagactggactattgggggcaagggactcttgtcaccgtcagttcaacgcgtgaggaggacctgaagaacgtgttcccacctgaggtggccgtgttcgagcctagcgaggccgagatcagccacacccagaaagccaccctcgtgtgcctggctaccggcttctaccccgaccatgtggaactgtcttggtgggtcaacggcaaagaggtgcacagcggcgtgtgtaccgacccccagccactgaaagaacagcccgccctgaacgacagccggtactgcctgagcagcagactgagagtgtccgccaccttctggcagaacccccggaaccacttcagatgccaggtgcagttctacggcctgagcgagaacgacgagtggacccaggacagagccaagcccgtgacccagatcgtgtctgccgaagcctggggcagagccgattgcggctttaccagcgagagctaccagcagggcgtgctgagcgccaccaacctgagcgtgatcggcttcagaatcctgctgctgaaagtggccggctttaacctgctgatgaccctgcggctgtggtccagccgcgccaagagaagcggatctggcgtgaagcagaccctgaatttcgacctgctgaagctggctggcgacgtggaatccaacccaggcccttctagaggccatatgaccgagtacaagcccacggtgcgcctcgccacccgcgacgacgtccccagggccgtacgcaccctcgccgccgcgttcgccgactaccccgccacgcgccacaccgtcgatccggaccgccacatcgagcgggtcaccgagctgcaagaactcttcctcacgcgcgtcgggctcgacatcggcaaggtgtgggtcgcggacgacggcgccgcggtggcggtctggaccacgccggagagcgtcgaagcgggggcggtgttcgccgagatcggcccgcgcatggccgagttgagcggttcccggctggccgcgcagcaacagatggaaggcctcctggcgccgcaccggcccaaggagcccgcgtggttcctggccaccgtcggcgtctcgcccgaccaccagggcaagggtctgggcagcgccgtcgtgctccccggagtggaggcggccgagcgcgccggggtgcccgccttcctggagacctccgcgccccgcaacctccccttctacgagcggctcggcttcaccgtcaccgccgacgtcgaggtgcccgaaggaccgcgcacctggtgcatgacccgcaagcccggtgcctga

SEQ ID NO: 5837 - DNA, 2694 bp, synthetic construct
  source 1..2694: mol_type = other DNA
atggccttaccagtgaccgccttgctcctgccgctggccttgctgctccacgccgccaggccgctcgaggaggcctctacaaagggaccctccgtgtttcctctggctcccagcagcaagtctacaagcggaggaacagccgctctgggctgcctggtcaaggattactttcccgagcctgtgaccgtgtcctggaatagcggagcactgacaagcggcgtgcacacctttccagccgtgctgcaaagcagcggcctgtactctctgagcagcgtggtcacagtgcctagctctagcctgggcacccagacctacatctgcaatgtgaaccacaagcctagcaacaccaaggtggacaagagagtggaacccaagagctgtcccatcaagaccgatgtgattacaatggaccccaaggacaactgctccaaggacgccaacgataccctgctgctccagctgaccaacaccagcgcctactacatgtacttgttgctgctgctgaagtccgtggtgtacttcgccatcatcacatgctgcctgctgcggagaaccgccttctgctgcaacggcgagaagtctagggccaagcgatctggatctggagcaacaaacttctcactactcaaacaagcaggtgacgtggaggagaatcccgggcctactagcatggccttaccagtgaccgccttgctcctgccgctggccttgctgctccacgccgccaggccggacatccagttgacccagtcccccagctcactcagcgccagtgtgggggaccgggtgaccattacctgtaaagccagtcagagtgtggactatgagggggatagcttcctgaattggtatcagcagaagcctggcaaagccccaaagctgctgatctacgctgcatctaatctggagtcaggcgtgccttctaggttctccggtagtgggtctgggaccgatttcacattgaccatttcatccctccaacccgaggatttcgctacatattactgtcagcagtccaatgaggaccctctcacctttggccagggcaccaaagttgaaattaagagaggcggaggcggaagtggaggcggaggatctggcggcggaggctctgaagtccaacttgtggagtctggagggggcctggtgcagcccggcggctctctcagactgtcttgtgcggcaagcggctacaccttcacctcttactggatagaatgggtgaggcaggcacctggaaagggactggagtggattggagagattctgccaggagggggagatacaaattacaatgaaatcttcaaggggcgggccaccttttcagcggataccagcaagaatacagcttacctgcagatgaatagcctccgggcagaagataccgctgtttattattgcacgagacgggtgccaataagactggactattgggggcaagggactcttgtcaccgtcagttcaacgcgtggacagcctaaggccaatcctaccgtgacactgttccctccaagcagcgaagaactccaggccaacaaggccacacttgtgtgcctgatctccgacttctaccctggggctgtgacagtggcttggaaggccgatggatctcctgtgaaagccggcgtggaaaccaccaagccatccaagcagagcaacaacaaatacgccgccagctcctacctgagcctgacacctgagcagtggaagtcccacagatcctacagctgccaagtgacccacgaaggcagcaccgtggaaaagacagtggcccctacagagtgcagcgaagtgaaaaccgactccaccgaccacgtgaagcccaaagagacagagaacaccaagcagcccagcaagagctgccacaagcccaaggccatcgtgcacaccgagaaagtgaacatgatgagcctgaccgtgctgggcctgcggatgctgttcgccaaaaccgtggccgtgaacttcctgctgaccgccaagctgttcttcctccgcgccaagagaagcggatctggcgtgaagcagaccctgaatttcgacctgctgaagctggctggcgacgtggaatccaacccaggcccttctagaggccatatgaccgagtacaagcccacggtgcgcctcgccacccgcgacgacgtccccagggccgtacgcaccctcgccgccgcgttcgccgactaccccgccacgcgccacaccgtcgatccggaccgccacatcgagcgggtcaccgagctgcaagaactcttcctcacgcgcgtcgggctcgacatcggcaaggtgtgggtcgcggacgacggcgccgcggtggcggtctggaccacgccggagagcgtcgaagcgggggcggtgttcgccgagatcggcccgcgcatggccgagttgagcggttcccggctggccgcgcagcaacagatggaaggcctcctggcgccgcaccggcccaaggagcccgcgtggttcctggccaccgtcggcgtctcgcccgaccaccagggcaagggtctgggcagcgccgtcgtgctccccggagtggaggcggccgagcgcgccggggtgcccgccttcctggagacctccgcgccccgcaacctccccttctacgagcggctcggcttcaccgtcaccgccgacgtcgaggtgcccgaaggaccgcgcacctggtgcatgacccgcaagcccggtgcctga

SEQ ID NO: 5838 - DNA, 2628 bp, synthetic construct
  source 1..2628: mol_type = other DNA
atggccttaccagtgaccgccttgctcctgccgctggccttgctgctccacgccgccaggccgctcgaggaggcctctacaaagggaccctccgtgtttcctctggctcccagcagcaagtctacaagcggaggaacagccgctctgggctgcctggtcaaggattactttcccgagcctgtgaccgtgtcctggaatagcggagcactgacaagcggcgtgcacacctttccagccgtgctgcaaagcagcggcctgtactctctgagcagcgtggtcacagtgcctagctctagcctgggcacccagacctacatctgcaatgtgaaccacaagcctagcaacaccaaggtggacaagagagtggaacccaagagctgtggcagagccgattgcggctttaccagcgagagctaccagcagggcgtgctgagcgccaccatcctgtacgagatcctgctgggcaaggccaccctgtacgccgtgctggtgtctgccctggtgctgatggctatggtcaagcggaaggacagccggggaagggccaagcgatctggatctggagcaacaaacttctcactactcaaacaagcaggtgacgtggaggagaatcccgggcctactagcatggccttaccagtgaccgccttgctcctgccgctggccttgctgctccacgccgccaggccggacatccagttgacccagtcccccagctcactcagcgccagtgtgggggaccgggtgaccattacctgtaaagccagtcagagtgtggactatgagggggatagcttcctgaattggtatcagcagaagcctggcaaagccccaaagctgctgatctacgctgcatctaatctggagtcaggcgtgccttctaggttctccggtagtgggtctgggaccgatttcacattgaccatttcatccctccaacccgaggatttcgctacatattactgtcagcagtccaatgaggaccctctcacctttggccagggcaccaaagttgaaattaagagaggcggaggcggaagtggaggcggaggatctggcggcggaggctctgaagtccaacttgtggagtctggagggggcctggtgcagcccggcggctctctcagactgtcttgtgcggcaagcggctacaccttcacctcttactggatagaatgggtgaggcaggcacctggaaagggactggagtggattggagagattctgccaggagggggagatacaaattacaatgaaatcttcaaggggcgggccaccttttcagcggataccagcaagaatacagcttacctgcagatgaatagcctccgggcagaagataccgctgtttattattgcacgagacgggtgccaataagactggactattgggggcaagggactcttgtcaccgtcagttcaacgcgtggacagcctaaggccaatcctaccgtgacactgttccctccaagcagcgaagaactccaggccaacaaggccacacttgtgtgcctgatctccgacttctaccctggggctgtgacagtggcttggaaggccgatggatctcctgtgaaagccggcgtggaaaccaccaagccatccaagcagagcaacaacaaatacgccgccagctcctacctgagcctgacacctgagcagtggaagtcccacagatcctacagctgccaagtgacccacgaaggcagcaccgtggaaaagacagtggcccctacagagtgcagcatccccgaggacacattcttcccaagccccgagagcagctgcgacgtgaagctggtggaaaagagcttcgagacagacaccaacctgaacttccagaacctgagcgtgatcggcttcagaatcctgctgctgaaagtggccggctttaacctgctgatgaccctgcggctgtggtccagccgcgccaagagaagcggatctggcgtgaagcagaccctgaatttcgacctgctgaagctggctggcgacgtggaatccaacccaggcccttctagaggccatatgaccgagtacaagcccacggtgcgcctcgccacccgcgacgacgtccccagggccgtacgcaccctcgccgccgcgttcgccgactaccccgccacgcgccacaccgtcgatccggaccgccacatcgagcgggtcaccgagctgcaagaactcttcctcacgcgcgtcgggctcgacatcggcaaggtgtgggtcgcggacgacggcgccgcggtggcggtctggaccacgccggagagcgtcgaagcgggggcggtgttcgccgagatcggcccgcgcatggccgagttgagcggttcccggctggccgcgcagcaacagatggaaggcctcctggcgccgcaccggcccaaggagcccgcgtggttcctggccaccgtcggcgtctcgcccgaccaccagggcaagggtctgggcagcgccgtcgtgctccccggagtggaggcggccgagcgcgccggggtgcccgccttcctggagacctccgcgccccgcaacctccccttctacgagcggctcggcttcaccgtcaccgccgacgtcgaggtgcccgaaggaccgcgcacctggtgcatgacccgcaagcccggtgcctga

SEQ ID NO: 5839 - DNA, 2628 bp, synthetic construct
  source 1..2628: mol_type = other DNA
atggccttaccagtgaccgccttgctcctgccgctggccttgctgctccacgccgccaggccgctcgaggaggcctctacaaagggaccctccgtgtttcctctggctcccagcagcaagtctacaagcggaggaacagccgctctgggctgcctggtcaaggattactttcccgagcctgtgaccgtgtcctggaatagcggagcactgacaagcggcgtgcacacctttccagccgtgctgcaaagcagcggcctgtactctctgagcagcgtggtcacagtgcctagctctagcctgggcacccagacctacatctgcaatgtgaaccacaagcctagcaacaccaaggtggacaagagagtggaacccaagagctgtatccccgaggacacattcttcccaagccccgagagcagctgcgacgtgaagctggtggaaaagagcttcgagacagacaccaacctgaacttccagaacctgagcgtgatcggcttcagaatcctgctgctgaaagtggccggctttaacctgctgatgaccctgcggctgtggtccagcagggccaagcgatctggatctggagcaacaaacttctcactactcaaacaagcaggtgacgtggaggagaatcccgggcctactagcatggccttaccagtgaccgccttgctcctgccgctggccttgctgctccacgccgccaggccggacatccagttgacccagtcccccagctcactcagcgccagtgtgggggaccgggtgaccattacctgtaaagccagtcagagtgtggactatgagggggatagcttcctgaattggtatcagcagaagcctggcaaagccccaaagctgctgatctacgctgcatctaatctggagtcaggcgtgccttctaggttctccggtagtgggtctgggaccgatttcacattgaccatttcatccctccaacccgaggatttcgctacatattactgtcagcagtccaatgaggaccctctcacctttggccagggcaccaaagttgaaattaagagaggcggaggcggaagtggaggcggaggatctggcggcggaggctctgaagtccaacttgtggagtctggagggggcctggtgcagcccggcggctctctcagactgtcttgtgcggcaagcggctacaccttcacctcttactggatagaatgggtgaggcaggcacctggaaagggactggagtggattggagagattctgccaggagggggagatacaaattacaatgaaatcttcaaggggcgggccaccttttcagcggataccagcaagaatacagcttacctgcagatgaatagcctccgggcagaagataccgctgtttattattgcacgagacgggtgccaataagactggactattgggggcaagggactcttgtcaccgtcagttcaacgcgtggacagcctaaggccaatcctaccgtgacactgttccctccaagcagcgaagaactccaggccaacaaggccacacttgtgtgcctgatctccgacttctaccctggggctgtgacagtggcttggaaggccgatggatctcctgtgaaagccggcgtggaaaccaccaagccatccaagcagagcaacaacaaatacgccgccagctcctacctgagcctgacacctgagcagtggaagtcccacagatcctacagctgccaagtgacccacgaaggcagcaccgtggaaaagacagtggcccctacagagtgcagcggcagagccgattgcggctttaccagcgagagctaccagcagggcgtgctgagcgccaccatcctgtacgagatcctgctgggcaaggccaccctgtacgccgtgctggtgtctgccctggtgctgatggctatggtcaagcggaaggacagccggggacgcgccaagagaagcggatctggcgtgaagcagaccctgaatttcgacctgctgaagctggctggcgacgtggaatccaacccaggcccttctagaggccatatgaccgagtacaagcccacggtgcgcctcgccacccgcgacgacgtccccagggccgtacgcaccctcgccgccgcgttcgccgactaccccgccacgcgccacaccgtcgatccggaccgccacatcgagcgggtcaccgagctgcaagaactcttcctcacgcgcgtcgggctcgacatcggcaaggtgtgggtcgcggacgacggcgccgcggtggcggtctggaccacgccggagagcgtcgaagcgggggcggtgttcgccgagatcggcccgcgcatggccgagttgagcggttcccggctggccgcgcagcaacagatggaaggcctcctggcgccgcaccggcccaaggagcccgcgtggttcctggccaccgtcggcgtctcgcccgaccaccagggcaagggtctgggcagcgccgtcgtgctccccggagtggaggcggccgagcgcgccggggtgcccgccttcctggagacctccgcgccccgcaacctccccttctacgagcggctcggcttcaccgtcaccgccgacgtcgaggtgcccgaaggaccgcgcacctggtgcatgacccgcaagcccggtgcctga

SEQ ID NO: 5840 - DNA, 1863 bp, synthetic construct
  source 1..1863: mol_type = other DNA
atggccttaccagtgaccgccttgctcctgccgctggccttgctgctccacgccgccaggccggacatccagttgacccagtcccccagctcactcagcgccagtgtgggggaccgggtgaccattacctgtaaagccagtcagagtgtggactatgagggggatagcttcctgaattggtatcagcagaagcctggcaaagccccaaagctgctgatctacgctgcatctaatctggagtcaggcgtgccttctaggttctccggtagtgggtctgggaccgatttcacattgaccatttcatccctccaacccgaggatttcgctacatattactgtcagcagtccaatgaggaccctctcacctttggccagggcaccaaagttgaaattaagagactcgaggacctgaagaacgtgttcccacctgaggtggccgtgttcgagcctagcgaggccgagatcagccacacccagaaagccaccctcgtgtgcctggctaccggcttctaccccgaccatgtggaactgtcttggtgggtcaacggcaaagaggtgcacagcggcgtgtgtaccgacccccagccactgaaagaacagcccgccctgaacgacagccggtactgcctgagcagcagactgagagtgtccgccaccttctggcagaacccccggaaccacttcagatgccaggtgcagttctacggcctgagcgagaacgacgagtggacccaggacagagccaagcccgtgacccagatcgtgtctgccgaagcctggggcagagccgatagcggctttaccagcgagagctaccagcagggcgtgctgagcgccaccatcctgtacgagatcctgctgggcaaggccaccctgtacgccgtgctggtgtctgccctggtgctgatggctatggtcaagcggaaggacagccggggaagggccaagcgatctggatctggagcaacaaacttctcactactcaaacaagcaggtgacgtggaggagaatcccgggcctactagtatggactggatttggcgcatccttttccttgtcggcgctgctaccggcgcgcattccttcgaagtccaacttgtggagtctggagggggcctggtgcagcccggcggctctctcagactgtcttgtgcggcaagcggctacaccttcacctcttactggatagaatgggtgaggcaggcacctggaaagggactggagtggattggagagattctgccaggagggggagatacaaattacaatgaaatcttcaaggggcgggccaccttttcagcggataccagcaagaatacagcttacctgcagatgaatagcctccgggcagaagataccgctgtttattattgcacgagacgggtgccaataagactggactattgggggcaagggactcttgtcaccgtcagttcaacgcgtatccagaaccctgatcctgccgtgtaccagctgcgggatagcaagagcagcgacaagagcgtgtgtctgttcaccgacttcgacagccagaccaacgtgtcccagagcaaggactccgacgtgtacatcaccgataagtgcgtgctggacatgcggagcatggacttcaagagcaactccgccgtggcctggtccaacaagtccgatttcgcctgcgccaacgccttcaacaacagcattatccccgaggacacattcttcccaagccccgagagcagcagcgacgtgaagctggtggaaaagagcttcgagacagacaccaacctgaacttccagaacctgagcgtgatcggcttcagaatcctgctgctgaaagtggccggctttaacctgctgatgaccctgcggctgtggtccagc

SEQ ID NO: 5841 - DNA, 2703 bp, synthetic construct
  source 1..2703: mol_type = other DNA
atggccttaccagtgaccgccttgctcctgccgctggccttgctgctccacgccgccaggccggaggttcagctgcttgagtctggcggaggactggttcaacctggcggaagcctgagactgtcttgtgccgcctctggcagaaccttcagcatgggctggtatagacaggcccctggcaagggcctcgaatttgtgtctgccatcacatacagcggcggcagcccttactacgccgattctgtgaagggcagattcaccatcagccgggacaacagcaagaacaccgtgtacctccagatgaacagcctgagagccgaggacaccgccgtgtactactgtgccgccaatccaacctacggcagcgactggaatgccgagaattggggccagggcacactggtcacagtgtctagtggtaccggcggaggcggatctggcggcggaggtagcggtggcggaggatctgaattcgacatccagttgacccagtcccccagctcactcagcgccagtgtgggggaccgggtgaccattacctgtaaagccagtcagagtgtggactatgagggggatagcttcctgaattggtatcagcagaagcctggcaaagccccaaagctgctgatctacgctgcatctaatctggagtcaggcgtgccttctaggttctccggtagtgggtctgggaccgatttcacattgaccatttcatccctccaacccgaggatttcgctacatattactgtcagcagtccaatgaggaccctctcacctttggccagggcaccaaagttgaaattaagagactcgagatccagaaccctgatcctgccgtgtaccagctgcgggatagcaagagcagcgacaagagcgtgtgtctgttcaccgacttcgacagccagaccaacgtgtcccagagcaaggactccgacgtgtacatcaccgataagtgcgtgctggacatgcggagcatggacttcaagagcaactccgccgtggcctggtccaacaagtccgatttcgcctgcgccaacgccttcaacaacagcattatccccgaggacacattcttcccaagcagcgacgtgccctgcgacgtgaagctggtggaaaagagcttcgagacagacaccaacctgaacttccagaacctgagcgtgatcggcttcagaatcctgctgctgaaagtggccggctttaacctgctgatgaccctgcggctgtggtccagccgcgccaagagaagcggatctggcgtgaagcagaccctgaatttcgacctgctgaagctggctggcgacgtggaatccaacccaggccctactagtaccatggactggatttggcgcatccttttccttgtcggcgctgctaccggcacccattccgggcccgaagtgcaactggttgaatccggtggcggcctggtgcaacccggcggatctctcagacttagctgtgccgcctccggcagaaccttcacaatgggatggtacaggcaggctccagggaaagagagagagttcgtcgccgccatctctctgtctcccacactggcctactacgccgactctgtgaaaggccggttcaccatctccagagataatagcaagaacaccgtggtgctgcaaatgaactctctgagagccgaggatacagccctgtactattgtgccgctgaccggaagtccgtgatgagcatcagacccgattactggggacagggcacactggtcacagtgtctagtggatccggcggcggaggatctggcggaggcggatctgggggcggaggctctttcgaagtccaacttgtggagtctggagggggcctggtgcagcccggcggctctctcagactgtcttgtgcggcaagcggctacaccttcacctcttactggatagaatgggtgaggcaggcacctggaaagggactggagtggattggagagattctgccaggagggggagatacaaattacaatgaaatcttcaaggggcgggccaccttttcagcggataccagcaagaatacagcttacctgcagatgaatagcctccgggcagaagataccgctgtttattattgcacgagacgggtgccaataagactggactattgggggcaagggactcttgtcaccgtcagttcaacgcgtgaggacctgaagaacgtgttcccacctgaggtggccgtgttcgagcctagcaaggccgagatcgcccacacccagaaagccaccctcgtgtgcctggctaccggcttctaccccgaccatgtggaactgtcttggtgggtcaacggcaaagaggtgcacagcggcgtgtgtaccgacccccagccactgaaagaacagcccgccctgaacgacagccggtactgcctgagcagcagactgagagtgtccgccaccttctggcagaacccccggaaccacttcagatgccaggtgcagttctacggcctgagcgagaacgacgagtggacccaggacagagccaagcccgtgacccagatcgtgtctgccgaagcctggggcagagccgattgcggcatcaccagcgccagctaccaccagggcgtgctgagcgccaccatcctgtacgagatcctgctgggcaaggccaccctgtacgccgtgctggtgtctgccctggtgctgatggctatggtcaagcggaaggacagccggggataa

SEQ ID NO: 5842 - DNA, 2703 bp, synthetic construct
  source 1..2703: mol_type = other DNA
atggccttaccagtgaccgccttgctcctgccgctggccttgctgctccacgccgccaggccggaagtgcagctggttgaatctggcggaggactggttcaggctggcggatctctgagactgtcttgtgccgccagcggcagaacctttagcatgggctggtttagacaggcccctggcaaagagagagagttcgtcgccgccatcacatactctggcggcagcccttactacgccgactctgtgaagggcagattcaccatcagccgggacaacgccaagaacaccgtgtacctccagatgaacagcctgaagcctgaggacaccgccgtgtactactgcgccgccaatccaacatacggcagcgactggaacgccgagaattggggccagggaacccaagtgacagtgtctagcggtaccggcggaggcggatctggcggcggaggtagcggtggcggaggatctgaattcgacatccagttgacccagtcccccagctcactcagcgccagtgtgggggaccgggtgaccattacctgtaaagccagtcagagtgtggactatgagggggatagcttcctgaattggtatcagcagaagcctggcaaagccccaaagctgctgatctacgctgcatctaatctggagtcaggcgtgccttctaggttctccggtagtgggtctgggaccgatttcacattgaccatttcatccctccaacccgaggatttcgctacatattactgtcagcagtccaatgaggaccctctcacctttggccagggcaccaaagttgaaattaagagactcgagatccagaaccctgatcctgccgtgtaccagctgcgggatagcaagagcagcgacaagagcgtgtgtctgttcaccgacttcgacagccagaccaacgtgtcccagagcaaggactccgacgtgtacatcaccgataagtgcgtgctggacatgcggagcatggacttcaagagcaactccgccgtggcctggtccaacaagtccgatttcgcctgcgccaacgccttcaacaacagcattatccccgaggacacattcttcccaagcagcgacgtgccctgcgacgtgaagctggtggaaaagagcttcgagacagacaccaacctgaacttccagaacctgagcgtgatcggcttcagaatcctgctgctgaaagtggccggctttaacctgctgatgaccctgcggctgtggtccagccgcgccaagagaagcggatctggcgtgaagcagaccctgaatttcgacctgctgaagctggctggcgacgtggaatccaacccaggccctactagtaccatggactggatttggcgcatccttttccttgtcggcgctgctaccggcgcccattccgggcccgaagtgcaactggttgaatccggtggcggcctggtgcaacccggcggatctctcagacttagctgtgccgcctccggcagaaccttcacaatgggatggtacaggcaggctccagggaaagagagagagttcgtcgccgccatctctctgtctcccacactggcctactacgccgactctgtgaaaggccggttcaccatctccagagataatagcaagaacaccgtggtgctgcaaatgaactctctgagagccgaggatacagccctgtactattgtgccgctgaccggaagtccgtgatgagcatcagacccgattactggggacagggcacactggtcacagtgtctagtggatccggcggcggaggatctggcggaggcggatctgggggcggaggctctttcgaagtccaacttgtggagtctggagggggcctggtgcagcccggcggctctctcagactgtcttgtgcggcaagcggctacaccttcacctcttactggatagaatgggtgaggcaggcacctggaaagggactggagtggattggagagattctgccaggagggggagatacaaattacaatgaaatcttcaaggggcgggccaccttttcagcggataccagcaagaatacagcttacctgcagatgaatagcctccgggcagaagataccgctgtttattattgcacgagacgggtgccaataagactggactattgggggcaagggactcttgtcaccgtcagttcaacgcgtgaggacctgaagaacgtgttcccacctgaggtggccgtgttcgagcctagcaaggccgagatcgcccacacccagaaagccaccctcgtgtgcctggctaccggcttctaccccgaccatgtggaactgtcttggtgggtcaacggcaaagaggtgcacagcggcgtgtgtaccgacccccagccactgaaagaacagcccgccctgaacgacagccggtactgcctgagcagcagactgagagtgtccgccaccttctggcagaacccccggaaccacttcagatgccaggtgcagttctacggcctgagcgagaacgacgagtggacccaggacagagccaagcccgtgacccagatcgtgtctgccgaagcctggggcagagccgattgcggcatcaccagcgccagctaccaccagggcgtgctgagcgccaccatcctgtacgagatcctgctgggcaaggccaccctgtacgccgtgctggtgtctgccctggtgctgatggctatggtcaagcggaaggacagccggggataa

SEQ ID NO: 5843 - DNA, 2694 bp, synthetic construct
  source 1..2694: mol_type = other DNA
atggccttaccagtgaccgccttgctcctgccgctggccttgctgctccacgccgccaggccggaagtgcagctggttgaatctggcggaggactggttcaggctggcggatctctgagactgtcttgtgccgccagcggcagaacctttagcatgggctggtttagacaggcccctggcaaagagagagagttcgtcgccgccatcacatactctggcggcagcccttactacgccgactctgtgaagggcagattcaccatcagccgggacaacgccaagaacaccgtgtacctccagatgaacagcctgaagcctgaggacaccgccgtgtactactgcgccgccaatccaacatacggcagcgactggaacgccgagaattggggccagggaacccaagtgacagtgtctagcggtaccggcggaggcggatctggcggcggaggtagcggtggcggaggatctgaattcgacatccagttgacccagtcccccagctcactcagcgccagtgtgggggaccgggtgaccattacctgtaaagccagtcagagtgtggactatgagggggatagcttcctgaattggtatcagcagaagcctggcaaagccccaaagctgctgatctacgctgcatctaatctggagtcaggcgtgccttctaggttctccggtagtgggtctgggaccgatttcacattgaccatttcatccctccaacccgaggatttcgctacatattactgtcagcagtccaatgaggaccctctcacctttggccagggcaccaaagttgaaattaagagactcgaggacctgaagaacgtgttcccacctgaggtggccgtgttcgagcctagcgaggccgagatcagccacacccagaaagccaccctcgtgtgcctggctaccggcttctaccccgaccatgtggaactgtcttggtgggtcaacggcaaagaggtgcacagcggcgtgtgtaccgacccccagccactgaaagaacagcccgccctgaacgacagccggtactgcctgagcagcagactgagagtgtccgccaccttctggcagaacccccggaaccacttcagatgccaggtgcagttctacggcctgagcgagaacgacgagtggacccaggacagagccaagcccgtgacccagatcgtgtctgccgaagcctggggcagagccgattgcggctttaccagcgagagctaccagcagggcgtgctgagcgccaccatcctgtacgagatcctgctgggcaaggccaccctgtacgccgtgctggtgtctgccctggtgctgatggctatggtcaagcggaaggacagccggggaagggccaagcgatctggatctggagcaacaaacttctcactactcaaacaagcaggtgacgtggaggagaatcccgggcctactagtgccaccatggactggatttggcgcatccttttccttgtcggcgctgctaccggcgcccattccgggcccgaagtgcaactggttgaatccggtggcggcctggtgcaagcaggcggatctctcagacttagctgtgccgcctccggcagaaccttcacaatgggatggtttaggcaggctccagggaaagagagagagttcgtcgccgccatctctctgtctcccacactggcctactacgccgactctgtgaaaggccggttcaccatctccagagataatgccaagaacaccgtggtgctgcaaatgaactctctgaaacccgaggatacagccctgtactattgtgccgctgaccggaagtccgtgatgagcatcagacccgattactggggacagggcacacaagtcacagtgtcctctggatccggcggcggaggatctggcggaggcggatctgggggcggaggctctttcgaagtccaacttgtggagtctggagggggcctggtgcagcccggcggctctctcagactgtcttgtgcggcaagcggctacaccttcacctcttactggatagaatgggtgaggcaggcacctggaaagggactggagtggattggagagattctgccaggagggggagatacaaattacaatgaaatcttcaaggggcgggccaccttttcagcggataccagcaagaatacagcttacctgcagatgaatagcctccgggcagaagataccgctgtttattattgcacgagacgggtgccaataagactggactattgggggcaagggactcttgtcaccgtcagttcaacgcgtatccagaaccctgatcctgccgtgtaccagctgcgggatagcaagagcagcgacaagagcgtgtgtctgttcaccgacttcgacagccagaccaacgtgtcccagagcaaggactccgacgtgtacatcaccgataagtgcgtgctggacatgcggagcatggacttcaagagcaactccgccgtggcctggtccaacaagtccgatttcgcctgcgccaacgccttcaacaacagcattatccccgaggacacattcttcccaagccccgagagcagctgcgacgtgaagctggtggaaaagagcttcgagacagacaccaacctgaacttccagaacctgagcgtgatcggcttcagaatcctgctgctgaaagtggccggctttaacctgctgatgaccctgcggctgtggtccagctaa

SEQ ID NO: 5844 - DNA, 2307 bp, synthetic construct
  source 1..2307: mol_type = other DNA
atggccttaccagtgaccgccttgctcctgccgctggccttgctgctccacgccgccaggccggaagtgcagctggttgaatctggcggaggactggttcagcctggcggatctctgagactgagctgtgaagccagcggcttcgccagcgacgattacatcatcggctggttcagacaggcccctggcaaagagagagagggcgtcagctgcatcagctctaagtacgccaacaccgtgtacaccgacagcgtgaagggcagattcagactgagcagaggcaccgccaagaataccgtgtacctccagatgagcgccctgaagcctgaggataccgccgtgtactactgcgctatggacagccgcagagtgacatgccctgagatcagcaccatgcaccggaacttcgattcttggggccagggcacactggtcacagtgtcatctggtaccggcggaggcggatctggcggcggaggtagcggtggcggaggatctgaattcgacatccagttgacccagtcccccagctcactcagcgccagtgtgggggaccgggtgaccattacctgtaaagccagtcagagtgtggactatgagggggatagcttcctgaattggtatcagcagaagcctggcaaagccccaaagctgctgatctacgctgcatctaatctggagtcaggcgtgccttctaggttctccggtagtgggtctgggaccgatttcacattgaccatttcatccctccaacccgaggatttcgctacatattactgtcagcagtccaatgaggaccctctcacctttggccagggcaccaaagttgaaattaagagactcgaggacctgaagaacgtgttcccacctgaggtggccgtgttcgagcctagcaaggccgagatcgcccacacccagaaagccaccctcgtgtgcctggctaccggcttctaccccgaccatgtggaactgtcttggtgggtcaacggcaaagaggtgcacagcggcgtgtgtaccgacccccagccactgaaagaacagcccgccctgaacgacagccggtactgcctgagcagcagactgagagtgtccgccaccttctggcagaacccccggaaccacttcagatgccaggtgcagttctacggcctgagcgagaacgacgagtggacccaggacagagccaagcccgtgacccagatcgtgtctgccgaagcctggggcagagccgattgcggcatcaccagcgccagctaccaccagggcgtgctgagcgccaccatcctgtacgagatcctgctgggcaaggccaccctgtacgccgtgctggtgtctgccctggtgctgatggctatggtcaagcggaaggacagccggggaagggccaagcgatctggatctggagcaacaaacttctcactactcaaacaagcaggtgacgtggaggagaatcccgggcctactagtatggactggatttggcgcatccttttccttgtcggcgctgctaccggcgcgcattccttcgaagtccaacttgtggagtctggagggggcctggtgcagcccggcggctctctcagactgtcttgtgcggcaagcggctacaccttcacctcttactggatagaatgggtgaggcaggcacctggaaagggactggagtggattggagagattctgccaggagggggagatacaaattacaatgaaatcttcaaggggcgggccaccttttcagcggataccagcaagaatacagcttacctgcagatgaatagcctccgggcagaagataccgctgtttattattgcacgagacgggtgccaataagactggactattgggggcaagggactcttgtcaccgtcagttcaacgcgtatccagaaccctgatcctgccgtgtaccagctgcgggatagcaagagcagcgacaagagcgtgtgtctgttcaccgacttcgacagccagaccaacgtgtcccagagcaaggactccgacgtgtacatcaccgataagtgcgtgctggacatgcggagcatggacttcaagagcaactccgccgtggcctggtccaacaagtccgatttcgcctgcgccaacgccttcaacaacagcattatccccgaggacacattcttcccaagcagcgacgtgccctgcgacgtgaagctggtggaaaagagcttcgagacagacaccaacctgaacttccagaacctgagcgtgatcggcttcagaatcctgctgctgaaagtggccggctttaacctgctgatgaccctgcggctgtggtccagctaa

SEQ ID NO: 5845 - DNA, 2280 bp, synthetic construct
  source 1..2280: mol_type = other DNA
atggccttaccagtgaccgccttgctcctgccgctggccttgctgctccacgccgccaggccggacatccagttgacccagtcccccagctcactcagcgccagtgtgggggaccgggtgaccattacctgtaaagccagtcagagtgtggactatgagggggatagcttcctgaattggtatcagcagaagcctggcaaagccccaaagctgctgatctacgctgcatctaatctggagtcaggcgtgccttctaggttctccggtagtgggtctgggaccgatttcacattgaccatttcatccctccaacccgaggatttcgctacatattactgtcagcagtccaatgaggaccctctcacctttggccagggcaccaaagttgaaattaagagactcgaggacctgaagaacgtgttcccacctgaggtggccgtgttcgagcctagcgaggccgagatcagccacacccagaaagccaccctcgtgtgcctggctaccggcttctaccccgaccatgtggaactgtcttggtgggtcaacggcaaagaggtgcacagcggcgtgtgtaccgacccccagccactgaaagaacagcccgccctgaacgacagccggtactgcctgagcagcagactgagagtgtccgccaccttctggcagaacccccggaaccacttcagatgccaggtgcagttctacggcctgagcgagaacgacgagtggacccaggacagagccaagcccgtgacccagatcgtgtctgccgaagcctggggcagagccgattgcggctttaccagcgagagctaccagcagggcgtgctgagcgccaccatcctgtacgagatcctgctgggcaaggccaccctgtacgccgtgctggtgtctgccctggtgctgatggctatggtcaagcggaaggacagccggggaagggccaagcgatctggatctggagcaacaaacttctcactactcaaacaagcaggtgacgtggaggagaatcccgggcctactagtaccatggactggatttggcgcatccttttccttgtcggcgctgctaccggcgcccattccgggcccgaagtgcaactggttgaatccggtggcggcctggtgcaacccggcggatctctcagacttagctgtgccgcctccggcagaaccttcacaatgggatggtacaggcaggctccagggaaagagagagagttcgtcgccgccatctctctgtctcccacactggcctactacgccgactctgtgaaaggccggttcaccatctccagagataatagcaagaacaccgtggtgctgcaaatgaactctctgagagccgaggatacagccctgtactattgtgccgctgaccggaagtccgtgatgagcatcagacccgattactggggacagggcacactggtcacagtgtctagtggatccggcggcggaggatctggcggaggcggatctgggggcggaggctctttcgaagtccaacttgtggagtctggagggggcctggtgcagcccggcggctctctcagactgtcttgtgcggcaagcggctacaccttcacctcttactggatagaatgggtgaggcaggcacctggaaagggactggagtggattggagagattctgccaggagggggagatacaaattacaatgaaatcttcaaggggcgggccaccttttcagcggataccagcaagaatacagcttacctgcagatgaatagcctccgggcagaagataccgctgtttattattgcacgagacgggtgccaataagactggactattgggggcaagggactcttgtcaccgtcagttcaacgcgtatccagaaccctgatcctgccgtgtaccagctgcgggatagcaagagcagcgacaagagcgtgtgtctgttcaccgacttcgacagccagaccaacgtgtcccagagcaaggactccgacgtgtacatcaccgataagtgcgtgctggacatgcggagcatggacttcaagagcaactccgccgtggcctggtccaacaagtccgatttcgcctgcgccaacgccttcaacaacagcattatccccgaggacacattcttcccaagccccgagagcagctgcgacgtgaagctggtggaaaagagcttcgagacagacaccaacctgaacttccagaacctgagcgtgatcggcttcagaatcctgctgctgaaagtggccggctttaacctgctgatgaccctgcggctgtggtccagctaa

SEQ ID NO: 5846 - DNA, 2298 bp, synthetic construct
  source 1..2298: mol_type = other DNA
atggccttaccagtgaccgccttgctcctgccgctggccttgctgctccacgccgccaggccggacatccagttgacccagtcccccagctcactcagcgccagtgtgggggaccgggtgaccattacctgtaaagccagtcagagtgtggactatgagggggatagcttcctgaattggtatcagcagaagcctggcaaagccccaaagctgctgatctacgctgcatctaatctggagtcaggcgtgccttctaggttctccggtagtgggtctgggaccgatttcacattgaccatttcatccctccaacccgaggatttcgctacatattactgtcagcagtccaatgaggaccctctcacctttggccagggcaccaaagttgaaattaagagactcgaggacctgaagaacgtgttcccacctgaggtggccgtgttcgagcctagcgaggccgagatcagccacacccagaaagccaccctcgtgtgcctggctaccggcttctaccccgaccatgtggaactgtcttggtgggtcaacggcaaagaggtgcacagcggcgtgtgtaccgacccccagccactgaaagaacagcccgccctgaacgacagccggtactgcctgagcagcagactgagagtgtccgccaccttctggcagaacccccggaaccacttcagatgccaggtgcagttctacggcctgagcgagaacgacgagtggacccaggacagagccaagcccgtgacccagatcgtgtctgccgaagcctggggcagagccgattgcggctttaccagcgagagctaccagcagggcgtgctgagcgccaccatcctgtacgagatcctgctgggcaaggccaccctgtacgccgtgctggtgtctgccctggtgctgatggctatggtcaagcggaaggacagccggggaagggccaagcgatctggatctggagcaacaaacttctcactactcaaacaagcaggtgacgtggaggagaatcccgggcctactagtaccatggactggatttggcgcatccttttccttgtcggcgctgctaccggcgcccattccgggccccaggtgcagctggttgaatctggcggaggactggttcagcctggcggatctctgagactgtcttgtgccgccagcggcaacatcaacagcagaaactgcatgggctggttcagacaggcccctggcaagggaagagaaggcgtggcagctatcggccaagtgaccggcagaacctactacgtggacagcgtgaagggcagattcaccatcagcctggacaacagcaagaacaccctgtacctccagatgaacagcctgagagccgaggacaccgccgtgtactattgtgctgctgcccctggctgtctgctgtctgcacttagaagcgccgactacagaaactggggccagggcacactggtcaccgtttcttctggatccggcggcggaggatctggcggaggcggatctgggggcggaggctctttcgaagtccaacttgtggagtctggagggggcctggtgcagcccggcggctctctcagactgtcttgtgcggcaagcggctacaccttcacctcttactggatagaatgggtgaggcaggcacctggaaagggactggagtggattggagagattctgccaggagggggagatacaaattacaatgaaatcttcaaggggcgggccaccttttcagcggataccagcaagaatacagcttacctgcagatgaatagcctccgggcagaagataccgctgtttattattgcacgagacgggtgccaataagactggactattgggggcaagggactcttgtcaccgtcagttcaacgcgtatccagaaccctgatcctgccgtgtaccagctgcgggatagcaagagcagcgacaagagcgtgtgtctgttcaccgacttcgacagccagaccaacgtgtcccagagcaaggactccgacgtgtacatcaccgataagtgcgtgctggacatgcggagcatggacttcaagagcaactccgccgtggcctggtccaacaagtccgatttcgcctgcgccaacgccttcaacaacagcattatccccgaggacacattcttcccaagccccgagagcagctgcgacgtgaagctggtggaaaagagcttcgagacagacaccaacctgaacttccagaacctgagcgtgatcggcttcagaatcctgctgctgaaagtggccggctttaacctgctgatgaccctgcggctgtggtccagc

SEQ ID NO: 5847 - DNA, 2301 bp, synthetic construct
  source 1..2301: mol_type = other DNA
atggccttaccagtgaccgccttgctcctgccgctggccttgctgctccacgccgccaggccggacatccagttgacccagtcccccagctcactcagcgccagtgtgggggaccgggtgaccattacctgtaaagccagtcagagtgtggactatgagggggatagcttcctgaattggtatcagcagaagcctggcaaagccccaaagctgctgatctacgctgcatctaatctggagtcaggcgtgccttctaggttctccggtagtgggtctgggaccgatttcacattgaccatttcatccctccaacccgaggatttcgctacatattactgtcagcagtccaatgaggaccctctcacctttggccagggcaccaaagttgaaattaagagactcgaggacctgaagaacgtgttcccacctgaggtggccgtgttcgagcctagcgaggccgagatcagccacacccagaaagccaccctcgtgtgcctggctaccggcttctaccccgaccatgtggaactgtcttggtgggtcaacggcaaagaggtgcacagcggcgtgtgtaccgacccccagccactgaaagaacagcccgccctgaacgacagccggtactgcctgagcagcagactgagagtgtccgccaccttctggcagaacccccggaaccacttcagatgccaggtgcagttctacggcctgagcgagaacgacgagtggacccaggacagagccaagcccgtgacccagatcgtgtctgccgaagcctggggcagagccgattgcggctttaccagcgagagctaccagcagggcgtgctgagcgccaccatcctgtacgagatcctgctgggcaaggccaccctgtacgccgtgctggtgtctgccctggtgctgatggctatggtcaagcggaaggacagccggggaagggccaagcgatctggatctggagcaacaaacttctcactactcaaacaagcaggtgacgtggaggagaatcccgggcctactagtaccatggactggatttggcgcatccttttccttgtcggcgctgctaccggcgcccattccgggccccaggtgcagctggttgaatctggcggaggatctgttcaggctggcggctctctgagactgtcttgtggcgcttccggcaacatcagcagcagaaactgcatgggctggttcagacaggcccctggcaaagagagagaaggcgttgccgccatcggacaagtgaccggcagatcctactacgtggacagcgtgaagggcagattcaccatcagcctggacaacgccaagaacaccctgtacctccagatgaacacactgaagcccgaggacaccgccatgtactactgtgctgctgcccctggctgtctgctgtctgcacttagaagcgccgactacagaaactggggccagggaacccaagtgacagtgtctagtggatccggcggcggaggatctggcggaggcggatctgggggcggaggctctttcgaagtccaacttgtggagtctggagggggcctggtgcagcccggcggctctctcagactgtcttgtgcggcaagcggctacaccttcacctcttactggatagaatgggtgaggcaggcacctggaaagggactggagtggattggagagattctgccaggagggggagatacaaattacaatgaaatcttcaaggggcgggccaccttttcagcggataccagcaagaatacagcttacctgcagatgaatagcctccgggcagaagataccgctgtttattattgcacgagacgggtgccaataagactggactattgggggcaagggactcttgtcaccgtcagttcaacgcgtatccagaaccctgatcctgccgtgtaccagctgcgggatagcaagagcagcgacaagagcgtgtgtctgttcaccgacttcgacagccagaccaacgtgtcccagagcaaggactccgacgtgtacatcaccgataagtgcgtgctggacatgcggagcatggacttcaagagcaactccgccgtggcctggtccaacaagtccgatttcgcctgcgccaacgccttcaacaacagcattatccccgaggacacattcttcccaagccccgagagcagctgcgacgtgaagctggtggaaaagagcttcgagacagacaccaacctgaacttccagaacctgagcgtgatcggcttcagaatcctgctgctgaaagtggccggctttaacctgctgatgaccctgcggctgtggtccagctaa

SEQ ID NO: 5848 - DNA, 2724 bp, synthetic construct
  source 1..2724: mol_type = other DNA
atggccttaccagtgaccgccttgctcctgccgctggccttgctgctccacgccgccaggccggaagtgcagctggttgaatctggcggaggactggttcaggctggcggatctctgagactgtcttgtgccgccagcggcagaacctttagcatgggctggtttagacaggcccctggcaaagagagagagttcgtcgccgccatcacatactctggcggcagcccttactacgccgactctgtgaagggcagattcaccatcagccgggacaacgccaagaacaccgtgtacctccagatgaacagcctgaagcctgaggacaccgccgtgtactactgcgccgccaatccaacatacggcagcgactggaacgccgagaattggggccagggaacccaagtgacagtgtctagcggtaccggcggaggcggatctggcggcggaggtagcggtggcggaggatctgaattcgacatccagttgacccagtcccccagctcactcagcgccagtgtgggggaccgggtgaccattacctgtaaagccagtcagagtgtggactatgagggggatagcttcctgaattggtatcagcagaagcctggcaaagccccaaagctgctgatctacgctgcatctaatctggagtcaggcgtgccttctaggttctccggtagtgggtctgggaccgatttcacattgaccatttcatccctccaacccgaggatttcgctacatattactgtcagcagtccaatgaggaccctctcacctttggccagggcaccaaagttgaaattaagagactcgagatccagaaccctgatcctgccgtgtaccagctgcgggatagcaagagcagcgacaagagcgtgtgtctgttcaccgacttcgacagccagaccaacgtgtcccagagcaaggactccgacgtgtacatcaccgataagtgcgtgctggacatgcggagcatggacttcaagagcaactccgccgtggcctggtccaacaagtccgatttcgcctgcgccaacgccttcaacaacagcattatccccgaggacacattcttcccaagcagcgacgtgccctgcgacgtgaagctggtggaaaagagcttcgagacagacaccaacctgaacttccagaacctgagcgtgatcggcttcagaatcctgctgctgaaagtggccggctttaacctgctgatgaccctgcggctgtggtccagccgcgccaagagaagcggatctggcgtgaagcagaccctgaatttcgacctgctgaagctggctggcgacgtggaatccaacccaggccctactagtaccatggactggatttggcgcatccttttccttgtcggcgctgctaccggcgcccattccgggccccaggtgcagctggttgaatctggcggaggatctgttcaggctggcggctctctgagactgtcttgtggcgcttccggcaacatcagcagcagaaactgcatgggctggttcagacaggcccctggcaaagagagagaaggcgttgccgccatcggacaagtgaccggcagatcctactacgtggacagcgtgaagggcagattcaccatcagcctggacaacgccaagaacaccctgtacctccagatgaacacactgaagcccgaggacaccgccatgtactactgtgctgctgcccctggctgtctgctgtctgcacttagaagcgccgactacagaaactggggccagggaacccaagtgacagtgtctagtggatccggcggcggaggatctggcggaggcggatctgggggcggaggctctttcgaagtccaacttgtggagtctggagggggcctggtgcagcccggcggctctctcagactgtcttgtgcggcaagcggctacaccttcacctcttactggatagaatgggtgaggcaggcacctggaaagggactggagtggattggagagattctgccaggagggggagatacaaattacaatgaaatcttcaaggggcgggccaccttttcagcggataccagcaagaatacagcttacctgcagatgaatagcctccgggcagaagataccgctgtttattattgcacgagacgggtgccaataagactggactattgggggcaagggactcttgtcaccgtcagttcaacgcgtgaggacctgaagaacgtgttcccacctgaggtggccgtgttcgagcctagcaaggccgagatcgcccacacccagaaagccaccctcgtgtgcctggctaccggcttctaccccgaccatgtggaactgtcttggtgggtcaacggcaaagaggtgcacagcggcgtgtgtaccgacccccagccactgaaagaacagcccgccctgaacgacagccggtactgcctgagcagcagactgagagtgtccgccaccttctggcagaacccccggaaccacttcagatgccaggtgcagttctacggcctgagcgagaacgacgagtggacccaggacagagccaagcccgtgacccagatcgtgtctgccgaagcctggggcagagccgattgcggcatcaccagcgccagctaccaccagggcgtgctgagcgccaccatcctgtacgagatcctgctgggcaaggccaccctgtacgccgtgctggtgtctgccctggtgctgatggctatggtcaagcggaaggacagccggggataa

SEQ ID NO: 5849 - DNA, 2715 bp, synthetic construct
  source 1..2715: mol_type = other DNA
atggccttaccagtgaccgccttgctcctgccgctggccttgctgctccacgccgccaggccgcaggtgcagctggttgaatctggcggaggatctgttcaggctggcggctctctgagactgtcttgtggcgcttccggcaacatcagcagcagaaactgcatgggctggttcagacaggcccctggcaaagagagagaaggcgttgccgccatcggacaagtgaccggcagatcctactacgtggacagcgtgaagggcagattcaccatcagcctggacaacgccaagaacaccctgtacctccagatgaacacactgaagcccgaggacaccgccatgtactactgtgctgctgcccctggctgtctgctgtctgcacttagaagcgccgactacagaaactggggccagggaacccaagtgacagtgtctagtggtaccggcggaggcggatctggcggcggaggtagcggtggcggaggatctgaattcgacatccagttgacccagtcccccagctcactcagcgccagtgtgggggaccgggtgaccattacctgtaaagccagtcagagtgtggactatgagggggatagcttcctgaattggtatcagcagaagcctggcaaagccccaaagctgctgatctacgctgcatctaatctggagtcaggcgtgccttctaggttctccggtagtgggtctgggaccgatttcacattgaccatttcatccctccaacccgaggatttcgctacatattactgtcagcagtccaatgaggaccctctcacctttggccagggcaccaaagttgaaattaagagactcgaggacctgaagaacgtgttcccacctgaggtggccgtgttcgagcctagcgaggccgagatcagccacacccagaaagccaccctcgtgtgcctggctaccggcttctaccccgaccatgtggaactgtcttggtgggtcaacggcaaagaggtgcacagcggcgtgtgtaccgacccccagccactgaaagaacagcccgccctgaacgacagccggtactgcctgagcagcagactgagagtgtccgccaccttctggcagaacccccggaaccacttcagatgccaggtgcagttctacggcctgagcgagaacgacgagtggacccaggacagagccaagcccgtgacccagatcgtgtctgccgaagcctggggcagagccgattgcggctttaccagcgagagctaccagcagggcgtgctgagcgccaccatcctgtacgagatcctgctgggcaaggccaccctgtacgccgtgctggtgtctgccctggtgctgatggctatggtcaagcggaaggacagccggggaagggccaagcgatctggatctggagcaacaaacttctcactactcaaacaagcaggtgacgtggaggagaatcccgggcctactagtgccaccatggactggatttggcgcatccttttccttgtcggcgctgctaccggcgcccattccgggcccgaagtgcaactggttgaatccggtggcggcctggtgcaagcaggcggatctctcagacttagctgtgccgcctccggcagaaccttcacaatgggatggtttaggcaggctccagggaaagagagagagttcgtcgccgccatctctctgtctcccacactggcctactacgccgactctgtgaaaggccggttcaccatctccagagataatgccaagaacaccgtggtgctgcaaatgaactctctgaaacccgaggatacagccctgtactattgtgccgctgaccggaagtccgtgatgagcatcagacccgattactggggacagggcacacaagtcacagtgtcctctggatccggcggcggaggatctggcggaggcggatctgggggcggaggctctttcgaagtccaacttgtggagtctggagggggcctggtgcagcccggcggctctctcagactgtcttgtgcggcaagcggctacaccttcacctcttactggatagaatgggtgaggcaggcacctggaaagggactggagtggattggagagattctgccaggagggggagatacaaattacaatgaaatcttcaaggggcgggccaccttttcagcggataccagcaagaatacagcttacctgcagatgaatagcctccgggcagaagataccgctgtttattattgcacgagacgggtgccaataagactggactattgggggcaagggactcttgtcaccgtcagttcaacgcgtatccagaaccctgatcctgccgtgtaccagctgcgggatagcaagagcagcgacaagagcgtgtgtctgttcaccgacttcgacagccagaccaacgtgtcccagagcaaggactccgacgtgtacatcaccgataagtgcgtgctggacatgcggagcatggacttcaagagcaactccgccgtggcctggtccaacaagtccgatttcgcctgcgccaacgccttcaacaacagcattatccccgaggacacattcttcccaagccccgagagcagctgcgacgtgaagctggtggaaaagagcttcgagacagacaccaacctgaacttccagaacctgagcgtgatcggcttcagaatcctgctgctgaaagtggccggctttaacctgctgatgaccctgcggctgtggtccagctaa

SEQ ID NO: 5850 - DNA, 2304 bp, synthetic construct
  source 1..2304: mol_type = other DNA
atggccttaccagtgaccgccttgctcctgccgctggccttgctgctccacgccgccaggccgcaggtgcagctggttgaatctggcggaggatctgttcaggctggcggctctctgagactgtcttgtggcgcttccggcaacatcagcagcagaaactgcatgggctggttcagacaggcccctggcaaagagagagaaggcgttgccgccatcggacaagtgaccggcagatcctactacgtggacagcgtgaagggcagattcaccatcagcctggacaacgccaagaacaccctgtacctccagatgaacacactgaagcccgaggacaccgccatgtactactgtgctgctgcccctggctgtctgctgtctgcacttagaagcgccgactacagaaactggggccagggaacccaagtgacagtgtctagtggtaccggcggaggcggatctggcggcggaggtagcggtggcggaggatctgaattcgacatccagttgacccagtcccccagctcactcagcgccagtgtgggggaccgggtgaccattacctgtaaagccagtcagagtgtggactatgagggggatagcttcctgaattggtatcagcagaagcctggcaaagccccaaagctgctgatctacgctgcatctaatctggagtcaggcgtgccttctaggttctccggtagtgggtctgggaccgatttcacattgaccatttcatccctccaacccgaggatttcgctacatattactgtcagcagtccaatgaggaccctctcacctttggccagggcaccaaagttgaaattaagagactcgaggacctgaagaacgtgttcccacctgaggtggccgtgttcgagcctagcgaggccgagatcagccacacccagaaagccaccctcgtgtgcctggctaccggcttctaccccgaccatgtggaactgtcttggtgggtcaacggcaaagaggtgcacagcggcgtgtgtaccgacccccagccactgaaagaacagcccgccctgaacgacagccggtactgcctgagcagcagactgagagtgtccgccaccttctggcagaacccccggaaccacttcagatgccaggtgcagttctacggcctgagcgagaacgacgagtggacccaggacagagccaagcccgtgacccagatcgtgtctgccgaagcctggggcagagccgattgcggctttaccagcgagagctaccagcagggcgtgctgagcgccaccatcctgtacgagatcctgctgggcaaggccaccctgtacgccgtgctggtgtctgccctggtgctgatggctatggtcaagcggaaggacagccggggaagggccaagcgatctggatctggagcaacaaacttctcactactcaaacaagcaggtgacgtggaggagaatcccgggcctactagtgccaccatggactggatttggcgcatccttttccttgtcggcgctgctaccggcgcccattccttcgaagtccaacttgtggagtctggagggggcctggtgcagcccggcggctctctcagactgtcttgtgcggcaagcggctacaccttcacctcttactggatagaatgggtgaggcaggcacctggaaagggactggagtggattggagagattctgccaggagggggagatacaaattacaatgaaatcttcaaggggcgggccaccttttcagcggataccagcaagaatacagcttacctgcagatgaatagcctccgggcagaagataccgctgtttattattgcacgagacgggtgccaataagactggactattgggggcaagggactcttgtcaccgtcagttcaacgcgtatccagaaccctgatcctgccgtgtaccagctgcgggatagcaagagcagcgacaagagcgtgtgtctgttcaccgacttcgacagccagaccaacgtgtcccagagcaaggactccgacgtgtacatcaccgataagtgcgtgctggacatgcggagcatggacttcaagagcaactccgccgtggcctggtccaacaagtccgatttcgcctgcgccaacgccttcaacaacagcattatccccgaggacacattcttcccaagccccgagagcagctgcgacgtgaagctggtggaaaagagcttcgagacagacaccaacctgaacttccagaacctgagcgtgatcggcttcagaatcctgctgctgaaagtggccggctttaacctgctgatgaccctgcggctgtggtccagctaa

SEQ ID NO: 5851 - DNA, 2304 bp, synthetic construct
  source 1..2304: mol_type = other DNA
atggccttaccagtgaccgccttgctcctgccgctggccttgctgctccacgccgccaggccgcaagttcagctggtggaaagcggtggtggcgttgtgcaacctggtggaagtctgaggctgagctgtgccgcttctggcctgagctttagcacctacactgtggcctggttcaggcaggctcccggaaagggtcttgaaggcgtggccgccattccttacaccagccagcacatggtgtacacagacagcgtcagaggccggttcaccatcagcagagacaactccaagaatacgctctatctccagatgaactctctgcgcgccgaagatacagccgtgtattactgcgccaccgacagacggcctggcacctctatgctggctatcaacggctacaacagatggggacagggaaccaccgtgaccgtgtcatctggtaccggcggaggcggatctggcggcggaggtagcggtggcggaggatctgaattcgacatccagttgacccagtcccccagctcactcagcgccagtgtgggggaccgggtgaccattacctgtaaagccagtcagagtgtggactatgagggggatagcttcctgaattggtatcagcagaagcctggcaaagccccaaagctgctgatctacgctgcatctaatctggagtcaggcgtgccttctaggttctccggtagtgggtctgggaccgatttcacattgaccatttcatccctccaacccgaggatttcgctacatattactgtcagcagtccaatgaggaccctctcacctttggccagggcaccaaagttgaaattaagagactcgaggacctgaagaacgtgttcccacctgaggtggccgtgttcgagcctagcgaggccgagatcagccacacccagaaagccaccctcgtgtgcctggctaccggcttctaccccgaccatgtggaactgtcttggtgggtcaacggcaaagaggtgcacagcggcgtgtgtaccgacccccagccactgaaagaacagcccgccctgaacgacagccggtactgcctgagcagcagactgagagtgtccgccaccttctggcagaacccccggaaccacttcagatgccaggtgcagttctacggcctgagcgagaacgacgagtggacccaggacagagccaagcccgtgacccagatcgtgtctgccgaagcctggggcagagccgattgcggctttaccagcgagagctaccagcagggcgtgctgagcgccaccatcctgtacgagatcctgctgggcaaggccaccctgtacgccgtgctggtgtctgccctggtgctgatggctatggtcaagcggaaggacagccggggaagggccaagcgatctggatctggagcaacaaacttctcactactcaaacaagcaggtgacgtggaggagaatcccgggcctactagtgccaccatggactggatttggcgcatccttttccttgtcggcgctgctaccggcgcccattccttcgaagtccaacttgtggagtctggagggggcctggtgcagcccggcggctctctcagactgtcttgtgcggcaagcggctacaccttcacctcttactggatagaatgggtgaggcaggcacctggaaagggactggagtggattggagagattctgccaggagggggagatacaaattacaatgaaatcttcaaggggcgggccaccttttcagcggataccagcaagaatacagcttacctgcagatgaatagcctccgggcagaagataccgctgtttattattgcacgagacgggtgccaataagactggactattgggggcaagggactcttgtcaccgtcagttcaacgcgtatccagaaccctgatcctgccgtgtaccagctgcgggatagcaagagcagcgacaagagcgtgtgtctgttcaccgacttcgacagccagaccaacgtgtcccagagcaaggactccgacgtgtacatcaccgataagtgcgtgctggacatgcggagcatggacttcaagagcaactccgccgtggcctggtccaacaagtccgatttcgcctgcgccaacgccttcaacaacagcattatccccgaggacacattcttcccaagccccgagagcagctgcgacgtgaagctggtggaaaagagcttcgagacagacaccaacctgaacttccagaacctgagcgtgatcggcttcagaatcctgctgctgaaagtggccggctttaacctgctgatgaccctgcggctgtggtccagctaa

SEQ ID NO: 5852 - DNA, 2301 bp, synthetic construct
  source 1..2301: mol_type = other DNA
atggccttaccagtgaccgccttgctcctgccgctggccttgctgctccacgccgccaggccggacatccagttgacccagtcccccagctcactcagcgccagtgtgggggaccgggtgaccattacctgtaaagccagtcagagtgtggactatgagggggatagcttcctgaattggtatcagcagaagcctggcaaagccccaaagctgctgatctacgctgcatctaatctggagtcaggcgtgccttctaggttctccggtagtgggtctgggaccgatttcacattgaccatttcatccctccaacccgaggatttcgctacatattactgtcagcagtccaatgaggaccctctcacctttggccagggcaccaaagttgaaattaagagactcgaggacctgaagaacgtgttcccacctgaggtggccgtgttcgagcctagcgaggccgagatcagccacacccagaaagccaccctcgtgtgcctggctaccggcttctaccccgaccatgtggaactgtcttggtgggtcaacggcaaagaggtgcacagcggcgtgtgtaccgacccccagccactgaaagaacagcccgccctgaacgacagccggtactgcctgagcagcagactgagagtgtccgccaccttctggcagaacccccggaaccacttcagatgccaggtgcagttctacggcctgagcgagaacgacgagtggacccaggacagagccaagcccgtgacccagatcgtgtctgccgaagcctggggcagagccgattgcggctttaccagcgagagctaccagcagggcgtgctgagcgccaccatcctgtacgagatcctgctgggcaaggccaccctgtacgccgtgctggtgtctgccctggtgctgatggctatggtcaagcggaaggacagccggggaagggccaagcgatctggatctggagcaacaaacttctcactactcaaacaagcaggtgacgtggaggagaatcccgggcctactagtaccatggactggatttggcgcatccttttccttgtcggcgctgctaccggcgcccattccgggccccaagttcagctggtggaaagcggtggtggcgttgtgcaacctggtggaagtctgaggctgagctgtgccgcttctggcctgagctttagcacctacactgtggcctggttcaggcaggctcccggaaagggtcttgaaggcgtggccgccattccttacaccagccagcacatggtgtacacagacagcgtcagaggccggttcaccatcagcagagacaactccaagaatacgctctatctccagatgaactctctgcgcgccgaagatacagccgtgtattactgcgccaccgacagacggcctggcacctctatgctggctatcaacggctacaacagatggggacagggaaccaccgtgaccgtgtcatctggatccggcggcggaggatctggcggaggcggatctgggggcggaggctctttcgaagtccaacttgtggagtctggagggggcctggtgcagcccggcggctctctcagactgtcttgtgcggcaagcggctacaccttcacctcttactggatagaatgggtgaggcaggcacctggaaagggactggagtggattggagagattctgccaggagggggagatacaaattacaatgaaatcttcaaggggcgggccaccttttcagcggataccagcaagaatacagcttacctgcagatgaatagcctccgggcagaagataccgctgtttattattgcacgagacgggtgccaataagactggactattgggggcaagggactcttgtcaccgtcagttcaacgcgtatccagaaccctgatcctgccgtgtaccagctgcgggatagcaagagcagcgacaagagcgtgtgtctgttcaccgacttcgacagccagaccaacgtgtcccagagcaaggactccgacgtgtacatcaccgataagtgcgtgctggacatgcggagcatggacttcaagagcaactccgccgtggcctggtccaacaagtccgatttcgcctgcgccaacgccttcaacaacagcattatccccgaggacacattcttcccaagccccgagagcagctgcgacgtgaagctggtggaaaagagcttcgagacagacaccaacctgaacttccagaacctgagcgtgatcggcttcagaatcctgctgctgaaagtggccggctttaacctgctgatgaccctgcggctgtggtccagctaa

SEQ ID NO: 5853 - DNA, 2307 bp, synthetic construct
  source 1..2307: mol_type = other DNA
atggccttaccagtgaccgccttgctcctgccgctggccttgctgctccacgccgccaggccggacatccagttgacccagtcccccagctcactcagcgccagtgtgggggaccgggtgaccattacctgtaaagccagtcagagtgtggactatgagggggatagcttcctgaattggtatcagcagaagcctggcaaagccccaaagctgctgatctacgctgcatctaatctggagtcaggcgtgccttctaggttctccggtagtgggtctgggaccgatttcacattgaccatttcatccctccaacccgaggatttcgctacatattactgtcagcagtccaatgaggaccctctcacctttggccagggcaccaaagttgaaattaagagactcgaggacctgaagaacgtgttcccacctgaggtggccgtgttcgagcctagcgaggccgagatcagccacacccagaaagccaccctcgtgtgcctggctaccggcttctaccccgaccatgtggaactgtcttggtgggtcaacggcaaagaggtgcacagcggcgtgtgtaccgacccccagccactgaaagaacagcccgccctgaacgacagccggtactgcctgagcagcagactgagagtgtccgccaccttctggcagaacccccggaaccacttcagatgccaggtgcagttctacggcctgagcgagaacgacgagtggacccaggacagagccaagcccgtgacccagatcgtgtctgccgaagcctggggcagagccgattgcggctttaccagcgagagctaccagcagggcgtgctgagcgccaccatcctgtacgagatcctgctgggcaaggccaccctgtacgccgtgctggtgtctgccctggtgctgatggctatggtcaagcggaaggacagccggggaagggccaagcgatctggatctggagcaacaaacttctcactactcaaacaagcaggtgacgtggaggagaatcccgggcctactagtaccatggactggatttggcgcatccttttccttgtcggcgctgctaccggcgcccattccgggcccgaggtgcagctggttgaatctggcggaggatctgttcaggctggcggctctctgagactgtcttgtgccgccagcggctacacctacagcatcaactgcatgggctggttcagacaggcccctggcaaagagagagaaggcgttgccgccatctctaccggcggaggcagaaccgattaccgggattctgtgaagggcagattcaccatcagccaggacaacgccaagaacaccgtgtacctccagatgaacagcctgaagcctgaggacaccgccatgtactactgtgccggcaagaccacctatcctggctacggatgtggcctgggcagaagcgcctacaattattggggccagggcacccaagtgaccgtgtcatctggatccggcggcggaggatctggcggaggcggatctgggggcggaggctctttcgaagtccaacttgtggagtctggagggggcctggtgcagcccggcggctctctcagactgtcttgtgcggcaagcggctacaccttcacctcttactggatagaatgggtgaggcaggcacctggaaagggactggagtggattggagagattctgccaggagggggagatacaaattacaatgaaatcttcaaggggcgggccaccttttcagcggataccagcaagaatacagcttacctgcagatgaatagcctccgggcagaagataccgctgtttattattgcacgagacgggtgccaataagactggactattgggggcaagggactcttgtcaccgtcagttcaacgcgtatccagaaccctgatcctgccgtgtaccagctgcgggatagcaagagcagcgacaagagcgtgtgtctgttcaccgacttcgacagccagaccaacgtgtcccagagcaaggactccgacgtgtacatcaccgataagtgcgtgctggacatgcggagcatggacttcaagagcaactccgccgtggcctggtccaacaagtccgatttcgcctgcgccaacgccttcaacaacagcattatccccgaggacacattcttcccaagccccgagagcagctgcgacgtgaagctggtggaaaagagcttcgagacagacaccaacctgaacttccagaacctgagcgtgatcggcttcagaatcctgctgctgaaagtggccggctttaacctgctgatgaccctgcggctgtggtccagctaa

SEQ ID NO: 5854 - DNA, 1863 bp, synthetic construct
  source 1..1863: mol_type = other DNA
atggccttaccagtgaccgccttgctcctgccgctggccttgctgctccacgccgccaggccggacatccagttgacccagtcccccagctcactcagcgccagtgtgggggaccgggtgaccattacctgtaaagccagtcagagtgtggactatgagggggatagcttcctgaattggtatcagcagaagcctggcaaagccccaaagctgctgatctacgctgcatctaatctggagtcaggcgtgccttctaggttctccggtagtgggtctgggaccgatttcacattgaccatttcatccctccaacccgaggatttcgctacatattactgtcagcagtccaatgaggaccctctcacctttggccagggcaccaaagttgaaattaagagactcgaggacctgaagcacgtgttcccacctgaggtggccgtgttcgagcctagcgacgccgagatctggcacacccagaaagccaccctcgtgtgcctggctaccggcttctaccccgaccatgtggaactgtcttggtgggtcaacggcaaagaggtgcacagcggcgtgtctaccgacccccagccactgaaagaacagcccgccctgaacgacagccggtactgcctgagcagcagactgagagtgtccgccaccttctggcagaacccccggaaccacttcagatgccaggtgcagttctacggcctgagcgagaacgacgagtggacccaggacagagccaagcccgtgacccagatcgtgtctgccgaagcctggggcagagccgattgcggctttaccagcgagagctaccagcagggcgtgctgagcgccaccatcctgtacgagatcctgctgggcaaggccaccctgtacgccgtgctggtgtctgccctggtgctgatggctatggtcaagcggaaggacagccggggaagggccaagcgatctggatctggagcaacaaacttctcactactcaaacaagcaggtgacgtggaggagaatcccgggcctactagtatggactggatttggcgcatccttttccttgtcggcgctgctaccggcgcgcattccttcgaagtccaacttgtggagtctggagggggcctggtgcagcccggcggctctctcagactgtcttgtgcggcaagcggctacaccttcacctcttactggatagaatgggtgaggcaggcacctggaaagggactggagtggattggagagattctgccaggagggggagatacaaattacaatgaaatcttcaaggggcgggccaccttttcagcggataccagcaagaatacagcttacctgcagatgaatagcctccgggcagaagataccgctgtttattattgcacgagacgggtgccaataagactggactattgggggcaagggactcttgtcaccgtcagttcaacgcgtatccagaaccctgatcctgccgtgtaccagctgcgggatagcaagagcagcgacaagagcgtgtgtctgttcaccgacttcgacagccagaccaacgtgtcccagagcaaggactccgacgtgtacatcaccgataagaccgtgctggacatgcggagcatggacttcaagagcaactccgccgtggcctggtccagcaagtccgatttcgcctgcgccaacgccttcaacaacagcattatccccgaggacacattcttcccaagccccgagatggcctgcgacgtgaagctggtggaaaagagcttcgagacagacaccaacctgaacttccagaacctgctcgtgatctggctgagaatcctgctgctgaaagtggccggctttaacctgctgatgaccctgcggctgtggtccagc

SEQ ID NO: 5855 - DNA, 1863 bp, synthetic construct
  source 1..1863: mol_type = other DNA
atggccttaccagtgaccgccttgctcctgccgctggccttgctgctccacgccgccaggccggacatccagttgacccagtcccccagctcactcagcgccagtgtgggggaccgggtgaccattacctgtaaagccagtcagagtgtggactatgagggggatagcttcctgaattggtatcagcagaagcctggcaaagccccaaagctgctgatctacgctgcatctaatctggagtcaggcgtgccttctaggttctccggtagtgggtctgggaccgatttcacattgaccatttcatccctccaacccgaggatttcgctacatattactgtcagcagtccaatgaggaccctctcacctttggccagggcaccaaagttgaaattaagagactcgaggacctgaagcacgtgttcccacctgaggtggccgtgttcgagcctagcgacgccgagatctggcacacccagaaagccaccctcgtgtgcctggctaccggcttctaccccgaccatgtggaactgtcttggtgggtcaacggcaaagaggtgcacagcggcgtgtctaccgacccccagccactgaaagaacagcccgccctgaacgacagccggtactgcctgagcagcagactgagagtgtccgccaccttctggcagaacccccggaaccacttcagatgccaggtgcagttctacggcctgagcgagaacgacgagtggacccaggacagagccaagcccgtgacccagatcgtgtctgccgaagcctggggcagagccgattgcggctttaccagcgagagctaccagcagggcgtgctgagcgccaccatcctgtacgagatcctgctgggcaaggccaccctgtacgccgtgctggtgtctgccctggtgctgatggctatggtcaagcggaaggacagccggggaagggccaagcgatctggatctggagcaacaaacttctcactactcaaacaagcaggtgacgtggaggagaatcccgggcctactagtatggactggatttggcgcatccttttccttgtcggcgctgctaccggcgcgcattccttcgaagtccaacttgtggagtctggagggggcctggtgcagcccggcggctctctcagactgtcttgtgcggcaagcggctacaccttcacctcttactggatagaatgggtgaggcaggcacctggaaagggactggagtggattggagagattctgccaggagggggagatacaaattacaatgaaatcttcaaggggcgggccaccttttcagcggataccagcaagaatacagcttacctgcagatgaatagcctccgggcagaagataccgctgtttattattgcacgagacgggtgccaataagactggactattgggggcaagggactcttgtcaccgtcagttcaacgcgtatccagaaccctgatcctgccgtgtaccagctgcgggatagcaagagcagcgacaagagcgtgtgtctgttcaccgacttcgacagccagaccaacgtgtcccagagcaaggactccgacgtgtacatcaccgataagaccgtgctggacatgcggagcatggacttcaagagcaactccgccgtggcctggtccaccaagtccgatttcgcctgcgccaacgccttcaacaacagcattatccccgaggacacattcttcccaagccccgaggtggtgtgcgacgtgaagctggtggaaaagagcttcgagacagacaccaacctgaacttccagaacctggtggtgatcggcgccagaatcctgctgctgaaagtggccggctttaacctgctgatgaccctgcggctgtggtccagc

SEQ ID NO: 5856 - DNA, 1863 bp, synthetic construct
  source 1..1863: mol_type = other DNA
atggccttaccagtgaccgccttgctcctgccgctggccttgctgctccacgccgccaggccggacatccagttgacccagtcccccagctcactcagcgccagtgtgggggaccgggtgaccattacctgtaaagccagtcagagtgtggactatgagggggatagcttcctgaattggtatcagcagaagcctggcaaagccccaaagctgctgatctacgctgcatctaatctggagtcaggcgtgccttctaggttctccggtagtgggtctgggaccgatttcacattgaccatttcatccctccaacccgaggatttcgctacatattactgtcagcagtccaatgaggaccctctcacctttggccagggcaccaaagttgaaattaagagactcgaggacctgaagaacgtgttcccacctgaggtggccgtgttcgagcctagcaaggccgagatcagcagaacccagaaagccaccctcgtgtgcctggctaccggcttctaccctcctcatgtggaactgtcttggtgggtcaacggcaaagaggtgcacgacggcgtgtgtaccgacccccagccactgaaagaacagcccgccctgaacgacagccggtactgcctgagcagcagactgagagtgtccgccaccttctggcagaacccccggaaccacttcagatgccaggtgcagttctacggcctgagcgagaacgacgagtggacccaggacagagccaagcccgtgacccagatcgtgtctgccgaagcctggggcagagccgattgcggctttaccagcgagagctaccagcagggcgtgctgagcgccaccatcctgtacgagatcctgctgggcaaggccaccctgtacgccgtgctggtgtctgccctggtgctgatggctatggtcaagcggaaggacagccggggaagggccaagcgatctggatctggagcaacaaacttctcactactcaaacaagcaggtgacgtggaggagaatcccgggcctactagtatggactggatttggcgcatccttttccttgtcggcgctgctaccggcgcgcattccttcgaagtccaacttgtggagtctggagggggcctggtgcagcccggcggctctctcagactgtcttgtgcggcaagcggctacaccttcacctcttactggatagaatgggtgaggcaggcacctggaaagggactggagtggattggagagattctgccaggagggggagatacaaattacaatgaaatcttcaaggggcgggccaccttttcagcggataccagcaagaatacagcttacctgcagatgaatagcctccgggcagaagataccgctgtttattattgcacgagacgggtgccaataagactggactattgggggcaagggactcttgtcaccgtcagttcaacgcgtatccagaaccctgatcctgccgtgtaccagctgcgggatagcaagagcagcgacaagttcgtgtgtctgttcaccgacttcgacagccagatcaacgtgtcccagagcaaggactccgacgtgtacatcaccgataagtgcgtgctggacatgcggagcatggacttcaagagcaactccgccgtggcctggtccaacaagtccgatttcacctgcgccaacgccttcaacaacagcattatccccgaggacacattcttcccaagccccgagagcagctgcgacgtgaagctggtggaaaagagcttcgagacagacaccaacctgaacttccagaacctgagcgtgatcggcttcagaatcctgctgctgaaagtggccggctttaacctgctgatgaccctgcggctgtggtccagc

SEQ ID NO: 5857 - DNA, 2289 bp, synthetic construct
  source 1..2289: mol_type = other DNA
atggccttaccagtgaccgccttgctcctgccgctggccttgctgctccacgccgccaggccggacatccagttgacccagtcccccagctcactcagcgccagtgtgggggaccgggtgaccattacctgtaaagccagtcagagtgtggactatgagggggatagcttcctgaattggtatcagcagaagcctggcaaagccccaaagctgctgatctacgctgcatctaatctggagtcaggcgtgccttctaggttctccggtagtgggtctgggaccgatttcacattgaccatttcatccctccaacccgaggatttcgctacatattactgtcagcagtccaatgaggaccctctcacctttggccagggcaccaaagttgaaattaagagactcgaggacctgaagaacgtgttcccacctgaggtggccgtgttcgagcctagcgaggccgagatcagccacacccagaaagccaccctcgtgtgcctggctaccggcttctaccccgaccatgtggaactgtcttggtgggtcaacggcaaagaggtgcacagcggcgtgtgtaccgacccccagccactgaaagaacagcccgccctgaacgacagccggtactgcctgagcagcagactgagagtgtccgccaccttctggcagaacccccggaaccacttcagatgccaggtgcagttctacggcctgagcgagaacgacgagtggacccaggacagagccaagcccgtgacccagatcgtgtctgccgaagcctggggcagagccgattgcggctttaccagcgagagctaccagcagggcgtgctgagcgccaccatcctgtacgagatcctgctgggcaaggccaccctgtacgccgtgctggtgtctgccctggtgctgatggctatggtcaagcggaaggacagccggggaagggccaagcgatctggatctggagcaacaaacttctcactactcaaacaagcaggtgacgtggaggagaatcccgggcctactagtaccatggactggatttggcgcatccttttccttgtcggcgctgctaccggcgcccattccgggccccaggtgcagctccaagaaagcggacccggactggttaagccctctcagaccctgtctctgacctgcacagttagcggagccagcattaccacaggcgagtattattggaattggtttcggcagccaccaggcaaggggcttgagtggatgggtgctattgctgcctctggcagcaccacctactctcccagctttgagagcagaacctccatcagccgggacacctccaaaaaccagttctctctgaagctgtcctccgtgaccgctgctgacaccgccgtctattattgtggccggtctttcggcgtggcagctgtgaccacaggacagaacagaggccagggaacacttgtgaccgtgtcctctggatccggcggcggaggatctggcggaggcggatctgggggcggaggctctttcgaagtccaacttgtggagtctggagggggcctggtgcagcccggcggctctctcagactgtcttgtgcggcaagcggctacaccttcacctcttactggatagaatgggtgaggcaggcacctggaaagggactggagtggattggagagattctgccaggagggggagatacaaattacaatgaaatcttcaaggggcgggccaccttttcagcggataccagcaagaatacagcttacctgcagatgaatagcctccgggcagaagataccgctgtttattattgcacgagacgggtgccaataagactggactattgggggcaagggactcttgtcaccgtcagttcaacgcgtatccagaaccctgatcctgccgtgtaccagctgcgggatagcaagagcagcgacaagagcgtgtgtctgttcaccgacttcgacagccagaccaacgtgtcccagagcaaggactccgacgtgtacatcaccgataagtgcgtgctggacatgcggagcatggacttcaagagcaactccgccgtggcctggtccaacaagtccgatttcgcctgcgccaacgccttcaacaacagcattatccccgaggacacattcttcccaagccccgagagcagctgcgacgtgaagctggtggaaaagagcttcgagacagacaccaacctgaacttccagaacctgagcgtgatcggcttcagaatcctgctgctgaaagtggccggctttaacctgctgatgaccctgcggctgtggtccagc

SEQ ID NO: 5858 - DNA, 2712 bp, synthetic construct
  source 1..2712: mol_type = other DNA
atggccttaccagtgaccgccttgctcctgccgctggccttgctgctccacgccgccaggccgcaggttcagctgcaagagtctggccctggcctggtcaagcctagccaaacactgagcctgacctgtaccgtgtctggcggctctatcaccaccggcgagttctactggaactggttcagacagcctcctggcaaaggactggaatggatgggagccattgccgccagcggcagcacaacatacagccctagcttcgagagccggaccagcatcagcagagacaccagcaagaatcagttcagcctgaagctgagcagcgtgacagccgccgatacagccgtgtattactgcggcagatcctttggagtggccgccgtgacaaccggccagaatagaggacagggcaccctggtcacagtgtctagcggtaccggcggaggcggatctggcggcggaggtagcggtggcggaggatctgaattcgacatccagttgacccagtcccccagctcactcagcgccagtgtgggggaccgggtgaccattacctgtaaagccagtcagagtgtggactatgagggggatagcttcctgaattggtatcagcagaagcctggcaaagccccaaagctgctgatctacgctgcatctaatctggagtcaggcgtgccttctaggttctccggtagtgggtctgggaccgatttcacattgaccatttcatccctccaacccgaggatttcgctacatattactgtcagcagtccaatgaggaccctctcacctttggccagggcaccaaagttgaaattaagagactcgagatccagaaccctgatcctgccgtgtaccagctgcgggatagcaagagcagcgacaagagcgtgtgtctgttcaccgacttcgacagccagaccaacgtgtcccagagcaaggactccgacgtgtacatcaccgataagtgcgtgctggacatgcggagcatggacttcaagagcaactccgccgtggcctggtccaacaagtccgatttcgcctgcgccaacgccttcaacaacagcattatccccgaggacacattcttcccaagcagcgacgtgccctgcgacgtgaagctggtggaaaagagcttcgagacagacaccaacctgaacttccagaacctgagcgtgatcggcttcagaatcctgctgctgaaagtggccggctttaacctgctgatgaccctgcggctgtggtccagccgcgccaagagaagcggatctggcgtgaagcagaccctgaatttcgacctgctgaagctggctggcgacgtggaatccaacccaggccctactagtaccatggactggatttggcgcatccttttccttgtcggcgctgctaccggcgcccattccgggcccgaagtgcaactggttgaatccggtggcggcctggtgcaacccggcggatctctcagacttagctgtgccgcctccggcagaaccttcacaatgggatggtacaggcaggctccagggaaagagagagagttcgtcgccgccatctctctgtctcccacactggcctactacgccgactctgtgaaaggccggttcaccatctccagagataatagcaagaacaccgtggtgctgcaaatgaactctctgagagccgaggatacagccctgtactattgtgccgctgaccggaagtccgtgatgagcatcagacccgattactggggacagggcacactggtcacagtgtctagtggatccggcggcggaggatctggcggaggcggatctgggggcggaggctctttcgaagtccaacttgtggagtctggagggggcctggtgcagcccggcggctctctcagactgtcttgtgcggcaagcggctacaccttcacctcttactggatagaatgggtgaggcaggcacctggaaagggactggagtggattggagagattctgccaggagggggagatacaaattacaatgaaatcttcaaggggcgggccaccttttcagcggataccagcaagaatacagcttacctgcagatgaatagcctccgggcagaagataccgctgtttattattgcacgagacgggtgccaataagactggactattgggggcaagggactcttgtcaccgtcagttcaacgcgtgaggacctgaagaacgtgttcccacctgaggtggccgtgttcgagcctagcaaggccgagatcgcccacacccagaaagccaccctcgtgtgcctggctaccggcttctaccccgaccatgtggaactgtcttggtgggtcaacggcaaagaggtgcacagcggcgtgtgtaccgacccccagccactgaaagaacagcccgccctgaacgacagccggtactgcctgagcagcagactgagagtgtccgccaccttctggcagaacccccggaaccacttcagatgccaggtgcagttctacggcctgagcgagaacgacgagtggacccaggacagagccaagcccgtgacccagatcgtgtctgccgaagcctggggcagagccgattgcggcatcaccagcgccagctaccaccagggcgtgctgagcgccaccatcctgtacgagatcctgctgggcaaggccaccctgtacgccgtgctggtgtctgccctggtgctgatggctatggtcaagcggaaggacagccgggga

SEQ ID NO: 5859 - DNA, 2301 bp, synthetic construct
  source 1..2301: mol_type = other DNA
atggccttaccagtgaccgccttgctcctgccgctggccttgctgctccacgccgccaggccgcaggttcagctgcaagagtctggccctggcctggtcaagcctagccaaacactgagcctgacctgtaccgtgtctggcggctctatcaccaccggcgagttctactggaactggttcagacagcctcctggcaaaggactggaatggatgggagccattgccgccagcggcagcacaacatacagccctagcttcgagagccggaccagcatcagcagagacaccagcaagaatcagttcagcctgaagctgagcagcgtgacagccgccgatacagccgtgtattactgcggcagatcctttggagtggccgccgtgacaaccggccagaatagaggacagggcaccctggtcacagtgtctagcggtaccggcggaggcggatctggcggcggaggtagcggtggcggaggatctgaattcgacatccagttgacccagtcccccagctcactcagcgccagtgtgggggaccgggtgaccattacctgtaaagccagtcagagtgtggactatgagggggatagcttcctgaattggtatcagcagaagcctggcaaagccccaaagctgctgatctacgctgcatctaatctggagtcaggcgtgccttctaggttctccggtagtgggtctgggaccgatttcacattgaccatttcatccctccaacccgaggatttcgctacatattactgtcagcagtccaatgaggaccctctcacctttggccagggcaccaaagttgaaattaagagactcgagatccagaaccctgatcctgccgtgtaccagctgcgggatagcaagagcagcgacaagagcgtgtgtctgttcaccgacttcgacagccagaccaacgtgtcccagagcaaggactccgacgtgtacatcaccgataagtgcgtgctggacatgcggagcatggacttcaagagcaactccgccgtggcctggtccaacaagtccgatttcgcctgcgccaacgccttcaacaacagcattatccccgaggacacattcttcccaagcagcgacgtgccctgcgacgtgaagctggtggaaaagagcttcgagacagacaccaacctgaacttccagaacctgagcgtgatcggcttcagaatcctgctgctgaaagtggccggctttaacctgctgatgaccctgcggctgtggtccagccgcgccaagagaagcggatctggcgtgaagcagaccctgaatttcgacctgctgaagctggctggcgacgtggaatccaacccaggccctactagtaccatggactggatttggcgcatccttttccttgtcggcgctgctaccggcgcccattccttcgaagtccaacttgtggagtctggagggggcctggtgcagcccggcggctctctcagactgtcttgtgcggcaagcggctacaccttcacctcttactggatagaatgggtgaggcaggcacctggaaagggactggagtggattggagagattctgccaggagggggagatacaaattacaatgaaatcttcaaggggcgggccaccttttcagcggataccagcaagaatacagcttacctgcagatgaatagcctccgggcagaagataccgctgtttattattgcacgagacgggtgccaataagactggactattgggggcaagggactcttgtcaccgtcagttcaacgcgtgaggacctgaagaacgtgttcccacctgaggtggccgtgttcgagcctagcaaggccgagatcgcccacacccagaaagccaccctcgtgtgcctggctaccggcttctaccccgaccatgtggaactgtcttggtgggtcaacggcaaagaggtgcacagcggcgtgtgtaccgacccccagccactgaaagaacagcccgccctgaacgacagccggtactgcctgagcagcagactgagagtgtccgccaccttctggcagaacccccggaaccacttcagatgccaggtgcagttctacggcctgagcgagaacgacgagtggacccaggacagagccaagcccgtgacccagatcgtgtctgccgaagcctggggcagagccgattgcggcatcaccagcgccagctaccaccagggcgtgctgagcgccaccatcctgtacgagatcctgctgggcaaggccaccctgtacgccgtgctggtgtctgccctggtgctgatggctatggtcaagcggaaggacagccgggga

SEQ ID NO: 5860 - DNA, 2700 bp, synthetic construct
  source 1..2700: mol_type = other DNA
atggccttaccagtgaccgccttgctcctgccgctggccttgctgctccacgccgccaggccggaagtgcagctggttgaatctggcggaggactggttcaggctggcggatctctgagactgtcttgtgccgccagcggcagaacctttagcatgggctggtttagacaggcccctggcaaagagagagagttcgtcgccgccatcacatactctggcggcagcccttactacgccgactctgtgaagggcagattcaccatcagccgggacaacgccaagaacaccgtgtacctccagatgaacagcctgaagcctgaggacaccgccgtgtactactgcgccgccaatccaacatacggcagcgactggaacgccgagaattggggccagggaacccaagtgacagtgtctagcggtaccggcggaggcggatctggcggcggaggtagcggtggcggaggatctgaattcgacatccagttgacccagtcccccagctcactcagcgccagtgtgggggaccgggtgaccattacctgtaaagccagtcagagtgtggactatgagggggatagcttcctgaattggtatcagcagaagcctggcaaagccccaaagctgctgatctacgctgcatctaatctggagtcaggcgtgccttctaggttctccggtagtgggtctgggaccgatttcacattgaccatttcatccctccaacccgaggatttcgctacatattactgtcagcagtccaatgaggaccctctcacctttggccagggcaccaaagttgaaattaagagactcgaggacctgaagaacgtgttcccacctgaggtggccgtgttcgagcctagcgaggccgagatcagccacacccagaaagccaccctcgtgtgcctggctaccggcttctaccccgaccatgtggaactgtcttggtgggtcaacggcaaagaggtgcacagcggcgtgtgtaccgacccccagccactgaaagaacagcccgccctgaacgacagccggtactgcctgagcagcagactgagagtgtccgccaccttctggcagaacccccggaaccacttcagatgccaggtgcagttctacggcctgagcgagaacgacgagtggacccaggacagagccaagcccgtgacccagatcgtgtctgccgaagcctggggcagagccgattgcggctttaccagcgagagctaccagcagggcgtgctgagcgccaccatcctgtacgagatcctgctgggcaaggccaccctgtacgccgtgctggtgtctgccctggtgctgatggctatggtcaagcggaaggacagccggggaagggccaagcgatctggatctggagcaacaaacttctcactactcaaacaagcaggtgacgtggaggagaatcccgggcctactagtaccatggactggatttggcgcatccttttccttgtcggcgctgctaccggcgcccattccgggccccaggtgcagctccaagaaagcggacccggactggttaagccctctcagaccctgtctctgacctgcacagttagcggagccagcattaccacaggcgagtattattggaattggtttcggcagccaccaggcaaggggcttgagtggatgggtgctattgctgcctctggcagcaccacctactctcccagctttgagagcagaacctccatcagccgggacacctccaaaaaccagttctctctgaagctgtcctccgtgaccgctgctgacaccgccgtctattattgtggccggtctttcggcgtggcagctgtgaccacaggacagaacagaggccagggaacacttgtgaccgtgtcctctggatccggcggcggaggatctggcggaggcggatctgggggcggaggctctttcgaagtccaacttgtggagtctggagggggcctggtgcagcccggcggctctctcagactgtcttgtgcggcaagcggctacaccttcacctcttactggatagaatgggtgaggcaggcacctggaaagggactggagtggattggagagattctgccaggagggggagatacaaattacaatgaaatcttcaaggggcgggccaccttttcagcggataccagcaagaatacagcttacctgcagatgaatagcctccgggcagaagataccgctgtttattattgcacgagacgggtgccaataagactggactattgggggcaagggactcttgtcaccgtcagttcaacgcgtatccagaaccctgatcctgccgtgtaccagctgcgggatagcaagagcagcgacaagagcgtgtgtctgttcaccgacttcgacagccagaccaacgtgtcccagagcaaggactccgacgtgtacatcaccgataagtgcgtgctggacatgcggagcatggacttcaagagcaactccgccgtggcctggtccaacaagtccgatttcgcctgcgccaacgccttcaacaacagcattatccccgaggacacattcttcccaagccccgagagcagctgcgacgtgaagctggtggaaaagagcttcgagacagacaccaacctgaacttccagaacctgagcgtgatcggcttcagaatcctgctgctgaaagtggccggctttaacctgctgatgaccctgcggctgtggtccagc

SEQ ID NO: 5861 - DNA, 2721 bp, synthetic construct
  source 1..2721: mol_type = other DNA
atggccttaccagtgaccgccttgctcctgccgctggccttgctgctccacgccgccaggccggaagtgcagctggttgaatctggcggaggactggttcaggctggcggatctctgagactgtcttgtgccgccagcggcagaacctttagcatgggctggtttagacaggcccctggcaaagagagagagttcgtcgccgccatcacatactctggcggcagcccttactacgccgactctgtgaagggcagattcaccatcagccgggacaacgccaagaacaccgtgtacctccagatgaacagcctgaagcctgaggacaccgccgtgtactactgcgccgccaatccaacatacggcagcgactggaacgccgagaattggggccagggaacccaagtgacagtgtctagcggtaccggcggaggcggatctggcggcggaggtagcggtggcggaggatctgaattcgacatccagttgacccagtcccccagctcactcagcgccagtgtgggggaccgggtgaccattacctgtaaagccagtcagagtgtggactatgagggggatagcttcctgaattggtatcagcagaagcctggcaaagccccaaagctgctgatctacgctgcatctaatctggagtcaggcgtgccttctaggttctccggtagtgggtctgggaccgatttcacattgaccatttcatccctccaacccgaggatttcgctacatattactgtcagcagtccaatgaggaccctctcacctttggccagggcaccaaagttgaaattaagagactcgagatccagaaccctgatcctgccgtgtaccagctgcgggatagcaagagcagcgacaagagcgtgtgtctgttcaccgacttcgacagccagaccaacgtgtcccagagcaaggactccgacgtgtacatcaccgataagtgcgtgctggacatgcggagcatggacttcaagagcaactccgccgtggcctggtccaacaagtccgatttcgcctgcgccaacgccttcaacaacagcattatccccgaggacacattcttcccaagcagcgacgtgccctgcgacgtgaagctggtggaaaagagcttcgagacagacaccaacctgaacttccagaacctgagcgtgatcggcttcagaatcctgctgctgaaagtggccggctttaacctgctgatgaccctgcggctgtggtccagccgcgccaagagaagcggatctggcgtgaagcagaccctgaatttcgacctgctgaagctggctggcgacgtggaatccaacccaggccctactagtaccatggactggatttggcgcatccttttccttgtcggcgctgctaccggcgcccattccgggccccaggtgcagctggttgaatctggcggaggactggttcagcctggcggatctctgagactgtcttgtgccgccagcggcaacatcaacagcagaaactgcatgggctggttcagacaggcccctggcaagggaagagaaggcgtggcagctatcggccaagtgaccggcagaacctactacgtggacagcgtgaagggcagattcaccatcagcctggacaacagcaagaacaccctgtacctccagatgaacagcctgagagccgaggacaccgccgtgtactattgtgctgctgcccctggctgtctgctgtctgcacttagaagcgccgactacagaaactggggccagggcacactggtcaccgtttcttctggatccggcggcggaggatctggcggaggcggatctgggggcggaggctctttcgaagtccaacttgtggagtctggagggggcctggtgcagcccggcggctctctcagactgtcttgtgcggcaagcggctacaccttcacctcttactggatagaatgggtgaggcaggcacctggaaagggactggagtggattggagagattctgccaggagggggagatacaaattacaatgaaatcttcaaggggcgggccaccttttcagcggataccagcaagaatacagcttacctgcagatgaatagcctccgggcagaagataccgctgtttattattgcacgagacgggtgccaataagactggactattgggggcaagggactcttgtcaccgtcagttcaacgcgtgaggacctgaagaacgtgttcccacctgaggtggccgtgttcgagcctagcaaggccgagatcgcccacacccagaaagccaccctcgtgtgcctggctaccggcttctaccccgaccatgtggaactgtcttggtgggtcaacggcaaagaggtgcacagcggcgtgtgtaccgacccccagccactgaaagaacagcccgccctgaacgacagccggtactgcctgagcagcagactgagagtgtccgccaccttctggcagaacccccggaaccacttcagatgccaggtgcagttctacggcctgagcgagaacgacgagtggacccaggacagagccaagcccgtgacccagatcgtgtctgccgaagcctggggcagagccgattgcggcatcaccagcgccagctaccaccagggcgtgctgagcgccaccatcctgtacgagatcctgctgggcaaggccaccctgtacgccgtgctggtgtctgccctggtgctgatggctatggtcaagcggaaggacagccgggga

SEQ ID NO: 5862 - DNA, 2709 bp, synthetic construct
  source 1..2709: mol_type = other DNA
atggccttaccagtgaccgccttgctcctgccgctggccttgctgctccacgccgccaggccggaagtgcagctggttgaatctggcggaggactggttcaggctggcggatctctgagactgtcttgtgccgccagcggcagaacctttagcatgggctggtttagacaggcccctggcaaagagagagagttcgtcgccgccatcacatactctggcggcagcccttactacgccgactctgtgaagggcagattcaccatcagccgggacaacgccaagaacaccgtgtacctccagatgaacagcctgaagcctgaggacaccgccgtgtactactgcgccgccaatccaacatacggcagcgactggaacgccgagaattggggccagggaacccaagtgacagtgtctagcggtaccggcggaggcggatctggcggcggaggtagcggtggcggaggatctgaattcgacatccagttgacccagtcccccagctcactcagcgccagtgtgggggaccgggtgaccattacctgtaaagccagtcagagtgtggactatgagggggatagcttcctgaattggtatcagcagaagcctggcaaagccccaaagctgctgatctacgctgcatctaatctggagtcaggcgtgccttctaggttctccggtagtgggtctgggaccgatttcacattgaccatttcatccctccaacccgaggatttcgctacatattactgtcagcagtccaatgaggaccctctcacctttggccagggcaccaaagttgaaattaagagactcgaggacctgaagaacgtgttcccacctgaggtggccgtgttcgagcctagcgaggccgagatcagccacacccagaaagccaccctcgtgtgcctggctaccggcttctaccccgaccatgtggaactgtcttggtgggtcaacggcaaagaggtgcacagcggcgtgtgtaccgacccccagccactgaaagaacagcccgccctgaacgacagccggtactgcctgagcagcagactgagagtgtccgccaccttctggcagaacccccggaaccacttcagatgccaggtgcagttctacggcctgagcgagaacgacgagtggacccaggacagagccaagcccgtgacccagatcgtgtctgccgaagcctggggcagagccgattgcggctttaccagcgagagctaccagcagggcgtgctgagcgccaccatcctgtacgagatcctgctgggcaaggccaccctgtacgccgtgctggtgtctgccctggtgctgatggctatggtcaagcggaaggacagccggggaagggccaagcgatctggatctggagcaacaaacttctcactactcaaacaagcaggtgacgtggaggagaatcccgggcctactagtaccatggactggatttggcgcatccttttccttgtcggcgctgctaccggcgcccattccgggccccaggtgcagctggttgaatctggcggaggactggttcagcctggcggatctctgagactgtcttgtgccgccagcggcaacatcaacagcagaaactgcatgggctggttcagacaggcccctggcaagggaagagaaggcgtggcagctatcggccaagtgaccggcagaacctactacgtggacagcgtgaagggcagattcaccatcagcctggacaacagcaagaacaccctgtacctccagatgaacagcctgagagccgaggacaccgccgtgtactattgtgctgctgcccctggctgtctgctgtctgcacttagaagcgccgactacagaaactggggccagggcacactggtcaccgtttcttctggatccggcggcggaggatctggcggaggcggatctgggggcggaggctctttcgaagtccaacttgtggagtctggagggggcctggtgcagcccggcggctctctcagactgtcttgtgcggcaagcggctacaccttcacctcttactggatagaatgggtgaggcaggcacctggaaagggactggagtggattggagagattctgccaggagggggagatacaaattacaatgaaatcttcaaggggcgggccaccttttcagcggataccagcaagaatacagcttacctgcagatgaatagcctccgggcagaagataccgctgtttattattgcacgagacgggtgccaataagactggactattgggggcaagggactcttgtcaccgtcagttcaacgcgtatccagaaccctgatcctgccgtgtaccagctgcgggatagcaagagcagcgacaagagcgtgtgtctgttcaccgacttcgacagccagaccaacgtgtcccagagcaaggactccgacgtgtacatcaccgataagtgcgtgctggacatgcggagcatggacttcaagagcaactccgccgtggcctggtccaacaagtccgatttcgcctgcgccaacgccttcaacaacagcattatccccgaggacacattcttcccaagccccgagagcagctgcgacgtgaagctggtggaaaagagcttcgagacagacaccaacctgaacttccagaacctgagcgtgatcggcttcagaatcctgctgctgaaagtggccggctttaacctgctgatgaccctgcggctgtggtccagc

SEQ ID NO: 5863 - DNA, 2709 bp, synthetic construct
  source 1..2709: mol_type = other DNA
atggccttaccagtgaccgccttgctcctgccgctggccttgctgctccacgccgccaggccggaagtgcaactggttgaatccggtggcggcctggtgcaagcaggcggatctctcagacttagctgtgccgcctccggcagaaccttcacaatgggatggtttaggcaggctccagggaaagagagagagttcgtcgccgccatctctctgtctcccacactggcctactacgccgactctgtgaaaggccggttcaccatctccagagataatgccaagaacaccgtggtgctgcaaatgaactctctgaaacccgaggatacagccctgtactattgtgccgctgaccggaagtccgtgatgagcatcagacccgattactggggacagggcacacaagtcacagtgtcctctggtaccggcggaggcggatctggcggcggaggtagcggtggcggaggatctgaattcgacatccagttgacccagtcccccagctcactcagcgccagtgtgggggaccgggtgaccattacctgtaaagccagtcagagtgtggactatgagggggatagcttcctgaattggtatcagcagaagcctggcaaagccccaaagctgctgatctacgctgcatctaatctggagtcaggcgtgccttctaggttctccggtagtgggtctgggaccgatttcacattgaccatttcatccctccaacccgaggatttcgctacatattactgtcagcagtccaatgaggaccctctcacctttggccagggcaccaaagttgaaattaagagactcgaggacctgaagaacgtgttcccacctgaggtggccgtgttcgagcctagcgaggccgagatcagccacacccagaaagccaccctcgtgtgcctggctaccggcttctaccccgaccatgtggaactgtcttggtgggtcaacggcaaagaggtgcacagcggcgtgtgtaccgacccccagccactgaaagaacagcccgccctgaacgacagccggtactgcctgagcagcagactgagagtgtccgccaccttctggcagaacccccggaaccacttcagatgccaggtgcagttctacggcctgagcgagaacgacgagtggacccaggacagagccaagcccgtgacccagatcgtgtctgccgaagcctggggcagagccgattgcggctttaccagcgagagctaccagcagggcgtgctgagcgccaccatcctgtacgagatcctgctgggcaaggccaccctgtacgccgtgctggtgtctgccctggtgctgatggctatggtcaagcggaaggacagccggggaagggccaagcgatctggatctggagcaacaaacttctcactactcaaacaagcaggtgacgtggaggagaatcccgggcctactagtaccatggactggatttggcgcatccttttccttgtcggcgctgctaccggcgcccattccgggccccaggtgcagctggttgaatctggcggaggactggttcagcctggcggatctctgagactgtcttgtgccgccagcggcaacatcaacagcagaaactgcatgggctggttcagacaggcccctggcaagggaagagaaggcgtggcagctatcggccaagtgaccggcagaacctactacgtggacagcgtgaagggcagattcaccatcagcctggacaacagcaagaacaccctgtacctccagatgaacagcctgagagccgaggacaccgccgtgtactattgtgctgctgcccctggctgtctgctgtctgcacttagaagcgccgactacagaaactggggccagggcacactggtcaccgtttcttctggatccggcggcggaggatctggcggaggcggatctgggggcggaggctctttcgaagtccaacttgtggagtctggagggggcctggtgcagcccggcggctctctcagactgtcttgtgcggcaagcggctacaccttcacctcttactggatagaatgggtgaggcaggcacctggaaagggactggagtggattggagagattctgccaggagggggagatacaaattacaatgaaatcttcaaggggcgggccaccttttcagcggataccagcaagaatacagcttacctgcagatgaatagcctccgggcagaagataccgctgtttattattgcacgagacgggtgccaataagactggactattgggggcaagggactcttgtcaccgtcagttcaacgcgtatccagaaccctgatcctgccgtgtaccagctgcgggatagcaagagcagcgacaagagcgtgtgtctgttcaccgacttcgacagccagaccaacgtgtcccagagcaaggactccgacgtgtacatcaccgataagtgcgtgctggacatgcggagcatggacttcaagagcaactccgccgtggcctggtccaacaagtccgatttcgcctgcgccaacgccttcaacaacagcattatccccgaggacacattcttcccaagccccgagagcagctgcgacgtgaagctggtggaaaagagcttcgagacagacaccaacctgaacttccagaacctgagcgtgatcggcttcagaatcctgctgctgaaagtggccggctttaacctgctgatgaccctgcggctgtggtccagc

SEQ ID NO: 5864 - DNA, 2721 bp, synthetic construct
  source 1..2721: mol_type = other DNA
atggccttaccagtgaccgccttgctcctgccgctggccttgctgctccacgccgccaggccgcaggttcagctgcaagagtctggccctggcctggtcaagcctagccaaacactgagcctgacctgtaccgtgtctggcggctctatcaccaccggcgagttctactggaactggttcagacagcctcctggcaaaggactggaatggatgggagccattgccgccagcggcagcacaacatacagccctagcttcgagagccggaccagcatcagcagagacaccagcaagaatcagttcagcctgaagctgagcagcgtgacagccgccgatacagccgtgtattactgcggcagatcctttggagtggccgccgtgacaaccggccagaatagaggacagggcaccctggtcacagtgtctagcggtaccggcggaggcggatctggcggcggaggtagcggtggcggaggatctgaattcgacatccagttgacccagtcccccagctcactcagcgccagtgtgggggaccgggtgaccattacctgtaaagccagtcagagtgtggactatgagggggatagcttcctgaattggtatcagcagaagcctggcaaagccccaaagctgctgatctacgctgcatctaatctggagtcaggcgtgccttctaggttctccggtagtgggtctgggaccgatttcacattgaccatttcatccctccaacccgaggatttcgctacatattactgtcagcagtccaatgaggaccctctcacctttggccagggcaccaaagttgaaattaagagactcgaggacctgaagaacgtgttcccacctgaggtggccgtgttcgagcctagcgaggccgagatcagccacacccagaaagccaccctcgtgtgcctggctaccggcttctaccccgaccatgtggaactgtcttggtgggtcaacggcaaagaggtgcacagcggcgtgtgtaccgacccccagccactgaaagaacagcccgccctgaacgacagccggtactgcctgagcagcagactgagagtgtccgccaccttctggcagaacccccggaaccacttcagatgccaggtgcagttctacggcctgagcgagaacgacgagtggacccaggacagagccaagcccgtgacccagatcgtgtctgccgaagcctggggcagagccgattgcggctttaccagcgagagctaccagcagggcgtgctgagcgccaccatcctgtacgagatcctgctgggcaaggccaccctgtacgccgtgctggtgtctgccctggtgctgatggctatggtcaagcggaaggacagccggggaagggccaagcgatctggatctggagcaacaaacttctcactactcaaacaagcaggtgacgtggaggagaatcccgggcctactagtaccatggactggatttggcgcatccttttccttgtcggcgctgctaccggcgcccattccgggccccaggtgcagctggttgaatctggcggaggactggttcagcctggcggatctctgagactgtcttgtgccgccagcggcaacatcaacagcagaaactgcatgggctggttcagacaggcccctggcaagggaagagaaggcgtggcagctatcggccaagtgaccggcagaacctactacgtggacagcgtgaagggcagattcaccatcagcctggacaacagcaagaacaccctgtacctccagatgaacagcctgagagccgaggacaccgccgtgtactattgtgctgctgcccctggctgtctgctgtctgcacttagaagcgccgactacagaaactggggccagggcacactggtcaccgtttcttctggatccggcggcggaggatctggcggaggcggatctgggggcggaggctctttcgaagtccaacttgtggagtctggagggggcctggtgcagcccggcggctctctcagactgtcttgtgcggcaagcggctacaccttcacctcttactggatagaatgggtgaggcaggcacctggaaagggactggagtggattggagagattctgccaggagggggagatacaaattacaatgaaatcttcaaggggcgggccaccttttcagcggataccagcaagaatacagcttacctgcagatgaatagcctccgggcagaagataccgctgtttattattgcacgagacgggtgccaataagactggactattgggggcaagggactcttgtcaccgtcagttcaacgcgtatccagaaccctgatcctgccgtgtaccagctgcgggatagcaagagcagcgacaagagcgtgtgtctgttcaccgacttcgacagccagaccaacgtgtcccagagcaaggactccgacgtgtacatcaccgataagtgcgtgctggacatgcggagcatggacttcaagagcaactccgccgtggcctggtccaacaagtccgatttcgcctgcgccaacgccttcaacaacagcattatccccgaggacacattcttcccaagccccgagagcagctgcgacgtgaagctggtggaaaagagcttcgagacagacaccaacctgaacttccagaacctgagcgtgatcggcttcagaatcctgctgctgaaagtggccggctttaacctgctgatgaccctgcggctgtggtccagc

SEQ ID NO: 5865 - DNA, 1458 bp, synthetic construct
  source 1..1458: mol_type = other DNA
atggccttaccagtgaccgccttgctcctgccgctggccttgctgctccacgccgccaggccggacatcgtgatgacacagagccctgatagcctggccgtgtctctgggagagagagccaccattaactgcaaggccagccagagcgtggactacgacggcgacagcttcctgaactggtatcagcagaagcccggccagcctcctaagctgctgatctacgccgccagcaatctggaaagcggcgtgccaagcagattttccggctctggcagcggcaccgatttcaccctgacaatatccagcctccagcctgaggacgtggccgtgtactactgccagcagagcaacgacgaccctctgacctttggacagggcaccaaggtggaaatcaaaggcggaggcggaagtggaggcggaggatctggcggcggaggctctcaagttcagctggttcagagcggagccgaagtgaagaaacctggggcctctgtgaaggtgtcctgcaaagccagcggctacacctttaccagctactggatcaactgggtccgacaggcccctggacaaggactggaatggatgggacagatccttccaggcggaggggacaccaactacaacggcaagttcaagggcagagtgaccatcaccgccgacaccagcacaagcaccgcctacatggaactgagcagcctgagaagcgaggacaccgccgtgtattattgcaccagacgggtgcccatccggctggattattggggacagggaaccctggtcaccgtgtctagtacgcgtaaaattgaagttatgtatcctcctccttacctagacaatgagaagagcaatggaaccattatccatgtgaaagggaaacacctttgtccaagtcccctatttcccggaccttctaagcccttttgggtgctggtggtggttgggggagtcctggcttgctatagcttgctagtaacagtggcctttattattttctgggtgaggagtaagaggagcaggctcctgcacagtgactacatgaacatgactccacgccgccccggacccacccgcaagcattaccagccctatgccccaccacgcgacttcgcagcctatcgctccagagtgaagttcagcaggagcgcagacgcccccgcgtaccagcagggccagaaccagctctataacgagctcaatctaggacgaagagaggagtacgatgttttggacaagagacgtggccgggaccctgagatggggggaaagccgagaaggaagaaccctcaggaaggcctgtacaatgaactgcagaaagataagatggcggaggcctacagtgagattgggatgaaaggcgagcgccggaggggcaaggggcacgatggcctttaccagggtctcagtacagccaccaaggacacctacgacgcccttcacatgcaggccctgccccctcgc

SEQ ID NO: 5866 - DNA, 1476 bp, synthetic construct
  source 1..1476: mol_type = other DNA
atggccttaccagtgaccgccttgctcctgccgctggccttgctgctccacgccgccaggccggacatcgtgatgacacagagccctgatagcctggccgtgtctctgggagagagagccaccattaactgcaaggccagccagagcgtggactacgacggcgacagcttcctgaactggtatcagcagaagcccggccagcctcctaagctgctgatctacgccgccagcaatctggaaagcggcgtgccaagcagattttccggctctggcagcggcaccgatttcaccctgacaatatccagcctccagcctgaggacgtggccgtgtactactgccagcagagcaacgacgaccctctgacctttggacagggcaccaaggtggaaatcaaaggcggaggcggaagtggaggcggaggatctggcggcggaggctctcaagttcagctggttcagagcggagccgaagtgaagaaacctggggcctctgtgaaggtgtcctgcaaagccagcggctacacctttaccagctactggatcaactgggtccgacaggcccctggacaaggactggaatggatgggacagatccttccaggcggaggggacaccaactacaacggcaagttcaagggcagagtgaccatcaccgccgacaccagcacaagcaccgcctacatggaactgagcagcctgagaagcgaggacaccgccgtgtattattgcaccagacgggtgcccatccggctggattattggggacagggaaccctggtcaccgtgtctagtacgcgtgcgaagcccaccacgacgccagcgccgcgaccaccaacaccggcgcccaccatcgcgtcgcagcccctgtccctgcgcccagaggcgtgccggccagcggcggggggcgcagtgcacacgagggggctggacttcgcctgtgacatctacatctgggcgcccttggccgggacttgtggggtccttctcctgtcactggttatcaccctttactgcaaacggggcagaaagaaactcctgtatatattcaaacaaccatttatgagaccagtacaaactactcaagaggaagatggctgtagctgccgatttccagaagaagaagaaggaggatgtgaactgagagtgaagttcagcaggagcgcagacgcccccgcgtaccagcagggccagaaccagctctataacgagctgaatctaggacgaagagaggagtacgatgttttggacaagagacgtggccgggaccctgagatggggggaaagccgagaaggaagaaccctcaggaaggcctgtacaatgaactgcagaaagataagatggcggaggcctacagtgagattgggatgaaaggcgagcgccggaggggcaaggggcacgatggcctttaccagggtctcagtacagccaccaaggacacctacgacgcccttcacatgcaggccctgccccctcgc

SEQ ID NO: 5867 - DNA, 1476 bp, synthetic construct
  source 1..1476: mol_type = other DNA
atggccttaccagtgaccgccttgctcctgccgctggccttgctgctccacgccgccaggccgcaagttcagctggttcagagcggagccgaagtgaagaaacctggggcctctgtgaaggtgtcctgcaaagccagcggctacacctttaccagctactggatcaactgggtccgacaggcccctggacaaggactggaatggatgggacagatccttccaggcggaggggacaccaactacaacggcaagttcaagggcagagtgaccatcaccgccgacaccagcacaagcaccgcctacatggaactgagcagcctgagaagcgaggacaccgccgtgtattattgcaccagacgggtgcccatccggctggattattggggacagggaaccctggtcaccgtgtctagtggcggaggcggaagtggaggcggaggatctggcggcggaggctctgacatcgtgatgacacagagccctgatagcctggccgtgtctctgggagagagagccaccattaactgcaaggccagccagagcgtggactacgacggcgacagcttcctgaactggtatcagcagaagcccggccagcctcctaagctgctgatctacgccgccagcaatctggaaagcggcgtgccaagcagattttccggctctggcagcggcaccgatttcaccctgacaatatccagcctccagcctgaggacgtggccgtgtactactgccagcagagcaacgacgaccctctgacctttggacagggcaccaaggtggaaatcaaaacgcgtgcgaagcccaccacgacgccagcgccgcgaccaccaacaccggcgcccaccatcgcgtcgcagcccctgtccctgcgcccagaggcgtgccggccagcggcggggggcgcagtgcacacgagggggctggacttcgcctgtgacatctacatctgggcgcccttggccgggacttgtggggtccttctcctgtcactggttatcaccctttactgcaaacggggcagaaagaaactcctgtatatattcaaacaaccatttatgagaccagtacaaactactcaagaggaagatggctgtagctgccgatttccagaagaagaagaaggaggatgtgaactgagagtgaagttcagcaggagcgcagacgcccccgcgtaccagcagggccagaaccagctctataacgagctgaatctaggacgaagagaggagtacgatgttttggacaagagacgtggccgggaccctgagatggggggaaagccgagaaggaagaaccctcaggaaggcctgtacaatgaactgcagaaagataagatggcggaggcctacagtgagattgggatgaaaggcgagcgccggaggggcaaggggcacgatggcctttaccagggtctcagtacagccaccaaggacacctacgacgcccttcacatgcaggccctgccccctcgc

SEQ ID NO: 5868 - DNA, 1875 bp, synthetic construct
  source 1..1875: mol_type = other DNA
atggccttaccagtgaccgccttgctcctgccgctggccttgctgctccacgccgccaggccggacatcgtgatgacacagagccctgatagcctggccgtgtctctgggagagagagccaccattaactgcaaggccagccagagcgtggactacgacggcgacagcttcctgaactggtatcagcagaagcccggccagcctcctaagctgctgatctacgccgccagcaatctggaaagcggcgtgccaagcagattttccggctctggcagcggcaccgatttcaccctgacaatatccagcctccagcctgaggacgtggccgtgtactactgccagcagagcaacgacgaccctctgacctttggacagggcaccaaggtggaaatcaaactcgagatccagaaccctgatcctgccgtgtaccagctgcgggatagcaagagcagcgacaagagcgtgtgtctgttcaccgacttcgacagccagaccaacgtgtcccagagcaaggactccgacgtgtacatcaccgataagtgcgtgctggacatgcggagcatggacttcaagagcaactccgccgtggcctggtccaacaagtccgatttcgcctgcgccaacgccttcaacaacagcattatccccgaggacacattcttcccaagcagcgacgtgccctgcgacgtgaagctggtggaaaagagcttcgagacagacaccaacctgaacttccagaacctgagcgtgatcggcttcagaatcctgctgctgaaagtggccggctttaacctgctgatgaccctgcggctgtggtccagccgcgccaagagaagcggatctggcgtgaagcagaccctgaatttcgacctgctgaagctggctggcgacgtggaatccaacccaggccctactagtatggactggatttggcgcatccttttccttgtcggcgctgctaccggcgcgcattccttcgaacaagttcagctggttcagagcggagccgaagtgaagaaacctggggcctctgtgaaggtgtcctgcaaagccagcggctacacctttaccagctactggatcaactgggtccgacaggcccctggacaaggactggaatggatgggacagatccttccaggcggaggggacaccaactacaacggcaagttcaagggcagagtgaccatcaccgccgacaccagcacaagcaccgcctacatggaactgagcagcctgagaagcgaggacaccgccgtgtattattgcaccagacgggtgcccatccggctggattattggggacagggaaccctggtcaccgtgtctagtacgcgtgaggacctgaagaacgtgttcccacctgaggtggccgtgttcgagcctagcaaggccgagatcgcccacacccagaaagccaccctcgtgtgcctggctaccggcttctaccccgaccatgtggaactgtcttggtgggtcaacggcaaagaggtgcacagcggcgtgtgtaccgacccccagccactgaaagaacagcccgccctgaacgacagccggtactgcctgagcagcagactgagagtgtccgccaccttctggcagaacccccggaaccacttcagatgccaggtgcagttctacggcctgagcgagaacgacgagtggacccaggacagagccaagcccgtgacccagatcgtgtctgccgaagcctggggcagagccgattgcggcatcaccagcgccagctaccaccagggcgtgctgagcgccaccatcctgtacgagatcctgctgggcaaggccaccctgtacgccgtgctggtgtctgccctggtgctgatggctatggtcaagcggaaggacagccgggga

SEQ ID NO: 5869 - DNA, 1863 bp, synthetic construct
  source 1..1863: mol_type = other DNA
atggccttaccagtgaccgccttgctcctgccgctggccttgctgctccacgccgccaggccggacatcgtgatgacacagagccctgatagcctggccgtgtctctgggagagagagccaccattaactgcaaggccagccagagcgtggactacgacggcgacagcttcctgaactggtatcagcagaagcccggccagcctcctaagctgctgatctacgccgccagcaatctggaaagcggcgtgccaagcagattttccggctctggcagcggcaccgatttcaccctgacaatatccagcctccagcctgaggacgtggccgtgtactactgccagcagagcaacgacgaccctctgacctttggacagggcaccaaggtggaaatcaaactcgaggacctgaagaacgtgttcccacctgaggtggccgtgttcgagcctagcaaggccgagatcgcccacacccagaaagccaccctcgtgtgcctggctaccggcttctaccccgaccatgtggaactgtcttggtgggtcaacggcaaagaggtgcacagcggcgtgtgtaccgacccccagccactgaaagaacagcccgccctgaacgacagccggtactgcctgagcagcagactgagagtgtccgccaccttctggcagaacccccggaaccacttcagatgccaggtgcagttctacggcctgagcgagaacgacgagtggacccaggacagagccaagcccgtgacccagatcgtgtctgccgaagcctggggcagagccgattgcggcatcaccagcgccagctaccaccagggcgtgctgagcgccaccatcctgtacgagatcctgctgggcaaggccaccctgtacgccgtgctggtgtctgccctggtgctgatggctatggtcaagcggaaggacagccggggaagggccaagcgatctggatctggagcaacaaacttctcactactcaaacaagcaggtgacgtggaggagaatcccgggcctactagtatggactggatttggcgcatccttttccttgtcggcgctgctaccggcgcgcattccttcgaacaagttcagctggttcagagcggagccgaagtgaagaaacctggggcctctgtgaaggtgtcctgcaaagccagcggctacacctttaccagctactggatcaactgggtccgacaggcccctggacaaggactggaatggatgggacagatccttccaggcggaggggacaccaactacaacggcaagttcaagggcagagtgaccatcaccgccgacaccagcacaagcaccgcctacatggaactgagcagcctgagaagcgaggacaccgccgtgtattattgcaccagacgggtgcccatccggctggattattggggacagggaaccctggtcaccgtgtctagtacgcgtatccagaaccctgatcctgccgtgtaccagctgcgggatagcaagagcagcgacaagagcgtgtgtctgttcaccgacttcgacagccagaccaacgtgtcccagagcaaggactccgacgtgtacatcaccgataagtgcgtgctggacatgcggagcatggacttcaagagcaactccgccgtggcctggtccaacaagtccgatttcgcctgcgccaacgccttcaacaacagcattatccccgaggacacattcttcccaagcagcgacgtgccctgcgacgtgaagctggtggaaaagagcttcgagacagacaccaacctgaacttccagaacctgagcgtgatcggcttcagaatcctgctgctgaaagtggccggctttaacctgctgatgaccctgcggctgtggtccagc

SEQ ID NO: 5870 - DNA, 1863 bp, synthetic construct
  source 1..1863: mol_type = other DNA
atggccttaccagtgaccgccttgctcctgccgctggccttgctgctccacgccgccaggccggacatcgtgatgacacagagccctgatagcctggccgtgtctctgggagagagagccaccattaactgcaaggccagccagagcgtggactacgacggcgacagcttcctgaactggtatcagcagaagcccggccagcctcctaagctgctgatctacgccgccagcaatctggaaagcggcgtgccaagcagattttccggctctggcagcggcaccgatttcaccctgacaatatccagcctccagcctgaggacgtggccgtgtactactgccagcagagcaacgacgaccctctgacctttggacagggcaccaaggtggaaatcaaactcgaggacctgaagaacgtgttcccacctgaggtggccgtgttcgagcctagcgaggccgagatcagccacacccagaaagccaccctcgtgtgcctggctaccggcttctaccccgaccatgtggaactgtcttggtgggtcaacggcaaagaggtgcacagcggcgtgtgtaccgacccccagccactgaaagaacagcccgccctgaacgacagccggtactgcctgagcagcagactgagagtgtccgccaccttctggcagaacccccggaaccacttcagatgccaggtgcagttctacggcctgagcgagaacgacgagtggacccaggacagagccaagcccgtgacccagatcgtgtctgccgaagcctggggcagagccgattgcggctttaccagcgagagctaccagcagggcgtgctgagcgccaccatcctgtacgagatcctgctgggcaaggccaccctgtacgccgtgctggtgtctgccctggtgctgatggctatggtcaagcggaaggacagccggggaagggccaagcgatctggatctggagcaacaaacttctcactactcaaacaagcaggtgacgtggaggagaatcccgggcctactagtatggactggatttggcgcatccttttccttgtcggcgctgctaccggcgcgcattccttcgaacaagttcagctggttcagagcggagccgaagtgaagaaacctggggcctctgtgaaggtgtcctgcaaagccagcggctacacctttaccagctactggatcaactgggtccgacaggcccctggacaaggactggaatggatgggacagatccttccaggcggaggggacaccaactacaacggcaagttcaagggcagagtgaccatcaccgccgacaccagcacaagcaccgcctacatggaactgagcagcctgagaagcgaggacaccgccgtgtattattgcaccagacgggtgcccatccggctggattattggggacagggaaccctggtcaccgtgtctagtacgcgtatccagaaccctgatcctgccgtgtaccagctgcgggatagcaagagcagcgacaagagcgtgtgtctgttcaccgacttcgacagccagaccaacgtgtcccagagcaaggactccgacgtgtacatcaccgataagtgcgtgctggacatgcggagcatggacttcaagagcaactccgccgtggcctggtccaacaagtccgatttcgcctgcgccaacgccttcaacaacagcattatccccgaggacacattcttcccaagccccgagagcagctgcgacgtgaagctggtggaaaagagcttcgagacagacaccaacctgaacttccagaacctgagcgtgatcggcttcagaatcctgctgctgaaagtggccggctttaacctgctgatgaccctgcggctgtggtccagc

SEQ ID NO: 5871 - DNA, 1875 bp, synthetic construct
  source 1..1875: mol_type = other DNA
atggccttaccagtgaccgccttgctcctgccgctggccttgctgctccacgccgccaggccggacatcgtgatgacacagagccctgatagcctggccgtgtctctgggagagagagccaccattaactgcaaggccagccagagcgtggactacgacggcgacagcttcctgaactggtatcagcagaagcccggccagcctcctaagctgctgatctacgccgccagcaatctggaaagcggcgtgccaagcagattttccggctctggcagcggcaccgatttcaccctgacaatatccagcctccagcctgaggacgtggccgtgtactactgccagcagagcaacgacgaccctctgacctttggacagggcaccaaggtggaaatcaaactcgagatccagaaccctgatcctgccgtgtaccagctgcgggatagcaagagcagcgacaagagcgtgtgtctgttcaccgacttcgacagccagaccaacgtgtcccagagcaaggactccgacgtgtacatcaccgataagtgcgtgctggacatgcggagcatggacttcaagagcaactccgccgtggcctggtccaacaagtccgatttcgcctgcgccaacgccttcaacaacagcattatccccgaggacacattcttcccaagccccgagagcagctgcgacgtgaagctggtggaaaagagcttcgagacagacaccaacctgaacttccagaacctgagcgtgatcggcttcagaatcctgctgctgaaagtggccggctttaacctgctgatgaccctgcggctgtggtccagccgcgccaagagaagcggatctggcgtgaagcagaccctgaatttcgacctgctgaagctggctggcgacgtggaatccaacccaggccctactagtatggactggatttggcgcatccttttccttgtcggcgctgctaccggcgcgcattccttcgaacaagttcagctggttcagagcggagccgaagtgaagaaacctggggcctctgtgaaggtgtcctgcaaagccagcggctacacctttaccagctactggatcaactgggtccgacaggcccctggacaaggactggaatggatgggacagatccttccaggcggaggggacaccaactacaacggcaagttcaagggcagagtgaccatcaccgccgacaccagcacaagcaccgcctacatggaactgagcagcctgagaagcgaggacaccgccgtgtattattgcaccagacgggtgcccatccggctggattattggggacagggaaccctggtcaccgtgtctagtacgcgtgaggacctgaagaacgtgttcccacctgaggtggccgtgttcgagcctagcgaggccgagatcagccacacccagaaagccaccctcgtgtgcctggctaccggcttctaccccgaccatgtggaactgtcttggtgggtcaacggcaaagaggtgcacagcggcgtgtgtaccgacccccagccactgaaagaacagcccgccctgaacgacagccggtactgcctgagcagcagactgagagtgtccgccaccttctggcagaacccccggaaccacttcagatgccaggtgcagttctacggcctgagcgagaacgacgagtggacccaggacagagccaagcccgtgacccagatcgtgtctgccgaagcctggggcagagccgattgcggctttaccagcgagagctaccagcagggcgtgctgagcgccaccatcctgtacgagatcctgctgggcaaggccaccctgtacgccgtgctggtgtctgccctggtgctgatggctatggtcaagcggaaggacagccgggga

SEQ ID NO: 5872 - DNA, 1911 bp, synthetic construct
  source 1..1911: mol_type = other DNA
atggccttaccagtgaccgccttgctcctgccgctggccttgctgctccacgccgccaggccgctcgaggaggacctgaagaacgtgttcccacctgaggtggccgtgttcgagcctagcaaggccgagatcgcccacacccagaaagccaccctcgtgtgcctggctaccggcttctaccccgaccatgtggaactgtcttggtgggtcaacggcaaagaggtgcacagcggcgtgtgtaccgacccccagccactgaaagaacagcccgccctgaacgacagccggtactgcctgagcagcagactgagagtgtccgccaccttctggcagaacccccggaaccacttcagatgccaggtgcagttctacggcctgagcgagaacgacgagtggacccaggacagagccaagcccgtgacccagatcgtgtctgccgaagcctggggcagagccgattgcggcatcaccagcgccagctaccaccagggcgtgctgagcgccaccatcctgtacgagatcctgctgggcaaggccaccctgtacgccgtgctggtgtctgccctggtgctgatggctatggtcaagcggaaggacagccggggaagggccaagcgatctggatctggagcaacaaacttctcactactcaaacaagcaggtgacgtggaggagaatcccgggcctactagcatggccttaccagtgaccgccttgctcctgccgctggccttgctgctccacgccgccaggccggacatcgtgatgacacagagccctgatagcctggccgtgtctctgggagagagagccaccattaactgcaaggccagccagagcgtggactacgacggcgacagcttcctgaactggtatcagcagaagcccggccagcctcctaagctgctgatctacgccgccagcaatctggaaagcggcgtgccaagcagattttccggctctggcagcggcaccgatttcaccctgacaatatccagcctccagcctgaggacgtggccgtgtactactgccagcagagcaacgacgaccctctgacctttggacagggcaccaaggtggaaatcaaaggcggaggcggaagtggaggcggaggatctggcggcggaggctctcaagttcagctggttcagagcggagccgaagtgaagaaacctggggcctctgtgaaggtgtcctgcaaagccagcggctacacctttaccagctactggatcaactgggtccgacaggcccctggacaaggactggaatggatgggacagatccttccaggcggaggggacaccaactacaacggcaagttcaagggcagagtgaccatcaccgccgacaccagcacaagcaccgcctacatggaactgagcagcctgagaagcgaggacaccgccgtgtattattgcaccagacgggtgcccatccggctggattattggggacagggaaccctggtcaccgtgtctagtacgcgtatccagaaccctgatcctgccgtgtaccagctgcgggatagcaagagcagcgacaagagcgtgtgtctgttcaccgacttcgacagccagaccaacgtgtcccagagcaaggactccgacgtgtacatcaccgataagtgcgtgctggacatgcggagcatggacttcaagagcaactccgccgtggcctggtccaacaagtccgatttcgcctgcgccaacgccttcaacaacagcattatccccgaggacacattcttcccaagcagcgacgtgccctgcgacgtgaagctggtggaaaagagcttcgagacagacaccaacctgaacttccagaacctgagcgtgatcggcttcagaatcctgctgctgaaagtggccggctttaacctgctgatgaccctgcggctgtggtccagc

SEQ ID NO: 5873 - DNA, 1932 bp, synthetic construct
  source 1..1932: mol_type = other DNA
atggccttaccagtgaccgccttgctcctgccgctggccttgctgctccacgccgccaggccgctcgagggctccggcgatcgccctgatcctgccgtgtaccagctgcgggatagcaagagcagcgacaagagcgtgtgtctgttcaccgacttcgacagccagaccaacgtgtcccagagcaaggactccgacgtgtacatcaccgataagtgcgtgctggacatgcggagcatggacttcaagagcaactccgccgtggcctggtccaacaagtccgatttcgcctgcgccaacgccttcaacaacagcattatccccgaggacacattcttcccaagccccgagagcagctgcgacgtgaagctggtggaaaagagcttcgagacagacaccaacctgaacttccagaacctgagcgtgatcggcttcagaatcctgctgctgaaagtggccggctttaacctgctgatgaccctgcggctgtggtccagctctagtcgcgccaagagaagcggatctggcgtgaagcagaccctgaatttcgacctgctgaagctggctggcgacgtggaatccaacccaggccccactagcatggccttaccagtgaccgccttgctcctgccgctggccttgctgctccacgccgccaggccggacatcgtgatgacacagagccctgatagcctggccgtgtctctgggagagagagccaccattaactgcaaggccagccagagcgtggactacgacggcgacagcttcctgaactggtatcagcagaagcccggccagcctcctaagctgctgatctacgccgccagcaatctggaaagcggcgtgccaagcagattttccggctctggcagcggcaccgatttcaccctgacaatatccagcctccagcctgaggacgtggccgtgtactactgccagcagagcaacgacgaccctctgacctttggacagggcaccaaggtggaaatcaaaggcggaggcggaagtggaggcggaggatctggcggcggaggctctcaagttcagctggttcagagcggagccgaagtgaagaaacctggggcctctgtgaaggtgtcctgcaaagccagcggctacacctttaccagctactggatcaactgggtccgacaggcccctggacaaggactggaatggatgggacagatccttccaggcggaggggacaccaactacaacggcaagttcaagggcagagtgaccatcaccgccgacaccagcacaagcaccgcctacatggaactgagcagcctgagaagcgaggacaccgccgtgtattattgcaccagacgggtgcccatccggctggattattggggacagggaaccctggtcaccgtgtctagtacgcgtgaggacctgaagaacgtgttcccacctgaggtggccgtgttcgagcctagcgaggccgagatcagccacacccagaaagccaccctcgtgtgcctggctaccggcttctaccccgaccatgtggaactgtcttggtgggtcaacggcaaagaggtgcacagcggcgtgtgtaccgacccccagccactgaaagaacagcccgccctgaacgacagccggtactgcctgagcagcagactgagagtgtccgccaccttctggcagaacccccggaaccacttcagatgccaggtgcagttctacggcctgagcgagaacgacgagtggacccaggacagagccaagcccgtgacccagatcgtgtctgccgaagcctggggcagagccgattgcggctttaccagcgagagctaccagcagggcgtgctgagcgccaccatcctgtacgagatcctgctgggcaaggccaccctgtacgccgtgctggtgtctgccctggtgctgatggctatggtcaagcggaaggacagccgggga

SEQ ID NO: 5874 - DNA, 1863 bp, synthetic construct
  source 1..1863: mol_type = other DNA
atggccttaccagtgaccgccttgctcctgccgctggccttgctgctccacgccgccaggccggacatcgtgatgacacagagccctgatagcctggccgtgtctctgggagagagagccaccattaactgcaaggccagccagagcgtggactacgacggcgacagcttcctgaactggtatcagcagaagcccggccagcctcctaagctgctgatctacgccgccagcaatctggaaagcggcgtgccaagcagattttccggctctggcagcggcaccgatttcaccctgacaatatccagcctccagcctgaggacgtggccgtgtactactgccagcagagcaacgacgaccctctgacctttggacagggcaccaaggtggaaatcaaactcgaggacctgaagaacgtgttcccacctgaggtggccgtgttcgagcctagcgaggccgagatcagccacacccagaaagccaccctcgtgtgcctggctaccggcttctaccccgaccatgtggaactgtcttggtgggtcaacggcaaagaggtgcacagcggcgtgtctaccgacccccagccactgaaagaacagcccgccctgaacgacagccggtactgcctgagcagcagactgagagtgtccgccaccttctggcagaacccccggaaccacttcagatgccaggtgcagttctacggcctgagcgagaacgacgagtggacccaggacagagccaagcccgtgacccagatcgtgtctgccgaagcctggggcagagccgattgcggctttaccagcgagagctaccagcagggcgtgctgagcgccaccatcctgtacgagatcctgctgggcaaggccaccctgtacgccgtgctggtgtctgccctggtgctgatggctatggtcaagcggaaggacagccggggaagggccaagcgatctggatctggagcaacaaacttctcactactcaaacaagcaggtgacgtggaggagaatcccgggcctactagtatggactggatttggcgcatccttttccttgtcggcgctgctaccggcgcgcattccttcgaacaagttcagctggttcagagcggagccgaagtgaagaaacctggggcctctgtgaaggtgtcctgcaaagccagcggctacacctttaccagctactggatcaactgggtccgacaggcccctggacaaggactggaatggatgggacagatccttccaggcggaggggacaccaactacaacggcaagttcaagggcagagtgaccatcaccgccgacaccagcacaagcaccgcctacatggaactgagcagcctgagaagcgaggacaccgccgtgtattattgcaccagacgggtgcccatccggctggattattggggacagggaaccctggtcaccgtgtctagtacgcgtatccagaaccctgatcctgccgtgtaccagctgcgggatagcaagagcagcgacaagagcgtgtgtctgttcaccgacttcgacagccagaccaacgtgtcccagagcaaggactccgacgtgtacatcaccgataagaccgtgctggacatgcggagcatggacttcaagagcaactccgccgtggcctggtccaacaagtccgatttcgcctgcgccaacgccttcaacaacagcattatccccgaggacacattcttcccaagccccgagagcagctgcgacgtgaagctggtggaaaagagcttcgagacagacaccaacctgaacttccagaacctgagcgtgatcggcttcagaatcctgctgctgaaagtggccggctttaacctgctgatgaccctgcggctgtggtccagc

SEQ ID NO: 5875 - DNA, 1887 bp, synthetic construct
  source 1..1887: mol_type = other DNA
atggccttaccagtgaccgccttgctcctgccgctggccttgctgctccacgccgccaggccggacatcgtgatgacacagagccctgatagcctggccgtgtctctgggagagagagccaccattaactgcaaggccagccagagcgtggactacgacggcgacagcttcctgaactggtatcagcagaagcccggccagcctcctaagctgctgatctacgccgccagcaatctggaaagcggcgtgccaagcagattttccggctctggcagcggcaccgatttcaccctgacaatatccagcctccagcctgaggacgtggccgtgtactactgccagcagagcaacgacgaccctctgacctttggacagggcaccaaggtggaaatcaaactcgaggacaagcagctggacgccgacgtgtcccccaagcctaccatcttcctgccctctatcgccgagacaaagctccagaaggccggcacctacctgtgcctgctggaaaagttcttcccagatgtgattaagatccactggcaggaaaagaagtccaacaccatcctgggcagccaggaaggcaacaccatgaagaccaacgacacctacatgaagttcagctggctgaccgtgcccgagaagtccctggacaaagaacacagatgcatcgtgcggcacgaaaacaacaagaacggcgtggaccaggaaatcatcttcccacccatcaagaccgatgtgattacaatggaccccaaggacaactgctccaaggacgccaacgataccctgctgctccagctgaccaacaccagcgcctactacatgtacttgttgctgctgctgaagtccgtggtgtacttcgccatcatcacatgctgcctgctgcggagaaccgccttctgctgcaacggcgagaagtctagggccaagcgatctggatctggagcaacaaacttctcactactcaaacaagcaggtgacgtggaggagaatcccgggcctactagtatggactggatttggcgcatccttttccttgtcggcgctgctaccggcgcgcattccttcgaacaagttcagctggttcagagcggagccgaagtgaagaaacctggggcctctgtgaaggtgtcctgcaaagccagcggctacacctttaccagctactggatcaactgggtccgacaggcccctggacaaggactggaatggatgggacagatccttccaggcggaggggacaccaactacaacggcaagttcaagggcagagtgaccatcaccgccgacaccagcacaagcaccgcctacatggaactgagcagcctgagaagcgaggacaccgccgtgtattattgcaccagacgggtgcccatccggctggattattggggacagggaaccctggtcaccgtgtctagtacgcgtagccagcctcacaccaagcccagcgtgttcgtgatgaagaacggcaccaacgtggcctgcctcgtgaaagagttctaccccaaggacatcaggatcaacctggtgtccagcaagaagatcaccgagttcgaccccgccatcgtgatctcccccagcggcaagtacaacgccgtgaagctggggaagtacgaggacagcaacagcgtgacctgctccgtgcagcacgacaacaagaccgtgcacagcaccgactttgaagtgaaaaccgactccaccgaccacgtgaagcccaaagagacagagaacaccaagcagcccagcaagagctgccacaagcccaaggccatcgtgcacaccgagaaagtgaacatgatgagcctgaccgtgctgggcctgcggatgctgttcgccaaaaccgtggccgtgaacttcctgctgaccgccaagctgttcttcctc

SEQ ID NO: 5876 - DNA, 1887 bp, synthetic construct
  source 1..1887: mol_type = other DNA
atggccttaccagtgaccgccttgctcctgccgctggccttgctgctccacgccgccaggccggacatcgtgatgacacagagccctgatagcctggccgtgtctctgggagagagagccaccattaactgcaaggccagccagagcgtggactacgacggcgacagcttcctgaactggtatcagcagaagcccggccagcctcctaagctgctgatctacgccgccagcaatctggaaagcggcgtgccaagcagattttccggctctggcagcggcaccgatttcaccctgacaatatccagcctccagcctgaggacgtggccgtgtactactgccagcagagcaacgacgaccctctgacctttggacagggcaccaaggtggaaatcaaactcgagagccagcctcacaccaagcccagcgtgttcgtgatgaagaacggcaccaacgtggcctgcctcgtgaaagagttctaccccaaggacatcaggatcaacctggtgtccagcaagaagatcaccgagttcgaccccgccatcgtgatctcccccagcggcaagtacaacgccgtgaagctggggaagtacgaggacagcaacagcgtgacctgctccgtgcagcacgacaacaagaccgtgcacagcaccgactttgaagtgaaaaccgactccaccgaccacgtgaagcccaaagagacagagaacaccaagcagcccagcaagagctgccacaagcccaaggccatcgtgcacaccgagaaagtgaacatgatgagcctgaccgtgctgggcctgcggatgctgttcgccaaaaccgtggccgtgaacttcctgctgaccgccaagctgttcttcctcagggccaagcgatctggatctggagcaacaaacttctcactactcaaacaagcaggtgacgtggaggagaatcccgggcctactagtatggactggatttggcgcatccttttccttgtcggcgctgctaccggcgcgcattccttcgaacaagttcagctggttcagagcggagccgaagtgaagaaacctggggcctctgtgaaggtgtcctgcaaagccagcggctacacctttaccagctactggatcaactgggtccgacaggcccctggacaaggactggaatggatgggacagatccttccaggcggaggggacaccaactacaacggcaagttcaagggcagagtgaccatcaccgccgacaccagcacaagcaccgcctacatggaactgagcagcctgagaagcgaggacaccgccgtgtattattgcaccagacgggtgcccatccggctggattattggggacagggaaccctggtcaccgtgtctagtacgcgtgacaagcagctggacgccgacgtgtcccccaagcctaccatcttcctgccctctatcgccgagacaaagctccagaaggccggcacctacctgtgcctgctggaaaagttcttcccagatgtgattaagatccactggcaggaaaagaagtccaacaccatcctgggcagccaggaaggcaacaccatgaagaccaacgacacctacatgaagttcagctggctgaccgtgcccgagaagtccctggacaaagaacacagatgcatcgtgcggcacgaaaacaacaagaacggcgtggaccaggaaatcatcttcccacccatcaagaccgatgtgattacaatggaccccaaggacaactgctccaaggacgccaacgataccctgctgctccagctgaccaacaccagcgcctactacatgtacttgttgctgctgctgaagtccgtggtgtacttcgccatcatcacatgctgcctgctgcggagaaccgccttctgctgcaacggcgagaagtct

SEQ ID NO: 5877 - DNA, 1932 bp, synthetic construct
  source 1..1932: mol_type = other DNA
atggccttaccagtgaccgccttgctcctgccgctggccttgctgctccacgccgccaggccgctcgaggacaagcagctggacgccgacgtgtcccccaagcctaccatcttcctgccctctatcgccgagacaaagctccagaaggccggcacctacctgtgcctgctggaaaagttcttcccagatgtgattaagatccactggcaggaaaagaagtccaacaccatcctgggcagccaggaaggcaacaccatgaagaccaacgacacctacatgaagttcagctggctgaccgtgcccgagaagtccctggacaaagaacacagatgcatcgtgcggcacgaaaacaacaagaacggcgtggaccaggaaatcatcttcccacccatcaagaccgatgtgattacaatggaccccaaggacaactgctccaaggacgccaacgataccctgctgctccagctgaccaacaccagcgcctactacatgtacttgttgctgctgctgaagtccgtggtgtacttcgccatcatcacatgctgcctgctgcggagaaccgccttctgctgcaacggcgagaagtctagggccaagcgatctggatctggagcaacaaacttctcactactcaaacaagcaggtgacgtggaggagaatcccgggcctactagcatggccttaccagtgaccgccttgctcctgccgctggccttgctgctccacgccgccaggccggacatcgtgatgacacagagccctgatagcctggccgtgtctctgggagagagagccaccattaactgcaaggccagccagagcgtggactacgacggcgacagcttcctgaactggtatcagcagaagcccggccagcctcctaagctgctgatctacgccgccagcaatctggaaagcggcgtgccaagcagattttccggctctggcagcggcaccgatttcaccctgacaatatccagcctccagcctgaggacgtggccgtgtactactgccagcagagcaacgacgaccctctgacctttggacagggcaccaaggtggaaatcaaaggcggaggcggaagtggaggcggaggatctggcggcggaggctctcaagttcagctggttcagagcggagccgaagtgaagaaacctggggcctctgtgaaggtgtcctgcaaagccagcggctacacctttaccagctactggatcaactgggtccgacaggcccctggacaaggactggaatggatgggacagatccttccaggcggaggggacaccaactacaacggcaagttcaagggcagagtgaccatcaccgccgacaccagcacaagcaccgcctacatggaactgagcagcctgagaagcgaggacaccgccgtgtattattgcaccagacgggtgcccatccggctggattattggggacagggaaccctggtcaccgtgtctagtacgcgtagccagcctcacaccaagcccagcgtgttcgtgatgaagaacggcaccaacgtggcctgcctcgtgaaagagttctaccccaaggacatcaggatcaacctggtgtccagcaagaagatcaccgagttcgaccccgccatcgtgatctcccccagcggcaagtacaacgccgtgaagctggggaagtacgaggacagcaacagcgtgacctgctccgtgcagcacgacaacaagaccgtgcacagcaccgactttgaagtgaaaaccgactccaccgaccacgtgaagcccaaagagacagagaacaccaagcagcccagcaagagctgccacaagcccaaggccatcgtgcacaccgagaaagtgaacatgatgagcctgaccgtgctgggcctgcggatgctgttcgccaaaaccgtggccgtgaacttcctgctgaccgccaagctgttcttcctc

SEQ ID NO: 5878 - DNA, 2394 bp, synthetic construct
  source 1..2394: mol_type = other DNA
atggccttaccagtgaccgccttgctcctgccgctggccttgctgctccacgccgccaggccggacatcgtgatgacacagagccctgatagcctggccgtgtctctgggagagagagccaccattaactgcaaggccagccagagcgtggactacgacggcgacagcttcctgaactggtatcagcagaagcccggccagcctcctaagctgctgatctacgccgccagcaatctggaaagcggcgtgccaagcagattttccggctctggcagcggcaccgatttcaccctgacaatatccagcctccagcctgaggacgtggccgtgtactactgccagcagagcaacgacgaccctctgacctttggacagggcaccaaggtggaaatcaaaggacagcctaaggccaatcctaccgtgacactgttccctccaagcagcgaagaactccaggccaacaaggccacacttgtgtgcctgatctccgacttctaccctggggctgtgacagtggcttggaaggccgatggatctcctgtgaaagccggcgtggaaaccaccaagccatccaagcagagcaacaacaaatacgccgccagctcctacctgagcctgacacctgagcagtggaagtcccacagatcctacagctgccaagtgacccacgaaggcagcaccgtggaaaagacagtggcccctacagagtgcagcggatcccagagcttcggcctgctggaccccaagctgtgctacctgctggatggcatcctgttcatctacggcgtgatcctgaccgccctgttcctgagagtgaagttcagcagaagcgccgacgcccctgcctaccagcagggacagaaccaactgtacaacgagctgaacctgggcagacgggaagagtacgacgtgctggacaagcggagaggcagggaccctgagatgggcggaaagccccagcggagaaagaacccccaggaaggactgtataacgaactccagaaagacaagatggccgaagcctacagcgagatcggcatgaagggcgagcggagaagaggcaagggccacgatggcctgtaccagggcctgagcaccgccaccaaggacacctatgacgccctgcacatgcaggccctgcctccaagaagggccaagcgatctggatctggagcaacaaacttctcactactcaaacaagcaggtgacgtggaggagaatcccgggcctactagtatggactggatttggcgcatccttttccttgtcggcgctgctaccggcgcgcattccttcgaacaagttcagctggttcagagcggagccgaagtgaagaaacctggggcctctgtgaaggtgtcctgcaaagccagcggctacacctttaccagctactggatcaactgggtccgacaggcccctggacaaggactggaatggatgggacagatccttccaggcggaggggacaccaactacaacggcaagttcaagggcagagtgaccatcaccgccgacaccagcacaagcaccgcctacatggaactgagcagcctgagaagcgaggacaccgccgtgtattattgcaccagacgggtgcccatccggctggattattggggacagggaaccctggtcaccgtgtctagtgcctctacaaagggaccctccgtgtttcctctggctcccagcagcaagtctacaagcggaggaacagccgctctgggctgcctggtcaaggattactttcccgagcctgtgaccgtgtcctggaatagcggagcactgacaagcggcgtgcacacctttccagccgtgctgcaaagcagcggcctgtactctctgagcagcgtggtcacagtgcctagctctagcctgggcacccagacctacatctgcaatgtgaaccacaagcctagcaacaccaaggtggacaagagagtggaacccaagagctgtggtacccagagttttgggttgttggaccctaaattgtgctatctgttggacggaatcctgttcatttacggagtgatcctgaccgcattgttcctgcgggttaagttttccagatccgcagacgcacccgcttaccaacaagggcagaaccaactctacaatgaacttaatttggggcggagggaagagtacgacgttctggacaaaaggaggggacgagatcccgagatgggcggaaagcctcagcgaaggaagaatccgcaagaggggctttataacgaactccagaaagataaaatggcagaagcctatagtgagattgggatgaagggagaaaggaggaggggtaaaggtcacgatgggttgtaccaaggattgagcacagccactaaagatacctatgatgcgctccacatgcaggccctgccgccaaga

SEQ ID NO: 5879 - DNA, 2451 bp, synthetic construct
  source 1..2451: mol_type = other DNA
atggccttaccagtgaccgccttgctcctgccgctggccttgctgctccacgccgccaggccggacatcgtgatgacacagagccctgatagcctggccgtgtctctgggagagagagccaccattaactgcaaggccagccagagcgtggactacgacggcgacagcttcctgaactggtatcagcagaagcccggccagcctcctaagctgctgatctacgccgccagcaatctggaaagcggcgtgccaagcagattttccggctctggcagcggcaccgatttcaccctgacaatatccagcctccagcctgaggacgtggccgtgtactactgccagcagagcaacgacgaccctctgacctttggacagggcaccaaggtggaaatcaaactcgaggacctgaagaacgtgttcccacctgaggtggccgtgttcgagcctagcgaggccgagatcagccacacccagaaagccaccctcgtgtgcctggctaccggcttctaccccgaccatgtggaactgtcttggtgggtcaacggcaaagaggtgcacagcggcgtgtctaccgacccccagccactgaaagaacagcccgccctgaacgacagccggtactgcctgagcagcagactgagagtgtccgccaccttctggcagaacccccggaaccacttcagatgccaggtgcagttctacggcctgagcgagaacgacgagtggacccaggacagagccaagcccgtgacccagatcgtgtctgccgaagcctggggcagagccgattgcggatcccagagcttcggcctgctggaccccaagctgtgctacctgctggatggcatcctgttcatctacggcgtgatcctgaccgccctgttcctgagagtgaagttcagcagaagcgccgacgcccctgcctaccagcagggacagaaccaactgtacaacgagctgaacctgggcagacgggaagagtacgacgtgctggacaagcggagaggcagggaccctgagatgggcggaaagccccagcggagaaagaacccccaggaaggactgtataacgaactccagaaagacaagatggccgaagcctacagcgagatcggcatgaagggcgagcggagaagaggcaagggccacgatggcctgtaccagggcctgagcaccgccaccaaggacacctatgacgccctgcacatgcaggccctgcctccaagaagggccaagcgatctggatctggagcaacaaacttctcactactcaaacaagcaggtgacgtggaggagaatcccgggcctactagtatggactggatttggcgcatccttttccttgtcggcgctgctaccggcgcgcattccttcgaacaagttcagctggttcagagcggagccgaagtgaagaaacctggggcctctgtgaaggtgtcctgcaaagccagcggctacacctttaccagctactggatcaactgggtccgacaggcccctggacaaggactggaatggatgggacagatccttccaggcggaggggacaccaactacaacggcaagttcaagggcagagtgaccatcaccgccgacaccagcacaagcaccgcctacatggaactgagcagcctgagaagcgaggacaccgccgtgtattattgcaccagacgggtgcccatccggctggattattggggacagggaaccctggtcaccgtgtctagtacgcgtatccagaaccctgatcctgccgtgtaccagctgcgggatagcaagagcagcgacaagagcgtgtgtctgttcaccgacttcgacagccagaccaacgtgtcccagagcaaggactccgacgtgtacatcaccgataagaccgtgctggacatgcggagcatggacttcaagagcaactccgccgtggcctggtccaacaagtccgatttcgcctgcgccaacgccttcaacaacagcattatccccgaggacacattcttcccaagccccgagagcagctgcggtacccagagttttgggttgttggaccctaaattgtgctatctgttggacggaatcctgttcatttacggagtgatcctgaccgcattgttcctgcgggttaagttttccagatccgcagacgcacccgcttaccaacaagggcagaaccaactctacaatgaacttaatttggggcggagggaagagtacgacgttctggacaaaaggaggggacgagatcccgagatgggcggaaagcctcagcgaaggaagaatccgcaagaggggctttataacgaactccagaaagataaaatggcagaagcctatagtgagattgggatgaagggagaaaggaggaggggtaaaggtcacgatgggttgtaccaaggattgagcacagccactaaagatacctatgatgcgctccacatgcaggccctgccgccaaga

SEQ ID NO: 5880 - DNA, 2577 bp, synthetic construct
  source 1..2577: mol_type = other DNA
atggccttaccagtgaccgccttgctcctgccgctggccttgctgctccacgccgccaggccggacatcgtgatgacacagagccctgatagcctggccgtgtctctgggagagagagccaccattaactgcaaggccagccagagcgtggactacgacggcgacagcttcctgaactggtatcagcagaagcccggccagcctcctaagctgctgatctacgccgccagcaatctggaaagcggcgtgccaagcagattttccggctctggcagcggcaccgatttcaccctgacaatatccagcctccagcctgaggacgtggccgtgtactactgccagcagagcaacgacgaccctctgacctttggacagggcaccaaggtggaaatcaaactcgaggaggacctgaagaacgtgttcccacctgaggtggccgtgttcgagcctagcgaggccgagatcagccacacccagaaagccaccctcgtgtgcctggctaccggcttctaccccgaccatgtggaactgtcttggtgggtcaacggcaaagaggtgcacagcggcgtgtctaccgacccccagccactgaaagaacagcccgccctgaacgacagccggtactgcctgagcagcagactgagagtgtccgccaccttctggcagaacccccggaaccacttcagatgccaggtgcagttctacggcctgagcgagaacgacgagtggacccaggacagagccaagcccgtgacccagatcgtgtctgccgaagcctggggcagagccgattgcggatcccagagcttcggcctgctggaccccaagctgtgctacctgctggatggcatcctgttcatctacggcgtgatcctgaccgccctgttcctgagagtgaagttcagcagaagcgccgacgcccctgcctaccagcagggacagaaccaactgtacaacgagctgaacctgggcagacgggaagagtacgacgtgctggacaagcggagaggcagggaccctgagatgggcggaaagccccagcggagaaagaacccccaggaaggactgtataacgaactccagaaagacaagatggccgaagcctacagcgagatcggcatgaagggcgagcggagaagaggcaagggccacgatggcctgtaccagggcctgagcaccgccaccaaggacacctatgacgccctgcacatgcaggccctgcctccaagaagggccaagcgatctggatctggagcaacaaacttctcactactcaaacaagcaggtgacgtggaggagaatcccgggcctactagtatggactggatttggcgcatccttttccttgtcggcgctgctaccggcgcgcattccttcgaacaagttcagctggttcagagcggagccgaagtgaagaaacctggggcctctgtgaaggtgtcctgcaaagccagcggctacacctttaccagctactggatcaactgggtccgacaggcccctggacaaggactggaatggatgggacagatccttccaggcggaggggacaccaactacaacggcaagttcaagggcagagtgaccatcaccgccgacaccagcacaagcaccgcctacatggaactgagcagcctgagaagcgaggacaccgccgtgtattattgcaccagacgggtgcccatccggctggattattggggacagggaaccctggtcaccgtgtctagtacgcgtatccagaaccctgatcctgccgtgtaccagctgcgggatagcaagagcagcgacaagagcgtgtgtctgttcaccgacttcgacagccagaccaacgtgtcccagagcaaggactccgacgtgtacatcaccgataagaccgtgctggacatgcggagcatggacttcaagagcaactccgccgtggcctggtccaacaagtccgatttcgcctgcgccaacgccttcaacaacagcattatccccgaggacacattcttcccaagccccgagagcagctgcggtacccagagttttgggttgttggaccctaaattgtgctatctgttggacggaatcctgttcatttacggagtgatcctgaccgcattgttcctgaggagcaagcggtcacggctgctccacagcgattacatgaatatgacaccacgaagaccgggtcctactcgcaaacactaccaaccctacgcacctccccgcgactttgcagcgtaccgatctcgggttaagttttccagatccgcagacgcacccgcttaccaacaagggcagaaccaactctacaatgaacttaatttggggcggagggaagagtacgacgttctggacaaaaggaggggacgagatcccgagatgggcggaaagcctcagcgaaggaagaatccgcaagaggggctttataacgaactccagaaagataaaatggcagaagcctatagtgagattgggatgaagggagaaaggaggaggggtaaaggtcacgatgggttgtaccaaggattgagcacagccactaaagatacctatgatgcgctccacatgcaggccctgccgccaaga

SEQ ID NO: 5881 - DNA, 2706 bp, synthetic construct
  source 1..2706: mol_type = other DNA
atggccttaccagtgaccgccttgctcctgccgctggccttgctgctccacgccgccaggccggacatcgtgatgacacagagccctgatagcctggccgtgtctctgggagagagagccaccattaactgcaaggccagccagagcgtggactacgacggcgacagcttcctgaactggtatcagcagaagcccggccagcctcctaagctgctgatctacgccgccagcaatctggaaagcggcgtgccaagcagattttccggctctggcagcggcaccgatttcaccctgacaatatccagcctccagcctgaggacgtggccgtgtactactgccagcagagcaacgacgaccctctgacctttggacagggcaccaaggtggaaatcaaactcgaggaggacctgaagaacgtgttcccacctgaggtggccgtgttcgagcctagcgaggccgagatcagccacacccagaaagccaccctcgtgtgcctggctaccggcttctaccccgaccatgtggaactgtcttggtgggtcaacggcaaagaggtgcacagcggcgtgtctaccgacccccagccactgaaagaacagcccgccctgaacgacagccggtactgcctgagcagcagactgagagtgtccgccaccttctggcagaacccccggaaccacttcagatgccaggtgcagttctacggcctgagcgagaacgacgagtggacccaggacagagccaagcccgtgacccagatcgtgtctgccgaagcctggggcagagccgattgcggatcccagagcttcggcctgctggaccccaagctgtgctacctgctggatggcatcctgttcatctacggcgtgatcctgaccgccctgttcctgaaacggggcagaaagaaactcctgtatatattcaaacaaccatttatgagaccagtacaaactactcaagaggaagatggctgtagctgccgatttccagaagaagaagaaggaggatgtgaactgagagtgaagttcagcagaagcgccgacgcccctgcctaccagcagggacagaaccaactgtacaacgagctgaacctgggcagacgggaagagtacgacgtgctggacaagcggagaggcagggaccctgagatgggcggaaagccccagcggagaaagaacccccaggaaggactgtataacgaactccagaaagacaagatggccgaagcctacagcgagatcggcatgaagggcgagcggagaagaggcaagggccacgatggcctgtaccagggcctgagcaccgccaccaaggacacctatgacgccctgcacatgcaggccctgcctccaagaagggccaagcgatctggatctggagcaacaaacttctcactactcaaacaagcaggtgacgtggaggagaatcccgggcctactagtatggactggatttggcgcatccttttccttgtcggcgctgctaccggcgcgcattccttcgaacaagttcagctggttcagagcggagccgaagtgaagaaacctggggcctctgtgaaggtgtcctgcaaagccagcggctacacctttaccagctactggatcaactgggtccgacaggcccctggacaaggactggaatggatgggacagatccttccaggcggaggggacaccaactacaacggcaagttcaagggcagagtgaccatcaccgccgacaccagcacaagcaccgcctacatggaactgagcagcctgagaagcgaggacaccgccgtgtattattgcaccagacgggtgcccatccggctggattattggggacagggaaccctggtcaccgtgtctagtacgcgtatccagaaccctgatcctgccgtgtaccagctgcgggatagcaagagcagcgacaagagcgtgtgtctgttcaccgacttcgacagccagaccaacgtgtcccagagcaaggactccgacgtgtacatcaccgataagaccgtgctggacatgcggagcatggacttcaagagcaactccgccgtggcctggtccaacaagtccgatttcgcctgcgccaacgccttcaacaacagcattatccccgaggacacattcttcccaagccccgagagcagctgcggtacccagagttttgggttgttggaccctaaattgtgctatctgttggacggaatcctgttcatttacggagtgatcctgaccgcattgttcctgaagagaggccggaagaagctgctgtacatcttcaagcagcctttcatgcggcccgtgcagaccacccaggaagaggacggctgctcctgccggttccccgaggaagaagaaggcggctgcgagctgcgggttaagttttccagatccgcagacgcacccgcttaccaacaagggcagaaccaactctacaatgaacttaatttggggcggagggaagagtacgacgttctggacaaaaggaggggacgagatcccgagatgggcggaaagcctcagcgaaggaagaatccgcaagaggggctttataacgaactccagaaagataaaatggcagaagcctatagtgagattgggatgaagggagaaaggaggaggggtaaaggtcacgatgggttgtaccaaggattgagcacagccactaaagatacctatgatgcgctccacatgcaggccctgccgccaaga

SEQ ID NO: 5882 - DNA, 1767 bp, synthetic construct
  source 1..1767: mol_type = other DNA
atggccttaccagtgaccgccttgctcctgccgctggccttgctgctccacgccgccaggccggacatcgtgatgacacagagccctgatagcctggccgtgtctctgggagagagagccaccattaactgcaaggccagccagagcgtggactacgacggcgacagcttcctgaactggtatcagcagaagcccggccagcctcctaagctgctgatctacgccgccagcaatctggaaagcggcgtgccaagcagattttccggctctggcagcggcaccgatttcaccctgacaatatccagcctccagcctgaggacgtggccgtgtactactgccagcagagcaacgacgaccctctgacctttggacagggcaccaaggtggaaatcaaactcgagcagagcttcggcctgctggaccccaagctgtgctacctgctggatggcatcctgttcatctacggcgtgatcctgaccgccctgttcctgagagtgaagttcagcagaagcgccgacgcccctgcctaccagcagggacagaaccaactgtacaacgagctgaacctgggcagacgggaagagtacgacgtgctggacaagcggagaggcagggaccctgagatgggcggaaagccccagcggagaaagaacccccaggaaggactgtataacgaactccagaaagacaagatggccgaagcctacagcgagatcggcatgaagggcgagcggagaagaggcaagggccacgatggcctgtaccagggcctgagcaccgccaccaaggacacctatgacgccctgcacatgcaggccctgcctccaagaagggccaagcgatctggatctggagcaacaaacttctcactactcaaacaagcaggtgacgtggaggagaatcccgggcctactagtatggactggatttggcgcatccttttccttgtcggcgctgctaccggcgcgcattccttcgaacaagttcagctggttcagagcggagccgaagtgaagaaacctggggcctctgtgaaggtgtcctgcaaagccagcggctacacctttaccagctactggatcaactgggtccgacaggcccctggacaaggactggaatggatgggacagatccttccaggcggaggggacaccaactacaacggcaagttcaagggcagagtgaccatcaccgccgacaccagcacaagcaccgcctacatggaactgagcagcctgagaagcgaggacaccgccgtgtattattgcaccagacgggtgcccatccggctggattattggggacagggaaccctggtcaccgtgtctagtacgcgtcagagttttgggttgttggaccctaaattgtgctatctgttggacggaatcctgttcatttacggagtgatcctgaccgcattgttcctgcgggttaagttttccagatccgcagacgcacccgcttaccaacaagggcagaaccaactctacaatgaacttaatttggggcggagggaagagtacgacgttctggacaaaaggaggggacgagatcccgagatgggcggaaagcctcagcgaaggaagaatccgcaagaggggctttataacgaactccagaaagataaaatggcagaagcctatagtgagattgggatgaagggagaaaggaggaggggtaaaggtcacgatgggttgtaccaaggattgagcacagccactaaagatacctatgatgcgctccacatgcaggccctgccgccaaga

SEQ ID NO: 5883 - DNA, 1941 bp, synthetic construct
  source 1..1941: mol_type = other DNA
atggccttaccagtgaccgccttgctcctgccgctggccttgctgctccacgccgccaggccggacatcgtgatgacacagagccctgatagcctggccgtgtctctgggagagagagccaccattaactgcaaggccagccagagcgtggactacgacggcgacagcttcctgaactggtatcagcagaagcccggccagcctcctaagctgctgatctacgccgccagcaatctggaaagcggcgtgccaagcagattttccggctctggcagcggcaccgatttcaccctgacaatatccagcctccagcctgaggacgtggccgtgtactactgccagcagagcaacgacgaccctctgacctttggacagggcaccaaggtggaaatcaaactcgagggacagcctaaggccaatcctaccgtgacactgttccctccaagcagcgaagaactccaggccaacaaggccacacttgtgtgcctgatctccgacttctaccctggggctgtgacagtggcttggaaggccgatggatctcctgtgaaagccggcgtggaaaccaccaagccatccaagcagagcaacaacaaatacgccgccagctcctacctgagcctgacacctgagcagtggaagtcccacagatcctacagctgccaagtgacccacgaaggcagcaccgtggaaaagacagtggcccctacagagtgcagccccatcaagaccgatgtgattacaatggaccccaaggacaactgctccaaggacgccaacgataccctgctgctccagctgaccaacaccagcgcctactacatgtacttgttgctgctgctgaagtccgtggtgtacttcgccatcatcacatgctgcctgctgcggagaaccgccttctgctgcaacggcgagaagtctagggccaagcgatctggatctggagcaacaaacttctcactactcaaacaagcaggtgacgtggaggagaatcccgggcctactagtatggactggatttggcgcatccttttccttgtcggcgctgctaccggcgcgcattccttcgaacaagttcagctggttcagagcggagccgaagtgaagaaacctggggcctctgtgaaggtgtcctgcaaagccagcggctacacctttaccagctactggatcaactgggtccgacaggcccctggacaaggactggaatggatgggacagatccttccaggcggaggggacaccaactacaacggcaagttcaagggcagagtgaccatcaccgccgacaccagcacaagcaccgcctacatggaactgagcagcctgagaagcgaggacaccgccgtgtattattgcaccagacgggtgcccatccggctggattattggggacagggaaccctggtcaccgtgtctagtacgcgtgcctctacaaagggaccctccgtgtttcctctggctcccagcagcaagtctacaagcggaggaacagccgctctgggctgcctggtcaaggattactttcccgagcctgtgaccgtgtcctggaatagcggagcactgacaagcggcgtgcacacctttccagccgtgctgcaaagcagcggcctgtactctctgagcagcgtggtcacagtgcctagctctagcctgggcacccagacctacatctgcaatgtgaaccacaagcctagcaacaccaaggtggacaagagagtggaacccaagagctgtgaagtgaaaaccgactccaccgaccacgtgaagcccaaagagacagagaacaccaagcagcccagcaagagctgccacaagcccaaggccatcgtgcacaccgagaaagtgaacatgatgagcctgaccgtgctgggcctgcggatgctgttcgccaaaaccgtggccgtgaacttcctgctgaccgccaagctgttcttcctc

SEQ ID NO: 5884 - DNA, 1875 bp, synthetic construct
  source 1..1875: mol_type = other DNA
atggccttaccagtgaccgccttgctcctgccgctggccttgctgctccacgccgccaggccggacatcgtgatgacacagagccctgatagcctggccgtgtctctgggagagagagccaccattaactgcaaggccagccagagcgtggactacgacggcgacagcttcctgaactggtatcagcagaagcccggccagcctcctaagctgctgatctacgccgccagcaatctggaaagcggcgtgccaagcagattttccggctctggcagcggcaccgatttcaccctgacaatatccagcctccagcctgaggacgtggccgtgtactactgccagcagagcaacgacgaccctctgacctttggacagggcaccaaggtggaaatcaaactcgagggacagcctaaggccaatcctaccgtgacactgttccctccaagcagcgaagaactccaggccaacaaggccacacttgtgtgcctgatctccgacttctaccctggggctgtgacagtggcttggaaggccgatggatctcctgtgaaagccggcgtggaaaccaccaagccatccaagcagagcaacaacaaatacgccgccagctcctacctgagcctgacacctgagcagtggaagtcccacagatcctacagctgccaagtgacccacgaaggcagcaccgtggaaaagacagtggcccctacagagtgcagcggcagagccgattgcggcatcaccagcgccagctaccaccagggcgtgctgagcgccaccatcctgtacgagatcctgctgggcaaggccaccctgtacgccgtgctggtgtctgccctggtgctgatggctatggtcaagcggaaggacagccggggaagggccaagcgatctggatctggagcaacaaacttctcactactcaaacaagcaggtgacgtggaggagaatcccgggcctactagtatggactggatttggcgcatccttttccttgtcggcgctgctaccggcgcgcattccttcgaacaagttcagctggttcagagcggagccgaagtgaagaaacctggggcctctgtgaaggtgtcctgcaaagccagcggctacacctttaccagctactggatcaactgggtccgacaggcccctggacaaggactggaatggatgggacagatccttccaggcggaggggacaccaactacaacggcaagttcaagggcagagtgaccatcaccgccgacaccagcacaagcaccgcctacatggaactgagcagcctgagaagcgaggacaccgccgtgtattattgcaccagacgggtgcccatccggctggattattggggacagggaaccctggtcaccgtgtctagtacgcgtgcctctacaaagggaccctccgtgtttcctctggctcccagcagcaagtctacaagcggaggaacagccgctctgggctgcctggtcaaggattactttcccgagcctgtgaccgtgtcctggaatagcggagcactgacaagcggcgtgcacacctttccagccgtgctgcaaagcagcggcctgtactctctgagcagcgtggtcacagtgcctagctctagcctgggcacccagacctacatctgcaatgtgaaccacaagcctagcaacaccaaggtggacaagagagtggaacccaagagctgtatccccgaggacacattcttcccaagcagcgacgtgccctgcgacgtgaagctggtggaaaagagcttcgagacagacaccaacctgaacttccagaacctgagcgtgatcggcttcagaatcctgctgctgaaagtggccggctttaacctgctgatgaccctgcggctgtggtccagc

SEQ ID NO: 5885 - DNA, 1875 bp, synthetic construct
  source 1..1875: mol_type = other DNA
atggccttaccagtgaccgccttgctcctgccgctggccttgctgctccacgccgccaggccggacatcgtgatgacacagagccctgatagcctggccgtgtctctgggagagagagccaccattaactgcaaggccagccagagcgtggactacgacggcgacagcttcctgaactggtatcagcagaagcccggccagcctcctaagctgctgatctacgccgccagcaatctggaaagcggcgtgccaagcagattttccggctctggcagcggcaccgatttcaccctgacaatatccagcctccagcctgaggacgtggccgtgtactactgccagcagagcaacgacgaccctctgacctttggacagggcaccaaggtggaaatcaaactcgagggacagcctaaggccaatcctaccgtgacactgttccctccaagcagcgaagaactccaggccaacaaggccacacttgtgtgcctgatctccgacttctaccctggggctgtgacagtggcttggaaggccgatggatctcctgtgaaagccggcgtggaaaccaccaagccatccaagcagagcaacaacaaatacgccgccagctcctacctgagcctgacacctgagcagtggaagtcccacagatcctacagctgccaagtgacccacgaaggcagcaccgtggaaaagacagtggcccctacagagtgcagcggcagagccgattgcggctttaccagcgagagctaccagcagggcgtgctgagcgccaccatcctgtacgagatcctgctgggcaaggccaccctgtacgccgtgctggtgtctgccctggtgctgatggctatggtcaagcggaaggacagccggggaagggccaagcgatctggatctggagcaacaaacttctcactactcaaacaagcaggtgacgtggaggagaatcccgggcctactagtatggactggatttggcgcatccttttccttgtcggcgctgctaccggcgcgcattccttcgaacaagttcagctggttcagagcggagccgaagtgaagaaacctggggcctctgtgaaggtgtcctgcaaagccagcggctacacctttaccagctactggatcaactgggtccgacaggcccctggacaaggactggaatggatgggacagatccttccaggcggaggggacaccaactacaacggcaagttcaagggcagagtgaccatcaccgccgacaccagcacaagcaccgcctacatggaactgagcagcctgagaagcgaggacaccgccgtgtattattgcaccagacgggtgcccatccggctggattattggggacagggaaccctggtcaccgtgtctagtacgcgtgcctctacaaagggaccctccgtgtttcctctggctcccagcagcaagtctacaagcggaggaacagccgctctgggctgcctggtcaaggattactttcccgagcctgtgaccgtgtcctggaatagcggagcactgacaagcggcgtgcacacctttccagccgtgctgcaaagcagcggcctgtactctctgagcagcgtggtcacagtgcctagctctagcctgggcacccagacctacatctgcaatgtgaaccacaagcctagcaacaccaaggtggacaagagagtggaacccaagagctgtatccccgaggacacattcttcccaagccccgagagcagctgcgacgtgaagctggtggaaaagagcttcgagacagacaccaacctgaacttccagaacctgagcgtgatcggcttcagaatcctgctgctgaaagtggccggctttaacctgctgatgaccctgcggctgtggtccagc

SEQ ID NO: 5886 - DNA, 1353 bp, synthetic construct
  source 1..1353: mol_type = other DNA
atggccttaccagtgaccgccttgctcctgccgctggccttgctgctccacgccgccaggccggacatcgtgatgacacagagccctgatagcctggccgtgtctctgggagagagagccaccattaactgcaaggccagccagagcgtggactacgacggcgacagcttcctgaactggtatcagcagaagcccggccagcctcctaagctgctgatctacgccgccagcaatctggaaagcggcgtgccaagcagattttccggctctggcagcggcaccgatttcaccctgacaatatccagcctccagcctgaggacgtggccgtgtactactgccagcagagcaacgacgaccctctgacctttggacagggcaccaaggtggaaatcaaaggcggaggcggaagtggaggcggaggatctggcggcggaggctctcaagttcagctggttcagagcggagccgaagtgaagaaacctggggcctctgtgaaggtgtcctgcaaagccagcggctacacctttaccagctactggatcaactgggtccgacaggcccctggacaaggactggaatggatgggacagatccttccaggcggaggggacaccaactacaacggcaagttcaagggcagagtgaccatcaccgccgacaccagcacaagcaccgcctacatggaactgagcagcctgagaagcgaggacaccgccgtgtattattgcaccagacgggtgcccatccggctggattattggggacagggaaccctggtcaccgtgtctagtacgcgtgacggtaacgaggagatgggaggaatcactcaaaccccttacaaagtctcaatttcaggaacaactgttatccttacatgtccccagtatcctggcagcgagatcctttggcagcataacgacaagaatatagggggagatgaagacgataagaatatcggatctgacgaggatcacttgagcctgaaagagttctccgagcttgaacaaagcggatattatgtgtgctatccgcgcgggtcaaagccggaagacgctaacttttacctttatctccgagccagagtgtgcgaaaattgcatggaaatggacgttatgtccgttgctacaatagttatcgtagatatatgcatcacgggtggactgcttctgctggtttattattggtccaagaatagaaaggccaaagctaaacccgtgaccagaggcgctggcgcaggcggaaggcaaaggggacaaaacaaagaacggccaccaccagtgccaaatccagattatgagcctattcggaaaggacagagggacctgtactctggcctgaatcagagaagaatc

SEQ ID NO: 5887 - DNA, 1248 bp, synthetic construct
  source 1..1248: mol_type = other DNA
atggccttaccagtgaccgccttgctcctgccgctggccttgctgctccacgccgccaggccggacatcgtgatgacacagagccctgatagcctggccgtgtctctgggagagagagccaccattaactgcaaggccagccagagcgtggactacgacggcgacagcttcctgaactggtatcagcagaagcccggccagcctcctaagctgctgatctacgccgccagcaatctggaaagcggcgtgccaagcagattttccggctctggcagcggcaccgatttcaccctgacaatatccagcctccagcctgaggacgtggccgtgtactactgccagcagagcaacgacgaccctctgacctttggacagggcaccaaggtggaaatcaaaggcggaggcggaagtggaggcggaggatctggcggcggaggctctcaagttcagctggttcagagcggagccgaagtgaagaaacctggggcctctgtgaaggtgtcctgcaaagccagcggctacacctttaccagctactggatcaactgggtccgacaggcccctggacaaggactggaatggatgggacagatccttccaggcggaggggacaccaactacaacggcaagttcaagggcagagtgaccatcaccgccgacaccagcacaagcaccgcctacatggaactgagcagcctgagaagcgaggacaccgccgtgtattattgcaccagacgggtgcccatccggctggattattggggacagggaaccctggtcaccgtgtctagtacgcgtttcaagatccccatcgaggaactggaagatcgggtgttcgtgaactgcaacacctctatcacctgggtggaaggcaccgtgggaacactgctgagcgacatcaccagactggacctcggcaagcggattctggaccctcggggcatctacagatgcaacggcaccgacatctacaaggacaaagaaagcaccgtgcaggtccactacagaatgtgccagtcctgcgtggaactggaccctgctacagtggccggcatcatcgtgaccgatgtgatcgctactctgctgctggctctgggagtgttctgcttcgccggacacgaaacaggcagactgtctggcgctgccgatacacaggccctgctgagaaacgaccaagtgtatcagcccctgcgcgacagagatgatgcccagtattctcacctcggcggcaactgggctagaaacaag

SEQ ID NO: 5888 - DNA, 1278 bp, synthetic construct
  source 1..1278: mol_type = other DNA
atggccttaccagtgaccgccttgctcctgccgctggccttgctgctccacgccgccaggccggacatcgtgatgacacagagccctgatagcctggccgtgtctctgggagagagagccaccattaactgcaaggccagccagagcgtggactacgacggcgacagcttcctgaactggtatcagcagaagcccggccagcctcctaagctgctgatctacgccgccagcaatctggaaagcggcgtgccaagcagattttccggctctggcagcggcaccgatttcaccctgacaatatccagcctccagcctgaggacgtggccgtgtactactgccagcagagcaacgacgaccctctgacctttggacagggcaccaaggtggaaatcaaaggcggaggcggaagtggaggcggaggatctggcggcggaggctctcaagttcagctggttcagagcggagccgaagtgaagaaacctggggcctctgtgaaggtgtcctgcaaagccagcggctacacctttaccagctactggatcaactgggtccgacaggcccctggacaaggactggaatggatgggacagatccttccaggcggaggggacaccaactacaacggcaagttcaagggcagagtgaccatcaccgccgacaccagcacaagcaccgcctacatggaactgagcagcctgagaagcgaggacaccgccgtgtattattgcaccagacgggtgcccatccggctggattattggggacagggaaccctggtcaccgtgtctagtacgcgtcagagcatcaagggcaaccacctggtcaaggtgtacgactaccaagaggacggcagcgtgctgctgacatgtgatgccgaggccaagaacatcacctggtttaaggacggcaagatgatcggcttcctgaccgaggacaagaagaagtggaacctgggcagcaacgctaaggaccccagaggcatgtatcagtgcaagggcagccagaacaagagcaagcccctccaggtgtactaccggatgtgccagaactgcatcgagctgaacgccgctaccatcagcggctttctgttcgccgagatcgtgtccatcttcgtgctggccgtgggcgtgtactttatcgctggacaggatggcgtgcggcagagcagagcttccgataagcaaaccctgctgcctaacgaccagctgtaccagcctctgaaggacagagaggacgaccagtacagccacctccagggcaatcagctgagaagaaac

SEQ ID NO: 5889 - DNA, 1227 bp, synthetic construct
  source 1..1227: mol_type = other DNA
atggccttaccagtgaccgccttgctcctgccgctggccttgctgctccacgccgccaggccggacatcgtgatgacacagagccctgatagcctggccgtgtctctgggagagagagccaccattaactgcaaggccagccagagcgtggactacgacggcgacagcttcctgaactggtatcagcagaagcccggccagcctcctaagctgctgatctacgccgccagcaatctggaaagcggcgtgccaagcagattttccggctctggcagcggcaccgatttcaccctgacaatatccagcctccagcctgaggacgtggccgtgtactactgccagcagagcaacgacgaccctctgacctttggacagggcaccaaggtggaaatcaaaggcggaggcggaagtggaggcggaggatctggcggcggaggctctcaagttcagctggttcagagcggagccgaagtgaagaaacctggggcctctgtgaaggtgtcctgcaaagccagcggctacacctttaccagctactggatcaactgggtccgacaggcccctggacaaggactggaatggatgggacagatccttccaggcggaggggacaccaactacaacggcaagttcaagggcagagtgaccatcaccgccgacaccagcacaagcaccgcctacatggaactgagcagcctgagaagcgaggacaccgccgtgtattattgcaccagacgggtgcccatccggctggattattggggacagggaaccctggtcaccgtgtctagtacgcgtcagagttttgggttgttggaccctaaattgtgctatctgttggacggaatcctgttcatttacggagtgatcctgaccgcattgttcctgcgggttaagttttccagatccgcagacgcacccgcttaccaacaagggcagaaccaactctacaatgaacttaatttggggcggagggaagagtacgacgttctggacaaaaggaggggacgagatcccgagatgggcggaaagcctcagcgaaggaagaatccgcaagaggggctttataacgaactccagaaagataaaatggcagaagcctatagtgagattgggatgaagggagaaaggaggaggggtaaaggtcacgatgggttgtaccaaggattgagcacagccactaaagatacctatgatgcgctccacatgcaggccctgccgccaaga

SEQ ID NO: 5890 - DNA, 1512 bp, synthetic construct
  source 1..1512: mol_type = other DNA
atggccttaccagtgaccgccttgctcctgccgctggccttgctgctccacgccgccaggccggacatcgtgatgacacagagccctgatagcctggccgtgtctctgggagagagagccaccattaactgcaaggccagccagagcgtggactacgacggcgacagcttcctgaactggtatcagcagaagcccggccagcctcctaagctgctgatctacgccgccagcaatctggaaagcggcgtgccaagcagattttccggctctggcagcggcaccgatttcaccctgacaatatccagcctccagcctgaggacgtggccgtgtactactgccagcagagcaacgacgaccctctgacctttggacagggcaccaaggtggaaatcaaaggcggaggcggaagtggaggcggaggatctggcggcggaggctctcaagttcagctggttcagagcggagccgaagtgaagaaacctggggcctctgtgaaggtgtcctgcaaagccagcggctacacctttaccagctactggatcaactgggtccgacaggcccctggacaaggactggaatggatgggacagatccttccaggcggaggggacaccaactacaacggcaagttcaagggcagagtgaccatcaccgccgacaccagcacaagcaccgcctacatggaactgagcagcctgagaagcgaggacaccgccgtgtattattgcaccagacgggtgcccatccggctggattattggggacagggaaccctggtcaccgtgtctagtacgcgtggaatgaggactgaggatcttcccaaagctgtcgtctttctcgaaccccaatggtatcgggtgctcgaaaaagactctgtgacactgaaatgccaaggggcctactctcccgaggacaactccacacagtggtttcataatgagtccctcatcagctctcaggccagctcttatttcattgatgccgctacagtggacgactccggcgagtatcggtgtcagaccaatctgtctacactgtctgaccccgtgcagcttgaggtccacattggatggttgctcttgcaagccccacgctgggttttcaaagaggaagatccaatccatctgcggtgccacagctggaaaaacaccgctctccacaaagtcacatacctgcaaaatggcaaaggacgcaaatacttccatcacaattccgatttttacattccgaaggctaccctgaaagacagcggcagctatttctgccggggactcgtcggctccaagaatgtgtcctccgaaaccgtgaatatcacgattacccaaggactggctgtgcctacaatctctagcttctttccgcctggataccaagtctccttctgtcttgtgatggtcctcctgtttgctgtggacacaggactgtacttttccgtgaaaacgaacatccgcagctccacacgcgattggaaagatcacaagtttaaatggcgcaaagatccccaggacaag

SEQ ID NO: 5891 - DNA, 1437 bp, synthetic construct
  source 1..1437: mol_type = other DNA
atggccttaccagtgaccgccttgctcctgccgctggccttgctgctccacgccgccaggccggacatcgtgatgacacagagccctgatagcctggccgtgtctctgggagagagagccaccattaactgcaaggccagccagagcgtggactacgacggcgacagcttcctgaactggtatcagcagaagcccggccagcctcctaagctgctgatctacgccgccagcaatctggaaagcggcgtgccaagcagattttccggctctggcagcggcaccgatttcaccctgacaatatccagcctccagcctgaggacgtggccgtgtactactgccagcagagcaacgacgaccctctgacctttggacagggcaccaaggtggaaatcaaaggcggaggcggaagtggaggcggaggatctggcggcggaggctctcaagttcagctggttcagagcggagccgaagtgaagaaacctggggcctctgtgaaggtgtcctgcaaagccagcggctacacctttaccagctactggatcaactgggtccgacaggcccctggacaaggactggaatggatgggacagatccttccaggcggaggggacaccaactacaacggcaagttcaagggcagagtgaccatcaccgccgacaccagcacaagcaccgcctacatggaactgagcagcctgagaagcgaggacaccgccgtgtattattgcaccagacgggtgcccatccggctggattattggggacagggaaccctggtcaccgtgtctagtacgcgtggaatgaggactgaggatcttcccaaagctgtcgtctttctcgaaccccaatggtatcgggtgctcgaaaaagactctgtgacactgaaatgccaaggggcctactctcccgaggacaactccacacagtggtttcataatgagtccctcatcagctctcaggccagctcttatttcattgatgccgctacagtggacgactccggcgagtatcggtgtcagaccaatctgtctacactgtctgaccccgtgcagcttgaggtccacattggatggttgctcttgcaagccccacgctgggttttcaaagaggaagatccaatccatctgcggtgccacagctggaaaaacaccgctctccacaaagtcacatacctgcaaaatggcaaaggacgcaaatacttccatcacaattccgatttttacattccgaaggctaccctgaaagacagcggcagctatttctgccggggactcgtcggctccaagaatgtgtcctccgaaaccgtgaatatcacgattacccaaggactggctgtgcctacaatctctagcttctttccgcctggataccaagtctccttctgtcttgtgatggtcctcctgtttgctgtggacacaggactgtacttttccgtg

SEQ ID NO: 5892 - DNA, 1440 bp, synthetic construct
  source 1..1440: mol_type = other DNA
atggccttaccagtgaccgccttgctcctgccgctggccttgctgctccacgccgccaggccggacatcgtgatgacacagagccctgatagcctggccgtgtctctgggagagagagccaccattaactgcaaggccagccagagcgtggactacgacggcgacagcttcctgaactggtatcagcagaagcccggccagcctcctaagctgctgatctacgccgccagcaatctggaaagcggcgtgccaagcagattttccggctctggcagcggcaccgatttcaccctgacaatatccagcctccagcctgaggacgtggccgtgtactactgccagcagagcaacgacgaccctctgacctttggacagggcaccaaggtggaaatcaaaggcggaggcggaagtggaggcggaggatctggcggcggaggctctcaagttcagctggttcagagcggagccgaagtgaagaaacctggggcctctgtgaaggtgtcctgcaaagccagcggctacacctttaccagctactggatcaactgggtccgacaggcccctggacaaggactggaatggatgggacagatccttccaggcggaggggacaccaactacaacggcaagttcaagggcagagtgaccatcaccgccgacaccagcacaagcaccgcctacatggaactgagcagcctgagaagcgaggacaccgccgtgtattattgcaccagacgggtgcccatccggctggattattggggacagggaaccctggtcaccgtgtctagtacgcgtggaatgaggactgaggatcttcccaaagctgtcgtctttctcgaaccccaatggtatcgggtgctcgaaaaagactctgtgacactgaaatgccaaggggcctactctcccgaggacaactccacacagtggtttcataatgagtccctcatcagctctcaggccagctcttatttcattgatgccgctacagtggacgactccggcgagtatcggtgtcagaccaatctgtctacactgtctgaccccgtgcagcttgaggtccacattggatggttgctcttgcaagccccacgctgggttttcaaagaggaagatccaatccatctgcggtgccacagctggaaaaacaccgctctccacaaagtcacatacctgcaaaatggcaaaggacgcaaatacttccatcacaattccgatttttacattccgaaggctaccctgaaagacagcggcagctatttctgccggggactcgtcggctccaagaatgtgtcctccgaaaccgtgaatatcacgattacccaaggactggctgtgcctacaatctctagcttctttccgcctggataccaagtctccttctgtcttgtgatggtcctcctgtttgctgtggacacaggactgtacttttccgtgaaa

SEQ ID NO: 5893 - DNA, 2172 bp, synthetic construct
  source 1..2172: mol_type = other DNA
atggccttaccagtgaccgccttgctcctgccgctggccttgctgctccacgccgccaggccggacatcgtgatgacacagagccctgatagcctggccgtgtctctgggagagagagccaccattaactgcaaggccagccagagcgtggactacgacggcgacagcttcctgaactggtatcagcagaagcccggccagcctcctaagctgctgatctacgccgccagcaatctggaaagcggcgtgccaagcagattttccggctctggcagcggcaccgatttcaccctgacaatatccagcctccagcctgaggacgtggccgtgtactactgccagcagagcaacgacgaccctctgacctttggacagggcaccaaggtggaaatcaaactcgagggacagcctaaggccaatcctaccgtgacactgttccctccaagcagcgaagaactccaggccaacaaggccacacttgtgtgcctgatctccgacttctaccctggggctgtgacagtggcttggaaggccgatggatctcctgtgaaagccggcgtggaaaccaccaagccatccaagcagagcaacaacaaatacgccgccagctcctacctgagcctgacacctgagcagtggaagtcccacagatcctacagctgccaagtgacccacgaaggcagcaccgtggaaaagacagtggcccctacagagtgcagcggatcccagagcttcggcctgctggaccccaagctgtgctacctgctggatggcatcctgttcatctacggcgtgatcctgaccgccctgttcctgagagtgaagttcagcagaagcgccgacgcccctgcctaccagcagggacagaaccaactgtacaacgagctgaacctgggcagacgggaagagtacgacgtgctggacaagcggagaggcagggaccctgagatgggcggaaagccccagcggagaaagaacccccaggaaggactgtataacgaactccagaaagacaagatggccgaagcctacagcgagatcggcatgaagggcgagcggagaagaggcaagggccacgatggcctgtaccagggcctgagcaccgccaccaaggacacctatgacgccctgcacatgcaggccctgcctccaagaagggccaagcgatctggatctggagcaacaaacttctcactactcaaacaagcaggtgacgtggaggagaatcccgggcctactagtatggactggatttggcgcatccttttccttgtcggcgctgctaccggcgcgcattccttcgaacaagttcagctggttcagagcggagccgaagtgaagaaacctggggcctctgtgaaggtgtcctgcaaagccagcggctacacctttaccagctactggatcaactgggtccgacaggcccctggacaaggactggaatggatgggacagatccttccaggcggaggggacaccaactacaacggcaagttcaagggcagagtgaccatcaccgccgacaccagcacaagcaccgcctacatggaactgagcagcctgagaagcgaggacaccgccgtgtattattgcaccagacgggtgcccatccggctggattattggggacagggaaccctggtcaccgtgtctagtacgcgtgcctctacaaagggaccctccgtgtttcctctggctcccagcagcaagtctacaagcggaggaacagccgctctgggctgcctggtcaaggattactttcccgagcctgtgaccgtgtcctggaatagcggagcactgacaagcggcgtgcacacctttccagccgtgctgcaaagcagcggcctgtactctctgagcagcgtggtcacagtgcctagctctagcctgggcacccagacctacatctgcaatgtgaaccacaagcctagcaacaccaaggtggacaagagagtggaacccaagagctgtggtaccatcactcaaggtttggcagtgtcaaccatctcatcattctttccacctggctaccaagtgtccttctgcctggtcatggtgctgctgttcgccgtggataccggcctgtacttcagcgtcaagaccaacatccggtccagcaccagagactggaaggaccacaagttcaagtggcggaaggaccctcaggacaag

SEQ ID NO: 5894 - DNA, 2217 bp, synthetic construct
  source 1..2217: mol_type = other DNA
atggccttaccagtgaccgccttgctcctgccgctggccttgctgctccacgccgccaggccggacatcgtgatgacacagagccctgatagcctggccgtgtctctgggagagagagccaccattaactgcaaggccagccagagcgtggactacgacggcgacagcttcctgaactggtatcagcagaagcccggccagcctcctaagctgctgatctacgccgccagcaatctggaaagcggcgtgccaagcagattttccggctctggcagcggcaccgatttcaccctgacaatatccagcctccagcctgaggacgtggccgtgtactactgccagcagagcaacgacgaccctctgacctttggacagggcaccaaggtggaaatcaaactcgaggacctgaagaacgtgttcccacctgaggtggccgtgttcgagcctagcgaggccgagatcagccacacccagaaagccaccctcgtgtgcctggctaccggcttctaccccgaccatgtggaactgtcttggtgggtcaacggcaaagaggtgcacagcggcgtgtctaccgacccccagccactgaaagaacagcccgccctgaacgacagccggtactgcctgagcagcagactgagagtgtccgccaccttctggcagaacccccggaaccacttcagatgccaggtgcagttctacggcctgagcgagaacgacgagtggacccaggacagagccaagcccgtgacccagatcgtgtctgccgaagcctggggcagagccgattgcggatcccagagcttcggcctgctggaccccaagctgtgctacctgctggatggcatcctgttcatctacggcgtgatcctgaccgccctgttcctgagagtgaagttcagcagaagcgccgacgcccctgcctaccagcagggacagaaccaactgtacaacgagctgaacctgggcagacgggaagagtacgacgtgctggacaagcggagaggcagggaccctgagatgggcggaaagccccagcggagaaagaacccccaggaaggactgtataacgaactccagaaagacaagatggccgaagcctacagcgagatcggcatgaagggcgagcggagaagaggcaagggccacgatggcctgtaccagggcctgagcaccgccaccaaggacacctatgacgccctgcacatgcaggccctgcctccaagaagggccaagcgatctggatctggagcaacaaacttctcactactcaaacaagcaggtgacgtggaggagaatcccgggcctactagtatggactggatttggcgcatccttttccttgtcggcgctgctaccggcgcgcattccttcgaacaagttcagctggttcagagcggagccgaagtgaagaaacctggggcctctgtgaaggtgtcctgcaaagccagcggctacacctttaccagctactggatcaactgggtccgacaggcccctggacaaggactggaatggatgggacagatccttccaggcggaggggacaccaactacaacggcaagttcaagggcagagtgaccatcaccgccgacaccagcacaagcaccgcctacatggaactgagcagcctgagaagcgaggacaccgccgtgtattattgcaccagacgggtgcccatccggctggattattggggacagggaaccctggtcaccgtgtctagtacgcgtatccagaaccctgatcctgccgtgtaccagctgcgggatagcaagagcagcgacaagagcgtgtgtctgttcaccgacttcgacagccagaccaacgtgtcccagagcaaggactccgacgtgtacatcaccgataagaccgtgctggacatgcggagcatggacttcaagagcaactccgccgtggcctggtccaacaagtccgatttcgcctgcgccaacgccttcaacaacagcattatccccgaggacacattcttcccaagccccgagagcagctgcggtaccatcactcaaggtttggcagtgtcaaccatctcatcattctttccacctggctaccaagtgtccttctgcctggtcatggtgctgctgttcgccgtggataccggcctgtacttcagcgtcaagaccaacatccggtccagcaccagagactggaaggaccacaagttcaagtggcggaaggaccctcaggacaag

SEQ ID NO: 5895 - DNA, 2142 bp, synthetic construct
  source 1..2142: mol_type = other DNA
atggccttaccagtgaccgccttgctcctgccgctggccttgctgctccacgccgccaggccggacatcgtgatgacacagagccctgatagcctggccgtgtctctgggagagagagccaccattaactgcaaggccagccagagcgtggactacgacggcgacagcttcctgaactggtatcagcagaagcccggccagcctcctaagctgctgatctacgccgccagcaatctggaaagcggcgtgccaagcagattttccggctctggcagcggcaccgatttcaccctgacaatatccagcctccagcctgaggacgtggccgtgtactactgccagcagagcaacgacgaccctctgacctttggacagggcaccaaggtggaaatcaaactcgaggacctgaagaacgtgttcccacctgaggtggccgtgttcgagcctagcgaggccgagatcagccacacccagaaagccaccctcgtgtgcctggctaccggcttctaccccgaccatgtggaactgtcttggtgggtcaacggcaaagaggtgcacagcggcgtgtctaccgacccccagccactgaaagaacagcccgccctgaacgacagccggtactgcctgagcagcagactgagagtgtccgccaccttctggcagaacccccggaaccacttcagatgccaggtgcagttctacggcctgagcgagaacgacgagtggacccaggacagagccaagcccgtgacccagatcgtgtctgccgaagcctggggcagagccgattgcggatcccagagcttcggcctgctggaccccaagctgtgctacctgctggatggcatcctgttcatctacggcgtgatcctgaccgccctgttcctgagagtgaagttcagcagaagcgccgacgcccctgcctaccagcagggacagaaccaactgtacaacgagctgaacctgggcagacgggaagagtacgacgtgctggacaagcggagaggcagggaccctgagatgggcggaaagccccagcggagaaagaacccccaggaaggactgtataacgaactccagaaagacaagatggccgaagcctacagcgagatcggcatgaagggcgagcggagaagaggcaagggccacgatggcctgtaccagggcctgagcaccgccaccaaggacacctatgacgccctgcacatgcaggccctgcctccaagaagggccaagcgatctggatctggagcaacaaacttctcactactcaaacaagcaggtgacgtggaggagaatcccgggcctactagtatggactggatttggcgcatccttttccttgtcggcgctgctaccggcgcgcattccttcgaacaagttcagctggttcagagcggagccgaagtgaagaaacctggggcctctgtgaaggtgtcctgcaaagccagcggctacacctttaccagctactggatcaactgggtccgacaggcccctggacaaggactggaatggatgggacagatccttccaggcggaggggacaccaactacaacggcaagttcaagggcagagtgaccatcaccgccgacaccagcacaagcaccgcctacatggaactgagcagcctgagaagcgaggacaccgccgtgtattattgcaccagacgggtgcccatccggctggattattggggacagggaaccctggtcaccgtgtctagtacgcgtatccagaaccctgatcctgccgtgtaccagctgcgggatagcaagagcagcgacaagagcgtgtgtctgttcaccgacttcgacagccagaccaacgtgtcccagagcaaggactccgacgtgtacatcaccgataagaccgtgctggacatgcggagcatggacttcaagagcaactccgccgtggcctggtccaacaagtccgatttcgcctgcgccaacgccttcaacaacagcattatccccgaggacacattcttcccaagccccgagagcagctgcggtaccatcactcaaggtttggcagtgtcaaccatctcatcattctttccacctggctaccaagtgtccttctgcctggtcatggtgctgctgttcgccgtggataccggcctgtacttcagcgtc

SEQ ID NO: 5896 - DNA, 2145 bp, synthetic construct
  source 1..2145: mol_type = other DNA
atggccttaccagtgaccgccttgctcctgccgctggccttgctgctccacgccgccaggccggacatcgtgatgacacagagccctgatagcctggccgtgtctctgggagagagagccaccattaactgcaaggccagccagagcgtggactacgacggcgacagcttcctgaactggtatcagcagaagcccggccagcctcctaagctgctgatctacgccgccagcaatctggaaagcggcgtgccaagcagattttccggctctggcagcggcaccgatttcaccctgacaatatccagcctccagcctgaggacgtggccgtgtactactgccagcagagcaacgacgaccctctgacctttggacagggcaccaaggtggaaatcaaactcgaggacctgaagaacgtgttcccacctgaggtggccgtgttcgagcctagcgaggccgagatcagccacacccagaaagccaccctcgtgtgcctggctaccggcttctaccccgaccatgtggaactgtcttggtgggtcaacggcaaagaggtgcacagcggcgtgtctaccgacccccagccactgaaagaacagcccgccctgaacgacagccggtactgcctgagcagcagactgagagtgtccgccaccttctggcagaacccccggaaccacttcagatgccaggtgcagttctacggcctgagcgagaacgacgagtggacccaggacagagccaagcccgtgacccagatcgtgtctgccgaagcctggggcagagccgattgcggatcccagagcttcggcctgctggaccccaagctgtgctacctgctggatggcatcctgttcatctacggcgtgatcctgaccgccctgttcctgagagtgaagttcagcagaagcgccgacgcccctgcctaccagcagggacagaaccaactgtacaacgagctgaacctgggcagacgggaagagtacgacgtgctggacaagcggagaggcagggaccctgagatgggcggaaagccccagcggagaaagaacccccaggaaggactgtataacgaactccagaaagacaagatggccgaagcctacagcgagatcggcatgaagggcgagcggagaagaggcaagggccacgatggcctgtaccagggcctgagcaccgccaccaaggacacctatgacgccctgcacatgcaggccctgcctccaagaagggccaagcgatctggatctggagcaacaaacttctcactactcaaacaagcaggtgacgtggaggagaatcccgggcctactagtatggactggatttggcgcatccttttccttgtcggcgctgctaccggcgcgcattccttcgaacaagttcagctggttcagagcggagccgaagtgaagaaacctggggcctctgtgaaggtgtcctgcaaagccagcggctacacctttaccagctactggatcaactgggtccgacaggcccctggacaaggactggaatggatgggacagatccttccaggcggaggggacaccaactacaacggcaagttcaagggcagagtgaccatcaccgccgacaccagcacaagcaccgcctacatggaactgagcagcctgagaagcgaggacaccgccgtgtattattgcaccagacgggtgcccatccggctggattattggggacagggaaccctggtcaccgtgtctagtacgcgtatccagaaccctgatcctgccgtgtaccagctgcgggatagcaagagcagcgacaagagcgtgtgtctgttcaccgacttcgacagccagaccaacgtgtcccagagcaaggactccgacgtgtacatcaccgataagaccgtgctggacatgcggagcatggacttcaagagcaactccgccgtggcctggtccaacaagtccgatttcgcctgcgccaacgccttcaacaacagcattatccccgaggacacattcttcccaagccccgagagcagctgcggtaccatcactcaaggtttggcagtgtcaaccatctcatcattctttccacctggctaccaagtgtccttctgcctggtcatggtgctgctgttcgccgtggataccggcctgtacttcagcgtcaag

SEQ ID NO: 5897 - DNA, 2148 bp, synthetic construct
  source 1..2148: mol_type = other DNA
atggccttaccagtgaccgccttgctcctgccgctggccttgctgctccacgccgccaggccggacatcgtgatgacacagagccctgatagcctggccgtgtctctgggagagagagccaccattaactgcaaggccagccagagcgtggactacgacggcgacagcttcctgaactggtatcagcagaagcccggccagcctcctaagctgctgatctacgccgccagcaatctggaaagcggcgtgccaagcagattttccggctctggcagcggcaccgatttcaccctgacaatatccagcctccagcctgaggacgtggccgtgtactactgccagcagagcaacgacgaccctctgacctttggacagggcaccaaggtggaaatcaaactcgaggacctgaagaacgtgttcccacctgaggtggccgtgttcgagcctagcgaggccgagatcagccacacccagaaagccaccctcgtgtgcctggctaccggcttctaccccgaccatgtggaactgtcttggtgggtcaacggcaaagaggtgcacagcggcgtgtctaccgacccccagccactgaaagaacagcccgccctgaacgacagccggtactgcctgagcagcagactgagagtgtccgccaccttctggcagaacccccggaaccacttcagatgccaggtgcagttctacggcctgagcgagaacgacgagtggacccaggacagagccaagcccgtgacccagatcgtgtctgccgaagcctggggcagagccgattgcggatcccagagcttcggcctgctggaccccaagctgtgctacctgctggatggcatcctgttcatctacggcgtgatcctgaccgccctgttcctgagagtgaagttcagcagaagcgccgacgcccctgcctaccagcagggacagaaccaactgtacaacgagctgaacctgggcagacgggaagagtacgacgtgctggacaagcggagaggcagggaccctgagatgggcggaaagccccagcggagaaagaacccccaggaaggactgtataacgaactccagaaagacaagatggccgaagcctacagcgagatcggcatgaagggcgagcggagaagaggcaagggccacgatggcctgtaccagggcctgagcaccgccaccaaggacacctatgacgccctgcacatgcaggccctgcctccaagaagggccaagcgatctggatctggagcaacaaacttctcactactcaaacaagcaggtgacgtggaggagaatcccgggcctactagtatggactggatttggcgcatccttttccttgtcggcgctgctaccggcgcgcattccttcgaacaagttcagctggttcagagcggagccgaagtgaagaaacctggggcctctgtgaaggtgtcctgcaaagccagcggctacacctttaccagctactggatcaactgggtccgacaggcccctggacaaggactggaatggatgggacagatccttccaggcggaggggacaccaactacaacggcaagttcaagggcagagtgaccatcaccgccgacaccagcacaagcaccgcctacatggaactgagcagcctgagaagcgaggacaccgccgtgtattattgcaccagacgggtgcccatccggctggattattggggacagggaaccctggtcaccgtgtctagtacgcgtatccagaaccctgatcctgccgtgtaccagctgcgggatagcaagagcagcgacaagagcgtgtgtctgttcaccgacttcgacagccagaccaacgtgtcccagagcaaggactccgacgtgtacatcaccgataagaccgtgctggacatgcggagcatggacttcaagagcaactccgccgtggcctggtccaacaagtccgatttcgcctgcgccaacgccttcaacaacagcattatccccgaggacacattcttcccaagccccgagagcagctgcggtaccatcactcaaggtttggcagtgtcaaccatctcatcattctttccacctggctaccaagtgtccttctgcctggtcatggtgctgctgttcgccgtggataccggcctgtacttcagcgtcaagacc

SEQ ID NO: 5898 - DNA, 1959 bp, synthetic construct
  source 1..1959: mol_type = other DNA
atggccttaccagtgaccgccttgctcctgccgctggccttgctgctccacgccgccaggccggacatcgtgatgacacagagccctgatagcctggccgtgtctctgggagagagagccaccattaactgcaaggccagccagagcgtggactacgacggcgacagcttcctgaactggtatcagcagaagcccggccagcctcctaagctgctgatctacgccgccagcaatctggaaagcggcgtgccaagcagattttccggctctggcagcggcaccgatttcaccctgacaatatccagcctccagcctgaggacgtggccgtgtactactgccagcagagcaacgacgaccctctgacctttggacagggcaccaaggtggaaatcaaactcgagggacagcctaaggccaatcctaccgtgacactgttccctccaagcagcgaagaactccaggccaacaaggccacacttgtgtgcctgatctccgacttctaccctggggctgtgacagtggcttggaaggccgatggatctcctgtgaaagccggcgtggaaaccaccaagccatccaagcagagcaacaacaaatacgccgccagctcctacctgagcctgacacctgagcagtggaagtcccacagatcctacagctgccaagtgacccacgaaggcagcaccgtggaaaagacagtggcccctacagagtgcagcggatccctgggagagcctcagctgtgctatatcctggacgccatcctgtttctgtacggcatcgtgctgaccctgctgtactgccggctgaagatccaagtgcggaaggccgccatcaccagctacgagaaatccgacggcgtgtacaccggcctgagcaccagaaatcaagagacatacgagacactgaagcacgaaaagcctccacaaagggccaagcgatctggatctggagcaacaaacttctcactactcaaacaagcaggtgacgtggaggagaatcccgggcctactagtatggactggatttggcgcatccttttccttgtcggcgctgctaccggcgcgcattccttcgaacaagttcagctggttcagagcggagccgaagtgaagaaacctggggcctctgtgaaggtgtcctgcaaagccagcggctacacctttaccagctactggatcaactgggtccgacaggcccctggacaaggactggaatggatgggacagatccttccaggcggaggggacaccaactacaacggcaagttcaagggcagagtgaccatcaccgccgacaccagcacaagcaccgcctacatggaactgagcagcctgagaagcgaggacaccgccgtgtattattgcaccagacgggtgcccatccggctggattattggggacagggaaccctggtcaccgtgtctagtacgcgtgcctctacaaagggaccctccgtgtttcctctggctcccagcagcaagtctacaagcggaggaacagccgctctgggctgcctggtcaaggattactttcccgagcctgtgaccgtgtcctggaatagcggagcactgacaagcggcgtgcacacctttccagccgtgctgcaaagcagcggcctgtactctctgagcagcgtggtcacagtgcctagctctagcctgggcacccagacctacatctgcaatgtgaaccacaagcctagcaacaccaaggtggacaagagagtggaacccaagagctgtggtaccctcggagaaccacagctctgttacattctggatgctatcctgttcctctatgggatcgtcctgacactcctgtattgcagactcaaaattcaagttcgcaaagccgccattacctcttacgagaagagtgatggggtgtacacaggactgtctacccggaatcaagaaacctacgaaaccctcaaacatgagaagccacctcagtaa

SEQ ID NO: 5899 - DNA, 1866 bp, synthetic construct
  source 1..1866: mol_type = other DNA
atggccttaccagtgaccgccttgctcctgccgctggccttgctgctccacgccgccaggccggacatcgtgatgacacagagccctgatagcctggccgtgtctctgggagagagagccaccattaactgcaaggccagccagagcgtggactacgacggcgacagcttcctgaactggtatcagcagaagcccggccagcctcctaagctgctgatctacgccgccagcaatctggaaagcggcgtgccaagcagattttccggctctggcagcggcaccgatttcaccctgacaatatccagcctccagcctgaggacgtggccgtgtactactgccagcagagcaacgacgaccctctgacctttggacagggcaccaaggtggaaatcaaactcgaggacctgaagaacgtgttcccacctgaggtggccgtgttcgagcctagcgaggccgagatcagccacacccagaaagccaccctcgtgtgcctggctaccggcttctaccccgaccatgtggaactgtcttggtgggtcaacggcaaagaggtgcacagcggcgtgtgtaccgacccccagccactgaaagaacagcccgccctgaacgacagccggtactgcctgagcagcagactgagagtgtccgccaccttctggcagaacccccggaaccacttcagatgccaggtgcagttctacggcctgagcgagaacgacgagtggacccaggacagagccaagcccgtgacccagatcgtgtctgccgaagcctggggcagagccgattgcggctttaccagcgagagctaccagcagggcgtgctgagcgcctactacatgtacttgttgctgctgctgaagtccgtggtgtacttcgccatcatcacatgctgcctgctgcggagaaccgccttctgctgcaacggcgagaagtctagggccaagcgatctggatctggagcaacaaacttctcactactcaaacaagcaggtgacgtggaggagaatcccgggcctactagtatggactggatttggcgcatccttttccttgtcggcgctgctaccggcgcgcattccttcgaacaagttcagctggttcagagcggagccgaagtgaagaaacctggggcctctgtgaaggtgtcctgcaaagccagcggctacacctttaccagctactggatcaactgggtccgacaggcccctggacaaggactggaatggatgggacagatccttccaggcggaggggacaccaactacaacggcaagttcaagggcagagtgaccatcaccgccgacaccagcacaagcaccgcctacatggaactgagcagcctgagaagcgaggacaccgccgtgtattattgcaccagacgggtgcccatccggctggattattggggacagggaaccctggtcaccgtgtctagtacgcgtatccagaaccctgatcctgccgtgtaccagctgcgggatagcaagagcagcgacaagagcgtgtgtctgttcaccgacttcgacagccagaccaacgtgtcccagagcaaggactccgacgtgtacatcaccgataagtgcgtgctggacatgcggagcatggacttcaagagcaactccgccgtggcctggtccaacaagtccgatttcgcctgcgccaacgccttcaacaacagcattatccccgaggacacattcttcccaagccccgagagcagctgcgacgtgaagctggtggaaaagagcttcgagacagacaccaacctgaacttccagaacctgagcgtgatcggcttcagaatcctgctgctgaaagtggccggctttaacctgctgatgaccctgcggctgtggtccagc

SEQ ID NO: 5900 - DNA, 1887 bp, synthetic construct
  source 1..1887: mol_type = other DNA
atggccttaccagtgaccgccttgctcctgccgctggccttgctgctccacgccgccaggccggacatcgtgatgacacagagccctgatagcctggccgtgtctctgggagagagagccaccattaactgcaaggccagccagagcgtggactacgacggcgacagcttcctgaactggtatcagcagaagcccggccagcctcctaagctgctgatctacgccgccagcaatctggaaagcggcgtgccaagcagattttccggctctggcagcggcaccgatttcaccctgacaatatccagcctccagcctgaggacgtggccgtgtactactgccagcagagcaacgacgaccctctgacctttggacagggcaccaaggtggaaatcaaactcgaggacaagcagctggacgccgacgtgtcccccaagcctaccatcttcctgccctctatcgccgagacaaagctccagaaggccggcacctacctgtgcctgctggaaaagttcttcccagatgtgattaagatccactggcaggaaaagaagtccaacaccatcctgggcagccaggaaggcaacaccatgaagaccaacgacacctacatgaagttcagctggctgaccgtgcccgagaagtccctggacaaagaacacagatgcatcgtgcggcacgaaaacaacaagaacggcgtggaccaggaaatcatcttcccacccatcaagaccgatgtgattacaatggaccccaaggacaactgctccaaggacgccaacgataccctgctgctccagctgaccaacaccagcgcctactacatgtacgagatcctgctgggcaaggccaccctgtacgccgtgctggtgtctgccctggtgctgatggctatggtcaagcggaaggacagccggggaagggccaagcgatctggatctggagcaacaaacttctcactactcaaacaagcaggtgacgtggaggagaatcccgggcctactagtatggactggatttggcgcatccttttccttgtcggcgctgctaccggcgcgcattccttcgaacaagttcagctggttcagagcggagccgaagtgaagaaacctggggcctctgtgaaggtgtcctgcaaagccagcggctacacctttaccagctactggatcaactgggtccgacaggcccctggacaaggactggaatggatgggacagatccttccaggcggaggggacaccaactacaacggcaagttcaagggcagagtgaccatcaccgccgacaccagcacaagcaccgcctacatggaactgagcagcctgagaagcgaggacaccgccgtgtattattgcaccagacgggtgcccatccggctggattattggggacagggaaccctggtcaccgtgtctagtacgcgtagccagcctcacaccaagcccagcgtgttcgtgatgaagaacggcaccaacgtggcctgcctcgtgaaagagttctaccccaaggacatcaggatcaacctggtgtccagcaagaagatcaccgagttcgaccccgccatcgtgatctcccccagcggcaagtacaacgccgtgaagctggggaagtatgaggacagcaacagcgtgacctgctccgtgcagcacgacaacaagaccgtgcacagcaccgactttgaagtgaaaaccgactccaccgaccacgtgaagcccaaagagacagagaacaccaagcagcccagcaagagctgccacaagcccaaggccatcgtgcacaccgagaaagtgaacatgatgagcctgaccgtgatcggcttcagaatcctgctgctgaaagtggccggctttaacctgctgatgaccctgcggctgtggtccagctaa

SEQ ID NO: 5901 - DNA, 1887 bp, synthetic construct
  source 1..1887: mol_type = other DNA
atggccttaccagtgaccgccttgctcctgccgctggccttgctgctccacgccgccaggccggacatcgtgatgacacagagccctgatagcctggccgtgtctctgggagagagagccaccattaactgcaaggccagccagagcgtggactacgacggcgacagcttcctgaactggtatcagcagaagcccggccagcctcctaagctgctgatctacgccgccagcaatctggaaagcggcgtgccaagcagattttccggctctggcagcggcaccgatttcaccctgacaatatccagcctccagcctgaggacgtggccgtgtactactgccagcagagcaacgacgaccctctgacctttggacagggcaccaaggtggaaatcaaactcgaggacaagcagctggacgccgacgtgtcccccaagcctaccatcttcctgccctctatcgccgagacaaagctccagaaggccggcacctacctgtgcctgctggaaaagttcttcccagatgtgattaagatccactggcaggaaaagaagtccaacaccatcctgggcagccaggaaggcaacaccatgaagaccaacgacacctacatgaagttcagctggctgaccgtgcccgagaagtccctggacaaagaacacagatgcatcgtgcggcacgaaaacaacaagaacggcgtggaccaggaaatcatcttcccacccatcaagaccgatgtgattacaatggaccccaaggacaactgctccaaggacgccaacgataccctgctgctccagctgaccaacaccagcgccaccatcctgtacgagatcctgctgggcaaggccaccctgtacgccgtgctggtgtctgccctggtgctgatggctatggtcaagcggaaggacagccggggaagggccaagcgatctggatctggagcaacaaacttctcactactcaaacaagcaggtgacgtggaggagaatcccgggcctactagtatggactggatttggcgcatccttttccttgtcggcgctgctaccggcgcgcattccttcgaacaagttcagctggttcagagcggagccgaagtgaagaaacctggggcctctgtgaaggtgtcctgcaaagccagcggctacacctttaccagctactggatcaactgggtccgacaggcccctggacaaggactggaatggatgggacagatccttccaggcggaggggacaccaactacaacggcaagttcaagggcagagtgaccatcaccgccgacaccagcacaagcaccgcctacatggaactgagcagcctgagaagcgaggacaccgccgtgtattattgcaccagacgggtgcccatccggctggattattggggacagggaaccctggtcaccgtgtctagtacgcgtagccagcctcacaccaagcccagcgtgttcgtgatgaagaacggcaccaacgtggcctgcctcgtgaaagagttctaccccaaggacatcaggatcaacctggtgtccagcaagaagatcaccgagttcgaccccgccatcgtgatctcccccagcggcaagtacaacgccgtgaagctggggaagtatgaggacagcaacagcgtgacctgctccgtgcagcacgacaacaagaccgtgcacagcaccgactttgaagtgaaaaccgactccaccgaccacgtgaagcccaaagagacagagaacaccaagcagcccagcaagagctgccacaagcccaaggccatcgtgcacaccgagaaagtgaacatgatgagcctgaccgtgatcggcttcagaatcctgctgctgaaagtggccggctttaacctgctgatgaccctgcggctgtggtccagctaa

SEQ ID NO: 5902 - DNA, 1887 bp, synthetic construct
  source 1..1887: mol_type = other DNA
atggccttaccagtgaccgccttgctcctgccgctggccttgctgctccacgccgccaggccggacatcgtgatgacacagagccctgatagcctggccgtgtctctgggagagagagccaccattaactgcaaggccagccagagcgtggactacgacggcgacagcttcctgaactggtatcagcagaagcccggccagcctcctaagctgctgatctacgccgccagcaatctggaaagcggcgtgccaagcagattttccggctctggcagcggcaccgatttcaccctgacaatatccagcctccagcctgaggacgtggccgtgtactactgccagcagagcaacgacgaccctctgacctttggacagggcaccaaggtggaaatcaaactcgaggacaagcagctggacgccgacgtgtcccccaagcctaccatcttcctgccctctatcgccgagacaaagctccagaaggccggcacctacctgtgcctgctggaaaagttcttcccagatgtgattaagatccactggcaggaaaagaagtccaacaccatcctgggcagccaggaaggcaacaccatgaagaccaacgacacctacatgaagttcagctggctgaccgtgcccgagaagtccctggacaaagaacacagatgcatcgtgcggcacgaaaacaacaagaacggcgtggaccaggaaatcatcttcccacccatcaagaccgatgtgattacaatggaccccaaggacaactgctccaaggacgccaacgataccctgctgctccagctgaccaacaccagcgcctactacatgtacgagatcctgctgggcaaggccaccctgtacgccgtgctggtgtctgccctggtgctgatggctatggtcaagcggaaggacagccggggaagggccaagcgatctggatctggagcaacaaacttctcactactcaaacaagcaggtgacgtggaggagaatcccgggcctactagtatggactggatttggcgcatccttttccttgtcggcgctgctaccggcgcgcattccttcgaacaagttcagctggttcagagcggagccgaagtgaagaaacctggggcctctgtgaaggtgtcctgcaaagccagcggctacacctttaccagctactggatcaactgggtccgacaggcccctggacaaggactggaatggatgggacagatccttccaggcggaggggacaccaactacaacggcaagttcaagggcagagtgaccatcaccgccgacaccagcacaagcaccgcctacatggaactgagcagcctgagaagcgaggacaccgccgtgtattattgcaccagacgggtgcccatccggctggattattggggacagggaaccctggtcaccgtgtctagtacgcgtagccagcctcacaccaagcccagcgtgttcgtgatgaagaacggcaccaacgtggcctgcctcgtgaaagagttctaccccaaggacatcaggatcaacctggtgtccagcaagaagatcaccgagttcgaccccgccatcgtgatctcccccagcggcaagtacaacgccgtgaagctggggaagtacgaggacagcaacagcgtgacctgctccgtgcagcacgacaacaagaccgtgcacagcaccgactttgaagtgaaaaccgactccaccgaccacgtgaagcccaaagagacagagaacaccaagcagcccagcaagagctgccacaagcccaaggccatcgtgcacaccgagaaagtgaacatgatgagcctgaccgtgctgggcttcagaatcctgctgctgaaagtggccggctttaacctgctgatgaccctgcggctgtggtccagctaa

SEQ ID NO: 5903 - DNA, 1887 bp, synthetic construct
  source 1..1887: mol_type = other DNA
atggccttaccagtgaccgccttgctcctgccgctggccttgctgctccacgccgccaggccggacatcgtgatgacacagagccctgatagcctggccgtgtctctgggagagagagccaccattaactgcaaggccagccagagcgtggactacgacggcgacagcttcctgaactggtatcagcagaagcccggccagcctcctaagctgctgatctacgccgccagcaatctggaaagcggcgtgccaagcagattttccggctctggcagcggcaccgatttcaccctgacaatatccagcctccagcctgaggacgtggccgtgtactactgccagcagagcaacgacgaccctctgacctttggacagggcaccaaggtggaaatcaaactcgaggacaagcagctggacgccgacgtgtcccccaagcctaccatcttcctgccctctatcgccgagacaaagctccagaaggccggcacctacctgtgcctgctggaaaagttcttcccagatgtgattaagatccactggcaggaaaagaagtccaacaccatcctgggcagccaggaaggcaacaccatgaagaccaacgacacctacatgaagttcagctggctgaccgtgcccgagaagtccctggacaaagaacacagatgcatcgtgcggcacgaaaacaacaagaacggcgtggaccaggaaatcatcttcccacccatcaagaccgatgtgattacaatggaccccaaggacaactgctccaaggacgccaacgataccctgctgctccagctgaccaacaccagcgccaccatcctgtacgagatcctgctgggcaaggccaccctgtacgccgtgctggtgtctgccctggtgctgatggctatggtcaagcggaaggacagccggggaagggccaagcgatctggatctggagcaacaaacttctcactactcaaacaagcaggtgacgtggaggagaatcccgggcctactagtatggactggatttggcgcatccttttccttgtcggcgctgctaccggcgcgcattccttcgaacaagttcagctggttcagagcggagccgaagtgaagaaacctggggcctctgtgaaggtgtcctgcaaagccagcggctacacctttaccagctactggatcaactgggtccgacaggcccctggacaaggactggaatggatgggacagatccttccaggcggaggggacaccaactacaacggcaagttcaagggcagagtgaccatcaccgccgacaccagcacaagcaccgcctacatggaactgagcagcctgagaagcgaggacaccgccgtgtattattgcaccagacgggtgcccatccggctggattattggggacagggaaccctggtcaccgtgtctagtacgcgtagccagcctcacaccaagcccagcgtgttcgtgatgaagaacggcaccaacgtggcctgcctcgtgaaagagttctaccccaaggacatcaggatcaacctggtgtccagcaagaagatcaccgagttcgaccccgccatcgtgatctcccccagcggcaagtacaacgccgtgaagctggggaagtacgaggacagcaacagcgtgacctgctccgtgcagcacgacaacaagaccgtgcacagcaccgactttgaagtgaaaaccgactccaccgaccacgtgaagcccaaagagacagagaacaccaagcagcccagcaagagctgccacaagcccaaggccatcgtgcacaccgagaaagtgaacatgatgagcctgaccgtgctgggcttcagaatcctgctgctgaaagtggccggctttaacctgctgatgaccctgcggctgtggtccagctaa

SEQ ID NO: 5904 - DNA, 1869 bp, synthetic construct
  source 1..1869: mol_type = other DNA
atggccttaccagtgaccgccttgctcctgccgctggccttgctgctccacgccgccaggccggacatcgtgatgacacagagccctgatagcctggccgtgtctctgggagagagagccaccattaactgcaaggccagccagagcgtggactacgacggcgacagcttcctgaactggtatcagcagaagcccggccagcctcctaagctgctgatctacgccgccagcaatctggaaagcggcgtgccaagcagattttccggctctggcagcggcaccgatttcaccctgacaatatccagcctccagcctgaggacgtggccgtgtactactgccagcagagcaacgacgaccctctgacctttggacagggcaccaaggtggaaatcaaactcgaggacctgaagaacgtgttcccacctgaggtggccgtgttcgagcctagcgaggccgagatcagccacacccagaaagccaccctcgtgtgcctggctaccggcttctaccccgaccatgtggaactgtcttggtgggtcaacggcaaagaggtgcacagcggcgtgtgtaccgacccccagccactgaaagaacagcccgccctgaacgacagccggtactgcctgagcagcagactgagagtgtccgccaccttctggcagaacccccggaaccacttcagatgccaggtgcagttctacggcctgagcgagaacgacgagtggacccaggacagagccaagcccgtgacccagatcgtgtctgccgaagcctggggcagagccgattgcggctttaccagcgagagctaccagcagggcgtgctgagcgccaccatcctgtacttgttgctgctgctgaagtccgtggtgtacttcgccatcatcacatgctgcctgctgcggagaaccgccttctgctgcaacggcgagaagtctagggccaagcgatctggatctggagcaacaaacttctcactactcaaacaagcaggtgacgtggaggagaatcccgggcctactagtatggactggatttggcgcatccttttccttgtcggcgctgctaccggcgcgcattccttcgaacaagttcagctggttcagagcggagccgaagtgaagaaacctggggcctctgtgaaggtgtcctgcaaagccagcggctacacctttaccagctactggatcaactgggtccgacaggcccctggacaaggactggaatggatgggacagatccttccaggcggaggggacaccaactacaacggcaagttcaagggcagagtgaccatcaccgccgacaccagcacaagcaccgcctacatggaactgagcagcctgagaagcgaggacaccgccgtgtattattgcaccagacgggtgcccatccggctggattattggggacagggaaccctggtcaccgtgtctagtacgcgtatccagaaccctgatcctgccgtgtaccagctgcgggatagcaagagcagcgacaagagcgtgtgtctgttcaccgacttcgacagccagaccaacgtgtcccagagcaaggactccgacgtgtacatcaccgataagtgcgtgctggacatgcggagcatggacttcaagagcaactccgccgtggcctggtccaacaagtccgatttcgcctgcgccaacgccttcaacaacagcattatccccgaggacacattcttcccaagccccgagagcagctgcgacgtgaagctggtggaaaagagcttcgagacagacaccaacctgaacttccagaacctgagcgtgatcggcctgcggatgctgttcgccaaaaccgtggccgtgaacttcctgctgaccgccaagctgttcttcctctaa

SEQ ID NO: 5905 - DNA, 1956 bp, synthetic construct
  source 1..1956: mol_type = other DNA
atggccttaccagtgaccgccttgctcctgccgctggccttgctgctccacgccgccaggccggacatcgtgatgacacagagccctgatagcctggccgtgtctctgggagagagagccaccattaactgcaaggccagccagagcgtggactacgacggcgacagcttcctgaactggtatcagcagaagcccggccagcctcctaagctgctgatctacgccgccagcaatctggaaagcggcgtgccaagcagattttccggctctggcagcggcaccgatttcaccctgacaatatccagcctccagcctgaggacgtggccgtgtactactgccagcagagcaacgacgaccctctgacctttggacagggcaccaaggtggaaatcaaactcgaggacctgaagaacgtgttcccacctgaggtggccgtgttcgagcctagcgaggccgagatcagccacacccagaaagccaccctcgtgtgcctggctaccggcttctaccccgaccatgtggaactgtcttggtgggtcaacggcaaagaggtgcacagcggcgtgtctaccgacccccagccactgaaagaacagcccgccctgaacgacagccggtactgcctgagcagcagactgagagtgtccgccaccttctggcagaacccccggaaccacttcagatgccaggtgcagttctacggcctgagcgagaacgacgagtggacccaggacagagccaagcccgtgacccagatcgtgtctgccgaagcctggggcagagccgattgcggatcctccaaggacgccaacgataccctgctgctccagctgaccaacaccagcgcctactacatgtacttgttgctgctgctgaagtccgtggtgtacttcgccatcatcacatgctgcctgctgcggagaaccgccttctgctgcaacggcgagaagtctagggccaagcgatctggatctggagcaacaaacttctcactactcaaacaagcaggtgacgtggaggagaatcccgggcctactagtatggactggatttggcgcatccttttccttgtcggcgctgctaccggcgcgcattccttcgaacaagttcagctggttcagagcggagccgaagtgaagaaacctggggcctctgtgaaggtgtcctgcaaagccagcggctacacctttaccagctactggatcaactgggtccgacaggcccctggacaaggactggaatggatgggacagatccttccaggcggaggggacaccaactacaacggcaagttcaagggcagagtgaccatcaccgccgacaccagcacaagcaccgcctacatggaactgagcagcctgagaagcgaggacaccgccgtgtattattgcaccagacgggtgcccatccggctggattattggggacagggaaccctggtcaccgtgtctagtacgcgtatccagaaccctgatcctgccgtgtaccagctgcgggatagcaagagcagcgacaagagcgtgtgtctgttcaccgacttcgacagccagaccaacgtgtcccagagcaaggactccgacgtgtacatcaccgataagaccgtgctggacatgcggagcatggacttcaagagcaactccgccgtggcctggtccaacaagtccgatttcgcctgcgccaacgccttcaacaacagcattatccccgaggacacattcttcccaagccccgagagcagctgcggtaccgaagtgaaaaccgactccaccgaccacgtgaagcccaaagagacagagaacaccaagcagcccagcaagagctgccacaagcccaaggccatcgtgcacaccgagaaagtgaacatgatgagcctgaccgtgctgggcctgcggatgctgttcgccaaaaccgtggccgtgaacttcctgctgaccgccaagctgttcttcctctaa

SEQ ID NO: 5906 - DNA, 1866 bp, synthetic construct
  source 1..1866: mol_type = other DNA
atggccttaccagtgaccgccttgctcctgccgctggccttgctgctccacgccgccaggccggacatcgtgatgacacagagccctgatagcctggccgtgtctctgggagagagagccaccattaactgcaaggccagccagagcgtggactacgacggcgacagcttcctgaactggtatcagcagaagcccggccagcctcctaagctgctgatctacgccgccagcaatctggaaagcggcgtgccaagcagattttccggctctggcagcggcaccgatttcaccctgacaatatccagcctccagcctgaggacgtggccgtgtactactgccagcagagcaacgacgaccctctgacctttggacagggcaccaaggtggaaatcaaactcgaggacctgaagaacgtgttcccacctgaggtggccgtgttcgagcctagcgaggccgagatcagccacacccagaaagccaccctcgtgtgcctggctaccggcttctaccccgaccatgtggaactgtcttggtgggtcaacggcaaagaggtgcacagcggcgtgtgtaccgacccccagccactgaaagaacagcccgccctgaacgacagccggtactgcctgagcagcagactgagagtgtccgccaccttctggcagaacccccggaaccacttcagatgccaggtgcagttctacggcctgagcgagaacgacgagtggacccaggacagagccaagcccgtgacccagatcgtgtctgccgaagcctggggcagagccgattgcgacgtgaagctggtggaaaagagcttcgagacagacaccaacctgaacttccagaacctgagcgtgatcggcttcagaatcctgctgctgaaagtggccggctttaacctgctgatgaccctgcggctgtggtccagcagggccaagcgatctggatctggagcaacaaacttctcactactcaaacaagcaggtgacgtggaggagaatcccgggcctactagtatggactggatttggcgcatccttttccttgtcggcgctgctaccggcgcgcattccttcgaacaagttcagctggttcagagcggagccgaagtgaagaaacctggggcctctgtgaaggtgtcctgcaaagccagcggctacacctttaccagctactggatcaactgggtccgacaggcccctggacaaggactggaatggatgggacagatccttccaggcggaggggacaccaactacaacggcaagttcaagggcagagtgaccatcaccgccgacaccagcacaagcaccgcctacatggaactgagcagcctgagaagcgaggacaccgccgtgtattattgcaccagacgggtgcccatccggctggattattggggacagggaaccctggtcaccgtgtctagtacgcgtatccagaaccctgatcctgccgtgtaccagctgcgggatagcaagagcagcgacaagagcgtgtgtctgttcaccgacttcgacagccagaccaacgtgtcccagagcaaggactccgacgtgtacatcaccgataagtgcgtgctggacatgcggagcatggacttcaagagcaactccgccgtggcctggtccaacaagtccgatttcgcctgcgccaacgccttcaacaacagcattatccccgaggacacattcttcccaagccccgagagcagctgcggctttaccagcgagagctaccagcagggcgtgctgagcgccaccatcctgtacgagatcctgctgggcaaggccaccctgtacgccgtgctggtgtctgccctggtgctgatggctatggtcaagcggaaggacagccggggataa

SEQ ID NO: 5907 - DNA, 1866 bp, synthetic construct
  source 1..1866: mol_type = other DNA
atggccttaccagtgaccgccttgctcctgccgctggccttgctgctccacgccgccaggccggacatcgtgatgacacagagccctgatagcctggccgtgtctctgggagagagagccaccattaactgcaaggccagccagagcgtggactacgacggcgacagcttcctgaactggtatcagcagaagcccggccagcctcctaagctgctgatctacgccgccagcaatctggaaagcggcgtgccaagcagattttccggctctggcagcggcaccgatttcaccctgacaatatccagcctccagcctgaggacgtggccgtgtactactgccagcagagcaacgacgaccctctgacctttggacagggcaccaaggtggaaatcaaactcgaggacctgaagaacgtgttcccacctgaggtggccgtgttcgagcctagcgaggccgagatcagccacacccagaaagccaccctcgtgtgcctggctaccggcttctaccccgaccatgtggaactgtcttggtgggtcaacggcaaagaggtgcacagcggcgtgtgtaccgacccccagccactgaaagaacagcccgccctgaacgacagccggtactgcctgagcagcagactgagagtgtccgccaccttctggcagaacccccggaaccacttcagatgccaggtgcagttctacggcctgagcgagaacgacgagtggacccaggacagagccaagcccgtgacccagatcgtgtctgccgaagcctggggcagagccgattgcggctttaccagcgagagctaccagcagggcgtgctgagcgccaccaacctgagcgtgatcggcttcagaatcctgctgctgaaagtggccggctttaacctgctgatgaccctgcggctgtggtccagcagggccaagcgatctggatctggagcaacaaacttctcactactcaaacaagcaggtgacgtggaggagaatcccgggcctactagtatggactggatttggcgcatccttttccttgtcggcgctgctaccggcgcgcattccttcgaacaagttcagctggttcagagcggagccgaagtgaagaaacctggggcctctgtgaaggtgtcctgcaaagccagcggctacacctttaccagctactggatcaactgggtccgacaggcccctggacaaggactggaatggatgggacagatccttccaggcggaggggacaccaactacaacggcaagttcaagggcagagtgaccatcaccgccgacaccagcacaagcaccgcctacatggaactgagcagcctgagaagcgaggacaccgccgtgtattattgcaccagacgggtgcccatccggctggattattggggacagggaaccctggtcaccgtgtctagtacgcgtatccagaaccctgatcctgccgtgtaccagctgcgggatagcaagagcagcgacaagagcgtgtgtctgttcaccgacttcgacagccagaccaacgtgtcccagagcaaggactccgacgtgtacatcaccgataagtgcgtgctggacatgcggagcatggacttcaagagcaactccgccgtggcctggtccaacaagtccgatttcgcctgcgccaacgccttcaacaacagcattatccccgaggacacattcttcccaagccccgagagcagctgcgacgtgaagctggtggaaaagagcttcgagacagacaccaacctgaacttccagatcctgtacgagatcctgctgggcaaggccaccctgtacgccgtgctggtgtctgccctggtgctgatggctatggtcaagcggaaggacagccggggataa

SEQ ID NO: 5908 - DNA, 1866 bp, synthetic construct; identical to SEQ ID NO: 5906
  source 1..1866: mol_type = other DNA

SEQ ID NO: 5909 - DNA, 1866 bp, synthetic construct; identical to SEQ ID NO: 5907
  source 1..1866: mol_type = other DNA

SEQ ID NO: 5910 - DNA, 1863 bp, synthetic construct
  source 1..1863: mol_type = other DNA
atggccttaccagtgaccgccttgctcctgccgctggccttgctgctccacgccgccaggccggacatcgtgatgacacagagccctgatagcctggccgtgtctctgggagagagagccaccattaactgcaaggccagccagagcgtggactacgacggcgacagcttcctgaactggtatcagcagaagcccggccagcctcctaagctgctgatctacgccgccagcaatctggaaagcggcgtgccaagcagattttccggctctggcagcggcaccgatttcaccctgacaatatccagcctccagcctgaggacgtggccgtgtactactgccagcagagcaacgacgaccctctgacctttggacagggcaccaaggtggaaatcaaactcgaggacctgaagaacgtgttcccacctgaggtggccgtgttcgagcctagcgaggccgagatcagccacacccagaaagccaccctcgtgtgcctggctaccggcttctaccccgaccatgtggaactgtcttggtgggtcaacggcaaagaggtgcacagcggcgtgtgtaccgacccccagccactgaaagaacagcccgccctgaacgacagccggtactgcctgagcagcagactgagagtgtccgccaccttctggcagaacccccggaaccacttcagatgccaggtgcagttctacggcctgagcgagaacgacgagtggacccaggacagagccaagcccgtgacccagatcgtgtctgccgaagcctggggcagagccgattgcgacgtgaagctggtggaaaagagcttcgagacagacaccaacctgaacttccagaacctgagcgtgatcggcttcagaatcctgctgctgaaagtggccggctttaacctgctgatgaccctgcggctgtggtccagcagggccaagcgatctggatctggagcaacaaacttctcactactcaaacaagcaggtgacgtggaggagaatcccgggcctactagtatggactggatttggcgcatccttttccttgtcggcgctgctaccggcgcgcattccttcgaacaagttcagctggttcagagcggagccgaagtgaagaaacctggggcctctgtgaaggtgtcctgcaaagccagcggctacacctttaccagctactggatcaactgggtccgacaggcccctggacaaggactggaatggatgggacagatccttccaggcggaggggacaccaactacaacggcaagttcaagggcagagtgaccatcaccgccgacaccagcacaagcaccgcctacatggaactgagcagcctgagaagcgaggacaccgccgtgtattattgcaccagacgggtgcccatccggctggattattggggacagggaaccctggtcaccgtgtctagtacgcgtatccagaaccctgatcctgccgtgtaccagctgcgggatagcaagagcagcgacaagagcgtgtgtctgttcaccgacttcgacagccagaccaacgtgtcccagagcaaggactccgacgtgtacatcaccgataagtgcgtgctggacatgcggagcatggacttcaagagcaactccgccgtggcctggtccaacaagtccgatttcgcctgcgccaacgccttcaacaacagcattatccccgaggacacattcttcccaagccccgagagcagctgcggctttaccagcgagagctaccagcagggcgtgctgagcgccaccatcctgtacgagatcctgctgggcaaggccaccctgtacgccgtgctggtgtctgccctggtgctgatggctatggtcaagcggaaggacagccgggga

SEQ ID NO: 5911 - DNA, 1875 bp, synthetic construct
  source 1..1875: mol_type = other DNA
atggccttaccagtgaccgccttgctcctgccgctggccttgctgctccacgccgccaggccggacatcgtgatgacacagagccctgatagcctggccgtgtctctgggagagagagccaccattaactgcaaggccagccagagcgtggactacgacggcgacagcttcctgaactggtatcagcagaagcccggccagcctcctaagctgctgatctacgccgccagcaatctggaaagcggcgtgccaagcagattttccggctctggcagcggcaccgatttcaccctgacaatatccagcctccagcctgaggacgtggccgtgtactactgccagcagagcaacgacgaccctctgacctttggacagggcaccaaggtggaaatcaaactcgaggccgacgtgtcccccaagcctaccatcttcctgccctctatcgccgagacaaagctccagaaggccggcacctacctgtgcctgctggaaaagttcttcccagatgtgattaagatccactggcaggaaaagaagtccaacaccatcctgggcagccaggaaggcaacaccatgaagaccaacgacacctacatgaagttcagctggctgaccgtgcccgagaagtccctggacaaagaacacagatgcatcgtgcggcacgaaaacaacaagaacggcgtggaccaggaaatcatcttcccacccatcaagaccgatgtgattacaatggaccccaaggacaactgctccaaggacgccaacgataccctgctgctccagctgaccaacaccagcgcctactacatgtacttgttgctgctgctgaagtccgtggtgtacttcgccatcatcacatgctgcctgctgcggagaaccgccttctgctgcaacggcgagaagtctagggccaagcgatctggatctggagcaacaaacttctcactactcaaacaagcaggtgacgtggaggagaatcccgggcctactagtatggactggatttggcgcatccttttccttgtcggcgctgctaccggcgcgcattccttcgaacaagttcagctggttcagagcggagccgaagtgaagaaacctggggcctctgtgaaggtgtcctgcaaagccagcggctacacctttaccagctactggatcaactgggtccgacaggcccctggacaaggactggaatggatgggacagatccttccaggcggaggggacaccaactacaacggcaagttcaagggcagagtgaccatcaccgccgacaccagcacaagcaccgcctacatggaactgagcagcctgagaagcgaggacaccgccgtgtattattgcaccagacgggtgcccatccggctggattattggggacagggaaccctggtcaccgtgtctagtacgcgtagccagcctcacaccaagcccagcgtgttcgtgatgaagaacggcaccaacgtggcctgcctcgtgaaagagttctaccccaaggacatcaggatcaacctggtgtccagcaagaagatcaccgagttcgaccccgccatcgtgatctcccccagcggcaagtacaacgccgtgaagctggggaagtatgaggacagcaacagcgtgacctgctccgtgcagcacgacaacaagaccgtgcacagcaccgactttgaagtgaaaaccgactccaccgaccacgtgaagcccaaagagacagagaacaccaagcagcccagcaagagctgccacaagcccaaggccatcgtgcacaccgagaaagtgaacatgatgagcctgaccgtgatcggcttcagaatcctgctgctgaaagtggccggctttaacctgctgatgaccctgcggctgtggtccagctaa

SEQ ID NO: 5912 - DNA, 1875 bp, synthetic construct
  source 1..1875: mol_type = other DNA
atggccttaccagtgaccgccttgctcctgccgctggccttgctgctccacgccgccaggccggacatcgtgatgacacagagccctgatagcctggccgtgtctctgggagagagagccaccattaactgcaaggccagccagagcgtggactacgacggcgacagcttcctgaactggtatcagcagaagcccggccagcctcctaagctgctgatctacgccgccagcaatctggaaagcggcgtgccaagcagattttccggctctggcagcggcaccgatttcaccctgacaatatccagcctccagcctgaggacgtggccgtgtactactgccagcagagcaacgacgaccctctgacctttggacagggcaccaaggtggaaatcaaactcgaggccgacgtgtcccccaagcctaccatcttcctgccctctatcgccgagacaaagctccagaaggccggcacctacctgtgcctgctggaaaagttcttcccagatgtgattaagatccactggcaggaaaagaagtccaacaccatcctgggcagccaggaaggcaacaccatgaagaccaacgacacctacatgaagttcagctggctgaccgtgcccgagaagtccctggacaaagaacacagatgcatcgtgcggcacgaaaacaacaagaacggcgtggaccaggaaatcatcttcccacccatcaagaccgatgtgattacaatggaccccaaggacaactgctccaaggacgccaacgataccctgctgctccagctgaccaacaccagcgcctactacatgtacttgttgctgctgctgaagtccgtggtgtacttcgccatcatcacatgctgcctgctgcggagaaccgccttctgctgcaacggcgagaagtctagggccaagcgatctggatctggagcaacaaacttctcactactcaaacaagcaggtgacgtggaggagaatcccgggcctactagtatggactggatttggcgcatccttttccttgtcggcgctgctaccggcgcgcattccttcgaacaagttcagctggttcagagcggagccgaagtgaagaaacctggggcctctgtgaaggtgtcctgcaaagccagcggctacacctttaccagctactggatcaactgggtccgacaggcccctggacaaggactggaatggatgggacagatccttccaggcggaggggacaccaactacaacggcaagttcaagggcagagtgaccatcaccgccgacaccagcacaagcaccgcctacatggaactgagcagcctgagaagcgaggacaccgccgtgtattattgcaccagacgggtgcccatccggctggattattggggacagggaaccctggtcaccgtgtctagtacgcgtagccagcctcacaccaagcccagcgtgttcgtgatgaagaacggcaccaacgtggcctgcctcgtgaaagagttctaccccaaggacatcaggatcaacctggtgtccagcaagaagatcaccgagttcgaccccgccatcgtgatctcccccagcggcaagtacaacgccgtgaagctggggaagtacgaggacagcaacagcgtgacctgctccgtgcagcacgacaacaagaccgtgcacagcaccgactttgaagtgaaaaccgactccaccgaccacgtgaagcccaaagagacagagaacaccaagcagcccagcaagagctgccacaagcccaaggccatcgtgcacaccgagaaagtgaacatgatgagcctgaccgtgctgggcttcagaatcctgctgctgaaagtggccggctttaacctgctgatgaccctgcggctgtggtccagctaa

SEQ ID NO: 5913 - DNA, 1863 bp, synthetic construct; identical to SEQ ID NO: 5910
  source 1..1863: mol_type = other DNA

SEQ ID NO: 5914 - DNA, 1875 bp, synthetic construct
  source 1..1875: mol_type = other DNA
atggccttaccagtgaccgccttgctcctgccgctggccttgctgctccacgccgccaggccggacatcgtgatgacacagagccctgatagcctggccgtgtctctgggagagagagccaccattaactgcaaggccagccagagcgtggactacgacggcgacagcttcctgaactggtatcagcagaagcccggccagcctcctaagctgctgatctacgccgccagcaatctggaaagcggcgtgccaagcagattttccggctctggcagcggcaccgatttcaccctgacaatatccagcctccagcctgaggacgtggccgtgtactactgccagcagagcaacgacgaccctctgacctttggacagggcaccaaggtggaaatcaaactcgagatccagaaccctgatcctgccgtgtaccagctgcgggatagcaagagcagcgacaagagcgtgtgtctgttcaccgacttcgacagccagaccaacgtgtcccagagcaaggactccgacgtgtacatcaccgataagtgcgtgctggacatgcggagcatggacttcaagagcaactccgccgtggcctggtccaacaagtccgatttcgcctgcgccaacgccttcaacaacagcattatccccgaggacacattcttcccaagccccgagagcagctgcggctttaccagcgagagctaccagcagggcgtgctgagcgccaccatcctgtacgagatcctgctgggcaaggccaccctgtacgccgtgctggtgtctgccctggtgctgatggctatggtcaagcggaaggacagccggggacgcgccaagagaagcggatctggcgtgaagcagaccctgaatttcgacctgctgaagctggctggcgacgtggaatccaacccaggccctactagtatggactggatttggcgcatccttttccttgtcggcgctgctaccggcgcgcattccttcgaacaagttcagctggttcagagcggagccgaagtgaagaaacctggggcctctgtgaaggtgtcctgcaaagccagcggctacacctttaccagctactggatcaactgggtccgacaggcccctggacaaggactggaatggatgggacagatccttccaggcggaggggacaccaactacaacggcaagttcaagggcagagtgaccatcaccgccgacaccagcacaagcaccgcctacatggaactgagcagcctgagaagcgaggacaccgccgtgtattattgcaccagacgggtgcccatccggctggattattggggacagggaaccctggtcaccgtgtctagtacgcgtgaggacctgaagaacgtgttcccacctgaggtggccgtgttcgagcctagcgaggccgagatcagccacacccagaaagccaccctcgtgtgcctggctaccggcttctaccccgaccatgtggaactgtcttggtgggtcaacggcaaagaggtgcacagcggcgtgtgtaccgacccccagccactgaaagaacagcccgccctgaacgacagccggtactgcctgagcagcagactgagagtgtccgccaccttctggcagaacccccggaaccacttcagatgccaggtgcagttctacggcctgagcgagaacgacgagtggacccaggacagagccaagcccgtgacccagatcgtgtctgccgaagcctggggcagagccgattgcgacgtgaagctggtggaaaagagcttcgagacagacaccaacctgaacttccagaacctgagcgtgatcggcttcagaatcctgctgctgaaagtggccggctttaacctgctgatgaccctgcggctgtggtccagc

SEQ ID NO: 5915 - DNA, 2268 bp, synthetic construct
  source 1..2268: mol_type = other DNA
atggccttaccagtgaccgccttgctcctgccgctggccttgctgctccacgccgccaggccggaagtgcagctggttgaatctggcggaggactggttcagcctggcggatctctgagactgtcttgtgccgccagcggcttcagcttcagcgacttttggatgagctgggtccgacaggcccctggcaaaggacttgaatgggtcgccacaatcagccaggccggcagcgagaaggactacgtggactctgtgaagggcagattcaccatcagccgggacaacgccaagaagtccctgtacctccagatgaacagcctgagagccgaggacaccgccgtgtactattgtgcctctggcgtgtacagcttcgactacagaggccagggcaccctggtcacagtctcttctggtaccggcggaggcggatctggcggcggaggtagcggtggcggaggatctgaattcgacatcgtgatgacacagagccctgatagcctggccgtgtctctgggagagagagccaccattaactgcaaggccagccagagcgtggactacgacggcgacagcttcctgaactggtatcagcagaagcccggccagcctcctaagctgctgatctacgccgccagcaatctggaaagcggcgtgccaagcagattttccggctctggcagcggcaccgatttcaccctgacaatatccagcctccagcctgaggacgtggccgtgtactactgccagcagagcaacgacgaccctctgacctttggacagggcaccaaggtggaaatcaaactcgaggacctgaagaacgtgttcccacctgaggtggccgtgttcgagcctagcgaggccgagatcagccacacccagaaagccaccctcgtgtgcctggctaccggcttctaccccgaccatgtggaactgtcttggtgggtcaacggcaaagaggtgcacagcggcgtgtgtaccgacccccagccactgaaagaacagcccgccctgaacgacagccggtactgcctgagcagcagactgagagtgtccgccaccttctggcagaacccccggaaccacttcagatgccaggtgcagttctacggcctgagcgagaacgacgagtggacccaggacagagccaagcccgtgacccagatcgtgtctgccgaagcctggggcagagccgattgcgacgtgaagctggtggaaaagagcttcgagacagacaccaacctgaacttccagaacctgagcgtgatcggcttcagaatcctgctgctgaaagtggccggctttaacctgctgatgaccctgcggctgtggtccagcagggccaagcgatctggatctggagcaacaaacttctcactactcaaacaagcaggtgacgtggaggagaatcccgggcctactagtatggactggatttggcgcatccttttccttgtcggcgctgctaccggcgcgcattccttcgaacaagttcagctggttcagagcggagccgaagtgaagaaacctggggcctctgtgaaggtgtcctgcaaagccagcggctacacctttaccagctactggatcaactgggtccgacaggcccctggacaaggactggaatggatgggacagatccttccaggcggaggggacaccaactacaacggcaagttcaagggcagagtgaccatcaccgccgacaccagcacaagcaccgcctacatggaactgagcagcctgagaagcgaggacaccgccgtgtattattgcaccagacgggtgcccatccggctggattattggggacagggaaccctggtcaccgtgtctagtacgcgtatccagaaccctgatcctgccgtgtaccagctgcgggatagcaagagcagcgacaagagcgtgtgtctgttcaccgacttcgacagccagaccaacgtgtcccagagcaaggactccgacgtgtacatcaccgataagtgcgtgctggacatgcggagcatggacttcaagagcaactccgccgtggcctggtccaacaagtccgatttcgcctgcgccaacgccttcaacaacagcattatccccgaggacacattcttcccaagccccgagagcagctgcggctttaccagcgagagctaccagcagggcgtgctgagcgccaccatcctgtacgagatcctgctgggcaaggccaccctgtacgccgtgctggtgtctgccctggtgctgatggctatggtcaagcggaaggacagccgggga

SEQ ID NO: 5916 - DNA, 2280 bp, synthetic construct
  source 1..2280: mol_type = other DNA
atggccttaccagtgaccgccttgctcctgccgctggccttgctgctccacgccgccaggccggaagtgcagctggttgaatctggcggaggactggttcagcctggcggatctctgagactgtcttgtgccgccagcggcttcagcttcagcgacttttggatgagctgggtccgacaggcccctggcaaaggacttgaatgggtcgccacaatcagccaggccggcagcgagaaggactacgtggactctgtgaagggcagattcaccatcagccgggacaacgccaagaagtccctgtacctccagatgaacagcctgagagccgaggacaccgccgtgtactattgtgcctctggcgtgtacagcttcgactacagaggccagggcaccctggtcacagtctcttctggtaccggcggaggcggatctggcggcggaggtagcggtggcggaggatctgaattcgacatcgtgatgacacagagccctgatagcctggccgtgtctctgggagagagagccaccattaactgcaaggccagccagagcgtggactacgacggcgacagcttcctgaactggtatcagcagaagcccggccagcctcctaagctgctgatctacgccgccagcaatctggaaagcggcgtgccaagcagattttccggctctggcagcggcaccgatttcaccctgacaatatccagcctccagcctgaggacgtggccgtgtactactgccagcagagcaacgacgaccctctgacctttggacagggcaccaaggtggaaatcaaactcgagatccagaaccctgatcctgccgtgtaccagctgcgggatagcaagagcagcgacaagagcgtgtgtctgttcaccgacttcgacagccagaccaacgtgtcccagagcaaggactccgacgtgtacatcaccgataagtgcgtgctggacatgcggagcatggacttcaagagcaactccgccgtggcctggtccaacaagtccgatttcgcctgcgccaacgccttcaacaacagcattatccccgaggacacattcttcccaagccccgagagcagctgcggctttaccagcgagagctaccagcagggcgtgctgagcgccaccatcctgtacgagatcctgctgggcaaggccaccctgtacgccgtgctggtgtctgccctggtgctgatggctatggtcaagcggaaggacagccggggacgcgccaagagaagcggatctggcgtgaagcagaccctgaatttcgacctgctgaagctggctggcgacgtggaatccaacccaggccctactagtatggactggatttggcgcatccttttccttgtcggcgctgctaccggcgcgcattccttcgaacaagttcagctggttcagagcggagccgaagtgaagaaacctggggcctctgtgaaggtgtcctgcaaagccagcggctacacctttaccagctactggatcaactgggtccgacaggcccctggacaaggactggaatggatgggacagatccttccaggcggaggggacaccaactacaacggcaagttcaagggcagagtgaccatcaccgccgacaccagcacaagcaccgcctacatggaactgagcagcctgagaagcgaggacaccgccgtgtattattgcaccagacgggtgcccatccggctggattattggggacagggaaccctggtcaccgtgtctagtacgcgtgaggacctgaagaacgtgttcccacctgaggtggccgtgttcgagcctagcgaggccgagatcagccacacccagaaagccaccctcgtgtgcctggctaccggcttctaccccgaccatgtggaactgtcttggtgggtcaacggcaaagaggtgcacagcggcgtgtgtaccgacccccagccactgaaagaacagcccgccctgaacgacagccggtactgcctgagcagcagactgagagtgtccgccaccttctggcagaacccccggaaccacttcagatgccaggtgcagttctacggcctgagcgagaacgacgagtggacccaggacagagccaagcccgtgacccagatcgtgtctgccgaagcctggggcagagccgattgcgacgtgaagctggtggaaaagagcttcgagacagacaccaacctgaacttccagaacctgagcgtgatcggcttcagaatcctgctgctgaaagtggccggctttaacctgctgatgaccctgcggctgtggtccagc

SEQ ID NO: 5917 - DNA, 2679 bp, synthetic construct
  source 1..2679: mol_type = other DNA
atggccttaccagtgaccgccttgctcctgccgctggccttgctgctccacgccgccaggccggaagtgcagctggttgaatctggcggaggactggttcagcctggcggatctctgagactgtcttgtgccgccagcggcttcagcttcagcgacttttggatgagctgggtccgacaggcccctggcaaaggacttgaatgggtcgccacaatcagccaggccggcagcgagaaggactacgtggactctgtgaagggcagattcaccatcagccgggacaacgccaagaagtccctgtacctccagatgaacagcctgagagccgaggacaccgccgtgtactattgtgcctctggcgtgtacagcttcgactacagaggccagggcaccctggtcacagtctcttctggtaccggcggaggcggatctggcggcggaggtagcggtggcggaggatctgaattcgacatcgtgatgacacagagccctgatagcctggccgtgtctctgggagagagagccaccattaactgcaaggccagccagagcgtggactacgacggcgacagcttcctgaactggtatcagcagaagcccggccagcctcctaagctgctgatctacgccgccagcaatctggaaagcggcgtgccaagcagattttccggctctggcagcggcaccgatttcaccctgacaatatccagcctccagcctgaggacgtggccgtgtactactgccagcagagcaacgacgaccctctgacctttggacagggcaccaaggtggaaatcaaactcgaggacctgaagaacgtgttcccacctgaggtggccgtgttcgagcctagcgaggccgagatcagccacacccagaaagccaccctcgtgtgcctggctaccggcttctaccccgaccatgtggaactgtcttggtgggtcaacggcaaagaggtgcacagcggcgtgtgtaccgacccccagccactgaaagaacagcccgccctgaacgacagccggtactgcctgagcagcagactgagagtgtccgccaccttctggcagaacccccggaaccacttcagatgccaggtgcagttctacggcctgagcgagaacgacgagtggacccaggacagagccaagcccgtgacccagatcgtgtctgccgaagcctggggcagagccgattgcgacgtgaagctggtggaaaagagcttcgagacagacaccaacctgaacttccagaacctgagcgtgatcggcttcagaatcctgctgctgaaagtggccggctttaacctgctgatgaccctgcggctgtggtccagcagggccaagcgatctggatctggagcaacaaacttctcactactcaaacaagcaggtgacgtggaggagaatcccgggcctactagtatggactggatttggcgcatccttttccttgtcggcgctgctaccggcgcgcattccgggccccagctccagctgcaagagtctggacctggcctggtcaagcctagcgagacactgagcctgacctgtaccgtgtccggcgatagcatcagcagcggcgattactactggggctggatcagacagcctcctggcaaaggactggaatggatcggccacatctactacagcggcgtgacctactacaaccccagcctgaagtccagagtgaccatcagcgtggacaccagccggaaccagttctccctgaagctgtctagcgtgacagccgccgataccgccgtgtactactgcaccagagaggacagcagcaactggcggagtagaggccagggaacactggtcacagttagctctggatccggcggaggcggaagtggaggcggaggatctggcggcggaggctctttcgaacaagttcagctggttcagagcggagccgaagtgaagaaacctggggcctctgtgaaggtgtcctgcaaagccagcggctacacctttaccagctactggatcaactgggtccgacaggcccctggacaaggactggaatggatgggacagatccttccaggcggaggggacaccaactacaacggcaagttcaagggcagagtgaccatcaccgccgacaccagcacaagcaccgcctacatggaactgagcagcctgagaagcgaggacaccgccgtgtattattgcaccagacgggtgcccatccggctggattattggggacagggaaccctggtcaccgtgtctagtacgcgtatccagaaccctgatcctgccgtgtaccagctgcgggatagcaagagcagcgacaagagcgtgtgtctgttcaccgacttcgacagccagaccaacgtgtcccagagcaaggactccgacgtgtacatcaccgataagtgcgtgctggacatgcggagcatggacttcaagagcaactccgccgtggcctggtccaacaagtccgatttcgcctgcgccaacgccttcaacaacagcattatccccgaggacacattcttcccaagccccgagagcagctgcggctttaccagcgagagctaccagcagggcgtgctgagcgccaccatcctgtacgagatcctgctgggcaaggccaccctgtacgccgtgctggtgtctgccctggtgctgatggctatggtcaagcggaaggacagccgggga

SEQ ID NO: 5918 - DNA, 2691 bp, synthetic construct
  source 1..2691: mol_type = other DNA
atggccttaccagtgaccgccttgctcctgccgctggccttgctgctccacgccgccaggccggaagtgcagctggttgaatctggcggaggactggttcagcctggcggatctctgagactgtcttgtgccgccagcggcttcagcttcagcgacttttggatgagctgggtccgacaggcccctggcaaaggacttgaatgggtcgccacaatcagccaggccggcagcgagaaggactacgtggactctgtgaagggcagattcaccatcagccgggacaacgccaagaagtccctgtacctccagatgaacagcctgagagccgaggacaccgccgtgtactattgtgcctctggcgtgtacagcttcgactacagaggccagggcaccctggtcacagtctcttctggtaccggcggaggcggatctggcggcggaggtagcggtggcggaggatctgaattcgacatcgtgatgacacagagccctgatagcctggccgtgtctctgggagagagagccaccattaactgcaaggccagccagagcgtggactacgacggcgacagcttcctgaactggtatcagcagaagcccggccagcctcctaagctgctgatctacgccgccagcaatctggaaagcggcgtgccaagcagattttccggctctggcagcggcaccgatttcaccctgacaatatccagcctccagcctgaggacgtggccgtgtactactgccagcagagcaacgacgaccctctgacctttggacagggcaccaaggtggaaatcaaactcgagatccagaaccctgatcctgccgtgtaccagctgcgggatagcaagagcagcgacaagagcgtgtgtctgttcaccgacttcgacagccagaccaacgtgtcccagagcaaggactccgacgtgtacatcaccgataagtgcgtgctggacatgcggagcatggacttcaagagcaactccgccgtggcctggtccaacaagtccgatttcgcctgcgccaacgccttcaacaacagcattatccccgaggacacattcttcccaagccccgagagcagctgcggctttaccagcgagagctaccagcagggcgtgctgagcgccaccatcctgtacgagatcctgctgggcaaggccaccctgtacgccgtgctggtgtctgccctggtgctgatggctatggtcaagcggaaggacagccggggacgcgccaagagaagcggatctggcgtgaagcagaccctgaatttcgacctgctgaagctggctggcgacgtggaatccaacccaggccctactagtatggactggatttggcgcatccttttccttgtcggcgctgctaccggcgcgcattccgggccccagctccagctgcaagagtctggacctggcctggtcaagcctagcgagacactgagcctgacctgtaccgtgtccggcgatagcatcagcagcggcgattactactggggctggatcagacagcctcctggcaaaggactggaatggatcggccacatctactacagcggcgtgacctactacaaccccagcctgaagtccagagtgaccatcagcgtggacaccagccggaaccagttctccctgaagctgtctagcgtgacagccgccgataccgccgtgtactactgcaccagagaggacagcagcaactggcggagtagaggccagggaacactggtcacagttagctctggatccggcggaggcggaagtggaggcggaggatctggcggcggaggctctttcgaacaagttcagctggttcagagcggagccgaagtgaagaaacctggggcctctgtgaaggtgtcctgcaaagccagcggctacacctttaccagctactggatcaactgggtccgacaggcccctggacaaggactggaatggatgggacagatccttccaggcggaggggacaccaactacaacggcaagttcaagggcagagtgaccatcaccgccgacaccagcacaagcaccgcctacatggaactgagcagcctgagaagcgaggacaccgccgtgtattattgcaccagacgggtgcccatccggctggattattggggacagggaaccctggtcaccgtgtctagtacgcgtgaggacctgaagaacgtgttcccacctgaggtggccgtgttcgagcctagcgaggccgagatcagccacacccagaaagccaccctcgtgtgcctggctaccggcttctaccccgaccatgtggaactgtcttggtgggtcaacggcaaagaggtgcacagcggcgtgtgtaccgacccccagccactgaaagaacagcccgccctgaacgacagccggtactgcctgagcagcagactgagagtgtccgccaccttctggcagaacccccggaaccacttcagatgccaggtgcagttctacggcctgagcgagaacgacgagtggacccaggacagagccaagcccgtgacccagatcgtgtctgccgaagcctggggcagagccgattgcgacgtgaagctggtggaaaagagcttcgagacagacaccaacctgaacttccagaacctgagcgtgatcggcttcagaatcctgctgctgaaagtggccggctttaacctgctgatgaccctgcggctgtggtccagc

SEQ ID NO: 5919 - DNA, 2073 bp, synthetic construct
  source 1..2073: mol_type = other DNA
atggccttaccagtgaccgccttgctcctgccgctggccttgctgctccacgccgccaggccggacatcgtgatgacacagagccctgatagcctggccgtgtctctgggagagagagccaccattaactgcaaggccagccagagcgtggactacgacggcgacagcttcctgaactggtatcagcagaagcccggccagcctcctaagctgctgatctacgccgccagcaatctggaaagcggcgtgccaagcagattttccggctctggcagcggcaccgatttcaccctgacaatatccagcctccagcctgaggacgtggccgtgtactactgccagcagagcaacgacgaccctctgacctttggacagggcaccaaggtggaaatcaaactcgaggacctgaagaacgtgttcccacctgaggtggccgtgttcgagcctagcgaggccgagatcagccacacccagaaagccaccctcgtgtgcctggctaccggcttctaccccgaccatgtggaactgtcttggtgggtcaacggcaaagaggtgcacagcggcgtgtgtaccgacccccagccactgaaagaacagcccgccctgaacgacagccggtactgcctgagcagcagactgagagtgtccgccaccttctggcagaacccccggaaccacttcagatgccaggtgcagttctacggcctgagcgagaacgacgagtggacccaggacagagccaagcccgtgacccagatcgtgtctgccgaagcctggggcagagccgattgcgacgtgaagctggtggaaaagagcttcgagacagacaccaacctgaacttccagaacctgagcgtgatcggcttcagaatcctgctgctgaaagtggccggctttaacctgctgatgaccctgcggctgtggtccagcagggccaagcgatctggatctggagcaacaaacttctcactactcaaacaagcaggtgacgtggaggagaatcccgggcctactagtatggactggatttggcgcatccttttccttgtcggcgctgctaccggcgcccattccgggcccatggaccccgacctggaaatcagagccgccttcctgcggcagagaaacacagccctgagaacagaggtggccgagctggaacaagaggtgcagcggctggaaaacgaggtgtcccagtacgagacaagatacggccctctcggaggcggaaaaggatccggcggcggaggatctggcggaggcggatctgggggcggaggctctttcgaacaagttcagctggttcagagcggagccgaagtgaagaaacctggggcctctgtgaaggtgtcctgcaaagccagcggctacacctttaccagctactggatcaactgggtccgacaggcccctggacaaggactggaatggatgggacagatccttccaggcggaggggacaccaactacaacggcaagttcaagggcagagtgaccatcaccgccgacaccagcacaagcaccgcctacatggaactgagcagcctgagaagcgaggacaccgccgtgtattattgcaccagacgggtgcccatccggctggattattggggacagggaaccctggtcaccgtgtctagtacgcgtatccagaaccctgatcctgccgtgtaccagctgcgggatagcaagagcagcgacaagagcgtgtgtctgttcaccgacttcgacagccagaccaacgtgtcccagagcaaggactccgacgtgtacatcaccgataagtgcgtgctggacatgcggagcatggacttcaagagcaactccgccgtggcctggtccaacaagtccgatttcgcctgcgccaacgccttcaacaacagcattatccccgaggacacattcttcccaagccccgagagcagctgcggctttaccagcgagagctaccagcagggcgtgctgagcgccaccatcctgtacgagatcctgctgggcaaggccaccctgtacgccgtgctggtgtctgccctggtgctgatggctatggtcaagcggaaggacagccgggga

SEQ ID NO: 5920 - DNA, 2085 bp, synthetic construct
  source 1..2085: mol_type = other DNA
atggccttaccagtgaccgccttgctcctgccgctggccttgctgctccacgccgccaggccggacatcgtgatgacacagagccctgatagcctggccgtgtctctgggagagagagccaccattaactgcaaggccagccagagcgtggactacgacggcgacagcttcctgaactggtatcagcagaagcccggccagcctcctaagctgctgatctacgccgccagcaatctggaaagcggcgtgccaagcagattttccggctctggcagcggcaccgatttcaccctgacaatatccagcctccagcctgaggacgtggccgtgtactactgccagcagagcaacgacgaccctctgacctttggacagggcaccaaggtggaaatcaaactcgagatccagaaccctgatcctgccgtgtaccagctgcgggatagcaagagcagcgacaagagcgtgtgtctgttcaccgacttcgacagccagaccaacgtgtcccagagcaaggactccgacgtgtacatcaccgataagtgcgtgctggacatgcggagcatggacttcaagagcaactccgccgtggcctggtccaacaagtccgatttcgcctgcgccaacgccttcaacaacagcattatccccgaggacacattcttcccaagccccgagagcagctgcggctttaccagcgagagctaccagcagggcgtgctgagcgccaccatcctgtacgagatcctgctgggcaaggccaccctgtacgccgtgctggtgtctgccctggtgctgatggctatggtcaagcggaaggacagccggggacgcgccaagagaagcggatctggcgtgaagcagaccctgaatttcgacctgctgaagctggctggcgacgtggaatccaacccaggccctactagtatggactggatttggcgcatccttttccttgtcggcgctgctaccggcgcccattccgggcccatggaccccgacctggaaatcagagccgccttcctgcggcagagaaacacagccctgagaacagaggtggccgagctggaacaagaggtgcagcggctggaaaacgaggtgtcccagtacgagacaagatacggccctctcggaggcggaaaaggatccggcggcggaggatctggcggaggcggatctgggggcggaggctctttcgaacaagttcagctggttcagagcggagccgaagtgaagaaacctggggcctctgtgaaggtgtcctgcaaagccagcggctacacctttaccagctactggatcaactgggtccgacaggcccctggacaaggactggaatggatgggacagatccttccaggcggaggggacaccaactacaacggcaagttcaagggcagagtgaccatcaccgccgacaccagcacaagcaccgcctacatggaactgagcagcctgagaagcgaggacaccgccgtgtattattgcaccagacgggtgcccatccggctggattattggggacagggaaccctggtcaccgtgtctagtacgcgtgaggacctgaagaacgtgttcccacctgaggtggccgtgttcgagcctagcgaggccgagatcagccacacccagaaagccaccctcgtgtgcctggctaccggcttctaccccgaccatgtggaactgtcttggtgggtcaacggcaaagaggtgcacagcggcgtgtgtaccgacccccagccactgaaagaacagcccgccctgaacgacagccggtactgcctgagcagcagactgagagtgtccgccaccttctggcagaacccccggaaccacttcagatgccaggtgcagttctacggcctgagcgagaacgacgagtggacccaggacagagccaagcccgtgacccagatcgtgtctgccgaagcctggggcagagccgattgcgacgtgaagctggtggaaaagagcttcgagacagacaccaacctgaacttccagaacctgagcgtgatcggcttcagaatcctgctgctgaaagtggccggctttaacctgctgatgaccctgcggctgtggtccagc

SEQ ID NO: 5921 - DNA, 2004 bp, synthetic construct
  source 1..2004: mol_type = other DNA
atggccttaccagtgaccgccttgctcctgccgctggccttgctgctccacgccgccaggccggacatcgtgatgacacagagccctgatagcctggccgtgtctctgggagagagagccaccattaactgcaaggccagccagagcgtggactacgacggcgacagcttcctgaactggtatcagcagaagcccggccagcctcctaagctgctgatctacgccgccagcaatctggaaagcggcgtgccaagcagattttccggctctggcagcggcaccgatttcaccctgacaatatccagcctccagcctgaggacgtggccgtgtactactgccagcagagcaacgacgaccctctgacctttggacagggcaccaaggtggaaatcaaactcgaggacctgaagaacgtgttcccacctgaggtggccgtgttcgagcctagcgaggccgagatcagccacacccagaaagccaccctcgtgtgcctggctaccggcttctaccccgaccatgtggaactgtcttggtgggtcaacggcaaagaggtgcacagcggcgtgtgtaccgacccccagccactgaaagaacagcccgccctgaacgacagccggtactgcctgagcagcagactgagagtgtccgccaccttctggcagaacccccggaaccacttcagatgccaggtgcagttctacggcctgagcgagaacgacgagtggacccaggacagagccaagcccgtgacccagatcgtgtctgccgaagcctggggcagagccgattgcgacgtgaagctggtggaaaagagcttcgagacagacaccaacctgaacttccagaacctgagcgtgatcggcttcagaatcctgctgctgaaagtggccggctttaacctgctgatgaccctgcggctgtggtccagcagggccaagcgatctggatctggagcaacaaacttctcactactcaaacaagcaggtgacgtggaggagaatcccgggcctactagtatggactggatttggcgcatccttttccttgtcggcgctgctaccggcgcccattccgggcccgaagttgctgccctcgagaaggaggtagcagctttggaaaaagaagtcgcagcccttgagaaagaagttgcggctctggagaagggatccggcggcggaggatctggcggaggcggatctgggggcggaggctctttcgaacaagttcagctggttcagagcggagccgaagtgaagaaacctggggcctctgtgaaggtgtcctgcaaagccagcggctacacctttaccagctactggatcaactgggtccgacaggcccctggacaaggactggaatggatgggacagatccttccaggcggaggggacaccaactacaacggcaagttcaagggcagagtgaccatcaccgccgacaccagcacaagcaccgcctacatggaactgagcagcctgagaagcgaggacaccgccgtgtattattgcaccagacgggtgcccatccggctggattattggggacagggaaccctggtcaccgtgtctagtacgcgtatccagaaccctgatcctgccgtgtaccagctgcgggatagcaagagcagcgacaagagcgtgtgtctgttcaccgacttcgacagccagaccaacgtgtcccagagcaaggactccgacgtgtacatcaccgataagtgcgtgctggacatgcggagcatggacttcaagagcaactccgccgtggcctggtccaacaagtccgatttcgcctgcgccaacgccttcaacaacagcattatccccgaggacacattcttcccaagccccgagagcagctgcggctttaccagcgagagctaccagcagggcgtgctgagcgccaccatcctgtacgagatcctgctgggcaaggccaccctgtacgccgtgctggtgtctgccctggtgctgatggctatggtcaagcggaaggacagccgggga

SEQ ID NO: 5922 - DNA, 2016 bp, synthetic construct
  source 1..2016: mol_type = other DNA
atggccttaccagtgaccgccttgctcctgccgctggccttgctgctccacgccgccaggccggacatcgtgatgacacagagccctgatagcctggccgtgtctctgggagagagagccaccattaactgcaaggccagccagagcgtggactacgacggcgacagcttcctgaactggtatcagcagaagcccggccagcctcctaagctgctgatctacgccgccagcaatctggaaagcggcgtgccaagcagattttccggctctggcagcggcaccgatttcaccctgacaatatccagcctccagcctgaggacgtggccgtgtactactgccagcagagcaacgacgaccctctgacctttggacagggcaccaaggtggaaatcaaactcgagatccagaaccctgatcctgccgtgtaccagctgcgggatagcaagagcagcgacaagagcgtgtgtctgttcaccgacttcgacagccagaccaacgtgtcccagagcaaggactccgacgtgtacatcaccgataagtgcgtgctggacatgcggagcatggacttcaagagcaactccgccgtggcctggtccaacaagtccgatttcgcctgcgccaacgccttcaacaacagcattatccccgaggacacattcttcccaagccccgagagcagctgcggctttaccagcgagagctaccagcagggcgtgctgagcgccaccatcctgtacgagatcctgctgggcaaggccaccctgtacgccgtgctggtgtctgccctggtgctgatggctatggtcaagcggaaggacagccggggacgcgccaagagaagcggatctggcgtgaagcagaccctgaatttcgacctgctgaagctggctggcgacgtggaatccaacccaggccctactagtatggactggatttggcgcatccttttccttgtcggcgctgctaccggcgcccattccgggcccgaagttgctgccctcgagaaggaggtagcagctttggaaaaagaagtcgcagcccttgagaaagaagttgcggctctggagaagggatccggcggcggaggatctggcggaggcggatctgggggcggaggctctttcgaacaagttcagctggttcagagcggagccgaagtgaagaaacctggggcctctgtgaaggtgtcctgcaaagccagcggctacacctttaccagctactggatcaactgggtccgacaggcccctggacaaggactggaatggatgggacagatccttccaggcggaggggacaccaactacaacggcaagttcaagggcagagtgaccatcaccgccgacaccagcacaagcaccgcctacatggaactgagcagcctgagaagcgaggacaccgccgtgtattattgcaccagacgggtgcccatccggctggattattggggacagggaaccctggtcaccgtgtctagtacgcgtgaggacctgaagaacgtgttcccacctgaggtggccgtgttcgagcctagcgaggccgagatcagccacacccagaaagccaccctcgtgtgcctggctaccggcttctaccccgaccatgtggaactgtcttggtgggtcaacggcaaagaggtgcacagcggcgtgtgtaccgacccccagccactgaaagaacagcccgccctgaacgacagccggtactgcctgagcagcagactgagagtgtccgccaccttctggcagaacccccggaaccacttcagatgccaggtgcagttctacggcctgagcgagaacgacgagtggacccaggacagagccaagcccgtgacccagatcgtgtctgccgaagcctggggcagagccgattgcgacgtgaagctggtggaaaagagcttcgagacagacaccaacctgaacttccagaacctgagcgtgatcggcttcagaatcctgctgctgaaagtggccggctttaacctgctgatgaccctgcggctgtggtccagc

SEQ ID NO: 5923 - DNA, 2274 bp, synthetic construct
  source 1..2274: mol_type = other DNA
atggccttaccagtgaccgccttgctcctgccgctggccttgctgctccacgccgccaggccggacatcgtgatgacacagagccctgatagcctggccgtgtctctgggagagagagccaccattaactgcaaggccagccagagcgtggactacgacggcgacagcttcctgaactggtatcagcagaagcccggccagcctcctaagctgctgatctacgccgccagcaatctggaaagcggcgtgccaagcagattttccggctctggcagcggcaccgatttcaccctgacaatatccagcctccagcctgaggacgtggccgtgtactactgccagcagagcaacgacgaccctctgacctttggacagggcaccaaggtggaaatcaaactcgaggacctgaagaacgtgttcccacctgaggtggccgtgttcgagcctagcgaggccgagatcagccacacccagaaagccaccctcgtgtgcctggctaccggcttctaccccgaccatgtggaactgtcttggtgggtcaacggcaaagaggtgcacagcggcgtgtgtaccgacccccagccactgaaagaacagcccgccctgaacgacagccggtactgcctgagcagcagactgagagtgtccgccaccttctggcagaacccccggaaccacttcagatgccaggtgcagttctacggcctgagcgagaacgacgagtggacccaggacagagccaagcccgtgacccagatcgtgtctgccgaagcctggggcagagccgattgcgacgtgaagctggtggaaaagagcttcgagacagacaccaacctgaacttccagaacctgagcgtgatcggcttcagaatcctgctgctgaaagtggccggctttaacctgctgatgaccctgcggctgtggtccagcagggccaagcgatctggatctggagcaacaaacttctcactactcaaacaagcaggtgacgtggaggagaatcccgggcctactagtatggactggatttggcgcatccttttccttgtcggcgctgctaccggcgcccattccgggccccaggttcagctgcaagagtctggcggaggacttgctcaagctggcggaagcctgagactgtcttgtgccgcctctggcagaaccttcagcatgggctggtttagacaggcccctggcaaagagagagagttcgtcgccgccatcacatacagcggcggcagcccttactacgcctcttctgtcagaggccggttcaccatcagccgggacaacgccaagaacaccgtgtacctccagatgaacagcctgaagccagaggacaccgccgtgtactactgtgccgccaatccaacctacggcagcgactggaatgccgagaattggggccagggcacccaagtgacagtgtctagtggatccggcggcggaggatctggcggaggcggatctgggggcggaggctctttcgaacaagttcagctggttcagagcggagccgaagtgaagaaacctggggcctctgtgaaggtgtcctgcaaagccagcggctacacctttaccagctactggatcaactgggtccgacaggcccctggacaaggactggaatggatgggacagatccttccaggcggaggggacaccaactacaacggcaagttcaagggcagagtgaccatcaccgccgacaccagcacaagcaccgcctacatggaactgagcagcctgagaagcgaggacaccgccgtgtattattgcaccagacgggtgcccatccggctggattattggggacagggaaccctggtcaccgtgtctagtacgcgtatccagaaccctgatcctgccgtgtaccagctgcgggatagcaagagcagcgacaagagcgtgtgtctgttcaccgacttcgacagccagaccaacgtgtcccagagcaaggactccgacgtgtacatcaccgataagtgcgtgctggacatgcggagcatggacttcaagagcaactccgccgtggcctggtccaacaagtccgatttcgcctgcgccaacgccttcaacaacagcattatccccgaggacacattcttcccaagccccgagagcagctgcggctttaccagcgagagctaccagcagggcgtgctgagcgccaccatcctgtacgagatcctgctgggcaaggccaccctgtacgccgtgctggtgtctgccctggtgctgatggctatggtcaagcggaaggacagccgggga

SEQ ID NO: 5924 - DNA, 2286 bp, synthetic construct
  source 1..2286: mol_type = other DNA
atggccttaccagtgaccgccttgctcctgccgctggccttgctgctccacgccgccaggccggacatcgtgatgacacagagccctgatagcctggccgtgtctctgggagagagagccaccattaactgcaaggccagccagagcgtggactacgacggcgacagcttcctgaactggtatcagcagaagcccggccagcctcctaagctgctgatctacgccgccagcaatctggaaagcggcgtgccaagcagattttccggctctggcagcggcaccgatttcaccctgacaatatccagcctccagcctgaggacgtggccgtgtactactgccagcagagcaacgacgaccctctgacctttggacagggcaccaaggtggaaatcaaactcgagatccagaaccctgatcctgccgtgtaccagctgcgggatagcaagagcagcgacaagagcgtgtgtctgttcaccgacttcgacagccagaccaacgtgtcccagagcaaggactccgacgtgtacatcaccgataagtgcgtgctggacatgcggagcatggacttcaagagcaactccgccgtggcctggtccaacaagtccgatttcgcctgcgccaacgccttcaacaacagcattatccccgaggacacattcttcccaagccccgagagcagctgcggctttaccagcgagagctaccagcagggcgtgctgagcgccaccatcctgtacgagatcctgctgggcaaggccaccctgtacgccgtgctggtgtctgccctggtgctgatggctatggtcaagcggaaggacagccggggacgcgccaagagaagcggatctggcgtgaagcagaccctgaatttcgacctgctgaagctggctggcgacgtggaatccaacccaggccctactagtatggactggatttggcgcatccttttccttgtcggcgctgctaccggcgcccattccgggccccaggttcagctgcaagagtctggcggaggacttgctcaagctggcggaagcctgagactgtcttgtgccgcctctggcagaaccttcagcatgggctggtttagacaggcccctggcaaagagagagagttcgtcgccgccatcacatacagcggcggcagcccttactacgcctcttctgtcagaggccggttcaccatcagccgggacaacgccaagaacaccgtgtacctccagatgaacagcctgaagccagaggacaccgccgtgtactactgtgccgccaatccaacctacggcagcgactggaatgccgagaattggggccagggcacccaagtgacagtgtctagtggatccggcggcggaggatctggcggaggcggatctgggggcggaggctctttcgaacaagttcagctggttcagagcggagccgaagtgaagaaacctggggcctctgtgaaggtgtcctgcaaagccagcggctacacctttaccagctactggatcaactgggtccgacaggcccctggacaaggactggaatggatgggacagatccttccaggcggaggggacaccaactacaacggcaagttcaagggcagagtgaccatcaccgccgacaccagcacaagcaccgcctacatggaactgagcagcctgagaagcgaggacaccgccgtgtattattgcaccagacgggtgcccatccggctggattattggggacagggaaccctggtcaccgtgtctagtacgcgtgaggacctgaagaacgtgttcccacctgaggtggccgtgttcgagcctagcgaggccgagatcagccacacccagaaagccaccctcgtgtgcctggctaccggcttctaccccgaccatgtggaactgtcttggtgggtcaacggcaaagaggtgcacagcggcgtgtgtaccgacccccagccactgaaagaacagcccgccctgaacgacagccggtactgcctgagcagcagactgagagtgtccgccaccttctggcagaacccccggaaccacttcagatgccaggtgcagttctacggcctgagcgagaacgacgagtggacccaggacagagccaagcccgtgacccagatcgtgtctgccgaagcctggggcagagccgattgcgacgtgaagctggtggaaaagagcttcgagacagacaccaacctgaacttccagaacctgagcgtgatcggcttcagaatcctgctgctgaaagtggccggctttaacctgctgatgaccctgcggctgtggtccagc

SEQ ID NO: 5925 - DNA, 2292 bp, synthetic construct
  source 1..2292: mol_type = other DNA
atggccttaccagtgaccgccttgctcctgccgctggccttgctgctccacgccgccaggccggaagtgcaactggtggaatctggaggctctctggtgcagccagggggaagcctgagactgtcttgtgccgcttccggcttcaccttcgacgactacgccatgagctgggtgcgccaggtgccaggcaaaggcctggaatgggtgtccagcatcaactggagcggcacccacaccgattacgccgactccgtgaaaggcagattcacaatcagcagaaacaacgccaacaataccctgtacctgcagatgaactccctgaagtctgaggatacagcagtgtattattgcgccaagaactggcgggacgccggcaccacttggtttgagaaaagcggctctgccggacagggaacccaagtgacagtgtcctccggtaccggcggaggcggatctggcggcggaggtagcggtggcggaggatctgaattcgacatcgtgatgacacagagccctgatagcctggccgtgtctctgggagagagagccaccattaactgcaaggccagccagagcgtggactacgacggcgacagcttcctgaactggtatcagcagaagcccggccagcctcctaagctgctgatctacgccgccagcaatctggaaagcggcgtgccaagcagattttccggctctggcagcggcaccgatttcaccctgacaatatccagcctccagcctgaggacgtggccgtgtactactgccagcagagcaacgacgaccctctgacctttggacagggcaccaaggtggaaatcaaactcgaggacctgaagaacgtgttcccacctgaggtggccgtgttcgagcctagcgaggccgagatcagccacacccagaaagccaccctcgtgtgcctggctaccggcttctaccccgaccatgtggaactgtcttggtgggtcaacggcaaagaggtgcacagcggcgtgtgtaccgacccccagccactgaaagaacagcccgccctgaacgacagccggtactgcctgagcagcagactgagagtgtccgccaccttctggcagaacccccggaaccacttcagatgccaggtgcagttctacggcctgagcgagaacgacgagtggacccaggacagagccaagcccgtgacccagatcgtgtctgccgaagcctggggcagagccgattgcgacgtgaagctggtggaaaagagcttcgagacagacaccaacctgaacttccagaacctgagcgtgatcggcttcagaatcctgctgctgaaagtggccggctttaacctgctgatgaccctgcggctgtggtccagcagggccaagcgatctggatctggagcaacaaacttctcactactcaaacaagcaggtgacgtggaggagaatcccgggcctactagtatggactggatttggcgcatccttttccttgtcggcgctgctaccggcgcgcattccttcgaacaagttcagctggttcagagcggagccgaagtgaagaaacctggggcctctgtgaaggtgtcctgcaaagccagcggctacacctttaccagctactggatcaactgggtccgacaggcccctggacaaggactggaatggatgggacagatccttccaggcggaggggacaccaactacaacggcaagttcaagggcagagtgaccatcaccgccgacaccagcacaagcaccgcctacatggaactgagcagcctgagaagcgaggacaccgccgtgtattattgcaccagacgggtgcccatccggctggattattggggacagggaaccctggtcaccgtgtctagtacgcgtatccagaaccctgatcctgccgtgtaccagctgcgggatagcaagagcagcgacaagagcgtgtgtctgttcaccgacttcgacagccagaccaacgtgtcccagagcaaggactccgacgtgtacatcaccgataagtgcgtgctggacatgcggagcatggacttcaagagcaactccgccgtggcctggtccaacaagtccgatttcgcctgcgccaacgccttcaacaacagcattatccccgaggacacattcttcccaagccccgagagcagctgcggctttaccagcgagagctaccagcagggcgtgctgagcgccaccatcctgtacgagatcctgctgggcaaggccaccctgtacgccgtgctggtgtctgccctggtgctgatggctatggtcaagcggaaggacagccgggga

SEQ ID NO: 5926 - DNA, 2304 bp, synthetic construct
  source 1..2304: mol_type = other DNA
atggccttaccagtgaccgccttgctcctgccgctggccttgctgctccacgccgccaggccggaagtgcaactggtggaatctggaggctctctggtgcagccagggggaagcctgagactgtcttgtgccgcttccggcttcaccttcgacgactacgccatgagctgggtgcgccaggtgccaggcaaaggcctggaatgggtgtccagcatcaactggagcggcacccacaccgattacgccgactccgtgaaaggcagattcacaatcagcagaaacaacgccaacaataccctgtacctgcagatgaactccctgaagtctgaggatacagcagtgtattattgcgccaagaactggcgggacgccggcaccacttggtttgagaaaagcggctctgccggacagggaacccaagtgacagtgtcctccggtaccggcggaggcggatctggcggcggaggtagcggtggcggaggatctgaattcgacatcgtgatgacacagagccctgatagcctggccgtgtctctgggagagagagccaccattaactgcaaggccagccagagcgtggactacgacggcgacagcttcctgaactggtatcagcagaagcccggccagcctcctaagctgctgatctacgccgccagcaatctggaaagcggcgtgccaagcagattttccggctctggcagcggcaccgatttcaccctgacaatatccagcctccagcctgaggacgtggccgtgtactactgccagcagagcaacgacgaccctctgacctttggacagggcaccaaggtggaaatcaaactcgagatccagaaccctgatcctgccgtgtaccagctgcgggatagcaagagcagcgacaagagcgtgtgtctgttcaccgacttcgacagccagaccaacgtgtcccagagcaaggactccgacgtgtacatcaccgataagtgcgtgctggacatgcggagcatggacttcaagagcaactccgccgtggcctggtccaacaagtccgatttcgcctgcgccaacgccttcaacaacagcattatccccgaggacacattcttcccaagccccgagagcagctgcggctttaccagcgagagctaccagcagggcgtgctgagcgccaccatcctgtacgagatcctgctgggcaaggccaccctgtacgccgtgctggtgtctgccctggtgctgatggctatggtcaagcggaaggacagccggggacgcgccaagagaagcggatctggcgtgaagcagaccctgaatttcgacctgctgaagctggctggcgacgtggaatccaacccaggccctactagtatggactggatttggcgcatccttttccttgtcggcgctgctaccggcgcgcattccttcgaacaagttcagctggttcagagcggagccgaagtgaagaaacctggggcctctgtgaaggtgtcctgcaaagccagcggctacacctttaccagctactggatcaactgggtccgacaggcccctggacaaggactggaatggatgggacagatccttccaggcggaggggacaccaactacaacggcaagttcaagggcagagtgaccatcaccgccgacaccagcacaagcaccgcctacatggaactgagcagcctgagaagcgaggacaccgccgtgtattattgcaccagacgggtgcccatccggctggattattggggacagggaaccctggtcaccgtgtctagtacgcgtgaggacctgaagaacgtgttcccacctgaggtggccgtgttcgagcctagcgaggccgagatcagccacacccagaaagccaccctcgtgtgcctggctaccggcttctaccccgaccatgtggaactgtcttggtgggtcaacggcaaagaggtgcacagcggcgtgtgtaccgacccccagccactgaaagaacagcccgccctgaacgacagccggtactgcctgagcagcagactgagagtgtccgccaccttctggcagaacccccggaaccacttcagatgccaggtgcagttctacggcctgagcgagaacgacgagtggacccaggacagagccaagcccgtgacccagatcgtgtctgccgaagcctggggcagagccgattgcgacgtgaagctggtggaaaagagcttcgagacagacaccaacctgaacttccagaacctgagcgtgatcggcttcagaatcctgctgctgaaagtggccggctttaacctgctgatgaccctgcggctgtggtccagc

SEQ ID NO: 5927 - DNA, 2286 bp, synthetic construct
  source 1..2286: mol_type = other DNA
atggccttaccagtgaccgccttgctcctgccgctggccttgctgctccacgccgccaggccggaagttcagctgcttgagtctggcggaggactggttcaacctggcggaagcctgagactgtcttgtgccgccagcggcttcatcttcagcagctacgccatgagctgggtccgacaggctcctggaaagggccaagaatgggtttccggcgttagcggcacaggcgtgaacacctactacgccgatagcgtgaagggcagattcaccatcagccgggacaacagcaagaacaccctgtacctccagatgaacagcctgagagccgaggacaccgccgtgtactattgtgcctctggcaaaggctgggacagcggctcttggtacgaggactatagaggccagggcaccctggtcacagtttcttcaggtaccggcggaggcggatctggcggcggaggtagcggtggcggaggatctgaattcgacatcgtgatgacacagagccctgatagcctggccgtgtctctgggagagagagccaccattaactgcaaggccagccagagcgtggactacgacggcgacagcttcctgaactggtatcagcagaagcccggccagcctcctaagctgctgatctacgccgccagcaatctggaaagcggcgtgccaagcagattttccggctctggcagcggcaccgatttcaccctgacaatatccagcctccagcctgaggacgtggccgtgtactactgccagcagagcaacgacgaccctctgacctttggacagggcaccaaggtggaaatcaaactcgaggacctgaagaacgtgttcccacctgaggtggccgtgttcgagcctagcgaggccgagatcagccacacccagaaagccaccctcgtgtgcctggctaccggcttctaccccgaccatgtggaactgtcttggtgggtcaacggcaaagaggtgcacagcggcgtgtgtaccgacccccagccactgaaagaacagcccgccctgaacgacagccggtactgcctgagcagcagactgagagtgtccgccaccttctggcagaacccccggaaccacttcagatgccaggtgcagttctacggcctgagcgagaacgacgagtggacccaggacagagccaagcccgtgacccagatcgtgtctgccgaagcctggggcagagccgattgcgacgtgaagctggtggaaaagagcttcgagacagacaccaacctgaacttccagaacctgagcgtgatcggcttcagaatcctgctgctgaaagtggccggctttaacctgctgatgaccctgcggctgtggtccagcagggccaagcgatctggatctggagcaacaaacttctcactactcaaacaagcaggtgacgtggaggagaatcccgggcctactagtatggactggatttggcgcatccttttccttgtcggcgctgctaccggcgcgcattccttcgaacaagttcagctggttcagagcggagccgaagtgaagaaacctggggcctctgtgaaggtgtcctgcaaagccagcggctacacctttaccagctactggatcaactgggtccgacaggcccctggacaaggactggaatggatgggacagatccttccaggcggaggggacaccaactacaacggcaagttcaagggcagagtgaccatcaccgccgacaccagcacaagcaccgcctacatggaactgagcagcctgagaagcgaggacaccgccgtgtattattgcaccagacgggtgcccatccggctggattattggggacagggaaccctggtcaccgtgtctagtacgcgtatccagaaccctgatcctgccgtgtaccagctgcgggatagcaagagcagcgacaagagcgtgtgtctgttcaccgacttcgacagccagaccaacgtgtcccagagcaaggactccgacgtgtacatcaccgataagtgcgtgctggacatgcggagcatggacttcaagagcaactccgccgtggcctggtccaacaagtccgatttcgcctgcgccaacgccttcaacaacagcattatccccgaggacacattcttcccaagccccgagagcagctgcggctttaccagcgagagctaccagcagggcgtgctgagcgccaccatcctgtacgagatcctgctgggcaaggccaccctgtacgccgtgctggtgtctgccctggtgctgatggctatggtcaagcggaaggacagccgggga

SEQ ID NO: 5928 - DNA, 2298 bp, synthetic construct
  source 1..2298: mol_type = other DNA
atggccttaccagtgaccgccttgctcctgccgctggccttgctgctccacgccgccaggccggaagttcagctgcttgagtctggcggaggactggttcaacctggcggaagcctgagactgtcttgtgccgccagcggcttcatcttcagcagctacgccatgagctgggtccgacaggctcctggaaagggccaagaatgggtttccggcgttagcggcacaggcgtgaacacctactacgccgatagcgtgaagggcagattcaccatcagccgggacaacagcaagaacaccctgtacctccagatgaacagcctgagagccgaggacaccgccgtgtactattgtgcctctggcaaaggctgggacagcggctcttggtacgaggactatagaggccagggcaccctggtcacagtttcttcaggtaccggcggaggcggatctggcggcggaggtagcggtggcggaggatctgaattcgacatcgtgatgacacagagccctgatagcctggccgtgtctctgggagagagagccaccattaactgcaaggccagccagagcgtggactacgacggcgacagcttcctgaactggtatcagcagaagcccggccagcctcctaagctgctgatctacgccgccagcaatctggaaagcggcgtgccaagcagattttccggctctggcagcggcaccgatttcaccctgacaatatccagcctccagcctgaggacgtggccgtgtactactgccagcagagcaacgacgaccctctgacctttggacagggcaccaaggtggaaatcaaactcgagatccagaaccctgatcctgccgtgtaccagctgcgggatagcaagagcagcgacaagagcgtgtgtctgttcaccgacttcgacagccagaccaacgtgtcccagagcaaggactccgacgtgtacatcaccgataagtgcgtgctggacatgcggagcatggacttcaagagcaactccgccgtggcctggtccaacaagtccgatttcgcctgcgccaacgccttcaacaacagcattatccccgaggacacattcttcccaagccccgagagcagctgcggctttaccagcgagagctaccagcagggcgtgctgagcgccaccatcctgtacgagatcctgctgggcaaggccaccctgtacgccgtgctggtgtctgccctggtgctgatggctatggtcaagcggaaggacagccggggacgcgccaagagaagcggatctggcgtgaagcagaccctgaatttcgacctgctgaagctggctggcgacgtggaatccaacccaggccctactagtatggactggatttggcgcatccttttccttgtcggcgctgctaccggcgcgcattccttcgaacaagttcagctggttcagagcggagccgaagtgaagaaacctggggcctctgtgaaggtgtcctgcaaagccagcggctacacctttaccagctactggatcaactgggtccgacaggcccctggacaaggactggaatggatgggacagatccttccaggcggaggggacaccaactacaacggcaagttcaagggcagagtgaccatcaccgccgacaccagcacaagcaccgcctacatggaactgagcagcctgagaagcgaggacaccgccgtgtattattgcaccagacgggtgcccatccggctggattattggggacagggaaccctggtcaccgtgtctagtacgcgtgaggacctgaagaacgtgttcccacctgaggtggccgtgttcgagcctagcgaggccgagatcagccacacccagaaagccaccctcgtgtgcctggctaccggcttctaccccgaccatgtggaactgtcttggtgggtcaacggcaaagaggtgcacagcggcgtgtgtaccgacccccagccactgaaagaacagcccgccctgaacgacagccggtactgcctgagcagcagactgagagtgtccgccaccttctggcagaacccccggaaccacttcagatgccaggtgcagttctacggcctgagcgagaacgacgagtggacccaggacagagccaagcccgtgacccagatcgtgtctgccgaagcctggggcagagccgattgcgacgtgaagctggtggaaaagagcttcgagacagacaccaacctgaacttccagaacctgagcgtgatcggcttcagaatcctgctgctgaaagtggccggctttaacctgctgatgaccctgcggctgtggtccagc

SEQ ID NO: 5929 - DNA, 2190 bp, synthetic construct
  source 1..2190: mol_type = other DNA
atggccttaccagtgaccgccttgctcctgccgctggccttgctgctccacgccgccaggccgatgctgcccgctcctaagaatctggtggtgtccagaatcaccgaggacagcgccagactgtcttggacagctcctgatgccgccttcgacagcttccccatccggtacatcgagacactgatctggggcgaagccatctggctggatgtgcctggaagcgagagaagctacgacctgaccggactgaagcctggcacagagtatgccgtggtcatcaccggcgtgaaaggcggcagattctctagccctctggtggcctctttcaccaccggtaccggcggaggcggatctggcggcggaggtagcggtggcggaggatctgaattcgacatcgtgatgacacagagccctgatagcctggccgtgtctctgggagagagagccaccattaactgcaaggccagccagagcgtggactacgacggcgacagcttcctgaactggtatcagcagaagcccggccagcctcctaagctgctgatctacgccgccagcaatctggaaagcggcgtgccaagcagattttccggctctggcagcggcaccgatttcaccctgacaatatccagcctccagcctgaggacgtggccgtgtactactgccagcagagcaacgacgaccctctgacctttggacagggcaccaaggtggaaatcaaactcgaggacctgaagaacgtgttcccacctgaggtggccgtgttcgagcctagcgaggccgagatcagccacacccagaaagccaccctcgtgtgcctggctaccggcttctaccccgaccatgtggaactgtcttggtgggtcaacggcaaagaggtgcacagcggcgtgtgtaccgacccccagccactgaaagaacagcccgccctgaacgacagccggtactgcctgagcagcagactgagagtgtccgccaccttctggcagaacccccggaaccacttcagatgccaggtgcagttctacggcctgagcgagaacgacgagtggacccaggacagagccaagcccgtgacccagatcgtgtctgccgaagcctggggcagagccgattgcgacgtgaagctggtggaaaagagcttcgagacagacaccaacctgaacttccagaacctgagcgtgatcggcttcagaatcctgctgctgaaagtggccggctttaacctgctgatgaccctgcggctgtggtccagcagggccaagcgatctggatctggagcaacaaacttctcactactcaaacaagcaggtgacgtggaggagaatcccgggcctactagtatggactggatttggcgcatccttttccttgtcggcgctgctaccggcgcgcattccttcgaacaagttcagctggttcagagcggagccgaagtgaagaaacctggggcctctgtgaaggtgtcctgcaaagccagcggctacacctttaccagctactggatcaactgggtccgacaggcccctggacaaggactggaatggatgggacagatccttccaggcggaggggacaccaactacaacggcaagttcaagggcagagtgaccatcaccgccgacaccagcacaagcaccgcctacatggaactgagcagcctgagaagcgaggacaccgccgtgtattattgcaccagacgggtgcccatccggctggattattggggacagggaaccctggtcaccgtgtctagtacgcgtatccagaaccctgatcctgccgtgtaccagctgcgggatagcaagagcagcgacaagagcgtgtgtctgttcaccgacttcgacagccagaccaacgtgtcccagagcaaggactccgacgtgtacatcaccgataagtgcgtgctggacatgcggagcatggacttcaagagcaactccgccgtggcctggtccaacaagtccgatttcgcctgcgccaacgccttcaacaacagcattatccccgaggacacattcttcccaagccccgagagcagctgcggctttaccagcgagagctaccagcagggcgtgctgagcgccaccatcctgtacgagatcctgctgggcaaggccaccctgtacgccgtgctggtgtctgccctggtgctgatggctatggtcaagcggaaggacagccgggga

SEQ ID NO: 5930 - DNA, 2202 bp, synthetic construct
  source 1..2202: mol_type = other DNA
atggccttaccagtgaccgccttgctcctgccgctggccttgctgctccacgccgccaggccgatgctgcccgctcctaagaatctggtggtgtccagaatcaccgaggacagcgccagactgtcttggacagctcctgatgccgccttcgacagcttccccatccggtacatcgagacactgatctggggcgaagccatctggctggatgtgcctggaagcgagagaagctacgacctgaccggactgaagcctggcacagagtatgccgtggtcatcaccggcgtgaaaggcggcagattctctagccctctggtggcctctttcaccaccggtaccggcggaggcggatctggcggcggaggtagcggtggcggaggatctgaattcgacatcgtgatgacacagagccctgatagcctggccgtgtctctgggagagagagccaccattaactgcaaggccagccagagcgtggactacgacggcgacagcttcctgaactggtatcagcagaagcccggccagcctcctaagctgctgatctacgccgccagcaatctggaaagcggcgtgccaagcagattttccggctctggcagcggcaccgatttcaccctgacaatatccagcctccagcctgaggacgtggccgtgtactactgccagcagagcaacgacgaccctctgacctttggacagggcaccaaggtggaaatcaaactcgagatccagaaccctgatcctgccgtgtaccagctgcgggatagcaagagcagcgacaagagcgtgtgtctgttcaccgacttcgacagccagaccaacgtgtcccagagcaaggactccgacgtgtacatcaccgataagtgcgtgctggacatgcggagcatggacttcaagagcaactccgccgtggcctggtccaacaagtccgatttcgcctgcgccaacgccttcaacaacagcattatccccgaggacacattcttcccaagccccgagagcagctgcggctttaccagcgagagctaccagcagggcgtgctgagcgccaccatcctgtacgagatcctgctgggcaaggccaccctgtacgccgtgctggtgtctgccctggtgctgatggctatggtcaagcggaaggacagccggggacgcgccaagagaagcggatctggcgtgaagcagaccctgaatttcgacctgctgaagctggctggcgacgtggaatccaacccaggccctactagtatggactggatttggcgcatccttttccttgtcggcgctgctaccggcgcgcattccttcgaacaagttcagctggttcagagcggagccgaagtgaagaaacctggggcctctgtgaaggtgtcctgcaaagccagcggctacacctttaccagctactggatcaactgggtccgacaggcccctggacaaggactggaatggatgggacagatccttccaggcggaggggacaccaactacaacggcaagttcaagggcagagtgaccatcaccgccgacaccagcacaagcaccgcctacatggaactgagcagcctgagaagcgaggacaccgccgtgtattattgcaccagacgggtgcccatccggctggattattggggacagggaaccctggtcaccgtgtctagtacgcgtgaggacctgaagaacgtgttcccacctgaggtggccgtgttcgagcctagcgaggccgagatcagccacacccagaaagccaccctcgtgtgcctggctaccggcttctaccccgaccatgtggaactgtcttggtgggtcaacggcaaagaggtgcacagcggcgtgtgtaccgacccccagccactgaaagaacagcccgccctgaacgacagccggtactgcctgagcagcagactgagagtgtccgccaccttctggcagaacccccggaaccacttcagatgccaggtgcagttctacggcctgagcgagaacgacgagtggacccaggacagagccaagcccgtgacccagatcgtgtctgccgaagcctggggcagagccgattgcgacgtgaagctggtggaaaagagcttcgagacagacaccaacctgaacttccagaacctgagcgtgatcggcttcagaatcctgctgctgaaagtggccggctttaacctgctgatgaccctgcggctgtggtccagc

SEQ ID NO: 5931 - DNA, 2277 bp, synthetic construct
  source 1..2277: mol_type = other DNA
atggccttaccagtgaccgccttgctcctgccgctggccttgctgctccacgccgccaggccggaggtgcagctggttgaatctggcggaggactggttcagcctggcggatctctgagactgtcttgtgccgccagcggcttcaacatcaaggatacctgtatcggctgggttcgcagagcccctggcaaagaggaagaactggtcgccaaaatctgcaagtacagcggccacaccagatacgccgacagcgtgaagggcagattcaccatcagcgccgacaccagcaagaacaccgcctacctccagatgaacagcctgagagccgaggacaccgccgtgtactattgtgccgctgtgtccgtcagagatgggcactacaattactggggccagggcaccaccgtgaccgtttcttcaggtaccggcggaggcggatctggcggcggaggtagcggtggcggaggatctgaattcgacatcgtgatgacacagagccctgatagcctggccgtgtctctgggagagagagccaccattaactgcaaggccagccagagcgtggactacgacggcgacagcttcctgaactggtatcagcagaagcccggccagcctcctaagctgctgatctacgccgccagcaatctggaaagcggcgtgccaagcagattttccggctctggcagcggcaccgatttcaccctgacaatatccagcctccagcctgaggacgtggccgtgtactactgccagcagagcaacgacgaccctctgacctttggacagggcaccaaggtggaaatcaaactcgaggacctgaagaacgtgttcccacctgaggtggccgtgttcgagcctagcgaggccgagatcagccacacccagaaagccaccctcgtgtgcctggctaccggcttctaccccgaccatgtggaactgtcttggtgggtcaacggcaaagaggtgcacagcggcgtgtgtaccgacccccagccactgaaagaacagcccgccctgaacgacagccggtactgcctgagcagcagactgagagtgtccgccaccttctggcagaacccccggaaccacttcagatgccaggtgcagttctacggcctgagcgagaacgacgagtggacccaggacagagccaagcccgtgacccagatcgtgtctgccgaagcctggggcagagccgattgcgacgtgaagctggtggaaaagagcttcgagacagacaccaacctgaacttccagaacctgagcgtgatcggcttcagaatcctgctgctgaaagtggccggctttaacctgctgatgaccctgcggctgtggtccagcagggccaagcgatctggatctggagcaacaaacttctcactactcaaacaagcaggtgacgtggaggagaatcccgggcctactagtatggactggatttggcgcatccttttccttgtcggcgctgctaccggcgcgcattccttcgaacaagttcagctggttcagagcggagccgaagtgaagaaacctggggcctctgtgaaggtgtcctgcaaagccagcggctacacctttaccagctactggatcaactgggtccgacaggcccctggacaaggactggaatggatgggacagatccttccaggcggaggggacaccaactacaacggcaagttcaagggcagagtgaccatcaccgccgacaccagcacaagcaccgcctacatggaactgagcagcctgagaagcgaggacaccgccgtgtattattgcaccagacgggtgcccatccggctggattattggggacagggaaccctggtcaccgtgtctagtacgcgtatccagaaccctgatcctgccgtgtaccagctgcgggatagcaagagcagcgacaagagcgtgtgtctgttcaccgacttcgacagccagaccaacgtgtcccagagcaaggactccgacgtgtacatcaccgataagtgcgtgctggacatgcggagcatggacttcaagagcaactccgccgtggcctggtccaacaagtccgatttcgcctgcgccaacgccttcaacaacagcattatccccgaggacacattcttcccaagccccgagagcagctgcggctttaccagcgagagctaccagcagggcgtgctgagcgccaccatcctgtacgagatcctgctgggcaaggccaccctgtacgccgtgctggtgtctgccctggtgctgatggctatggtcaagcggaaggacagccgggga

SEQ ID NO: 5932 - DNA, 2289 bp, synthetic construct
  source 1..2289: mol_type = other DNA
atggccttaccagtgaccgccttgctcctgccgctggccttgctgctccacgccgccaggccggaggtgcagctggttgaatctggcggaggactggttcagcctggcggatctctgagactgtcttgtgccgccagcggcttcaacatcaaggatacctgtatcggctgggttcgcagagcccctggcaaagaggaagaactggtcgccaaaatctgcaagtacagcggccacaccagatacgccgacagcgtgaagggcagattcaccatcagcgccgacaccagcaagaacaccgcctacctccagatgaacagcctgagagccgaggacaccgccgtgtactattgtgccgctgtgtccgtcagagatgggcactacaattactggggccagggcaccaccgtgaccgtttcttcaggtaccggcggaggcggatctggcggcggaggtagcggtggcggaggatctgaattcgacatcgtgatgacacagagccctgatagcctggccgtgtctctgggagagagagccaccattaactgcaaggccagccagagcgtggactacgacggcgacagcttcctgaactggtatcagcagaagcccggccagcctcctaagctgctgatctacgccgccagcaatctggaaagcggcgtgccaagcagattttccggctctggcagcggcaccgatttcaccctgacaatatccagcctccagcctgaggacgtggccgtgtactactgccagcagagcaacgacgaccctctgacctttggacagggcaccaaggtggaaatcaaactcgagatccagaaccctgatcctgccgtgtaccagctgcgggatagcaagagcagcgacaagagcgtgtgtctgttcaccgacttcgacagccagaccaacgtgtcccagagcaaggactccgacgtgtacatcaccgataagtgcgtgctggacatgcggagcatggacttcaagagcaactccgccgtggcctggtccaacaagtccgatttcgcctgcgccaacgccttcaacaacagcattatccccgaggacacattcttcccaagccccgagagcagctgcggctttaccagcgagagctaccagcagggcgtgctgagcgccaccatcctgtacgagatcctgctgggcaaggccaccctgtacgccgtgctggtgtctgccctggtgctgatggctatggtcaagcggaaggacagccggggacgcgccaagagaagcggatctggcgtgaagcagaccctgaatttcgacctgctgaagctggctggcgacgtggaatccaacccaggccctactagtatggactggatttggcgcatccttttccttgtcggcgctgctaccggcgcgcattccttcgaacaagttcagctggttcagagcggagccgaagtgaagaaacctggggcctctgtgaaggtgtcctgcaaagccagcggctacacctttaccagctactggatcaactgggtccgacaggcccctggacaaggactggaatggatgggacagatccttccaggcggaggggacaccaactacaacggcaagttcaagggcagagtgaccatcaccgccgacaccagcacaagcaccgcctacatggaactgagcagcctgagaagcgaggacaccgccgtgtattattgcaccagacgggtgcccatccggctggattattggggacagggaaccctggtcaccgtgtctagtacgcgtgaggacctgaagaacgtgttcccacctgaggtggccgtgttcgagcctagcgaggccgagatcagccacacccagaaagccaccctcgtgtgcctggctaccggcttctaccccgaccatgtggaactgtcttggtgggtcaacggcaaagaggtgcacagcggcgtgtgtaccgacccccagccactgaaagaacagcccgccctgaacgacagccggtactgcctgagcagcagactgagagtgtccgccaccttctggcagaacccccggaaccacttcagatgccaggtgcagttctacggcctgagcgagaacgacgagtggacccaggacagagccaagcccgtgacccagatcgtgtctgccgaagcctggggcagagccgattgcgacgtgaagctggtggaaaagagcttcgagacagacaccaacctgaacttccagaacctgagcgtgatcggcttcagaatcctgctgctgaaagtggccggctttaacctgctgatgaccctgcggctgtggtccagc

SEQ ID NO: 5933 - DNA, 3393 bp, synthetic construct
  source 1..3393: mol_type = other DNA
atggccttaccagtgaccgccttgctcctgccgctggccttgctgctccacgccgccaggccggaagtgcagctggttgaatctggcggaggactggttcaggctggcggatctctgagactgtcttgtgccgccagcggcagaacctttagcatgggctggtttagacaggcccctggcaaagagagagagttcgtcgccgccatcacatactctggcggcagcccttactacgccgactctgtgaagggcagattcaccatcagccgggacaacgccaagaacaccgtgtacctccagatgaacagcctgaagcctgaggacaccgccgtgtactactgcgccgccaatccaacatacggcagcgactggaacgccgagaattggggccagggaacccaagtgacagtgtctagcggtaccggcggaggcggatctggcggcggaggtagcggtggcggaggatctgaattcgacatcgtgatgacacagagccctgatagcctggccgtgtctctgggagagagagccaccattaactgcaaggccagccagagcgtggactacgacggcgacagcttcctgaactggtatcagcagaagcccggccagcctcctaagctgctgatctacgccgccagcaatctggaaagcggcgtgccaagcagattttccggctctggcagcggcaccgatttcaccctgacaatatccagcctccagcctgaggacgtggccgtgtactactgccagcagagcaacgacgaccctctgacctttggacagggcaccaaggtggaaatcaaactcgaggacctgaagaacgtgttcccacctgaggtggccgtgttcgagcctagcgaggccgagatcagccacacccagaaagccaccctcgtgtgcctggctaccggcttctaccccgaccatgtggaactgtcttggtgggtcaacggcaaagaggtgcacagcggcgtgtgtaccgacccccagccactgaaagaacagcccgccctgaacgacagccggtactgcctgagcagcagactgagagtgtccgccaccttctggcagaacccccggaaccacttcagatgccaggtgcagttctacggcctgagcgagaacgacgagtggacccaggacagagccaagcccgtgacccagatcgtgtctgccgaagcctggggcagagccgattgcgacgtgaagctggtggaaaagagcttcgagacagacaccaacctgaacttccagaacctgagcgtgatcggcttcagaatcctgctgctgaaagtggccggctttaacctgctgatgaccctgcggctgtggtccagcagggccaagcgatctggatctggagcaacaaacttctcactactcaaacaagcaggtgacgtggaggagaatcccgggcctactagtgccaccatggactggatttggcgcatccttttccttgtcggcgctgctaccggcgcccattccgggcccgaagtgcaactggttgaatccggtggcggcctggtgcaagcaggcggatctctcagacttagctgtgccgcctccggcagaaccttcacaatgggatggtttaggcaggctccagggaaagagagagagttcgtcgccgccatctctctgtctcccacactggcctactacgccgactctgtgaaaggccggttcaccatctccagagataatgccaagaacaccgtggtgctgcaaatgaactctctgaaacccgaggatacagccctgtactattgtgccgctgaccggaagtccgtgatgagcatcagacccgattactggggacagggcacacaagtcacagtgtcctctggatccggcggcggaggatctggcggaggcggatctgggggcggaggctctttcgaacaagttcagctggttcagagcggagccgaagtgaagaaacctggggcctctgtgaaggtgtcctgcaaagccagcggctacacctttaccagctactggatcaactgggtccgacaggcccctggacaaggactggaatggatgggacagatccttccaggcggaggggacaccaactacaacggcaagttcaagggcagagtgaccatcaccgccgacaccagcacaagcaccgcctacatggaactgagcagcctgagaagcgaggacaccgccgtgtattattgcaccagacgggtgcccatccggctggattattggggacagggaaccctggtcaccgtgtctagtacgcgtatccagaaccctgatcctgccgtgtaccagctgcgggatagcaagagcagcgacaagagcgtgtgtctgttcaccgacttcgacagccagaccaacgtgtcccagagcaaggactccgacgtgtacatcaccgataagtgcgtgctggacatgcggagcatggacttcaagagcaactccgccgtggcctggtccaacaagtccgatttcgcctgcgccaacgccttcaacaacagcattatccccgaggacacattcttcccaagccccgagagcagctgcggctttaccagcgagagctaccagcagggcgtgctgagcgccaccatcctgtacgagatcctgctgggcaaggccaccctgtacgccgtgctggtgtctgccctggtgctgatggctatggtcaagcggaaggacagccggggacgcgccaagagaagcggatctggcgtgaagcagaccctgaatttcgacctgctgaagctggctggcgacgtggaatccaacccaggcccttctagaggccatatgaccgagtacaagcccacggtgcgcctcgccacccgcgacgacgtccccagggccgtacgcaccctcgccgccgcgttcgccgactaccccgccacgcgccacaccgtcgatccggaccgccacatcgagcgggtcaccgagctgcaagaactcttcctcacgcgcgtcgggctcgacatcggcaaggtgtgggtcgcggacgacggcgccgcggtggcggtctggaccacgccggagagcgtcgaagcgggggcggtgttcgccgagatcggcccgcgcatggccgagttgagcggttcccggctggccgcgcagcaacagatggaaggcctcctggcgccgcaccggcccaaggagcccgcgtggttcctggccaccgtcggcgtctcgcccgaccaccagggcaagggtctgggcagcgccgtcgtgctccccggagtggaggcggccgagcgcgccggggtgcccgccttcctggagacctccgcgccccgcaacctccccttctacgagcggctcggcttcaccgtcaccgccgacgtcgaggtgcccgaaggaccgcgcacctggtgcatgacccgcaagcccggtgcctga

SEQ ID NO: 5934 - DNA, 2307 bp, synthetic construct
  source 1..2307: mol_type = other DNA
atggccttaccagtgaccgccttgctcctgccgctggccttgctgctccacgccgccaggccggaagtgcagctggttgaatctggcggaggactggttcagcctggcggatctctgagactgtcttgtgccgcctctggcttcgccagcgactactatatcatcggctggttcagacaggcccctggcaaagagagagagggcgtcagctgtatcagcagcagatacgccaacaccaactacgccgacagcgtgaagggcagattcaccatcagccgggacaacgccaagaacaccgtgtacctccagatgaacagcctgaagcctgaggacaccgccgtgtactactgtgccgccgacaccagaagatacacctgtcctgacattgccaccatgcaccggaacttcgattcttggggccagggcacactggtcaccgtttcttctggtaccggcggaggcggatctggcggcggaggtagcggtggcggaggatctgaattcgacatcgtgatgacacagagccctgatagcctggccgtgtctctgggagagagagccaccattaactgcaaggccagccagagcgtggactacgacggcgacagcttcctgaactggtatcagcagaagcccggccagcctcctaagctgctgatctacgccgccagcaatctggaaagcggcgtgccaagcagattttccggctctggcagcggcaccgatttcaccctgacaatatccagcctccagcctgaggacgtggccgtgtactactgccagcagagcaacgacgaccctctgacctttggacagggcaccaaggtggaaatcaaactcgaggacctgaagaacgtgttcccacctgaggtggccgtgttcgagcctagcgaggccgagatcagccacacccagaaagccaccctcgtgtgcctggctaccggcttctaccccgaccatgtggaactgtcttggtgggtcaacggcaaagaggtgcacagcggcgtgtgtaccgacccccagccactgaaagaacagcccgccctgaacgacagccggtactgcctgagcagcagactgagagtgtccgccaccttctggcagaacccccggaaccacttcagatgccaggtgcagttctacggcctgagcgagaacgacgagtggacccaggacagagccaagcccgtgacccagatcgtgtctgccgaagcctggggcagagccgattgcgacgtgaagctggtggaaaagagcttcgagacagacaccaacctgaacttccagaacctgagcgtgatcggcttcagaatcctgctgctgaaagtggccggctttaacctgctgatgaccctgcggctgtggtccagcagggccaagcgatctggatctggagcaacaaacttctcactactcaaacaagcaggtgacgtggaggagaatcccgggcctactagtatggactggatttggcgcatccttttccttgtcggcgctgctaccggcgcgcattccttcgaacaagttcagctggttcagagcggagccgaagtgaagaaacctggggcctctgtgaaggtgtcctgcaaagccagcggctacacctttaccagctactggatcaactgggtccgacaggcccctggacaaggactggaatggatgggacagatccttccaggcggaggggacaccaactacaacggcaagttcaagggcagagtgaccatcaccgccgacaccagcacaagcaccgcctacatggaactgagcagcctgagaagcgaggacaccgccgtgtattattgcaccagacgggtgcccatccggctggattattggggacagggaaccctggtcaccgtgtctagtacgcgtatccagaaccctgatcctgccgtgtaccagctgcgggatagcaagagcagcgacaagagcgtgtgtctgttcaccgacttcgacagccagaccaacgtgtcccagagcaaggactccgacgtgtacatcaccgataagtgcgtgctggacatgcggagcatggacttcaagagcaactccgccgtggcctggtccaacaagtccgatttcgcctgcgccaacgccttcaacaacagcattatccccgaggacacattcttcccaagccccgagagcagctgcggctttaccagcgagagctaccagcagggcgtgctgagcgccaccatcctgtacgagatcctgctgggcaaggccaccctgtacgccgtgctggtgtctgccctggtgctgatggctatggtcaagcggaaggacagccggggataa

SEQ ID NO: 5935 - DNA, 2307 bp, synthetic construct
  source 1..2307: mol_type = other DNA
atggccttaccagtgaccgccttgctcctgccgctggccttgctgctccacgccgccaggccggaagtgcagctggttgaatctggcggaggactggttcagcctggcggatctctgagactgagctgtgaagccagcggcttcgccagcgacgattacatcatcggctggttcagacaggcccctggcaaagagagagagggcgtcagctgcatcagctctaagtacgccaacaccgtgtacaccgacagcgtgaagggcagattcagactgagcagaggcaccgccaagaataccgtgtacctccagatgagcgccctgaagcctgaggataccgccgtgtactactgcgctatggacagccgcagagtgacatgccctgagatcagcaccatgcaccggaacttcgattcttggggccagggcacactggtcacagtgtcatctggtaccggcggaggcggatctggcggcggaggtagcggtggcggaggatctgaattcgacatcgtgatgacacagagccctgatagcctggccgtgtctctgggagagagagccaccattaactgcaaggccagccagagcgtggactacgacggcgacagcttcctgaactggtatcagcagaagcccggccagcctcctaagctgctgatctacgccgccagcaatctggaaagcggcgtgccaagcagattttccggctctggcagcggcaccgatttcaccctgacaatatccagcctccagcctgaggacgtggccgtgtactactgccagcagagcaacgacgaccctctgacctttggacagggcaccaaggtggaaatcaaactcgaggacctgaagaacgtgttcccacctgaggtggccgtgttcgagcctagcgaggccgagatcagccacacccagaaagccaccctcgtgtgcctggctaccggcttctaccccgaccatgtggaactgtcttggtgggtcaacggcaaagaggtgcacagcggcgtgtgtaccgacccccagccactgaaagaacagcccgccctgaacgacagccggtactgcctgagcagcagactgagagtgtccgccaccttctggcagaacccccggaaccacttcagatgccaggtgcagttctacggcctgagcgagaacgacgagtggacccaggacagagccaagcccgtgacccagatcgtgtctgccgaagcctggggcagagccgattgcgacgtgaagctggtggaaaagagcttcgagacagacaccaacctgaacttccagaacctgagcgtgatcggcttcagaatcctgctgctgaaagtggccggctttaacctgctgatgaccctgcggctgtggtccagcagggccaagcgatctggatctggagcaacaaacttctcactactcaaacaagcaggtgacgtggaggagaatcccgggcctactagtatggactggatttggcgcatccttttccttgtcggcgctgctaccggcgcgcattccttcgaacaagttcagctggttcagagcggagccgaagtgaagaaacctggggcctctgtgaaggtgtcctgcaaagccagcggctacacctttaccagctactggatcaactgggtccgacaggcccctggacaaggactggaatggatgggacagatccttccaggcggaggggacaccaactacaacggcaagttcaagggcagagtgaccatcaccgccgacaccagcacaagcaccgcctacatggaactgagcagcctgagaagcgaggacaccgccgtgtattattgcaccagacgggtgcccatccggctggattattggggacagggaaccctggtcaccgtgtctagtacgcgtatccagaaccctgatcctgccgtgtaccagctgcgggatagcaagagcagcgacaagagcgtgtgtctgttcaccgacttcgacagccagaccaacgtgtcccagagcaaggactccgacgtgtacatcaccgataagtgcgtgctggacatgcggagcatggacttcaagagcaactccgccgtggcctggtccaacaagtccgatttcgcctgcgccaacgccttcaacaacagcattatccccgaggacacattcttcccaagccccgagagcagctgcggctttaccagcgagagctaccagcagggcgtgctgagcgccaccatcctgtacgagatcctgctgggcaaggccaccctgtacgccgtgctggtgtctgccctggtgctgatggctatggtcaagcggaaggacagccggggataa

SEQ ID NO: 5936 - DNA, 2304 bp, synthetic construct
  source 1..2304: mol_type = other DNA
atggccttaccagtgaccgccttgctcctgccgctggccttgctgctccacgccgccaggccggaagtgcagctggttgaatctggcggaggactggttcagcctggcggatctctgagactgtcttgtgccgcctctggcttcgccagcgactactatatcatcggctggttcagacaggcccctggcaaagagagagagggcgtcagctgtatcagcagcagatacgccaacaccaactacgccgacagcgtgaagggcagattcaccatcagccgggacaacgccaagaacaccgtgtacctccagatgaacagcctgaagcctgaggacaccgccgtgtactactgtgccgccgacaccagaagatacacctgtcctgacattgccaccatgcaccggaacttcgattcttggggccagggcacactggtcaccgtttcttctggtaccggcggaggcggatctggcggcggaggtagcggtggcggaggatctgaattcgacatcgtgatgacacagagccctgatagcctggccgtgtctctgggagagagagccaccattaactgcaaggccagccagagcgtggactacgacggcgacagcttcctgaactggtatcagcagaagcccggccagcctcctaagctgctgatctacgccgccagcaatctggaaagcggcgtgccaagcagattttccggctctggcagcggcaccgatttcaccctgacaatatccagcctccagcctgaggacgtggccgtgtactactgccagcagagcaacgacgaccctctgacctttggacagggcaccaaggtggaaatcaaactcgagatccagaaccctgatcctgccgtgtaccagctgcgggatagcaagagcagcgacaagagcgtgtgtctgttcaccgacttcgacagccagaccaacgtgtcccagagcaaggactccgacgtgtacatcaccgataagtgcgtgctggacatgcggagcatggacttcaagagcaactccgccgtggcctggtccaacaagtccgatttcgcctgcgccaacgccttcaacaacagcattatccccgaggacacattcttcccaagccccgagagcagctgcggctttaccagcgagagctaccagcagggcgtgctgagcgccaccatcctgtacgagatcctgctgggcaaggccaccctgtacgccgtgctggtgtctgccctggtgctgatggctatggtcaagcggaaggacagccggggaagggccaagcgatctggatctggagcaacaaacttctcactactcaaacaagcaggtgacgtggaggagaatcccgggcctactagtatggactggatttggcgcatccttttccttgtcggcgctgctaccggcgcgcattccttcgaacaagttcagctggttcagagcggagccgaagtgaagaaacctggggcctctgtgaaggtgtcctgcaaagccagcggctacacctttaccagctactggatcaactgggtccgacaggcccctggacaaggactggaatggatgggacagatccttccaggcggaggggacaccaactacaacggcaagttcaagggcagagtgaccatcaccgccgacaccagcacaagcaccgcctacatggaactgagcagcctgagaagcgaggacaccgccgtgtattattgcaccagacgggtgcccatccggctggattattggggacagggaaccctggtcaccgtgtctagtacgcgtgacctgaagaacgtgttcccacctgaggtggccgtgttcgagcctagcgaggccgagatcagccacacccagaaagccaccctcgtgtgcctggctaccggcttctaccccgaccatgtggaactgtcttggtgggtcaacggcaaagaggtgcacagcggcgtgtgtaccgacccccagccactgaaagaacagcccgccctgaacgacagccggtactgcctgagcagcagactgagagtgtccgccaccttctggcagaacccccggaaccacttcagatgccaggtgcagttctacggcctgagcgagaacgacgagtggacccaggacagagccaagcccgtgacccagatcgtgtctgccgaagcctggggcagagccgattgcgacgtgaagctggtggaaaagagcttcgagacagacaccaacctgaacttccagaacctgagcgtgatcggcttcagaatcctgctgctgaaagtggccggctttaacctgctgatgaccctgcggctgtggtccagc

SEQ ID NO: 5937 - DNA, 2304 bp, synthetic construct
  source 1..2304: mol_type = other DNA
atggccttaccagtgaccgccttgctcctgccgctggccttgctgctccacgccgccaggccggaagtgcagctggttgaatctggcggaggactggttcagcctggcggatctctgagactgagctgtgaagccagcggcttcgccagcgacgattacatcatcggctggttcagacaggcccctggcaaagagagagagggcgtcagctgcatcagctctaagtacgccaacaccgtgtacaccgacagcgtgaagggcagattcagactgagcagaggcaccgccaagaataccgtgtacctccagatgagcgccctgaagcctgaggataccgccgtgtactactgcgctatggacagccgcagagtgacatgccctgagatcagcaccatgcaccggaacttcgattcttggggccagggcacactggtcacagtgtcatctggtaccggcggaggcggatctggcggcggaggtagcggtggcggaggatctgaattcgacatcgtgatgacacagagccctgatagcctggccgtgtctctgggagagagagccaccattaactgcaaggccagccagagcgtggactacgacggcgacagcttcctgaactggtatcagcagaagcccggccagcctcctaagctgctgatctacgccgccagcaatctggaaagcggcgtgccaagcagattttccggctctggcagcggcaccgatttcaccctgacaatatccagcctccagcctgaggacgtggccgtgtactactgccagcagagcaacgacgaccctctgacctttggacagggcaccaaggtggaaatcaaactcgagatccagaaccctgatcctgccgtgtaccagctgcgggatagcaagagcagcgacaagagcgtgtgtctgttcaccgacttcgacagccagaccaacgtgtcccagagcaaggactccgacgtgtacatcaccgataagtgcgtgctggacatgcggagcatggacttcaagagcaactccgccgtggcctggtccaacaagtccgatttcgcctgcgccaacgccttcaacaacagcattatccccgaggacacattcttcccaagccccgagagcagctgcggctttaccagcgagagctaccagcagggcgtgctgagcgccaccatcctgtacgagatcctgctgggcaaggccaccctgtacgccgtgctggtgtctgccctggtgctgatggctatggtcaagcggaaggacagccggggaagggccaagcgatctggatctggagcaacaaacttctcactactcaaacaagcaggtgacgtggaggagaatcccgggcctactagtatggactggatttggcgcatccttttccttgtcggcgctgctaccggcgcgcattccttcgaacaagttcagctggttcagagcggagccgaagtgaagaaacctggggcctctgtgaaggtgtcctgcaaagccagcggctacacctttaccagctactggatcaactgggtccgacaggcccctggacaaggactggaatggatgggacagatccttccaggcggaggggacaccaactacaacggcaagttcaagggcagagtgaccatcaccgccgacaccagcacaagcaccgcctacatggaactgagcagcctgagaagcgaggacaccgccgtgtattattgcaccagacgggtgcccatccggctggattattggggacagggaaccctggtcaccgtgtctagtacgcgtgacctgaagaacgtgttcccacctgaggtggccgtgttcgagcctagcgaggccgagatcagccacacccagaaagccaccctcgtgtgcctggctaccggcttctaccccgaccatgtggaactgtcttggtgggtcaacggcaaagaggtgcacagcggcgtgtgtaccgacccccagccactgaaagaacagcccgccctgaacgacagccggtactgcctgagcagcagactgagagtgtccgccaccttctggcagaacccccggaaccacttcagatgccaggtgcagttctacggcctgagcgagaacgacgagtggacccaggacagagccaagcccgtgacccagatcgtgtctgccgaagcctggggcagagccgattgcgacgtgaagctggtggaaaagagcttcgagacagacaccaacctgaacttccagaacctgagcgtgatcggcttcagaatcctgctgctgaaagtggccggctttaacctgctgatgaccctgcggctgtggtccagc

SEQ ID NO: 5938 - DNA, 2277 bp, synthetic construct
  source 1..2277: mol_type = other DNA
atggccttaccagtgaccgccttgctcctgccgctggccttgctgctccacgccgccaggccgcaagtcaaactggaagaaagcggtggcggcctggtgcaacctggcgaatctctgagactgagctgtagcgccagcggctccatcttcaaggtgttcagagtgttcgccatgagctggtacaggcaaggccctggcaagcagagagagctggtcgcctctatcagcagcggcgagacaaccacatacgccgaatctgtgaaaggccggttcaccatcagccgggataatgccaagaataccgcctatctccagatggactccctgaagcctgaagatacagctgtgtactactgcaacgccgaccataccttcaccggcgatttttggggccagggaacccaagtgaccgtgtctagtggtaccggcggaggcggatctggcggcggaggtagcggtggcggaggatctgaattcgacatcgtgatgacacagagccctgatagcctggccgtgtctctgggagagagagccaccattaactgcaaggccagccagagcgtggactacgacggcgacagcttcctgaactggtatcagcagaagcccggccagcctcctaagctgctgatctacgccgccagcaatctggaaagcggcgtgccaagcagattttccggctctggcagcggcaccgatttcaccctgacaatatccagcctccagcctgaggacgtggccgtgtactactgccagcagagcaacgacgaccctctgacctttggacagggcaccaaggtggaaatcaaactcgagatccagaaccctgatcctgccgtgtaccagctgcgggatagcaagagcagcgacaagagcgtgtgtctgttcaccgacttcgacagccagaccaacgtgtcccagagcaaggactccgacgtgtacatcaccgataagtgcgtgctggacatgcggagcatggacttcaagagcaactccgccgtggcctggtccaacaagtccgatttcgcctgcgccaacgccttcaacaacagcattatccccgaggacacattcttcccaagccccgagagcagctgcggctttaccagcgagagctaccagcagggcgtgctgagcgccaccatcctgtacgagatcctgctgggcaaggccaccctgtacgccgtgctggtgtctgccctggtgctgatggctatggtcaagcggaaggacagccggggaagggccaagcgatctggatctggagcaacaaacttctcactactcaaacaagcaggtgacgtggaggagaatcccgggcctactagtatggactggatttggcgcatccttttccttgtcggcgctgctaccggcgcgcattccttcgaacaagttcagctggttcagagcggagccgaagtgaagaaacctggggcctctgtgaaggtgtcctgcaaagccagcggctacacctttaccagctactggatcaactgggtccgacaggcccctggacaaggactggaatggatgggacagatccttccaggcggaggggacaccaactacaacggcaagttcaagggcagagtgaccatcaccgccgacaccagcacaagcaccgcctacatggaactgagcagcctgagaagcgaggacaccgccgtgtattattgcaccagacgggtgcccatccggctggattattggggacagggaaccctggtcaccgtgtctagtacgcgtgacctgaagaacgtgttcccacctgaggtggccgtgttcgagcctagcgaggccgagatcagccacacccagaaagccaccctcgtgtgcctggctaccggcttctaccccgaccatgtggaactgtcttggtgggtcaacggcaaagaggtgcacagcggcgtgtgtaccgacccccagccactgaaagaacagcccgccctgaacgacagccggtactgcctgagcagcagactgagagtgtccgccaccttctggcagaacccccggaaccacttcagatgccaggtgcagttctacggcctgagcgagaacgacgagtggacccaggacagagccaagcccgtgacccagatcgtgtctgccgaagcctggggcagagccgattgcgacgtgaagctggtggaaaagagcttcgagacagacaccaacctgaacttccagaacctgagcgtgatcggcttcagaatcctgctgctgaaagtggccggctttaacctgctgatgaccctgcggctgtggtccagc

SEQ ID NO: 5939 - DNA, 2283 bp, synthetic construct
  source 1..2283: mol_type = other DNA
atggccttaccagtgaccgccttgctcctgccgctggccttgctgctccacgccgccaggccggacatcgtgatgacacagagccctgatagcctggccgtgtctctgggagagagagccaccattaactgcaaggccagccagagcgtggactacgacggcgacagcttcctgaactggtatcagcagaagcccggccagcctcctaagctgctgatctacgccgccagcaatctggaaagcggcgtgccaagcagattttccggctctggcagcggcaccgatttcaccctgacaatatccagcctccagcctgaggacgtggccgtgtactactgccagcagagcaacgacgaccctctgacctttggacagggcaccaaggtggaaatcaaactcgaggacctgaagaacgtgttcccacctgaggtggccgtgttcgagcctagcgaggccgagatcagccacacccagaaagccaccctcgtgtgcctggctaccggcttctaccccgaccatgtggaactgtcttggtgggtcaacggcaaagaggtgcacagcggcgtgtgtaccgacccccagccactgaaagaacagcccgccctgaacgacagccggtactgcctgagcagcagactgagagtgtccgccaccttctggcagaacccccggaaccacttcagatgccaggtgcagttctacggcctgagcgagaacgacgagtggacccaggacagagccaagcccgtgacccagatcgtgtctgccgaagcctggggcagagccgattgcgacgtgaagctggtggaaaagagcttcgagacagacaccaacctgaacttccagaacctgagcgtgatcggcttcagaatcctgctgctgaaagtggccggctttaacctgctgatgaccctgcggctgtggtccagcagggccaagcgatctggatctggagcaacaaacttctcactactcaaacaagcaggtgacgtggaggagaatcccgggcctactagtgccaccatggactggatttggcgcatccttttccttgtcggcgctgctaccggcgcccattccgggcccgaagtgcagctggttgaatctggcggaggactggttcaggctggcggatctctgagactgtcttgtgccgccagcggcagaacctttagcatgggctggtttagacaggcccctggcaaagagagagagttcgtcgccgccatcacatactctggcggcagcccttactacgccgactctgtgaagggcagattcaccatcagccgggacaacgccaagaacaccgtgtacctccagatgaacagcctgaagcctgaggacaccgccgtgtactactgcgccgccaatccaacatacggcagcgactggaacgccgagaattggggccagggaacccaagtgacagtgtctagcggatccggcggcggaggatctggcggaggcggatctgggggcggaggctctttcgaacaagttcagctggttcagagcggagccgaagtgaagaaacctggggcctctgtgaaggtgtcctgcaaagccagcggctacacctttaccagctactggatcaactgggtccgacaggcccctggacaaggactggaatggatgggacagatccttccaggcggaggggacaccaactacaacggcaagttcaagggcagagtgaccatcaccgccgacaccagcacaagcaccgcctacatggaactgagcagcctgagaagcgaggacaccgccgtgtattattgcaccagacgggtgcccatccggctggattattggggacagggaaccctggtcaccgtgtctagtacgcgtatccagaaccctgatcctgccgtgtaccagctgcgggatagcaagagcagcgacaagagcgtgtgtctgttcaccgacttcgacagccagaccaacgtgtcccagagcaaggactccgacgtgtacatcaccgataagtgcgtgctggacatgcggagcatggacttcaagagcaactccgccgtggcctggtccaacaagtccgatttcgcctgcgccaacgccttcaacaacagcattatccccgaggacacattcttcccaagccccgagagcagctgcggctttaccagcgagagctaccagcagggcgtgctgagcgccaccatcctgtacgagatcctgctgggcaaggccaccctgtacgccgtgctggtgtctgccctggtgctgatggctatggtcaagcggaaggacagccggggataa

SEQ ID NO: 5940 - DNA, 2286 bp, synthetic construct
  source 1..2286: mol_type = other DNA
atggccttaccagtgaccgccttgctcctgccgctggccttgctgctccacgccgccaggccggacatcgtgatgacacagagccctgatagcctggccgtgtctctgggagagagagccaccattaactgcaaggccagccagagcgtggactacgacggcgacagcttcctgaactggtatcagcagaagcccggccagcctcctaagctgctgatctacgccgccagcaatctggaaagcggcgtgccaagcagattttccggctctggcagcggcaccgatttcaccctgacaatatccagcctccagcctgaggacgtggccgtgtactactgccagcagagcaacgacgaccctctgacctttggacagggcaccaaggtggaaatcaaactcgaggacctgaagaacgtgttcccacctgaggtggccgtgttcgagcctagcgaggccgagatcagccacacccagaaagccaccctcgtgtgcctggctaccggcttctaccccgaccatgtggaactgtcttggtgggtcaacggcaaagaggtgcacagcggcgtgtgtaccgacccccagccactgaaagaacagcccgccctgaacgacagccggtactgcctgagcagcagactgagagtgtccgccaccttctggcagaacccccggaaccacttcagatgccaggtgcagttctacggcctgagcgagaacgacgagtggacccaggacagagccaagcccgtgacccagatcgtgtctgccgaagcctggggcagagccgattgcgacgtgaagctggtggaaaagagcttcgagacagacaccaacctgaacttccagaacctgagcgtgatcggcttcagaatcctgctgctgaaagtggccggctttaacctgctgatgaccctgcggctgtggtccagcagggccaagcgatctggatctggagcaacaaacttctcactactcaaacaagcaggtgacgtggaggagaatcccgggcctactagtgccaccatggactggatttggcgcatccttttccttgtcggcgctgctaccggcgcccattccgggcccgaagtgcaactggtggaatctgggggcggactggtgcagccaggcggaagtctgaggctgtcttgtgccgcctccggcagcatcttcggcttcaacgacatggcctggtatcggcaggctcccggaaaacagcgcgagctggtggctctgattagcagagtgggcgtgaccagcagcgccgactctgtgaagggcagattcacaatctccagagtgaacgccaaggatacagtgtacctccagatgaactctctgaaacctgaggatacagcagtgtactattgctacatggaccagcggctggacggcagcacactggcctactggggacagggaactcaagtgacagtgtctagcggatccggcggcggaggatctggcggaggcggatctgggggcggaggctctttcgaacaagttcagctggttcagagcggagccgaagtgaagaaacctggggcctctgtgaaggtgtcctgcaaagccagcggctacacctttaccagctactggatcaactgggtccgacaggcccctggacaaggactggaatggatgggacagatccttccaggcggaggggacaccaactacaacggcaagttcaagggcagagtgaccatcaccgccgacaccagcacaagcaccgcctacatggaactgagcagcctgagaagcgaggacaccgccgtgtattattgcaccagacgggtgcccatccggctggattattggggacagggaaccctggtcaccgtgtctagtacgcgtatccagaaccctgatcctgccgtgtaccagctgcgggatagcaagagcagcgacaagagcgtgtgtctgttcaccgacttcgacagccagaccaacgtgtcccagagcaaggactccgacgtgtacatcaccgataagtgcgtgctggacatgcggagcatggacttcaagagcaactccgccgtggcctggtccaacaagtccgatttcgcctgcgccaacgccttcaacaacagcattatccccgaggacacattcttcccaagccccgagagcagctgcggctttaccagcgagagctaccagcagggcgtgctgagcgccaccatcctgtacgagatcctgctgggcaaggccaccctgtacgccgtgctggtgtctgccctggtgctgatggctatggtcaagcggaaggacagccggggataa

SEQ ID NO: 5941 - DNA, 2274 bp, synthetic construct
  source 1..2274: mol_type = other DNA
atggccttaccagtgaccgccttgctcctgccgctggccttgctgctccacgccgccaggccggacatcgtgatgacacagagccctgatagcctggccgtgtctctgggagagagagccaccattaactgcaaggccagccagagcgtggactacgacggcgacagcttcctgaactggtatcagcagaagcccggccagcctcctaagctgctgatctacgccgccagcaatctggaaagcggcgtgccaagcagattttccggctctggcagcggcaccgatttcaccctgacaatatccagcctccagcctgaggacgtggccgtgtactactgccagcagagcaacgacgaccctctgacctttggacagggcaccaaggtggaaatcaaactcgaggacctgaagaacgtgttcccacctgaggtggccgtgttcgagcctagcgaggccgagatcagccacacccagaaagccaccctcgtgtgcctggctaccggcttctaccccgaccatgtggaactgtcttggtgggtcaacggcaaagaggtgcacagcggcgtgtgtaccgacccccagccactgaaagaacagcccgccctgaacgacagccggtactgcctgagcagcagactgagagtgtccgccaccttctggcagaacccccggaaccacttcagatgccaggtgcagttctacggcctgagcgagaacgacgagtggacccaggacagagccaagcccgtgacccagatcgtgtctgccgaagcctggggcagagccgattgcgacgtgaagctggtggaaaagagcttcgagacagacaccaacctgaacttccagaacctgagcgtgatcggcttcagaatcctgctgctgaaagtggccggctttaacctgctgatgaccctgcggctgtggtccagcagggccaagcgatctggatctggagcaacaaacttctcactactcaaacaagcaggtgacgtggaggagaatcccgggcctactagtgccaccatggactggatttggcgcatccttttccttgtcggcgctgctaccggcgcccattccgggcccgaggtgcagctggttgaatctggcggaggactggttcaggctggcggatctctgagactgtcttgtgccgccagcggctctgtgttcagcggcaatgtgatgggctggtacagacaggcccctggcaaagaaagagagtgggttgccgccattgccagcggcggcagcatctactacagagactctgtgaagggcagattcaccatcagccgggacaacgccaagaacaccgtgtacctccagatgaacagcctgaagcctgaggacaccgccgtgtactactgcaactctcaccctcctacactgccctattggggcctgggaacccaagtgacagtgtcctctggatccggcggcggaggatctggcggaggcggatctgggggcggaggctctttcgaacaagttcagctggttcagagcggagccgaagtgaagaaacctggggcctctgtgaaggtgtcctgcaaagccagcggctacacctttaccagctactggatcaactgggtccgacaggcccctggacaaggactggaatggatgggacagatccttccaggcggaggggacaccaactacaacggcaagttcaagggcagagtgaccatcaccgccgacaccagcacaagcaccgcctacatggaactgagcagcctgagaagcgaggacaccgccgtgtattattgcaccagacgggtgcccatccggctggattattggggacagggaaccctggtcaccgtgtctagtacgcgtatccagaaccctgatcctgccgtgtaccagctgcgggatagcaagagcagcgacaagagcgtgtgtctgttcaccgacttcgacagccagaccaacgtgtcccagagcaaggactccgacgtgtacatcaccgataagtgcgtgctggacatgcggagcatggacttcaagagcaactccgccgtggcctggtccaacaagtccgatttcgcctgcgccaacgccttcaacaacagcattatccccgaggacacattcttcccaagccccgagagcagctgcggctttaccagcgagagctaccagcagggcgtgctgagcgccaccatcctgtacgagatcctgctgggcaaggccaccctgtacgccgtgctggtgtctgccctggtgctgatggctatggtcaagcggaaggacagccggggataa

SEQ ID NO: 5942 - DNA, 2268 bp, synthetic construct
  source 1..2268: mol_type = other DNA
atggccttaccagtgaccgccttgctcctgccgctggccttgctgctccacgccgccaggccggacatcgtgatgacacagagccctgatagcctggccgtgtctctgggagagagagccaccattaactgcaaggccagccagagcgtggactacgacggcgacagcttcctgaactggtatcagcagaagcccggccagcctcctaagctgctgatctacgccgccagcaatctggaaagcggcgtgccaagcagattttccggctctggcagcggcaccgatttcaccctgacaatatccagcctccagcctgaggacgtggccgtgtactactgccagcagagcaacgacgaccctctgacctttggacagggcaccaaggtggaaatcaaactcgaggacctgaagaacgtgttcccacctgaggtggccgtgttcgagcctagcgaggccgagatcagccacacccagaaagccaccctcgtgtgcctggctaccggcttctaccccgaccatgtggaactgtcttggtgggtcaacggcaaagaggtgcacagcggcgtgtgtaccgacccccagccactgaaagaacagcccgccctgaacgacagccggtactgcctgagcagcagactgagagtgtccgccaccttctggcagaacccccggaaccacttcagatgccaggtgcagttctacggcctgagcgagaacgacgagtggacccaggacagagccaagcccgtgacccagatcgtgtctgccgaagcctggggcagagccgattgcgacgtgaagctggtggaaaagagcttcgagacagacaccaacctgaacttccagaacctgagcgtgatcggcttcagaatcctgctgctgaaagtggccggctttaacctgctgatgaccctgcggctgtggtccagcagggccaagcgatctggatctggagcaacaaacttctcactactcaaacaagcaggtgacgtggaggagaatcccgggcctactagtgccaccatggactggatttggcgcatccttttccttgtcggcgctgctaccggcgcccattccgggcccgaagttcagctgctggaatctggcggaggactcgttcaacctggcggctctctgagactgagctgtgccgcttctggcttcagcttctctagctacgccctgagctgggttcgacaagctcccggaaagggccttgaatgggtgtccagcatcggcgagaatgacggcaccacagactatgccgatgccgtgaaaggccggtttaccatcagcagagacaattccaagaacacgctctatctgcaaatgaactccctgcgcgtggaagatacagccgtgtattattgcgtgaaggacggcatccactggggacagggaaccctggttacagtgtctagcggatccggcggcggaggatctggcggaggcggatctgggggcggaggctctttcgaacaagttcagctggttcagagcggagccgaagtgaagaaacctggggcctctgtgaaggtgtcctgcaaagccagcggctacacctttaccagctactggatcaactgggtccgacaggcccctggacaaggactggaatggatgggacagatccttccaggcggaggggacaccaactacaacggcaagttcaagggcagagtgaccatcaccgccgacaccagcacaagcaccgcctacatggaactgagcagcctgagaagcgaggacaccgccgtgtattattgcaccagacgggtgcccatccggctggattattggggacagggaaccctggtcaccgtgtctagtacgcgtatccagaaccctgatcctgccgtgtaccagctgcgggatagcaagagcagcgacaagagcgtgtgtctgttcaccgacttcgacagccagaccaacgtgtcccagagcaaggactccgacgtgtacatcaccgataagtgcgtgctggacatgcggagcatggacttcaagagcaactccgccgtggcctggtccaacaagtccgatttcgcctgcgccaacgccttcaacaacagcattatccccgaggacacattcttcccaagccccgagagcagctgcggctttaccagcgagagctaccagcagggcgtgctgagcgccaccatcctgtacgagatcctgctgggcaaggccaccctgtacgccgtgctggtgtctgccctggtgctgatggctatggtcaagcggaaggacagccggggataa

SEQ ID NO: 5943 - DNA, 3375 bp, synthetic construct
  source 1..3375: mol_type = other DNA
atgggacccagactgctgttttgggctctgctgtgtctgctcggcacaggacctgttgaagctggcgtgacacagagccccacacacctgattaagaccagaggccagcaggccacactgagatgcagccctatcagcggccacaccagcgtgtactggtatcagcaggctctcggactgggcctccagttcctgctttggtacgacgagggcgaagagagaaaccggggcaacttccctcctcggttttccggcagacagttccccaactacagcagcgagctgaacgtgaacgccctggaactggaagatagcgccctgtacctgtgtgcctcttctcttggtggacctcgcggactggctggactgagaggggatgagcagtttttcggccctggcaccagactgaccgtgctggaaggtaccggcggaggcggatctggcggcggagaattcgacatcgtgatgacacagagccctgatagcctggccgtgtctctgggagagagagccaccattaactgcaaggccagccagagcgtggactacgacggcgacagcttcctgaactggtatcagcagaagcccggccagcctcctaagctgctgatctacgccgccagcaatctggaaagcggcgtgccaagcagattttccggctctggcagcggcaccgatttcaccctgacaatatccagcctccagcctgaggacgtggccgtgtactactgccagcagagcaacgacgaccctctgacctttggacagggcaccaaggtggaaatcaaactcgaggacctgaagaacgtgttcccacctgaggtggccgtgttcgagcctagcgaggccgagatcagccacacccagaaagccaccctcgtgtgcctggctaccggcttctaccccgaccatgtggaactgtcttggtgggtcaacggcaaagaggtgcacagcggcgtgtgtaccgacccccagccactgaaagaacagcccgccctgaacgacagccggtactgcctgagcagcagactgagagtgtccgccaccttctggcagaacccccggaaccacttcagatgccaggtgcagttctacggcctgagcgagaacgacgagtggacccaggacagagccaagcccgtgacccagatcgtgtctgccgaagcctggggcagagccgattgcgacgtgaagctggtggaaaagagcttcgagacagacaccaacctgaacttccagaacctgagcgtgatcggcttcagaatcctgctgctgaaagtggccggctttaacctgctgatgaccctgcggctgtggtccagcagggccaagcgatctggatctggagcaacaaacttctcactactcaaacaagcaggtgacgtggaggagaatcccgggcctactagtgccaccatggactggatttggcgcatccttttccttgtcggcgctgctaccggcgcccattccgggcccgaagtgcagctggttgaatctggcggaggactggttcaggctggcggatctctgagactgtcttgtgccgccagcggcagaacctttagcatgggctggtttagacaggcccctggcaaagagagagagttcgtcgccgccatcacatactctggcggcagcccttactacgccgactctgtgaagggcagattcaccatcagccgggacaacgccaagaacaccgtgtacctccagatgaacagcctgaagcctgaggacaccgccgtgtactactgcgccgccaatccaacatacggcagcgactggaacgccgagaattggggccagggaacccaagtgacagtgtctagcggatccggcggcggaggatctggcggaggcggatctgggggcggaggctctttcgaacaagttcagctggttcagagcggagccgaagtgaagaaacctggggcctctgtgaaggtgtcctgcaaagccagcggctacacctttaccagctactggatcaactgggtccgacaggcccctggacaaggactggaatggatgggacagatccttccaggcggaggggacaccaactacaacggcaagttcaagggcagagtgaccatcaccgccgacaccagcacaagcaccgcctacatggaactgagcagcctgagaagcgaggacaccgccgtgtattattgcaccagacgggtgcccatccggctggattattggggacagggaaccctggtcaccgtgtctagtacgcgtatccagaaccctgatcctgccgtgtaccagctgcgggatagcaagagcagcgacaagagcgtgtgtctgttcaccgacttcgacagccagaccaacgtgtcccagagcaaggactccgacgtgtacatcaccgataagtgcgtgctggacatgcggagcatggacttcaagagcaactccgccgtggcctggtccaacaagtccgatttcgcctgcgccaacgccttcaacaacagcattatccccgaggacacattcttcccaagccccgagagcagctgcggctttaccagcgagagctaccagcagggcgtgctgagcgccaccatcctgtacgagatcctgctgggcaaggccaccctgtacgccgtgctggtgtctgccctggtgctgatggctatggtcaagcggaaggacagccggggacgcgccaagagaagcggatctggcgtgaagcagaccctgaatttcgacctgctgaagctggctggcgacgtggaatccaacccaggcccttctagaggccatatgaccgagtacaagcccacggtgcgcctcgccacccgcgacgacgtccccagggccgtacgcaccctcgccgccgcgttcgccgactaccccgccacgcgccacaccgtcgatccggaccgccacatcgagcgggtcaccgagctgcaagaactcttcctcacgcgcgtcgggctcgacatcggcaaggtgtgggtcgcggacgacggcgccgcggtggcggtctggaccacgccggagagcgtcgaagcgggggcggtgttcgccgagatcggcccgcgcatggccgagttgagcggttcccggctggccgcgcagcaacagatggaaggcctcctggcgccgcaccggcccaaggagcccgcgtggttcctggccaccgtcggcgtctcgcccgaccaccagggcaagggtctgggcagcgccgtcgtgctccccggagtggaggcggccgagcgcgccggggtgcccgccttcctggagacctccgcgccccgcaacctccccttctacgagcggctcggcttcaccgtcaccgccgacgtcgaggtgcccgaaggaccgcgcacctggtgcatgacccgcaagcccggtgcctga

SEQ ID NO: 5944 - DNA, 3372 bp, synthetic construct
  source 1..3372: mol_type = other DNA
atgggacccagactgctgttttgggctctgctgtgtctgctcggcacaggacctgttgaagctggcgtgacacagagccccacacacctgattaagaccagaggccagcaggccacactgagatgcagccctatcagcggccacaccagcgtgtactggtatcagcaggctctcggactgggcctccagttcctgctttggtacgacgagggcgaagagagaaaccggggcaacttccctcctcggttttccggcagacagttccccaactacagcagcgagctgaacgtgaacgccctggaactggaagatagcgccctgtacctgtgtgccagctctctcggcggagatgaactgggagccgatggcaacgagcagttctttggccctggcaccagactgaccgtgctggaaggtaccggcggaggcggatctggcggcggaagcgaattcgacatcgtgatgacacagagccctgatagcctggccgtgtctctgggagagagagccaccattaactgcaaggccagccagagcgtggactacgacggcgacagcttcctgaactggtatcagcagaagcccggccagcctcctaagctgctgatctacgccgccagcaatctggaaagcggcgtgccaagcagattttccggctctggcagcggcaccgatttcaccctgacaatatccagcctccagcctgaggacgtggccgtgtactactgccagcagagcaacgacgaccctctgacctttggacagggcaccaaggtggaaatcaaactcgaggacctgaagaacgtgttcccacctgaggtggccgtgttcgagcctagcgaggccgagatcagccacacccagaaagccaccctcgtgtgcctggctaccggcttctaccccgaccatgtggaactgtcttggtgggtcaacggcaaagaggtgcacagcggcgtgtgtaccgacccccagccactgaaagaacagcccgccctgaacgacagccggtactgcctgagcagcagactgagagtgtccgccaccttctggcagaacccccggaaccacttcagatgccaggtgcagttctacggcctgagcgagaacgacgagtggacccaggacagagccaagcccgtgacccagatcgtgtctgccgaagcctggggcagagccgattgcgacgtgaagctggtggaaaagagcttcgagacagacaccaacctgaacttccagaacctgagcgtgatcggcttcagaatcctgctgctgaaagtggccggctttaacctgctgatgaccctgcggctgtggtccagcagggccaagcgatctggatctggagcaacaaacttctcactactcaaacaagcaggtgacgtggaggagaatcccgggcctactagtgccaccatggactggatttggcgcatccttttccttgtcggcgctgctaccggcgcccattccgggcccgaagtgcagctggttgaatctggcggaggactggttcaggctggcggatctctgagactgtcttgtgccgccagcggcagaacctttagcatgggctggtttagacaggcccctggcaaagagagagagttcgtcgccgccatcacatactctggcggcagcccttactacgccgactctgtgaagggcagattcaccatcagccgggacaacgccaagaacaccgtgtacctccagatgaacagcctgaagcctgaggacaccgccgtgtactactgcgccgccaatccaacatacggcagcgactggaacgccgagaattggggccagggaacccaagtgacagtgtctagcggatccggcggcggaggatctggcggaggcggatctgggggcggaggctctttcgaacaagttcagctggttcagagcggagccgaagtgaagaaacctggggcctctgtgaaggtgtcctgcaaagccagcggctacacctttaccagctactggatcaactgggtccgacaggcccctggacaaggactggaatggatgggacagatccttccaggcggaggggacaccaactacaacggcaagttcaagggcagagtgaccatcaccgccgacaccagcacaagcaccgcctacatggaactgagcagcctgagaagcgaggacaccgccgtgtattattgcaccagacgggtgcccatccggctggattattggggacagggaaccctggtcaccgtgtctagtacgcgtatccagaaccctgatcctgccgtgtaccagctgcgggatagcaagagcagcgacaagagcgtgtgtctgttcaccgacttcgacagccagaccaacgtgtcccagagcaaggactccgacgtgtacatcaccgataagtgcgtgctggacatgcggagcatggacttcaagagcaactccgccgtggcctggtccaacaagtccgatttcgcctgcgccaacgccttcaacaacagcattatccccgaggacacattcttcccaagccccgagagcagctgcggctttaccagcgagagctaccagcagggcgtgctgagcgccaccatcctgtacgagatcctgctgggcaaggccaccctgtacgccgtgctggtgtctgccctggtgctgatggctatggtcaagcggaaggacagccggggacgcgccaagagaagcggatctggcgtgaagcagaccctgaatttcgacctgctgaagctggctggcgacgtggaatccaacccaggcccttctagaggccatatgaccgagtacaagcccacggtgcgcctcgccacccgcgacgacgtccccagggccgtacgcaccctcgccgccgcgttcgccgactaccccgccacgcgccacaccgtcgatccggaccgccacatcgagcgggtcaccgagctgcaagaactcttcctcacgcgcgtcgggctcgacatcggcaaggtgtgggtcgcggacgacggcgccgcggtggcggtctggaccacgccggagagcgtcgaagcgggggcggtgttcgccgagatcggcccgcgcatggccgagttgagcggttcccggctggccgcgcagcaacagatggaaggcctcctggcgccgcaccggcccaaggagcccgcgtggttcctggccaccgtcggcgtctcgcccgaccaccagggcaagggtctgggcagcgccgtcgtgctccccggagtggaggcggccgagcgcgccggggtgcccgccttcctggagacctccgcgccccgcaacctccccttctacgagcggctcggcttcaccgtcaccgccgacgtcgaggtgcccgaaggaccgcgcacctggtgcatgacccgcaagcccggtgcctga

SEQ ID NO: 5945 - DNA, 2847 bp, synthetic construct
  source 1..2847: mol_type = other DNA
atggccttaccagtgaccgccttgctcctgccgctggccttgctgctccacgccgccaggccggacatcgtgatgacacagagccctgatagcctggccgtgtctctgggagagagagccaccattaactgcaaggccagccagagcgtggactacgacggcgacagcttcctgaactggtatcagcagaagcccggccagcctcctaagctgctgatctacgccgccagcaatctggaaagcggcgtgccaagcagattttccggctctggcagcggcaccgatttcaccctgacaatatccagcctccagcctgaggacgtggccgtgtactactgccagcagagcaacgacgaccctctgacctttggacagggcaccaaggtggaaatcaaactcgaggacctgaagaacgtgttcccacctgaggtggccgtgttcgagcctagcgaggccgagatcagccacacccagaaagccaccctcgtgtgcctggctaccggcttctaccccgaccatgtggaactgtcttggtgggtcaacggcaaagaggtgcacagcggcgtgtgtaccgacccccagccactgaaagaacagcccgccctgaacgacagccggtactgcctgagcagcagactgagagtgtccgccaccttctggcagaacccccggaaccacttcagatgccaggtgcagttctacggcctgagcgagaacgacgagtggacccaggacagagccaagcccgtgacccagatcgtgtctgccgaagcctggggcagagccgattgcgacgtgaagctggtggaaaagagcttcgagacagacaccaacctgaacttccagaacctgagcgtgatcggcttcagaatcctgctgctgaaagtggccggctttaacctgctgatgaccctgcggctgtggtccagcagggccaagcgatctggatctggagcaacaaacttctcactactcaaacaagcaggtgacgtggaggagaatcccgggcctactagtgccaccatggactggatttggcgcatccttttccttgtcggcgctgctaccggcgcccattccgggcccatgggaagctggcttgagttctaccacagactcaacgccattgacagcaggctgtgggcacttggcggaagcgaagctgaactcgccgcttttgaaaaagaaattgccgctttcgagtccgagcttcaggcttacaaaggcaaagggaatcctgaggtcgagagcctgagagatcacgctgcccacattagagagtggttgcaggcataccggcacaatggatccggcggcggaggatctggcggaggcggatctgggggcggaggctctttcgaacaagttcagctggttcagagcggagccgaagtgaagaaacctggggcctctgtgaaggtgtcctgcaaagccagcggctacacctttaccagctactggatcaactgggtccgacaggcccctggacaaggactggaatggatgggacagatccttccaggcggaggggacaccaactacaacggcaagttcaagggcagagtgaccatcaccgccgacaccagcacaagcaccgcctacatggaactgagcagcctgagaagcgaggacaccgccgtgtattattgcaccagacgggtgcccatccggctggattattggggacagggaaccctggtcaccgtgtctagtacgcgtatccagaaccctgatcctgccgtgtaccagctgcgggatagcaagagcagcgacaagagcgtgtgtctgttcaccgacttcgacagccagaccaacgtgtcccagagcaaggactccgacgtgtacatcaccgataagtgcgtgctggacatgcggagcatggacttcaagagcaactccgccgtggcctggtccaacaagtccgatttcgcctgcgccaacgccttcaacaacagcattatccccgaggacacattcttcccaagccccgagagcagctgcggctttaccagcgagagctaccagcagggcgtgctgagcgccaccatcctgtacgagatcctgctgggcaaggccaccctgtacgccgtgctggtgtctgccctggtgctgatggctatggtcaagcggaaggacagccggggacgcgccaagagaagcggatctggcgtgaagcagaccctgaatttcgacctgctgaagctggctggcgacgtggaatccaacccaggcccttctagaggccatatgaccgagtacaagcccacggtgcgcctcgccacccgcgacgacgtccccagggccgtacgcaccctcgccgccgcgttcgccgactaccccgccacgcgccacaccgtcgatccggaccgccacatcgagcgggtcaccgagctgcaagaactcttcctcacgcgcgtcgggctcgacatcggcaaggtgtgggtcgcggacgacggcgccgcggtggcggtctggaccacgccggagagcgtcgaagcgggggcggtgttcgccgagatcggcccgcgcatggccgagttgagcggttcccggctggccgcgcagcaacagatggaaggcctcctggcgccgcaccggcccaaggagcccgcgtggttcctggccaccgtcggcgtctcgcccgaccaccagggcaagggtctgggcagcgccgtcgtgctccccggagtggaggcggccgagcgcgccggggtgcccgccttcctggagacctccgcgccccgcaacctccccttctacgagcggctcggcttcaccgtcaccgccgacgtcgaggtgcccgaaggaccgcgcacctggtgcatgacccgcaagcccggtgcctga

SEQ ID NO: 5946 - DNA, 2847 bp, synthetic construct
  source 1..2847: mol_type = other DNA
atggccttaccagtgaccgccttgctcctgccgctggccttgctgctccacgccgccaggccggcatgcatgggcagttggttcgagttctacgaccggctgaatgccatcgacgccagactgtgggctctcggaggatctgaagctgagctggccgccttcgagaaagagatcgccgcctttgagagcgagctgcaagcctacaaaggcaagggcaaccccgaggtggaaaacctgagagtgcacgccgctgccatcagagaatggctccaggcttacagacacaacggtaccggcggaggcggatctggcggcggaggtagcggtggcggaggatctgaattcgacatcgtgatgacacagagccctgatagcctggccgtgtctctgggagagagagccaccattaactgcaaggccagccagagcgtggactacgacggcgacagcttcctgaactggtatcagcagaagcccggccagcctcctaagctgctgatctacgccgccagcaatctggaaagcggcgtgccaagcagattttccggctctggcagcggcaccgatttcaccctgacaatatccagcctccagcctgaggacgtggccgtgtactactgccagcagagcaacgacgaccctctgacctttggacagggcaccaaggtggaaatcaaactcgaggacctgaagaacgtgttcccacctgaggtggccgtgttcgagcctagcgaggccgagatcagccacacccagaaagccaccctcgtgtgcctggctaccggcttctaccccgaccatgtggaactgtcttggtgggtcaacggcaaagaggtgcacagcggcgtgtgtaccgacccccagccactgaaagaacagcccgccctgaacgacagccggtactgcctgagcagcagactgagagtgtccgccaccttctggcagaacccccggaaccacttcagatgccaggtgcagttctacggcctgagcgagaacgacgagtggacccaggacagagccaagcccgtgacccagatcgtgtctgccgaagcctggggcagagccgattgcgacgtgaagctggtggaaaagagcttcgagacagacaccaacctgaacttccagaacctgagcgtgatcggcttcagaatcctgctgctgaaagtggccggctttaacctgctgatgaccctgcggctgtggtccagcagggccaagcgatctggatctggagcaacaaacttctcactactcaaacaagcaggtgacgtggaggagaatcccgggcctactagtatggactggatttggcgcatccttttccttgtcggcgctgctaccggcgcgcattccttcgaacaagttcagctggttcagagcggagccgaagtgaagaaacctggggcctctgtgaaggtgtcctgcaaagccagcggctacacctttaccagctactggatcaactgggtccgacaggcccctggacaaggactggaatggatgggacagatccttccaggcggaggggacaccaactacaacggcaagttcaagggcagagtgaccatcaccgccgacaccagcacaagcaccgcctacatggaactgagcagcctgagaagcgaggacaccgccgtgtattattgcaccagacgggtgcccatccggctggattattggggacagggaaccctggtcaccgtgtctagtacgcgtatccagaaccctgatcctgccgtgtaccagctgcgggatagcaagagcagcgacaagagcgtgtgtctgttcaccgacttcgacagccagaccaacgtgtcccagagcaaggactccgacgtgtacatcaccgataagtgcgtgctggacatgcggagcatggacttcaagagcaactccgccgtggcctggtccaacaagtccgatttcgcctgcgccaacgccttcaacaacagcattatccccgaggacacattcttcccaagccccgagagcagctgcggctttaccagcgagagctaccagcagggcgtgctgagcgccaccatcctgtacgagatcctgctgggcaaggccaccctgtacgccgtgctggtgtctgccctggtgctgatggctatggtcaagcggaaggacagccggggacgcgccaagagaagcggatctggcgtgaagcagaccctgaatttcgacctgctgaagctggctggcgacgtggaatccaacccaggcccttctagaggccatatgaccgagtacaagcccacggtgcgcctcgccacccgcgacgacgtccccagggccgtacgcaccctcgccgccgcgttcgccgactaccccgccacgcgccacaccgtcgatccggaccgccacatcgagcgggtcaccgagctgcaagaactcttcctcacgcgcgtcgggctcgacatcggcaaggtgtgggtcgcggacgacggcgccgcggtggcggtctggaccacgccggagagcgtcgaagcgggggcggtgttcgccgagatcggcccgcgcatggccgagttgagcggttcccggctggccgcgcagcaacagatggaaggcctcctggcgccgcaccggcccaaggagcccgcgtggttcctggccaccgtcggcgtctcgcccgaccaccagggcaagggtctgggcagcgccgtcgtgctccccggagtggaggcggccgagcgcgccggggtgcccgccttcctggagacctccgcgccccgcaacctccccttctacgagcggctcggcttcaccgtcaccgccgacgtcgaggtgcccgaaggaccgcgcacctggtgcatgacccgcaagcccggtgcctga

SEQ ID NO: 5947 - DNA, 3198 bp, synthetic construct
  source 1..3198: mol_type = other DNA
atggccttaccagtgaccgccttgctcctgccgctggccttgctgctccacgccgccaggccggcatgcatggaccccgacctggaaatcagagccgccttcctgcggcagagaaacacagccctgagaacagaggtggccgagctggaacaagaggtgcagcggctggaaaacgaggtgtcccagtacgagacaagatacggccctctcggaggcggaaaaggtaccggcggaggcggatctggcggcggaggtagcggtggcggaggatctgaattcgacatcgtgatgacacagagccctgatagcctggccgtgtctctgggagagagagccaccattaactgcaaggccagccagagcgtggactacgacggcgacagcttcctgaactggtatcagcagaagcccggccagcctcctaagctgctgatctacgccgccagcaatctggaaagcggcgtgccaagcagattttccggctctggcagcggcaccgatttcaccctgacaatatccagcctccagcctgaggacgtggccgtgtactactgccagcagagcaacgacgaccctctgacctttggacagggcaccaaggtggaaatcaaactcgaggacctgaagaacgtgttcccacctgaggtggccgtgttcgagcctagcgaggccgagatcagccacacccagaaagccaccctcgtgtgcctggctaccggcttctaccccgaccatgtggaactgtcttggtgggtcaacggcaaagaggtgcacagcggcgtgtgtaccgacccccagccactgaaagaacagcccgccctgaacgacagccggtactgcctgagcagcagactgagagtgtccgccaccttctggcagaacccccggaaccacttcagatgccaggtgcagttctacggcctgagcgagaacgacgagtggacccaggacagagccaagcccgtgacccagatcgtgtctgccgaagcctggggcagagccgattgcgacgtgaagctggtggaaaagagcttcgagacagacaccaacctgaacttccagaacctgagcgtgatcggcttcagaatcctgctgctgaaagtggccggctttaacctgctgatgaccctgcggctgtggtccagcagggccaagcgatctggatctggagcaacaaacttctcactactcaaacaagcaggtgacgtggaggagaatcccgggcctactagtgccaccatggactggatttggcgcatccttttccttgtcggcgctgctaccggcgcccattccgggcccgaagtgcagctggttgaatctggcggaggactggttcaggctggcggatctctgagactgtcttgtgccgccagcggcagaacctttagcatgggctggtttagacaggcccctggcaaagagagagagttcgtcgccgccatcacatactctggcggcagcccttactacgccgactctgtgaagggcagattcaccatcagccgggacaacgccaagaacaccgtgtacctccagatgaacagcctgaagcctgaggacaccgccgtgtactactgcgccgccaatccaacatacggcagcgactggaacgccgagaattggggccagggaacccaagtgacagtgtctagcggatccggcggcggaggatctggcggaggcggatctgggggcggaggctctttcgaacaagttcagctggttcagagcggagccgaagtgaagaaacctggggcctctgtgaaggtgtcctgcaaagccagcggctacacctttaccagctactggatcaactgggtccgacaggcccctggacaaggactggaatggatgggacagatccttccaggcggaggggacaccaactacaacggcaagttcaagggcagagtgaccatcaccgccgacaccagcacaagcaccgcctacatggaactgagcagcctgagaagcgaggacaccgccgtgtattattgcaccagacgggtgcccatccggctggattattggggacagggaaccctggtcaccgtgtctagtacgcgtatccagaaccctgatcctgccgtgtaccagctgcgggatagcaagagcagcgacaagagcgtgtgtctgttcaccgacttcgacagccagaccaacgtgtcccagagcaaggactccgacgtgtacatcaccgataagtgcgtgctggacatgcggagcatggacttcaagagcaactccgccgtggcctggtccaacaagtccgatttcgcctgcgccaacgccttcaacaacagcattatccccgaggacacattcttcccaagccccgagagcagctgcggctttaccagcgagagctaccagcagggcgtgctgagcgccaccatcctgtacgagatcctgctgggcaaggccaccctgtacgccgtgctggtgtctgccctggtgctgatggctatggtcaagcggaaggacagccggggacgcgccaagagaagcggatctggcgtgaagcagaccctgaatttcgacctgctgaagctggctggcgacgtggaatccaacccaggcccttctagaggccatatgaccgagtacaagcccacggtgcgcctcgccacccgcgacgacgtccccagggccgtacgcaccctcgccgccgcgttcgccgactaccccgccacgcgccacaccgtcgatccggaccgccacatcgagcgggtcaccgagctgcaagaactcttcctcacgcgcgtcgggctcgacatcggcaaggtgtgggtcgcggacgacggcgccgcggtggcggtctggaccacgccggagagcgtcgaagcgggggcggtgttcgccgagatcggcccgcgcatggccgagttgagcggttcccggctggccgcgcagcaacagatggaaggcctcctggcgccgcaccggcccaaggagcccgcgtggttcctggccaccgtcggcgtctcgcccgaccaccagggcaagggtctgggcagcgccgtcgtgctccccggagtggaggcggccgagcgcgccggggtgcccgccttcctggagacctccgcgccccgcaacctccccttctacgagcggctcggcttcaccgtcaccgccgacgtcgaggtgcccgaaggaccgcgcacctggtgcatgacccgcaagcccggtgcctga

SEQ ID NO: 5948 - DNA, 2847 bp, synthetic construct
  source 1..2847: mol_type = other DNA
atggccttaccagtgaccgccttgctcctgccgctggccttgctgctccacgccgccaggccggacatcgtgatgacacagagccctgatagcctggccgtgtctctgggagagagagccaccattaactgcaaggccagccagagcgtggactacgacggcgacagcttcctgaactggtatcagcagaagcccggccagcctcctaagctgctgatctacgccgccagcaatctggaaagcggcgtgccaagcagattttccggctctggcagcggcaccgatttcaccctgacaatatccagcctccagcctgaggacgtggccgtgtactactgccagcagagcaacgacgaccctctgacctttggacagggcaccaaggtggaaatcaaactcgaggacctgaagaacgtgttcccacctgaggtggccgtgttcgagcctagcgaggccgagatcagccacacccagaaagccaccctcgtgtgcctggctaccggcttctaccccgaccatgtggaactgtcttggtgggtcaacggcaaagaggtgcacagcggcgtgtgtaccgacccccagccactgaaagaacagcccgccctgaacgacagccggtactgcctgagcagcagactgagagtgtccgccaccttctggcagaacccccggaaccacttcagatgccaggtgcagttctacggcctgagcgagaacgacgagtggacccaggacagagccaagcccgtgacccagatcgtgtctgccgaagcctggggcagagccgattgcgacgtgaagctggtggaaaagagcttcgagacagacaccaacctgaacttccagaacctgagcgtgatcggcttcagaatcctgctgctgaaagtggccggctttaacctgctgatgaccctgcggctgtggtccagcagggccaagcgatctggatctggagcaacaaacttctcactactcaaacaagcaggtgacgtggaggagaatcccgggcctactagtgccaccatggactggatttggcgcatccttttccttgtcggcgctgctaccggcgcccattccgggcccatgggatcttggagcgagttttacgatcggctgcacgccattcaccaccggctgtatgctctcggaggaagcgaagctgagctggccgcttttgaaaaagaaattgccgctttcgagtccgagcttcaggcttacaaaggcaaagggaatcctgaggtcgaggccctgagagataccgccgccttcatcagaacccggttgcaggcataccggcacaacggatccggcggcggaggatctggcggaggcggatctgggggcggaggctctttcgaacaagttcagctggttcagagcggagccgaagtgaagaaacctggggcctctgtgaaggtgtcctgcaaagccagcggctacacctttaccagctactggatcaactgggtccgacaggcccctggacaaggactggaatggatgggacagatccttccaggcggaggggacaccaactacaacggcaagttcaagggcagagtgaccatcaccgccgacaccagcacaagcaccgcctacatggaactgagcagcctgagaagcgaggacaccgccgtgtattattgcaccagacgggtgcccatccggctggattattggggacagggaaccctggtcaccgtgtctagtacgcgtatccagaaccctgatcctgccgtgtaccagctgcgggatagcaagagcagcgacaagagcgtgtgtctgttcaccgacttcgacagccagaccaacgtgtcccagagcaaggactccgacgtgtacatcaccgataagtgcgtgctggacatgcggagcatggacttcaagagcaactccgccgtggcctggtccaacaagtccgatttcgcctgcgccaacgccttcaacaacagcattatccccgaggacacattcttcccaagccccgagagcagctgcggctttaccagcgagagctaccagcagggcgtgctgagcgccaccatcctgtacgagatcctgctgggcaaggccaccctgtacgccgtgctggtgtctgccctggtgctgatggctatggtcaagcggaaggacagccggggacgcgccaagagaagcggatctggcgtgaagcagaccctgaatttcgacctgctgaagctggctggcgacgtggaatccaacccaggcccttctagaggccatatgaccgagtacaagcccacggtgcgcctcgccacccgcgacgacgtccccagggccgtacgcaccctcgccgccgcgttcgccgactaccccgccacgcgccacaccgtcgatccggaccgccacatcgagcgggtcaccgagctgcaagaactcttcctcacgcgcgtcgggctcgacatcggcaaggtgtgggtcgcggacgacggcgccgcggtggcggtctggaccacgccggagagcgtcgaagcgggggcggtgttcgccgagatcggcccgcgcatggccgagttgagcggttcccggctggccgcgcagcaacagatggaaggcctcctggcgccgcaccggcccaaggagcccgcgtggttcctggccaccgtcggcgtctcgcccgaccaccagggcaagggtctgggcagcgccgtcgtgctccccggagtggaggcggccgagcgcgccggggtgcccgccttcctggagacctccgcgccccgcaacctccccttctacgagcggctcggcttcaccgtcaccgccgacgtcgaggtgcccgaaggaccgcgcacctggtgcatgacccgcaagcccggtgcctga

SEQ ID NO: 5949 - DNA, 3477 bp, synthetic construct
  source 1..3477: mol_type = other DNA
atggccttaccagtgaccgccttgctcctgccgctggccttgctgctccacgccgccaggccggacatcgtgatgacacagagccctgatagcctggccgtgtctctgggagagagagccaccattaactgcaaggccagccagagcgtggactacgacggcgacagcttcctgaactggtatcagcagaagcccggccagcctcctaagctgctgatctacgccgccagcaatctggaaagcggcgtgccaagcagattttccggctctggcagcggcaccgatttcaccctgacaatatccagcctccagcctgaggacgtggccgtgtactactgccagcagagcaacgacgaccctctgacctttggacagggcaccaaggtggaaatcaaactcgaggacctgaagaacgtgttcccacctgaggtggccgtgttcgagcctagcgaggccgagatcagccacacccagaaagccaccctcgtgtgcctggctaccggcttctaccccgaccatgtggaactgtcttggtgggtcaacggcaaagaggtgcacagcggcgtgtgtaccgacccccagccactgaaagaacagcccgccctgaacgacagccggtactgcctgagcagcagactgagagtgtccgccaccttctggcagaacccccggaaccacttcagatgccaggtgcagttctacggcctgagcgagaacgacgagtggacccaggacagagccaagcccgtgacccagatcgtgtctgccgaagcctggggcagagccgattgcgacgtgaagctggtggaaaagagcttcgagacagacaccaacctgaacttccagaacctgagcgtgatcggcttcagaatcctgctgctgaaagtggccggctttaacctgctgatgaccctgcggctgtggtccagcagggccaagcgatctggatctggagcaacaaacttctcactactcaaacaagcaggtgacgtggaggagaatcccgggcctactagtaccatggactggatttggcgcatccttttccttgtcggcgctgctaccggcgcccattccctgttcaatcaagaggtgcagatccctctgaccgagagctactgtggcccctgtcctaagaactggatctgctacaagaacaactgctaccagttcttcgacgagagcaagaattggtacgagagccaggccagctgcatgagccagaatgccagcctgctgaaggtgtacagcaaagaggaccaggacctgctgaaactggtcaagagcgcccactggatgggccttgtgcacatccccaccaatggctcttggcagtgggaggacggcagcattctgagccctaacctgctgaccatcatcgagatgcagaagggcgactgcgccctgtacgccagcagctttaagggctacatcgagaattgcagcaccccgaacacctacatctgtatgcagagaaccgtttctggcggaggcggctctggaggaggcggaagtggcggcggaggcgacctctttaatcaagaagtccagattccactcaccgaatcctactgcggaccttgtccaaaaaattggatttgttataagaacaactgttatcaattctttgatgagtctaaaaattggtatgagtcccaggcttcctgcatgtctcagaacgcttctctgctgaaagtctactctaaagaagatcaggatctcctgaagctcgtcaagtctgcccattggatggggctcgtccacattcctaccaacggaagctggcaatgggaagatggctccatcctgtctccaaatctgctcacgattattgaaatgcagaaaggggattgtgctctctacgccagctccttcaagggatatattgagaactgtagcacgcccaatacttatatctgtatgcaacggaccgtgggatccggcggcggaggatctggcggaggcggatctgggggcggaggctctttcgaacaagttcagctggttcagagcggagccgaagtgaagaaacctggggcctctgtgaaggtgtcctgcaaagccagcggctacacctttaccagctactggatcaactgggtccgacaggcccctggacaaggactggaatggatgggacagatccttccaggcggaggggacaccaactacaacggcaagttcaagggcagagtgaccatcaccgccgacaccagcacaagcaccgcctacatggaactgagcagcctgagaagcgaggacaccgccgtgtattattgcaccagacgggtgcccatccggctggattattggggacagggaaccctggtcaccgtgtctagtacgcgtatccagaaccctgatcctgccgtgtaccagctgcgggatagcaagagcagcgacaagagcgtgtgtctgttcaccgacttcgacagccagaccaacgtgtcccagagcaaggactccgacgtgtacatcaccgataagtgcgtgctggacatgcggagcatggacttcaagagcaactccgccgtggcctggtccaacaagtccgatttcgcctgcgccaacgccttcaacaacagcattatccccgaggacacattcttcccaagccccgagagcagctgcggctttaccagcgagagctaccagcagggcgtgctgagcgccaccatcctgtacgagatcctgctgggcaaggccaccctgtacgccgtgctggtgtctgccctggtgctgatggctatggtcaagcggaaggacagccggggacgcgccaagagaagcggatctggcgtgaagcagaccctgaatttcgacctgctgaagctggctggcgacgtggaatccaacccaggcccttctagaggccatatgaccgagtacaagcccacggtgcgcctcgccacccgcgacgacgtccccagggccgtacgcaccctcgccgccgcgttcgccgactaccccgccacgcgccacaccgtcgatccggaccgccacatcgagcgggtcaccgagctgcaagaactcttcctcacgcgcgtcgggctcgacatcggcaaggtgtgggtcgcggacgacggcgccgcggtggcggtctggaccacgccggagagcgtcgaagcgggggcggtgttcgccgagatcggcccgcgcatggccgagttgagcggttcccggctggccgcgcagcaacagatggaaggcctcctggcgccgcaccggcccaaggagcccgcgtggttcctggccaccgtcggcgtctcgcccgaccaccagggcaagggtctgggcagcgccgtcgtgctccccggagtggaggcggccgagcgcgccggggtgcccgccttcctggagacctccgcgccccgcaacctccccttctacgagcggctcggcttcaccgtcaccgccgacgtcgaggtgcccgaaggaccgcgcacctggtgcatgacccgcaagcccggtgcctga

SEQ ID NO: 5950 - DNA, 1863 bp, synthetic construct
  source 1..1863: mol_type = other DNA
atggccttaccagtgaccgccttgctcctgccgctggccttgctgctccacgccgccaggccggacatcgtgatgacacagagccctgatagcctggccgtgtctctgggagagagagccaccattaactgcaaggccagccagagcgtggactacgacggcgacagcttcctgaactggtatcagcagaagcccggccagcctcctaagctgctgatctacgccgccagcaatctggaaagcggcgtgccaagcagattttccggctctggcagcggcaccgatttcaccctgacaatatccagcctccagcctgaggacgtggccgtgtactactgccagcagagcaacgacgaccctctgacctttggacagggcaccaaggtggaaatcaaactcgaggacctgaagaacgtgttcccacctgaggtggccgtgttcgagcctagcgaggccgagatcagccacacccagaaagccaccctcgtgtgcctggctaccggcttctaccccgaccatgtggaactgtcttggtgggtcaacggcaaagaggtgcacagcggcgtgtgtaccgacccccagccactgaaagaacagcccgccctgaacgacagccggtactgcctgagcagcagactgagagtgtccgccaccttctggcagaacccccggaaccacttcagatgccaggtgcagttctacggcctgagcgagaacgacgagtggacccaggacagagccaagcccgtgacccagatcgtgtctgccgaagcctggggcagagccgattgcggctttaccagcgagagctaccagcagggcgtgctgagcgccaccaacctgagcgtgatcggcttcagaatcctgctgctgaaagtggccggctttaacctgctgatgaccctgcggctgtggtccagcagggccaagcgatctggatctggagcaacaaacttctcactactcaaacaagcaggtgacgtggaggagaatcccgggcctactagtatggactggatttggcgcatccttttccttgtcggcgctgctaccggcgcgcattccttcgaacaagttcagctggttcagagcggagccgaagtgaagaaacctggggcctctgtgaaggtgtcctgcaaagccagcggctacacctttaccagctactggatcaactgggtccgacaggcccctggacaaggactggaatggatgggacagatccttccaggcggaggggacaccaactacaacggcaagttcaagggcagagtgaccatcaccgccgacaccagcacaagcaccgcctacatggaactgagcagcctgagaagcgaggacaccgccgtgtattattgcaccagacgggtgcccatccggctggattattggggacagggaaccctggtcaccgtgtctagtacgcgtatccagaaccctgatcctgccgtgtaccagctgcgggatagcaagagcagcgacaagagcgtgtgtctgttcaccgacttcgacagccagaccaacgtgtcccagagcaaggactccgacgtgtacatcaccgataagtgcgtgctggacatgcggagcatggacttcaagagcaactccgccgtggcctggtccaacaagtccgatttcgcctgcgccaacgccttcaacaacagcattatccccgaggacacattcttcccaagccccgagagcagctgcgacgtgaagctggtggaaaagagcttcgagacagacaccaacctgaacttccagatcctgtacgagatcctgctgggcaaggccaccctgtacgccgtgctggtgtctgccctggtgctgatggctatggtcaagcggaaggacagccgggga

SEQ ID NO: 5951 - DNA, 1875 bp, synthetic construct
  source 1..1875: mol_type = other DNA
atggccttaccagtgaccgccttgctcctgccgctggccttgctgctccacgccgccaggccggacatcgtgatgacacagagccctgatagcctggccgtgtctctgggagagagagccaccattaactgcaaggccagccagagcgtggactacgacggcgacagcttcctgaactggtatcagcagaagcccggccagcctcctaagctgctgatctacgccgccagcaatctggaaagcggcgtgccaagcagattttccggctctggcagcggcaccgatttcaccctgacaatatccagcctccagcctgaggacgtggccgtgtactactgccagcagagcaacgacgaccctctgacctttggacagggcaccaaggtggaaatcaaactcgagatccagaaccctgatcctgccgtgtaccagctgcgggatagcaagagcagcgacaagagcgtgtgtctgttcaccgacttcgacagccagaccaacgtgtcccagagcaaggactccgacgtgtacatcaccgataagtgcgtgctggacatgcggagcatggacttcaagagcaactccgccgtggcctggtccaacaagtccgatttcgcctgcgccaacgccttcaacaacagcattatccccgaggacacattcttcccaagccccgagagcagctgcgacgtgaagctggtggaaaagagcttcgagacagacaccaacctgaacttccagatcctgtacgagatcctgctgggcaaggccaccctgtacgccgtgctggtgtctgccctggtgctgatggctatggtcaagcggaaggacagccggggacgcgccaagagaagcggatctggcgtgaagcagaccctgaatttcgacctgctgaagctggctggcgacgtggaatccaacccaggccctactagtatggactggatttggcgcatccttttccttgtcggcgctgctaccggcgcgcattccttcgaacaagttcagctggttcagagcggagccgaagtgaagaaacctggggcctctgtgaaggtgtcctgcaaagccagcggctacacctttaccagctactggatcaactgggtccgacaggcccctggacaaggactggaatggatgggacagatccttccaggcggaggggacaccaactacaacggcaagttcaagggcagagtgaccatcaccgccgacaccagcacaagcaccgcctacatggaactgagcagcctgagaagcgaggacaccgccgtgtattattgcaccagacgggtgcccatccggctggattattggggacagggaaccctggtcaccgtgtctagtacgcgtgaggacctgaagaacgtgttcccacctgaggtggccgtgttcgagcctagcgaggccgagatcagccacacccagaaagccaccctcgtgtgcctggctaccggcttctaccccgaccatgtggaactgtcttggtgggtcaacggcaaagaggtgcacagcggcgtgtgtaccgacccccagccactgaaagaacagcccgccctgaacgacagccggtactgcctgagcagcagactgagagtgtccgccaccttctggcagaacccccggaaccacttcagatgccaggtgcagttctacggcctgagcgagaacgacgagtggacccaggacagagccaagcccgtgacccagatcgtgtctgccgaagcctggggcagagccgattgcggctttaccagcgagagctaccagcagggcgtgctgagcgccaccaacctgagcgtgatcggcttcagaatcctgctgctgaaagtggccggctttaacctgctgatgaccctgcggctgtggtccagc

SEQ ID NO: 5952 - DNA, 2268 bp, synthetic construct
  source 1..2268: mol_type = other DNA
atggccttaccagtgaccgccttgctcctgccgctggccttgctgctccacgccgccaggccggaagtgcagctggttgaatctggcggaggactggttcagcctggcggatctctgagactgtcttgtgccgccagcggcttcagcttcagcgacttttggatgagctgggtccgacaggcccctggcaaaggacttgaatgggtcgccacaatcagccaggccggcagcgagaaggactacgtggactctgtgaagggcagattcaccatcagccgggacaacgccaagaagtccctgtacctccagatgaacagcctgagagccgaggacaccgccgtgtactattgtgcctctggcgtgtacagcttcgactacagaggccagggcaccctggtcacagtctcttctggtaccggcggaggcggatctggcggcggaggtagcggtggcggaggatctgaattcgacatcgtgatgacacagagccctgatagcctggccgtgtctctgggagagagagccaccattaactgcaaggccagccagagcgtggactacgacggcgacagcttcctgaactggtatcagcagaagcccggccagcctcctaagctgctgatctacgccgccagcaatctggaaagcggcgtgccaagcagattttccggctctggcagcggcaccgatttcaccctgacaatatccagcctccagcctgaggacgtggccgtgtactactgccagcagagcaacgacgaccctctgacctttggacagggcaccaaggtggaaatcaaactcgaggacctgaagaacgtgttcccacctgaggtggccgtgttcgagcctagcgaggccgagatcagccacacccagaaagccaccctcgtgtgcctggctaccggcttctaccccgaccatgtggaactgtcttggtgggtcaacggcaaagaggtgcacagcggcgtgtgtaccgacccccagccactgaaagaacagcccgccctgaacgacagccggtactgcctgagcagcagactgagagtgtccgccaccttctggcagaacccccggaaccacttcagatgccaggtgcagttctacggcctgagcgagaacgacgagtggacccaggacagagccaagcccgtgacccagatcgtgtctgccgaagcctggggcagagccgattgcggctttaccagcgagagctaccagcagggcgtgctgagcgccaccaacctgagcgtgatcggcttcagaatcctgctgctgaaagtggccggctttaacctgctgatgaccctgcggctgtggtccagcagggccaagcgatctggatctggagcaacaaacttctcactactcaaacaagcaggtgacgtggaggagaatcccgggcctactagtatggactggatttggcgcatccttttccttgtcggcgctgctaccggcgcgcattccttcgaacaagttcagctggttcagagcggagccgaagtgaagaaacctggggcctctgtgaaggtgtcctgcaaagccagcggctacacctttaccagctactggatcaactgggtccgacaggcccctggacaaggactggaatggatgggacagatccttccaggcggaggggacaccaactacaacggcaagttcaagggcagagtgaccatcaccgccgacaccagcacaagcaccgcctacatggaactgagcagcctgagaagcgaggacaccgccgtgtattattgcaccagacgggtgcccatccggctggattattggggacagggaaccctggtcaccgtgtctagtacgcgtatccagaaccctgatcctgccgtgtaccagctgcgggatagcaagagcagcgacaagagcgtgtgtctgttcaccgacttcgacagccagaccaacgtgtcccagagcaaggactccgacgtgtacatcaccgataagtgcgtgctggacatgcggagcatggacttcaagagcaactccgccgtggcctggtccaacaagtccgatttcgcctgcgccaacgccttcaacaacagcattatccccgaggacacattcttcccaagccccgagagcagctgcgacgtgaagctggtggaaaagagcttcgagacagacaccaacctgaacttccagatcctgtacgagatcctgctgggcaaggccaccctgtacgccgtgctggtgtctgccctggtgctgatggctatggtcaagcggaaggacagccgggga

SEQ ID NO: 5953 - DNA, 2280 bp, synthetic construct
  source 1..2280: mol_type = other DNA
atggccttaccagtgaccgccttgctcctgccgctggccttgctgctccacgccgccaggccggaagtgcagctggttgaatctggcggaggactggttcagcctggcggatctctgagactgtcttgtgccgccagcggcttcagcttcagcgacttttggatgagctgggtccgacaggcccctggcaaaggacttgaatgggtcgccacaatcagccaggccggcagcgagaaggactacgtggactctgtgaagggcagattcaccatcagccgggacaacgccaagaagtccctgtacctccagatgaacagcctgagagccgaggacaccgccgtgtactattgtgcctctggcgtgtacagcttcgactacagaggccagggcaccctggtcacagtctcttctggtaccggcggaggcggatctggcggcggaggtagcggtggcggaggatctgaattcgacatcgtgatgacacagagccctgatagcctggccgtgtctctgggagagagagccaccattaactgcaaggccagccagagcgtggactacgacggcgacagcttcctgaactggtatcagcagaagcccggccagcctcctaagctgctgatctacgccgccagcaatctggaaagcggcgtgccaagcagattttccggctctggcagcggcaccgatttcaccctgacaatatccagcctccagcctgaggacgtggccgtgtactactgccagcagagcaacgacgaccctctgacctttggacagggcaccaaggtggaaatcaaactcgagatccagaaccctgatcctgccgtgtaccagctgcgggatagcaagagcagcgacaagagcgtgtgtctgttcaccgacttcgacagccagaccaacgtgtcccagagcaaggactccgacgtgtacatcaccgataagtgcgtgctggacatgcggagcatggacttcaagagcaactccgccgtggcctggtccaacaagtccgatttcgcctgcgccaacgccttcaacaacagcattatccccgaggacacattcttcccaagccccgagagcagctgcgacgtgaagctggtggaaaagagcttcgagacagacaccaacctgaacttccagatcctgtacgagatcctgctgggcaaggccaccctgtacgccgtgctggtgtctgccctggtgctgatggctatggtcaagcggaaggacagccggggacgcgccaagagaagcggatctggcgtgaagcagaccctgaatttcgacctgctgaagctggctggcgacgtggaatccaacccaggccctactagtatggactggatttggcgcatccttttccttgtcggcgctgctaccggcgcgcattccttcgaacaagttcagctggttcagagcggagccgaagtgaagaaacctggggcctctgtgaaggtgtcctgcaaagccagcggctacacctttaccagctactggatcaactgggtccgacaggcccctggacaaggactggaatggatgggacagatccttccaggcggaggggacaccaactacaacggcaagttcaagggcagagtgaccatcaccgccgacaccagcacaagcaccgcctacatggaactgagcagcctgagaagcgaggacaccgccgtgtattattgcaccagacgggtgcccatccggctggattattggggacagggaaccctggtcaccgtgtctagtacgcgtgaggacctgaagaacgtgttcccacctgaggtggccgtgttcgagcctagcgaggccgagatcagccacacccagaaagccaccctcgtgtgcctggctaccggcttctaccccgaccatgtggaactgtcttggtgggtcaacggcaaagaggtgcacagcggcgtgtgtaccgacccccagccactgaaagaacagcccgccctgaacgacagccggtactgcctgagcagcagactgagagtgtccgccaccttctggcagaacccccggaaccacttcagatgccaggtgcagttctacggcctgagcgagaacgacgagtggacccaggacagagccaagcccgtgacccagatcgtgtctgccgaagcctggggcagagccgattgcggctttaccagcgagagctaccagcagggcgtgctgagcgccaccaacctgagcgtgatcggcttcagaatcctgctgctgaaagtggccggctttaacctgctgatgaccctgcggctgtggtccagc

SEQ ID NO: 5954 - DNA, 2679 bp, synthetic construct
  source 1..2679: mol_type = other DNA
atggccttaccagtgaccgccttgctcctgccgctggccttgctgctccacgccgccaggccggaagtgcagctggttgaatctggcggaggactggttcagcctggcggatctctgagactgtcttgtgccgccagcggcttcagcttcagcgacttttggatgagctgggtccgacaggcccctggcaaaggacttgaatgggtcgccacaatcagccaggccggcagcgagaaggactacgtggactctgtgaagggcagattcaccatcagccgggacaacgccaagaagtccctgtacctccagatgaacagcctgagagccgaggacaccgccgtgtactattgtgcctctggcgtgtacagcttcgactacagaggccagggcaccctggtcacagtctcttctggtaccggcggaggcggatctggcggcggaggtagcggtggcggaggatctgaattcgacatcgtgatgacacagagccctgatagcctggccgtgtctctgggagagagagccaccattaactgcaaggccagccagagcgtggactacgacggcgacagcttcctgaactggtatcagcagaagcccggccagcctcctaagctgctgatctacgccgccagcaatctggaaagcggcgtgccaagcagattttccggctctggcagcggcaccgatttcaccctgacaatatccagcctccagcctgaggacgtggccgtgtactactgccagcagagcaacgacgaccctctgacctttggacagggcaccaaggtggaaatcaaactcgaggacctgaagaacgtgttcccacctgaggtggccgtgttcgagcctagcgaggccgagatcagccacacccagaaagccaccctcgtgtgcctggctaccggcttctaccccgaccatgtggaactgtcttggtgggtcaacggcaaagaggtgcacagcggcgtgtgtaccgacccccagccactgaaagaacagcccgccctgaacgacagccggtactgcctgagcagcagactgagagtgtccgccaccttctggcagaacccccggaaccacttcagatgccaggtgcagttctacggcctgagcgagaacgacgagtggacccaggacagagccaagcccgtgacccagatcgtgtctgccgaagcctggggcagagccgattgcggctttaccagcgagagctaccagcagggcgtgctgagcgccaccaacctgagcgtgatcggcttcagaatcctgctgctgaaagtggccggctttaacctgctgatgaccctgcggctgtggtccagcagggccaagcgatctggatctggagcaacaaacttctcactactcaaacaagcaggtgacgtggaggagaatcccgggcctactagtatggactggatttggcgcatccttttccttgtcggcgctgctaccggcgcgcattccgggccccagctccagctgcaagagtctggacctggcctggtcaagcctagcgagacactgagcctgacctgtaccgtgtccggcgatagcatcagcagcggcgattactactggggctggatcagacagcctcctggcaaaggactggaatggatcggccacatctactacagcggcgtgacctactacaaccccagcctgaagtccagagtgaccatcagcgtggacaccagccggaaccagttctccctgaagctgtctagcgtgacagccgccgataccgccgtgtactactgcaccagagaggacagcagcaactggcggagtagaggccagggaacactggtcacagttagctctggatccggcggaggcggaagtggaggcggaggatctggcggcggaggctctttcgaacaagttcagctggttcagagcggagccgaagtgaagaaacctggggcctctgtgaaggtgtcctgcaaagccagcggctacacctttaccagctactggatcaactgggtccgacaggcccctggacaaggactggaatggatgggacagatccttccaggcggaggggacaccaactacaacggcaagttcaagggcagagtgaccatcaccgccgacaccagcacaagcaccgcctacatggaactgagcagcctgagaagcgaggacaccgccgtgtattattgcaccagacgggtgcccatccggctggattattggggacagggaaccctggtcaccgtgtctagtacgcgtatccagaaccctgatcctgccgtgtaccagctgcgggatagcaagagcagcgacaagagcgtgtgtctgttcaccgacttcgacagccagaccaacgtgtcccagagcaaggactccgacgtgtacatcaccgataagtgcgtgctggacatgcggagcatggacttcaagagcaactccgccgtggcctggtccaacaagtccgatttcgcctgcgccaacgccttcaacaacagcattatccccgaggacacattcttcccaagccccgagagcagctgcgacgtgaagctggtggaaaagagcttcgagacagacaccaacctgaacttccagatcctgtacgagatcctgctgggcaaggccaccctgtacgccgtgctggtgtctgccctggtgctgatggctatggtcaagcggaaggacagccgggga

SEQ ID NO: 5955 - DNA, 2691 bp, synthetic construct
  source 1..2691: mol_type = other DNA
atggccttaccagtgaccgccttgctcctgccgctggccttgctgctccacgccgccaggccggaagtgcagctggttgaatctggcggaggactggttcagcctggcggatctctgagactgtcttgtgccgccagcggcttcagcttcagcgacttttggatgagctgggtccgacaggcccctggcaaaggacttgaatgggtcgccacaatcagccaggccggcagcgagaaggactacgtggactctgtgaagggcagattcaccatcagccgggacaacgccaagaagtccctgtacctccagatgaacagcctgagagccgaggacaccgccgtgtactattgtgcctctggcgtgtacagcttcgactacagaggccagggcaccctggtcacagtctcttctggtaccggcggaggcggatctggcggcggaggtagcggtggcggaggatctgaattcgacatcgtgatgacacagagccctgatagcctggccgtgtctctgggagagagagccaccattaactgcaaggccagccagagcgtggactacgacggcgacagcttcctgaactggtatcagcagaagcccggccagcctcctaagctgctgatctacgccgccagcaatctggaaagcggcgtgccaagcagattttccggctctggcagcggcaccgatttcaccctgacaatatccagcctccagcctgaggacgtggccgtgtactactgccagcagagcaacgacgaccctctgacctttggacagggcaccaaggtggaaatcaaactcgagatccagaaccctgatcctgccgtgtaccagctgcgggatagcaagagcagcgacaagagcgtgtgtctgttcaccgacttcgacagccagaccaacgtgtcccagagcaaggactccgacgtgtacatcaccgataagtgcgtgctggacatgcggagcatggacttcaagagcaactccgccgtggcctggtccaacaagtccgatttcgcctgcgccaacgccttcaacaacagcattatccccgaggacacattcttcccaagccccgagagcagctgcgacgtgaagctggtggaaaagagcttcgagacagacaccaacctgaacttccagatcctgtacgagatcctgctgggcaaggccaccctgtacgccgtgctggtgtctgccctggtgctgatggctatggtcaagcggaaggacagccggggacgcgccaagagaagcggatctggcgtgaagcagaccctgaatttcgacctgctgaagctggctggcgacgtggaatccaacccaggccctactagtatggactggatttggcgcatccttttccttgtcggcgctgctaccggcgcgcattccgggccccagctccagctgcaagagtctggacctggcctggtcaagcctagcgagacactgagcctgacctgtaccgtgtccggcgatagcatcagcagcggcgattactactggggctggatcagacagcctcctggcaaaggactggaatggatcggccacatctactacagcggcgtgacctactacaaccccagcctgaagtccagagtgaccatcagcgtggacaccagccggaaccagttctccctgaagctgtctagcgtgacagccgccgataccgccgtgtactactgcaccagagaggacagcagcaactggcggagtagaggccagggaacactggtcacagttagctctggatccggcggaggcggaagtggaggcggaggatctggcggcggaggctctttcgaacaagttcagctggttcagagcggagccgaagtgaagaaacctggggcctctgtgaaggtgtcctgcaaagccagcggctacacctttaccagctactggatcaactgggtccgacaggcccctggacaaggactggaatggatgggacagatccttccaggcggaggggacaccaactacaacggcaagttcaagggcagagtgaccatcaccgccgacaccagcacaagcaccgcctacatggaactgagcagcctgagaagcgaggacaccgccgtgtattattgcaccagacgggtgcccatccggctggattattggggacagggaaccctggtcaccgtgtctagtacgcgtgaggacctgaagaacgtgttcccacctgaggtggccgtgttcgagcctagcgaggccgagatcagccacacccagaaagccaccctcgtgtgcctggctaccggcttctaccccgaccatgtggaactgtcttggtgggtcaacggcaaagaggtgcacagcggcgtgtgtaccgacccccagccactgaaagaacagcccgccctgaacgacagccggtactgcctgagcagcagactgagagtgtccgccaccttctggcagaacccccggaaccacttcagatgccaggtgcagttctacggcctgagcgagaacgacgagtggacccaggacagagccaagcccgtgacccagatcgtgtctgccgaagcctggggcagagccgattgcggctttaccagcgagagctaccagcagggcgtgctgagcgccaccaacctgagcgtgatcggcttcagaatcctgctgctgaaagtggccggctttaacctgctgatgaccctgcggctgtggtccagc

SEQ ID NO: 5956 - DNA, 2175 bp, synthetic construct
  source 1..2175: mol_type = other DNA
atggccttaccagtgaccgccttgctcctgccgctggccttgctgctccacgccgccaggccggacatcgtgatgacacagagccctgatagcctggccgtgtctctgggagagagagccaccattaactgcaaggccagccagagcgtggactacgacggcgacagcttcctgaactggtatcagcagaagcccggccagcctcctaagctgctgatctacgccgccagcaatctggaaagcggcgtgccaagcagattttccggctctggcagcggcaccgatttcaccctgacaatatccagcctccagcctgaggacgtggccgtgtactactgccagcagagcaacgacgaccctctgacctttggacagggcaccaaggtggaaatcaaactcgaggacctgaagaacgtgttcccacctgaggtggccgtgttcgagcctagcgaggccgagatcagccacacccagaaagccaccctcgtgtgcctggctaccggcttctaccccgaccatgtggaactgtcttggtgggtcaacggcaaagaggtgcacagcggcgtgtgtaccgacccccagccactgaaagaacagcccgccctgaacgacagccggtactgcctgagcagcagactgagagtgtccgccaccttctggcagaacccccggaaccacttcagatgccaggtgcagttctacggcctgagcgagaacgacgagtggacccaggacagagccaagcccgtgacccagatcgtgtctgccgaagcctggggcagagccgatgatgtgattaagatccactggcaggaaaagaagtccaacaccatcctgggcagccaggaaggcaacaccatgaagaccaacgacacctacatgaagttcagctggctgaccgtgcccgagaagtccctggacaaagaacacagatgcatcgtgcggcacgaaaacaacaagaacggcgtggaccaggaaatcatcttcccacccatcaagaccgatgtgattacaatggaccccaaggacaactgctccaaggacgccaacgataccctgctgctccagctgaccaacaccagcgcctactacatgtacttgttgctgctgctgaagtccgtggtgtacttcgccatcatcacatgctgcctgctgatggctatggtcaagcggaaggacagccggggaagggccaagcgatctggatctggagcaacaaacttctcactactcaaacaagcaggtgacgtggaggagaatcccgggcctactagtatggactggatttggcgcatccttttccttgtcggcgctgctaccggcgcgcattccttcgaacaagttcagctggttcagagcggagccgaagtgaagaaacctggggcctctgtgaaggtgtcctgcaaagccagcggctacacctttaccagctactggatcaactgggtccgacaggcccctggacaaggactggaatggatgggacagatccttccaggcggaggggacaccaactacaacggcaagttcaagggcagagtgaccatcaccgccgacaccagcacaagcaccgcctacatggaactgagcagcctgagaagcgaggacaccgccgtgtattattgcaccagacgggtgcccatccggctggattattggggacagggaaccctggtcaccgtgtctagtacgcgtatccagaaccctgatcctgccgtgtaccagctgcgggatagcaagagcagcgacaagagcgtgtgtctgttcaccgacttcgacagccagaccaacgtgtcccagagcaaggactccgacgtgtacatcaccgataagtgcgtgctggacatgcggagcatggacttcaagagcaactccgccgtggcctggtccaacaagtccgatttcgcctgcgccaacgccttcaacaacagcattatccccgaggacacattcttcccaagccccgagagcagcgactccaccgaccacgtgaagcccaaagagacagagaacaccaagcagcccagcaagagctgccacaagcccaaggccatcgtgcacaccgagaaagtgaacatgatgagcctgaccgtgctgggcctgcggatgctgttcgccaaaaccgtggccgtgaacttcctgctgaccgccaagctgttcttcctcctcaccgcc

SEQ ID NO: 5957 - DNA, 2187 bp, synthetic construct
  source 1..2187: mol_type = other DNA
atggccttaccagtgaccgccttgctcctgccgctggccttgctgctccacgccgccaggccggacatcgtgatgacacagagccctgatagcctggccgtgtctctgggagagagagccaccattaactgcaaggccagccagagcgtggactacgacggcgacagcttcctgaactggtatcagcagaagcccggccagcctcctaagctgctgatctacgccgccagcaatctggaaagcggcgtgccaagcagattttccggctctggcagcggcaccgatttcaccctgacaatatccagcctccagcctgaggacgtggccgtgtactactgccagcagagcaacgacgaccctctgacctttggacagggcaccaaggtggaaatcaaactcgagatccagaaccctgatcctgccgtgtaccagctgcgggatagcaagagcagcgacaagagcgtgtgtctgttcaccgacttcgacagccagaccaacgtgtcccagagcaaggactccgacgtgtacatcaccgataagtgcgtgctggacatgcggagcatggacttcaagagcaactccgccgtggcctggtccaacaagtccgatttcgcctgcgccaacgccttcaacaacagcattatccccgaggacacattcttcccaagccccgagagcagcgactccaccgaccacgtgaagcccaaagagacagagaacaccaagcagcccagcaagagctgccacaagcccaaggccatcgtgcacaccgagaaagtgaacatgatgagcctgaccgtgctgggcctgcggatgctgttcgccaaaaccgtggccgtgaacttcctgctgaccgccaagctgttcttcctcctcaccgcccgcgccaagagaagcggatctggcgtgaagcagaccctgaatttcgacctgctgaagctggctggcgacgtggaatccaacccaggccctactagtatggactggatttggcgcatccttttccttgtcggcgctgctaccggcgcgcattccttcgaacaagttcagctggttcagagcggagccgaagtgaagaaacctggggcctctgtgaaggtgtcctgcaaagccagcggctacacctttaccagctactggatcaactgggtccgacaggcccctggacaaggactggaatggatgggacagatccttccaggcggaggggacaccaactacaacggcaagttcaagggcagagtgaccatcaccgccgacaccagcacaagcaccgcctacatggaactgagcagcctgagaagcgaggacaccgccgtgtattattgcaccagacgggtgcccatccggctggattattggggacagggaaccctggtcaccgtgtctagtacgcgtgaggacctgaagaacgtgttcccacctgaggtggccgtgttcgagcctagcgaggccgagatcagccacacccagaaagccaccctcgtgtgcctggctaccggcttctaccccgaccatgtggaactgtcttggtgggtcaacggcaaagaggtgcacagcggcgtgtgtaccgacccccagccactgaaagaacagcccgccctgaacgacagccggtactgcctgagcagcagactgagagtgtccgccaccttctggcagaacccccggaaccacttcagatgccaggtgcagttctacggcctgagcgagaacgacgagtggacccaggacagagccaagcccgtgacccagatcgtgtctgccgaagcctggggcagagccgatgatgtgattaagatccactggcaggaaaagaagtccaacaccatcctgggcagccaggaaggcaacaccatgaagaccaacgacacctacatgaagttcagctggctgaccgtgcccgagaagtccctggacaaagaacacagatgcatcgtgcggcacgaaaacaacaagaacggcgtggaccaggaaatcatcttcccacccatcaagaccgatgtgattacaatggaccccaaggacaactgctccaaggacgccaacgataccctgctgctccagctgaccaacaccagcgcctactacatgtacttgttgctgctgctgaagtccgtggtgtacttcgccatcatcacatgctgcctgctgatggctatggtcaagcggaaggacagccgggga

SEQ ID NO: 5958 - DNA, 2580 bp, synthetic construct
  source 1..2580: mol_type = other DNA
atggccttaccagtgaccgccttgctcctgccgctggccttgctgctccacgccgccaggccggaagtgcagctggttgaatctggcggaggactggttcagcctggcggatctctgagactgtcttgtgccgccagcggcttcagcttcagcgacttttggatgagctgggtccgacaggcccctggcaaaggacttgaatgggtcgccacaatcagccaggccggcagcgagaaggactacgtggactctgtgaagggcagattcaccatcagccgggacaacgccaagaagtccctgtacctccagatgaacagcctgagagccgaggacaccgccgtgtactattgtgcctctggcgtgtacagcttcgactacagaggccagggcaccctggtcacagtctcttctggtaccggcggaggcggatctggcggcggaggtagcggtggcggaggatctgaattcgacatcgtgatgacacagagccctgatagcctggccgtgtctctgggagagagagccaccattaactgcaaggccagccagagcgtggactacgacggcgacagcttcctgaactggtatcagcagaagcccggccagcctcctaagctgctgatctacgccgccagcaatctggaaagcggcgtgccaagcagattttccggctctggcagcggcaccgatttcaccctgacaatatccagcctccagcctgaggacgtggccgtgtactactgccagcagagcaacgacgaccctctgacctttggacagggcaccaaggtggaaatcaaactcgaggacctgaagaacgtgttcccacctgaggtggccgtgttcgagcctagcgaggccgagatcagccacacccagaaagccaccctcgtgtgcctggctaccggcttctaccccgaccatgtggaactgtcttggtgggtcaacggcaaagaggtgcacagcggcgtgtgtaccgacccccagccactgaaagaacagcccgccctgaacgacagccggtactgcctgagcagcagactgagagtgtccgccaccttctggcagaacccccggaaccacttcagatgccaggtgcagttctacggcctgagcgagaacgacgagtggacccaggacagagccaagcccgtgacccagatcgtgtctgccgaagcctggggcagagccgatgatgtgattaagatccactggcaggaaaagaagtccaacaccatcctgggcagccaggaaggcaacaccatgaagaccaacgacacctacatgaagttcagctggctgaccgtgcccgagaagtccctggacaaagaacacagatgcatcgtgcggcacgaaaacaacaagaacggcgtggaccaggaaatcatcttcccacccatcaagaccgatgtgattacaatggaccccaaggacaactgctccaaggacgccaacgataccctgctgctccagctgaccaacaccagcgcctactacatgtacttgttgctgctgctgaagtccgtggtgtacttcgccatcatcacatgctgcctgctgatggctatggtcaagcggaaggacagccggggaagggccaagcgatctggatctggagcaacaaacttctcactactcaaacaagcaggtgacgtggaggagaatcccgggcctactagtatggactggatttggcgcatccttttccttgtcggcgctgctaccggcgcgcattccttcgaacaagttcagctggttcagagcggagccgaagtgaagaaacctggggcctctgtgaaggtgtcctgcaaagccagcggctacacctttaccagctactggatcaactgggtccgacaggcccctggacaaggactggaatggatgggacagatccttccaggcggaggggacaccaactacaacggcaagttcaagggcagagtgaccatcaccgccgacaccagcacaagcaccgcctacatggaactgagcagcctgagaagcgaggacaccgccgtgtattattgcaccagacgggtgcccatccggctggattattggggacagggaaccctggtcaccgtgtctagtacgcgtatccagaaccctgatcctgccgtgtaccagctgcgggatagcaagagcagcgacaagagcgtgtgtctgttcaccgacttcgacagccagaccaacgtgtcccagagcaaggactccgacgtgtacatcaccgataagtgcgtgctggacatgcggagcatggacttcaagagcaactccgccgtggcctggtccaacaagtccgatttcgcctgcgccaacgccttcaacaacagcattatccccgaggacacattcttcccaagccccgagagcagcgactccaccgaccacgtgaagcccaaagagacagagaacaccaagcagcccagcaagagctgccacaagcccaaggccatcgtgcacaccgagaaagtgaacatgatgagcctgaccgtgctgggcctgcggatgctgttcgccaaaaccgtggccgtgaacttcctgctgaccgccaagctgttcttcctcctcaccgcc

SEQ ID NO: 5959 - DNA, 2592 bp, synthetic construct
  source 1..2592: mol_type = other DNA
atggccttaccagtgaccgccttgctcctgccgctggccttgctgctccacgccgccaggccggaagtgcagctggttgaatctggcggaggactggttcagcctggcggatctctgagactgtcttgtgccgccagcggcttcagcttcagcgacttttggatgagctgggtccgacaggcccctggcaaaggacttgaatgggtcgccacaatcagccaggccggcagcgagaaggactacgtggactctgtgaagggcagattcaccatcagccgggacaacgccaagaagtccctgtacctccagatgaacagcctgagagccgaggacaccgccgtgtactattgtgcctctggcgtgtacagcttcgactacagaggccagggcaccctggtcacagtctcttctggtaccggcggaggcggatctggcggcggaggtagcggtggcggaggatctgaattcgacatcgtgatgacacagagccctgatagcctggccgtgtctctgggagagagagccaccattaactgcaaggccagccagagcgtggactacgacggcgacagcttcctgaactggtatcagcagaagcccggccagcctcctaagctgctgatctacgccgccagcaatctggaaagcggcgtgccaagcagattttccggctctggcagcggcaccgatttcaccctgacaatatccagcctccagcctgaggacgtggccgtgtactactgccagcagagcaacgacgaccctctgacctttggacagggcaccaaggtggaaatcaaactcgagatccagaaccctgatcctgccgtgtaccagctgcgggatagcaagagcagcgacaagagcgtgtgtctgttcaccgacttcgacagccagaccaacgtgtcccagagcaaggactccgacgtgtacatcaccgataagtgcgtgctggacatgcggagcatggacttcaagagcaactccgccgtggcctggtccaacaagtccgatttcgcctgcgccaacgccttcaacaacagcattatccccgaggacacattcttcccaagccccgagagcagcgactccaccgaccacgtgaagcccaaagagacagagaacaccaagcagcccagcaagagctgccacaagcccaaggccatcgtgcacaccgagaaagtgaacatgatgagcctgaccgtgctgggcctgcggatgctgttcgccaaaaccgtggccgtgaacttcctgctgaccgccaagctgttcttcctcctcaccgcccgcgccaagagaagcggatctggcgtgaagcagaccctgaatttcgacctgctgaagctggctggcgacgtggaatccaacccaggccctactagtatggactggatttggcgcatccttttccttgtcggcgctgctaccggcgcgcattccttcgaacaagttcagctggttcagagcggagccgaagtgaagaaacctggggcctctgtgaaggtgtcctgcaaagccagcggctacacctttaccagctactggatcaactgggtccgacaggcccctggacaaggactggaatggatgggacagatccttccaggcggaggggacaccaactacaacggcaagttcaagggcagagtgaccatcaccgccgacaccagcacaagcaccgcctacatggaactgagcagcctgagaagcgaggacaccgccgtgtattattgcaccagacgggtgcccatccggctggattattggggacagggaaccctggtcaccgtgtctagtacgcgtgaggacctgaagaacgtgttcccacctgaggtggccgtgttcgagcctagcgaggccgagatcagccacacccagaaagccaccctcgtgtgcctggctaccggcttctaccccgaccatgtggaactgtcttggtgggtcaacggcaaagaggtgcacagcggcgtgtgtaccgacccccagccactgaaagaacagcccgccctgaacgacagccggtactgcctgagcagcagactgagagtgtccgccaccttctggcagaacccccggaaccacttcagatgccaggtgcagttctacggcctgagcgagaacgacgagtggacccaggacagagccaagcccgtgacccagatcgtgtctgccgaagcctggggcagagccgatgatgtgattaagatccactggcaggaaaagaagtccaacaccatcctgggcagccaggaaggcaacaccatgaagaccaacgacacctacatgaagttcagctggctgaccgtgcccgagaagtccctggacaaagaacacagatgcatcgtgcggcacgaaaacaacaagaacggcgtggaccaggaaatcatcttcccacccatcaagaccgatgtgattacaatggaccccaaggacaactgctccaaggacgccaacgataccctgctgctccagctgaccaacaccagcgcctactacatgtacttgttgctgctgctgaagtccgtggtgtacttcgccatcatcacatgctgcctgctgatggctatggtcaagcggaaggacagccgggga

SEQ ID NO: 5960 - DNA, 2991 bp, synthetic construct
  source 1..2991: mol_type = other DNA
atggccttaccagtgaccgccttgctcctgccgctggccttgctgctccacgccgccaggccggaagtgcagctggttgaatctggcggaggactggttcagcctggcggatctctgagactgtcttgtgccgccagcggcttcagcttcagcgacttttggatgagctgggtccgacaggcccctggcaaaggacttgaatgggtcgccacaatcagccaggccggcagcgagaaggactacgtggactctgtgaagggcagattcaccatcagccgggacaacgccaagaagtccctgtacctccagatgaacagcctgagagccgaggacaccgccgtgtactattgtgcctctggcgtgtacagcttcgactacagaggccagggcaccctggtcacagtctcttctggtaccggcggaggcggatctggcggcggaggtagcggtggcggaggatctgaattcgacatcgtgatgacacagagccctgatagcctggccgtgtctctgggagagagagccaccattaactgcaaggccagccagagcgtggactacgacggcgacagcttcctgaactggtatcagcagaagcccggccagcctcctaagctgctgatctacgccgccagcaatctggaaagcggcgtgccaagcagattttccggctctggcagcggcaccgatttcaccctgacaatatccagcctccagcctgaggacgtggccgtgtactactgccagcagagcaacgacgaccctctgacctttggacagggcaccaaggtggaaatcaaactcgaggacctgaagaacgtgttcccacctgaggtggccgtgttcgagcctagcgaggccgagatcagccacacccagaaagccaccctcgtgtgcctggctaccggcttctaccccgaccatgtggaactgtcttggtgggtcaacggcaaagaggtgcacagcggcgtgtgtaccgacccccagccactgaaagaacagcccgccctgaacgacagccggtactgcctgagcagcagactgagagtgtccgccaccttctggcagaacccccggaaccacttcagatgccaggtgcagttctacggcctgagcgagaacgacgagtggacccaggacagagccaagcccgtgacccagatcgtgtctgccgaagcctggggcagagccgatgatgtgattaagatccactggcaggaaaagaagtccaacaccatcctgggcagccaggaaggcaacaccatgaagaccaacgacacctacatgaagttcagctggctgaccgtgcccgagaagtccctggacaaagaacacagatgcatcgtgcggcacgaaaacaacaagaacggcgtggaccaggaaatcatcttcccacccatcaagaccgatgtgattacaatggaccccaaggacaactgctccaaggacgccaacgataccctgctgctccagctgaccaacaccagcgcctactacatgtacttgttgctgctgctgaagtccgtggtgtacttcgccatcatcacatgctgcctgctgatggctatggtcaagcggaaggacagccggggaagggccaagcgatctggatctggagcaacaaacttctcactactcaaacaagcaggtgacgtggaggagaatcccgggcctactagtatggactggatttggcgcatccttttccttgtcggcgctgctaccggcgcgcattccgggccccagctccagctgcaagagtctggacctggcctggtcaagcctagcgagacactgagcctgacctgtaccgtgtccggcgatagcatcagcagcggcgattactactggggctggatcagacagcctcctggcaaaggactggaatggatcggccacatctactacagcggcgtgacctactacaaccccagcctgaagtccagagtgaccatcagcgtggacaccagccggaaccagttctccctgaagctgtctagcgtgacagccgccgataccgccgtgtactactgcaccagagaggacagcagcaactggcggagtagaggccagggaacactggtcacagttagctctggatccggcggaggcggaagtggaggcggaggatctggcggcggaggctctttcgaacaagttcagctggttcagagcggagccgaagtgaagaaacctggggcctctgtgaaggtgtcctgcaaagccagcggctacacctttaccagctactggatcaactgggtccgacaggcccctggacaaggactggaatggatgggacagatccttccaggcggaggggacaccaactacaacggcaagttcaagggcagagtgaccatcaccgccgacaccagcacaagcaccgcctacatggaactgagcagcctgagaagcgaggacaccgccgtgtattattgcaccagacgggtgcccatccggctggattattggggacagggaaccctggtcaccgtgtctagtacgcgtatccagaaccctgatcctgccgtgtaccagctgcgggatagcaagagcagcgacaagagcgtgtgtctgttcaccgacttcgacagccagaccaacgtgtcccagagcaaggactccgacgtgtacatcaccgataagtgcgtgctggacatgcggagcatggacttcaagagcaactccgccgtggcctggtccaacaagtccgatttcgcctgcgccaacgccttcaacaacagcattatccccgaggacacattcttcccaagccccgagagcagcgactccaccgaccacgtgaagcccaaagagacagagaacaccaagcagcccagcaagagctgccacaagcccaaggccatcgtgcacaccgagaaagtgaacatgatgagcctgaccgtgctgggcctgcggatgctgttcgccaaaaccgtggccgtgaacttcctgctgaccgccaagctgttcttcctcctcaccgcc

SEQ ID NO: 5961 - DNA, 3003 bp, synthetic construct
  source 1..3003: mol_type = other DNA
atggccttaccagtgaccgccttgctcctgccgctggccttgctgctccacgccgccaggccggaagtgcagctggttgaatctggcggaggactggttcagcctggcggatctctgagactgtcttgtgccgccagcggcttcagcttcagcgacttttggatgagctgggtccgacaggcccctggcaaaggacttgaatgggtcgccacaatcagccaggccggcagcgagaaggactacgtggactctgtgaagggcagattcaccatcagccgggacaacgccaagaagtccctgtacctccagatgaacagcctgagagccgaggacaccgccgtgtactattgtgcctctggcgtgtacagcttcgactacagaggccagggcaccctggtcacagtctcttctggtaccggcggaggcggatctggcggcggaggtagcggtggcggaggatctgaattcgacatcgtgatgacacagagccctgatagcctggccgtgtctctgggagagagagccaccattaactgcaaggccagccagagcgtggactacgacggcgacagcttcctgaactggtatcagcagaagcccggccagcctcctaagctgctgatctacgccgccagcaatctggaaagcggcgtgccaagcagattttccggctctggcagcggcaccgatttcaccctgacaatatccagcctccagcctgaggacgtggccgtgtactactgccagcagagcaacgacgaccctctgacctttggacagggcaccaaggtggaaatcaaactcgagatccagaaccctgatcctgccgtgtaccagctgcgggatagcaagagcagcgacaagagcgtgtgtctgttcaccgacttcgacagccagaccaacgtgtcccagagcaaggactccgacgtgtacatcaccgataagtgcgtgctggacatgcggagcatggacttcaagagcaactccgccgtggcctggtccaacaagtccgatttcgcctgcgccaacgccttcaacaacagcattatccccgaggacacattcttcccaagccccgagagcagcgactccaccgaccacgtgaagcccaaagagacagagaacaccaagcagcccagcaagagctgccacaagcccaaggccatcgtgcacaccgagaaagtgaacatgatgagcctgaccgtgctgggcctgcggatgctgttcgccaaaaccgtggccgtgaacttcctgctgaccgccaagctgttcttcctcctcaccgcccgcgccaagagaagcggatctggcgtgaagcagaccctgaatttcgacctgctgaagctggctggcgacgtggaatccaacccaggccctactagtatggactggatttggcgcatccttttccttgtcggcgctgctaccggcgcgcattccgggccccagctccagctgcaagagtctggacctggcctggtcaagcctagcgagacactgagcctgacctgtaccgtgtccggcgatagcatcagcagcggcgattactactggggctggatcagacagcctcctggcaaaggactggaatggatcggccacatctactacagcggcgtgacctactacaaccccagcctgaagtccagagtgaccatcagcgtggacaccagccggaaccagttctccctgaagctgtctagcgtgacagccgccgataccgccgtgtactactgcaccagagaggacagcagcaactggcggagtagaggccagggaacactggtcacagttagctctggatccggcggaggcggaagtggaggcggaggatctggcggcggaggctctttcgaacaagttcagctggttcagagcggagccgaagtgaagaaacctggggcctctgtgaaggtgtcctgcaaagccagcggctacacctttaccagctactggatcaactgggtccgacaggcccctggacaaggactggaatggatgggacagatccttccaggcggaggggacaccaactacaacggcaagttcaagggcagagtgaccatcaccgccgacaccagcacaagcaccgcctacatggaactgagcagcctgagaagcgaggacaccgccgtgtattattgcaccagacgggtgcccatccggctggattattggggacagggaaccctggtcaccgtgtctagtacgcgtgaggacctgaagaacgtgttcccacctgaggtggccgtgttcgagcctagcgaggccgagatcagccacacccagaaagccaccctcgtgtgcctggctaccggcttctaccccgaccatgtggaactgtcttggtgggtcaacggcaaagaggtgcacagcggcgtgtgtaccgacccccagccactgaaagaacagcccgccctgaacgacagccggtactgcctgagcagcagactgagagtgtccgccaccttctggcagaacccccggaaccacttcagatgccaggtgcagttctacggcctgagcgagaacgacgagtggacccaggacagagccaagcccgtgacccagatcgtgtctgccgaagcctggggcagagccgatgatgtgattaagatccactggcaggaaaagaagtccaacaccatcctgggcagccaggaaggcaacaccatgaagaccaacgacacctacatgaagttcagctggctgaccgtgcccgagaagtccctggacaaagaacacagatgcatcgtgcggcacgaaaacaacaagaacggcgtggaccaggaaatcatcttcccacccatcaagaccgatgtgattacaatggaccccaaggacaactgctccaaggacgccaacgataccctgctgctccagctgaccaacaccagcgcctactacatgtacttgttgctgctgctgaagtccgtggtgtacttcgccatcatcacatgctgcctgctgatggctatggtcaagcggaaggacagccgggga

SEQ ID NO: 5962 - DNA, 2169 bp, synthetic construct
  source 1..2169: mol_type = other DNA
atggccttaccagtgaccgccttgctcctgccgctggccttgctgctccacgccgccaggccggacatcgtgatgacacagagccctgatagcctggccgtgtctctgggagagagagccaccattaactgcaaggccagccagagcgtggactacgacggcgacagcttcctgaactggtatcagcagaagcccggccagcctcctaagctgctgatctacgccgccagcaatctggaaagcggcgtgccaagcagattttccggctctggcagcggcaccgatttcaccctgacaatatccagcctccagcctgaggacgtggccgtgtactactgccagcagagcaacgacgaccctctgacctttggacagggcaccaaggtggaaatcaaactcgaggacctgaagaacgtgttcccacctgaggtggccgtgttcgagcctagcgaggccgagatcagccacacccagaaagccaccctcgtgtgcctggctaccggcttctaccccgaccatgtggaactgtcttggtgggtcaacggcaaagaggtgcacagcggcgtgtgtaccgacccccagccactgaaagaacagcccgccctgaacgacagccggtactgcctgagcagcagactgagagtgtccgccaccttctggcagaacccccggaaccacttcagatgccaggtgcagttctacggcctgagcgagaacgacgagtggacccaggacagagccaagcccgtgacccagatcgtgtctgccgaagcctggggcagagccgatgatgtgattaagatccactggcaggaaaagaagtccaacaccatcctgggcagccaggaaggcaacaccatgaagaccaacgacacctacatgaagttcagctggctgaccgtgcccgagaagtccctggacaaagaacacagatgcatcgtgcggcacgaaaacaacaagaacggcgtggaccaggaaatcatcttcccacccatcaagaccgatgtgattacaatggaccccaaggacaactgctccaaggacgccaacgataccctgctgctccagctgaccaacaccagcgcctactacatgtacttgttgctgctgctgaagtccgtggtgtacttcgccatcatcacatgctgcctgctgcggagaaccgccttctgctgcaacggcgagaagtctagggccaagcgatctggatctggagcaacaaacttctcactactcaaacaagcaggtgacgtggaggagaatcccgggcctactagtatggactggatttggcgcatccttttccttgtcggcgctgctaccggcgcgcattccttcgaacaagttcagctggttcagagcggagccgaagtgaagaaacctggggcctctgtgaaggtgtcctgcaaagccagcggctacacctttaccagctactggatcaactgggtccgacaggcccctggacaaggactggaatggatgggacagatccttccaggcggaggggacaccaactacaacggcaagttcaagggcagagtgaccatcaccgccgacaccagcacaagcaccgcctacatggaactgagcagcctgagaagcgaggacaccgccgtgtattattgcaccagacgggtgcccatccggctggattattggggacagggaaccctggtcaccgtgtctagtacgcgtatccagaaccctgatcctgccgtgtaccagctgcgggatagcaagagcagcgacaagagcgtgtgtctgttcaccgacttcgacagccagaccaacgtgtcccagagcaaggactccgacgtgtacatcaccgataagtgcgtgctggacatgcggagcatggacttcaagagcaactccgccgtggcctggtccaacaagtccgatttcgcctgcgccaacgccttcaacaacagcattatccccgaggacacattcttcccaagccccgagagcagcgactccaccgaccacgtgaagcccaaagagacagagaacaccaagcagcccagcaagagctgccacaagcccaaggccatcgtgcacaccgagaaagtgaacatgatgagcctgaccgtgctgggcctgcggatgctgttcgccaaaaccgtggccgtgaacttcctgctgaccgccaagctgttcttcctc

SEQ ID NO: 5963 - DNA, 2181 bp, synthetic construct
  source 1..2181: mol_type = other DNA
atggccttaccagtgaccgccttgctcctgccgctggccttgctgctccacgccgccaggccggacatcgtgatgacacagagccctgatagcctggccgtgtctctgggagagagagccaccattaactgcaaggccagccagagcgtggactacgacggcgacagcttcctgaactggtatcagcagaagcccggccagcctcctaagctgctgatctacgccgccagcaatctggaaagcggcgtgccaagcagattttccggctctggcagcggcaccgatttcaccctgacaatatccagcctccagcctgaggacgtggccgtgtactactgccagcagagcaacgacgaccctctgacctttggacagggcaccaaggtggaaatcaaactcgagatccagaaccctgatcctgccgtgtaccagctgcgggatagcaagagcagcgacaagagcgtgtgtctgttcaccgacttcgacagccagaccaacgtgtcccagagcaaggactccgacgtgtacatcaccgataagtgcgtgctggacatgcggagcatggacttcaagagcaactccgccgtggcctggtccaacaagtccgatttcgcctgcgccaacgccttcaacaacagcattatccccgaggacacattcttcccaagccccgagagcagcgactccaccgaccacgtgaagcccaaagagacagagaacaccaagcagcccagcaagagctgccacaagcccaaggccatcgtgcacaccgagaaagtgaacatgatgagcctgaccgtgctgggcctgcggatgctgttcgccaaaaccgtggccgtgaacttcctgctgaccgccaagctgttcttcctccgcgccaagagaagcggatctggcgtgaagcagaccctgaatttcgacctgctgaagctggctggcgacgtggaatccaacccaggccctactagtatggactggatttggcgcatccttttccttgtcggcgctgctaccggcgcgcattccttcgaacaagttcagctggttcagagcggagccgaagtgaagaaacctggggcctctgtgaaggtgtcctgcaaagccagcggctacacctttaccagctactggatcaactgggtccgacaggcccctggacaaggactggaatggatgggacagatccttccaggcggaggggacaccaactacaacggcaagttcaagggcagagtgaccatcaccgccgacaccagcacaagcaccgcctacatggaactgagcagcctgagaagcgaggacaccgccgtgtattattgcaccagacgggtgcccatccggctggattattggggacagggaaccctggtcaccgtgtctagtacgcgtgaggacctgaagaacgtgttcccacctgaggtggccgtgttcgagcctagcgaggccgagatcagccacacccagaaagccaccctcgtgtgcctggctaccggcttctaccccgaccatgtggaactgtcttggtgggtcaacggcaaagaggtgcacagcggcgtgtgtaccgacccccagccactgaaagaacagcccgccctgaacgacagccggtactgcctgagcagcagactgagagtgtccgccaccttctggcagaacccccggaaccacttcagatgccaggtgcagttctacggcctgagcgagaacgacgagtggacccaggacagagccaagcccgtgacccagatcgtgtctgccgaagcctggggcagagccgatgatgtgattaagatccactggcaggaaaagaagtccaacaccatcctgggcagccaggaaggcaacaccatgaagaccaacgacacctacatgaagttcagctggctgaccgtgcccgagaagtccctggacaaagaacacagatgcatcgtgcggcacgaaaacaacaagaacggcgtggaccaggaaatcatcttcccacccatcaagaccgatgtgattacaatggaccccaaggacaactgctccaaggacgccaacgataccctgctgctccagctgaccaacaccagcgcctactacatgtacttgttgctgctgctgaagtccgtggtgtacttcgccatcatcacatgctgcctgctgcggagaaccgccttctgctgcaacggcgagaagtct

SEQ ID NO: 5964 - DNA, 2574 bp, synthetic construct
  source 1..2574: mol_type = other DNA
atggccttaccagtgaccgccttgctcctgccgctggccttgctgctccacgccgccaggccggaagtgcagctggttgaatctggcggaggactggttcagcctggcggatctctgagactgtcttgtgccgccagcggcttcagcttcagcgacttttggatgagctgggtccgacaggcccctggcaaaggacttgaatgggtcgccacaatcagccaggccggcagcgagaaggactacgtggactctgtgaagggcagattcaccatcagccgggacaacgccaagaagtccctgtacctccagatgaacagcctgagagccgaggacaccgccgtgtactattgtgcctctggcgtgtacagcttcgactacagaggccagggcaccctggtcacagtctcttctggtaccggcggaggcggatctggcggcggaggtagcggtggcggaggatctgaattcgacatcgtgatgacacagagccctgatagcctggccgtgtctctgggagagagagccaccattaactgcaaggccagccagagcgtggactacgacggcgacagcttcctgaactggtatcagcagaagcccggccagcctcctaagctgctgatctacgccgccagcaatctggaaagcggcgtgccaagcagattttccggctctggcagcggcaccgatttcaccctgacaatatccagcctccagcctgaggacgtggccgtgtactactgccagcagagcaacgacgaccctctgacctttggacagggcaccaaggtggaaatcaaactcgaggacctgaagaacgtgttcccacctgaggtggccgtgttcgagcctagcgaggccgagatcagccacacccagaaagccaccctcgtgtgcctggctaccggcttctaccccgaccatgtggaactgtcttggtgggtcaacggcaaagaggtgcacagcggcgtgtgtaccgacccccagccactgaaagaacagcccgccctgaacgacagccggtactgcctgagcagcagactgagagtgtccgccaccttctggcagaacccccggaaccacttcagatgccaggtgcagttctacggcctgagcgagaacgacgagtggacccaggacagagccaagcccgtgacccagatcgtgtctgccgaagcctggggcagagccgatgatgtgattaagatccactggcaggaaaagaagtccaacaccatcctgggcagccaggaaggcaacaccatgaagaccaacgacacctacatgaagttcagctggctgaccgtgcccgagaagtccctggacaaagaacacagatgcatcgtgcggcacgaaaacaacaagaacggcgtggaccaggaaatcatcttcccacccatcaagaccgatgtgattacaatggaccccaaggacaactgctccaaggacgccaacgataccctgctgctccagctgaccaacaccagcgcctactacatgtacttgttgctgctgctgaagtccgtggtgtacttcgccatcatcacatgctgcctgctgcggagaaccgccttctgctgcaacggcgagaagtctagggccaagcgatctggatctggagcaacaaacttctcactactcaaacaagcaggtgacgtggaggagaatcccgggcctactagtatggactggatttggcgcatccttttccttgtcggcgctgctaccggcgcgcattccttcgaacaagttcagctggttcagagcggagccgaagtgaagaaacctggggcctctgtgaaggtgtcctgcaaagccagcggctacacctttaccagctactggatcaactgggtccgacaggcccctggacaaggactggaatggatgggacagatccttccaggcggaggggacaccaactacaacggcaagttcaagggcagagtgaccatcaccgccgacaccagcacaagcaccgcctacatggaactgagcagcctgagaagcgaggacaccgccgtgtattattgcaccagacgggtgcccatccggctggattattggggacagggaaccctggtcaccgtgtctagtacgcgtatccagaaccctgatcctgccgtgtaccagctgcgggatagcaagagcagcgacaagagcgtgtgtctgttcaccgacttcgacagccagaccaacgtgtcccagagcaaggactccgacgtgtacatcaccgataagtgcgtgctggacatgcggagcatggacttcaagagcaactccgccgtggcctggtccaacaagtccgatttcgcctgcgccaacgccttcaacaacagcattatccccgaggacacattcttcccaagccccgagagcagcgactccaccgaccacgtgaagcccaaagagacagagaacaccaagcagcccagcaagagctgccacaagcccaaggccatcgtgcacaccgagaaagtgaacatgatgagcctgaccgtgctgggcctgcggatgctgttcgccaaaaccgtggccgtgaacttcctgctgaccgccaagctgttcttcctc

SEQ ID NO: 5965 - DNA, 2985 bp, synthetic construct
  source 1..2985: mol_type = other DNA
atggccttaccagtgaccgccttgctcctgccgctggccttgctgctccacgccgccaggccggaagtgcagctggttgaatctggcggaggactggttcagcctggcggatctctgagactgtcttgtgccgccagcggcttcagcttcagcgacttttggatgagctgggtccgacaggcccctggcaaaggacttgaatgggtcgccacaatcagccaggccggcagcgagaaggactacgtggactctgtgaagggcagattcaccatcagccgggacaacgccaagaagtccctgtacctccagatgaacagcctgagagccgaggacaccgccgtgtactattgtgcctctggcgtgtacagcttcgactacagaggccagggcaccctggtcacagtctcttctggtaccggcggaggcggatctggcggcggaggtagcggtggcggaggatctgaattcgacatcgtgatgacacagagccctgatagcctggccgtgtctctgggagagagagccaccattaactgcaaggccagccagagcgtggactacgacggcgacagcttcctgaactggtatcagcagaagcccggccagcctcctaagctgctgatctacgccgccagcaatctggaaagcggcgtgccaagcagattttccggctctggcagcggcaccgatttcaccctgacaatatccagcctccagcctgaggacgtggccgtgtactactgccagcagagcaacgacgaccctctgacctttggacagggcaccaaggtggaaatcaaactcgaggacctgaagaacgtgttcccacctgaggtggccgtgttcgagcctagcgaggccgagatcagccacacccagaaagccaccctcgtgtgcctggctaccggcttctaccccgaccatgtggaactgtcttggtgggtcaacggcaaagaggtgcacagcggcgtgtgtaccgacccccagccactgaaagaacagcccgccctgaacgacagccggtactgcctgagcagcagactgagagtgtccgccaccttctggcagaacccccggaaccacttcagatgccaggtgcagttctacggcctgagcgagaacgacgagtggacccaggacagagccaagcccgtgacccagatcgtgtctgccgaagcctggggcagagccgatgatgtgattaagatccactggcaggaaaagaagtccaacaccatcctgggcagccaggaaggcaacaccatgaagaccaacgacacctacatgaagttcagctggctgaccgtgcccgagaagtccctggacaaagaacacagatgcatcgtgcggcacgaaaacaacaagaacggcgtggaccaggaaatcatcttcccacccatcaagaccgatgtgattacaatggaccccaaggacaactgctccaaggacgccaacgataccctgctgctccagctgaccaacaccagcgcctactacatgtacttgttgctgctgctgaagtccgtggtgtacttcgccatcatcacatgctgcctgctgcggagaaccgccttctgctgcaacggcgagaagtctagggccaagcgatctggatctggagcaacaaacttctcactactcaaacaagcaggtgacgtggaggagaatcccgggcctactagtatggactggatttggcgcatccttttccttgtcggcgctgctaccggcgcgcattccgggccccagctccagctgcaagagtctggacctggcctggtcaagcctagcgagacactgagcctgacctgtaccgtgtccggcgatagcatcagcagcggcgattactactggggctggatcagacagcctcctggcaaaggactggaatggatcggccacatctactacagcggcgtgacctactacaaccccagcctgaagtccagagtgaccatcagcgtggacaccagccggaaccagttctccctgaagctgtctagcgtgacagccgccgataccgccgtgtactactgcaccagagaggacagcagcaactggcggagtagaggccagggaacactggtcacagttagctctggatccggcggaggcggaagtggaggcggaggatctggcggcggaggctctttcgaacaagttcagctggttcagagcggagccgaagtgaagaaacctggggcctctgtgaaggtgtcctgcaaagccagcggctacacctttaccagctactggatcaactgggtccgacaggcccctggacaaggactggaatggatgggacagatccttccaggcggaggggacaccaactacaacggcaagttcaagggcagagtgaccatcaccgccgacaccagcacaagcaccgcctacatggaactgagcagcctgagaagcgaggacaccgccgtgtattattgcaccagacgggtgcccatccggctggattattggggacagggaaccctggtcaccgtgtctagtacgcgtatccagaaccctgatcctgccgtgtaccagctgcgggatagcaagagcagcgacaagagcgtgtgtctgttcaccgacttcgacagccagaccaacgtgtcccagagcaaggactccgacgtgtacatcaccgataagtgcgtgctggacatgcggagcatggacttcaagagcaactccgccgtggcctggtccaacaagtccgatttcgcctgcgccaacgccttcaacaacagcattatccccgaggacacattcttcccaagccccgagagcagcgactccaccgaccacgtgaagcccaaagagacagagaacaccaagcagcccagcaagagctgccacaagcccaaggccatcgtgcacaccgagaaagtgaacatgatgagcctgaccgtgctgggcctgcggatgctgttcgccaaaaccgtggccgtgaacttcctgctgaccgccaagctgttcttcctc

SEQ ID NO: 5966 - DNA, 1863 bp, synthetic construct
  source 1..1863: mol_type = other DNA
atggccttaccagtgaccgccttgctcctgccgctggccttgctgctccacgccgccaggccggacatcgtgatgacacagagccctgatagcctggccgtgtctctgggagagagagccaccattaactgcaaggccagccagagcgtggactacgacggcgacagcttcctgaactggtatcagcagaagcccggccagcctcctaagctgctgatctacgccgccagcaatctggaaagcggcgtgccaagcagattttccggctctggcagcggcaccgatttcaccctgacaatatccagcctccagcctgaggacgtggccgtgtactactgccagcagagcaacgacgaccctctgacctttggacagggcaccaaggtggaaatcaaactcgaggacctgaagaacgtgttcccacctgaggtggccgtgttcgagcctagcgaggccgagatcagccacacccagaaagccaccctcgtgtgcctggctaccggcttctaccccgaccatgtggaactgtcttggtgggtcaacggcaaagaggtgcacagcggcgtgtctaccgacccccagccactgaaagaacagcccgccctgaacgacagccggtactgcctgagcagcagactgagagtgtccgccaccttctggcagaacccccggaaccacttcagatgccaggtgcagttctacggcctgagcgagaacgacgagtggacccaggacagagccaagcccgtgacccagatcgtgtctgccgaagcctggggcagagccgattgcgacgtgaagctggtggaaaagagcttcgagacagacaccaacctgaacttccagaacctgagcgtgatcggcttcagaatcctgctgctgaaagtggccggctttaacctgctgatgaccctgcggctgtggtccagcagggccaagcgatctggatctggagcaacaaacttctcactactcaaacaagcaggtgacgtggaggagaatcccgggcctactagtatggactggatttggcgcatccttttccttgtcggcgctgctaccggcgcgcattccttcgaacaagttcagctggttcagagcggagccgaagtgaagaaacctggggcctctgtgaaggtgtcctgcaaagccagcggctacacctttaccagctactggatcaactgggtccgacaggcccctggacaaggactggaatggatgggacagatccttccaggcggaggggacaccaactacaacggcaagttcaagggcagagtgaccatcaccgccgacaccagcacaagcaccgcctacatggaactgagcagcctgagaagcgaggacaccgccgtgtattattgcaccagacgggtgcccatccggctggattattggggacagggaaccctggtcaccgtgtctagtacgcgtatccagaaccctgatcctgccgtgtaccagctgcgggatagcaagagcagcgacaagagcgtgtgtctgttcaccgacttcgacagccagaccaacgtgtcccagagcaaggactccgacgtgtacatcaccgataagaccgtgctggacatgcggagcatggacttcaagagcaactccgccgtggcctggtccaacaagtccgatttcgcctgcgccaacgccttcaacaacagcattatccccgaggacacattcttcccaagccccgagagcagctgcggctttaccagcgagagctaccagcagggcgtgctgagcgccaccatcctgtacgagatcctgctgggcaaggccaccctgtacgccgtgctggtgtctgccctggtgctgatggctatggtcaagcggaaggacagccgggga

SEQ ID NO: 5967 - DNA, 1863 bp, synthetic construct
  source 1..1863: mol_type = other DNA
atggccttaccagtgaccgccttgctcctgccgctggccttgctgctccacgccgccaggccggacatcgtgatgacacagagccctgatagcctggccgtgtctctgggagagagagccaccattaactgcaaggccagccagagcgtggactacgacggcgacagcttcctgaactggtatcagcagaagcccggccagcctcctaagctgctgatctacgccgccagcaatctggaaagcggcgtgccaagcagattttccggctctggcagcggcaccgatttcaccctgacaatatccagcctccagcctgaggacgtggccgtgtactactgccagcagagcaacgacgaccctctgacctttggacagggcaccaaggtggaaatcaaactcgaggacctgaagaacgtgttcccacctgaggtggccgtgttcgagcctagcgaggccgagatcagccacacccagaaagccaccctcgtgtgcctggctaccggcttctaccccgaccatgtggaactgtcttggtgggtcaacggcaaagaggtgcacagcggcgtgtctaccgacccccagccactgaaagaacagcccgccctgaacgacagccggtactgcctgagcagcagactgagagtgtccgccaccttctggcagaacccccggaaccacttcagatgccaggtgcagttctacggcctgagcgagaacgacgagtggacccaggacagagccaagcccgtgacccagatcgtgtctgccgaagcctggggcagagccgattgcggctttaccagcgagagctaccagcagggcgtgctgagcgccaccaacctgagcgtgatcggcttcagaatcctgctgctgaaagtggccggctttaacctgctgatgaccctgcggctgtggtccagcagggccaagcgatctggatctggagcaacaaacttctcactactcaaacaagcaggtgacgtggaggagaatcccgggcctactagtatggactggatttggcgcatccttttccttgtcggcgctgctaccggcgcgcattccttcgaacaagttcagctggttcagagcggagccgaagtgaagaaacctggggcctctgtgaaggtgtcctgcaaagccagcggctacacctttaccagctactggatcaactgggtccgacaggcccctggacaaggactggaatggatgggacagatccttccaggcggaggggacaccaactacaacggcaagttcaagggcagagtgaccatcaccgccgacaccagcacaagcaccgcctacatggaactgagcagcctgagaagcgaggacaccgccgtgtattattgcaccagacgggtgcccatccggctggattattggggacagggaaccctggtcaccgtgtctagtacgcgtatccagaaccctgatcctgccgtgtaccagctgcgggatagcaagagcagcgacaagagcgtgtgtctgttcaccgacttcgacagccagaccaacgtgtcccagagcaaggactccgacgtgtacatcaccgataagaccgtgctggacatgcggagcatggacttcaagagcaactccgccgtggcctggtccaacaagtccgatttcgcctgcgccaacgccttcaacaacagcattatccccgaggacacattcttcccaagccccgagagcagctgcgacgtgaagctggtggaaaagagcttcgagacagacaccaacctgaacttccagatcctgtacgagatcctgctgggcaaggccaccctgtacgccgtgctggtgtctgccctggtgctgatggctatggtcaagcggaaggacagccgggga

SEQ ID NO: 5968 - DNA, 2175 bp, synthetic construct
  source 1..2175: mol_type = other DNA
atggccttaccagtgaccgccttgctcctgccgctggccttgctgctccacgccgccaggccggacatcgtgatgacacagagccctgatagcctggccgtgtctctgggagagagagccaccattaactgcaaggccagccagagcgtggactacgacggcgacagcttcctgaactggtatcagcagaagcccggccagcctcctaagctgctgatctacgccgccagcaatctggaaagcggcgtgccaagcagattttccggctctggcagcggcaccgatttcaccctgacaatatccagcctccagcctgaggacgtggccgtgtactactgccagcagagcaacgacgaccctctgacctttggacagggcaccaaggtggaaatcaaactcgaggacctgaagaacgtgttcccacctgaggtggccgtgttcgagcctagcgaggccgagatcagccacacccagaaagccaccctcgtgtgcctggctaccggcttctaccccgaccatgtggaactgtcttggtgggtcaacggcaaagaggtgcacagcggcgtgtctaccgacccccagccactgaaagaacagcccgccctgaacgacagccggtactgcctgagcagcagactgagagtgtccgccaccttctggcagaacccccggaaccacttcagatgccaggtgcagttctacggcctgagcgagaacgacgagtggacccaggacagagccaagcccgtgacccagatcgtgtctgccgaagcctggggcagagccgatgatgtgattaagatccactggcaggaaaagaagtccaacaccatcctgggcagccaggaaggcaacaccatgaagaccaacgacacctacatgaagttcagctggctgaccgtgcccgagaagtccctggacaaagaacacagatgcatcgtgcggcacgaaaacaacaagaacggcgtggaccaggaaatcatcttcccacccatcaagaccgatgtgattacaatggaccccaaggacaactgctccaaggacgccaacgataccctgctgctccagctgaccaacaccagcgcctactacatgtacttgttgctgctgctgaagtccgtggtgtacttcgccatcatcacatgctgcctgctgatggctatggtcaagcggaaggacagccggggaagggccaagcgatctggatctggagcaacaaacttctcactactcaaacaagcaggtgacgtggaggagaatcccgggcctactagtatggactggatttggcgcatccttttccttgtcggcgctgctaccggcgcgcattccttcgaacaagttcagctggttcagagcggagccgaagtgaagaaacctggggcctctgtgaaggtgtcctgcaaagccagcggctacacctttaccagctactggatcaactgggtccgacaggcccctggacaaggactggaatggatgggacagatccttccaggcggaggggacaccaactacaacggcaagttcaagggcagagtgaccatcaccgccgacaccagcacaagcaccgcctacatggaactgagcagcctgagaagcgaggacaccgccgtgtattattgcaccagacgggtgcccatccggctggattattggggacagggaaccctggtcaccgtgtctagtacgcgtatccagaaccctgatcctgccgtgtaccagctgcgggatagcaagagcagcgacaagagcgtgtgtctgttcaccgacttcgacagccagaccaacgtgtcccagagcaaggactccgacgtgtacatcaccgataagaccgtgctggacatgcggagcatggacttcaagagcaactccgccgtggcctggtccaacaagtccgatttcgcctgcgccaacgccttcaacaacagcattatccccgaggacacattcttcccaagccccgagagcagcgactccaccgaccacgtgaagcccaaagagacagagaacaccaagcagcccagcaagagctgccacaagcccaaggccatcgtgcacaccgagaaagtgaacatgatgagcctgaccgtgctgggcctgcggatgctgttcgccaaaaccgtggccgtgaacttcctgctgaccgccaagctgttcttcctcctcaccgcc

SEQ ID NO: 5969 - DNA, 2169 bp, synthetic construct
  source 1..2169: mol_type = other DNA
atggccttaccagtgaccgccttgctcctgccgctggccttgctgctccacgccgccaggccggacatcgtgatgacacagagccctgatagcctggccgtgtctctgggagagagagccaccattaactgcaaggccagccagagcgtggactacgacggcgacagcttcctgaactggtatcagcagaagcccggccagcctcctaagctgctgatctacgccgccagcaatctggaaagcggcgtgccaagcagattttccggctctggcagcggcaccgatttcaccctgacaatatccagcctccagcctgaggacgtggccgtgtactactgccagcagagcaacgacgaccctctgacctttggacagggcaccaaggtggaaatcaaactcgaggacctgaagaacgtgttcccacctgaggtggccgtgttcgagcctagcgaggccgagatcagccacacccagaaagccaccctcgtgtgcctggctaccggcttctaccccgaccatgtggaactgtcttggtgggtcaacggcaaagaggtgcacagcggcgtgtctaccgacccccagccactgaaagaacagcccgccctgaacgacagccggtactgcctgagcagcagactgagagtgtccgccaccttctggcagaacccccggaaccacttcagatgccaggtgcagttctacggcctgagcgagaacgacgagtggacccaggacagagccaagcccgtgacccagatcgtgtctgccgaagcctggggcagagccgatgatgtgattaagatccactggcaggaaaagaagtccaacaccatcctgggcagccaggaaggcaacaccatgaagaccaacgacacctacatgaagttcagctggctgaccgtgcccgagaagtccctggacaaagaacacagatgcatcgtgcggcacgaaaacaacaagaacggcgtggaccaggaaatcatcttcccacccatcaagaccgatgtgattacaatggaccccaaggacaactgctccaaggacgccaacgataccctgctgctccagctgaccaacaccagcgcctactacatgtacttgttgctgctgctgaagtccgtggtgtacttcgccatcatcacatgctgcctgctgcggagaaccgccttctgctgcaacggcgagaagtctagggccaagcgatctggatctggagcaacaaacttctcactactcaaacaagcaggtgacgtggaggagaatcccgggcctactagtatggactggatttggcgcatccttttccttgtcggcgctgctaccggcgcgcattccttcgaacaagttcagctggttcagagcggagccgaagtgaagaaacctggggcctctgtgaaggtgtcctgcaaagccagcggctacacctttaccagctactggatcaactgggtccgacaggcccctggacaaggactggaatggatgggacagatccttccaggcggaggggacaccaactacaacggcaagttcaagggcagagtgaccatcaccgccgacaccagcacaagcaccgcctacatggaactgagcagcctgagaagcgaggacaccgccgtgtattattgcaccagacgggtgcccatccggctggattattggggacagggaaccctggtcaccgtgtctagtacgcgtatccagaaccctgatcctgccgtgtaccagctgcgggatagcaagagcagcgacaagagcgtgtgtctgttcaccgacttcgacagccagaccaacgtgtcccagagcaaggactccgacgtgtacatcaccgataagaccgtgctggacatgcggagcatggacttcaagagcaactccgccgtggcctggtccaacaagtccgatttcgcctgcgccaacgccttcaacaacagcattatccccgaggacacattcttcccaagccccgagagcagcgactccaccgaccacgtgaagcccaaagagacagagaacaccaagcagcccagcaagagctgccacaagcccaaggccatcgtgcacaccgagaaagtgaacatgatgagcctgaccgtgctgggcctgcggatgctgttcgccaaaaccgtggccgtgaacttcctgctgaccgccaagctgttcttcctc

SEQ ID NO: 5970 - DNA, 2601 bp, synthetic construct
  source 1..2601: mol_type = other DNA
atggccttaccagtgaccgccttgctcctgccgctggccttgctgctccacgccgccaggccgctcgaggaggacctgaagaacgtgttcccacctgaggtggccgtgttcgagcctagcgaggccgagatcagccacacccagaaagccaccctcgtgtgcctggctaccggcttctaccccgaccatgtggaactgtcttggtgggtcaacggcaaagaggtgcacagcggcgtgtgtaccgacccccagccactgaaagaacagcccgccctgaacgacagccggtactgcctgagcagcagactgagagtgtccgccaccttctggcagaacccccggaaccacttcagatgccaggtgcagttctacggcctgagcgagaacgacgagtggacccaggacagagccaagcccgtgacccagatcgtgtctgccgaagcctggggcagagccgattgcggctttaccagcgagagctaccagcagggcgtgctgagcgccaccaacctgagcgtgatcggcttcagaatcctgctgctgaaagtggccggctttaacctgctgatgaccctgcggctgtggtccagcagggccaagcgatctggatctggagcaacaaacttctcactactcaaacaagcaggtgacgtggaggagaatcccgggcctactagcatggccttaccagtgaccgccttgctcctgccgctggccttgctgctccacgccgccaggccggacatcgtgatgacacagagccctgatagcctggccgtgtctctgggagagagagccaccattaactgcaaggccagccagagcgtggactacgacggcgacagcttcctgaactggtatcagcagaagcccggccagcctcctaagctgctgatctacgccgccagcaatctggaaagcggcgtgccaagcagattttccggctctggcagcggcaccgatttcaccctgacaatatccagcctccagcctgaggacgtggccgtgtactactgccagcagagcaacgacgaccctctgacctttggacagggcaccaaggtggaaatcaaaggcggaggcggaagtggaggcggaggatctggcggcggaggctctcaagttcagctggttcagagcggagccgaagtgaagaaacctggggcctctgtgaaggtgtcctgcaaagccagcggctacacctttaccagctactggatcaactgggtccgacaggcccctggacaaggactggaatggatgggacagatccttccaggcggaggggacaccaactacaacggcaagttcaagggcagagtgaccatcaccgccgacaccagcacaagcaccgcctacatggaactgagcagcctgagaagcgaggacaccgccgtgtattattgcaccagacgggtgcccatccggctggattattggggacagggaaccctggtcaccgtgtctagtacgcgtatccagaaccctgatcctgccgtgtaccagctgcgggatagcaagagcagcgacaagagcgtgtgtctgttcaccgacttcgacagccagaccaacgtgtcccagagcaaggactccgacgtgtacatcaccgataagtgcgtgctggacatgcggagcatggacttcaagagcaactccgccgtggcctggtccaacaagtccgatttcgcctgcgccaacgccttcaacaacagcattatccccgaggacacattcttcccaagccccgagagcagctgcgacgtgaagctggtggaaaagagcttcgagacagacaccaacctgaacttccagatcctgtacgaggtgatcggcttcagaatcctgctgctgaaagtggccggctttaacctgctgatgaccctgcggctgtggtccagccgcgccaagagaagcggatctggcgtgaagcagaccctgaatttcgacctgctgaagctggctggcgacgtggaatccaacccaggcccttctagaggccatatgaccgagtacaagcccacggtgcgcctcgccacccgcgacgacgtccccagggccgtacgcaccctcgccgccgcgttcgccgactaccccgccacgcgccacaccgtcgatccggaccgccacatcgagcgggtcaccgagctgcaagaactcttcctcacgcgcgtcgggctcgacatcggcaaggtgtgggtcgcggacgacggcgccgcggtggcggtctggaccacgccggagagcgtcgaagcgggggcggtgttcgccgagatcggcccgcgcatggccgagttgagcggttcccggctggccgcgcagcaacagatggaaggcctcctggcgccgcaccggcccaaggagcccgcgtggttcctggccaccgtcggcgtctcgcccgaccaccagggcaagggtctgggcagcgccgtcgtgctccccggagtggaggcggccgagcgcgccggggtgcccgccttcctggagacctccgcgccccgcaacctccccttctacgagcggctcggcttcaccgtcaccgccgacgtcgaggtgcccgaaggaccgcgcacctggtgcatgacccgcaagcccggtgcctga

SEQ ID NO: 5971 - DNA, 2601 bp, synthetic construct
  source 1..2601: mol_type = other DNA
atggccttaccagtgaccgccttgctcctgccgctggccttgctgctccacgccgccaggccgctcgagatccagaaccctgatcctgccgtgtaccagctgcgggatagcaagagcagcgacaagagcgtgtgtctgttcaccgacttcgacagccagaccaacgtgtcccagagcaaggactccgacgtgtacatcaccgataagtgcgtgctggacatgcggagcatggacttcaagagcaactccgccgtggcctggtccaacaagtccgatttcgcctgcgccaacgccttcaacaacagcattatccccgaggacacattcttcccaagccccgagagcagctgcgacgtgaagctggtggaaaagagcttcgagacagacaccaacctgaacttccagatcctgtacgaggtgatcggcttcagaatcctgctgctgaaagtggccggctttaacctgctgatgaccctgcggctgtggtccagcagggccaagcgatctggatctggagcaacaaacttctcactactcaaacaagcaggtgacgtggaggagaatcccgggcctactagcatggccttaccagtgaccgccttgctcctgccgctggccttgctgctccacgccgccaggccggacatcgtgatgacacagagccctgatagcctggccgtgtctctgggagagagagccaccattaactgcaaggccagccagagcgtggactacgacggcgacagcttcctgaactggtatcagcagaagcccggccagcctcctaagctgctgatctacgccgccagcaatctggaaagcggcgtgccaagcagattttccggctctggcagcggcaccgatttcaccctgacaatatccagcctccagcctgaggacgtggccgtgtactactgccagcagagcaacgacgaccctctgacctttggacagggcaccaaggtggaaatcaaaggcggaggcggaagtggaggcggaggatctggcggcggaggctctcaagttcagctggttcagagcggagccgaagtgaagaaacctggggcctctgtgaaggtgtcctgcaaagccagcggctacacctttaccagctactggatcaactgggtccgacaggcccctggacaaggactggaatggatgggacagatccttccaggcggaggggacaccaactacaacggcaagttcaagggcagagtgaccatcaccgccgacaccagcacaagcaccgcctacatggaactgagcagcctgagaagcgaggacaccgccgtgtattattgcaccagacgggtgcccatccggctggattattggggacagggaaccctggtcaccgtgtctagtacgcgtgaggacctgaagaacgtgttcccacctgaggtggccgtgttcgagcctagcgaggccgagatcagccacacccagaaagccaccctcgtgtgcctggctaccggcttctaccccgaccatgtggaactgtcttggtgggtcaacggcaaagaggtgcacagcggcgtgtgtaccgacccccagccactgaaagaacagcccgccctgaacgacagccggtactgcctgagcagcagactgagagtgtccgccaccttctggcagaacccccggaaccacttcagatgccaggtgcagttctacggcctgagcgagaacgacgagtggacccaggacagagccaagcccgtgacccagatcgtgtctgccgaagcctggggcagagccgattgcggctttaccagcgagagctaccagcagggcgtgctgagcgccaccaacctgagcgtgatcggcttcagaatcctgctgctgaaagtggccggctttaacctgctgatgaccctgcggctgtggtccagccgcgccaagagaagcggatctggcgtgaagcagaccctgaatttcgacctgctgaagctggctggcgacgtggaatccaacccaggcccttctagaggccatatgaccgagtacaagcccacggtgcgcctcgccacccgcgacgacgtccccagggccgtacgcaccctcgccgccgcgttcgccgactaccccgccacgcgccacaccgtcgatccggaccgccacatcgagcgggtcaccgagctgcaagaactcttcctcacgcgcgtcgggctcgacatcggcaaggtgtgggtcgcggacgacggcgccgcggtggcggtctggaccacgccggagagcgtcgaagcgggggcggtgttcgccgagatcggcccgcgcatggccgagttgagcggttcccggctggccgcgcagcaacagatggaaggcctcctggcgccgcaccggcccaaggagcccgcgtggttcctggccaccgtcggcgtctcgcccgaccaccagggcaagggtctgggcagcgccgtcgtgctccccggagtggaggcggccgagcgcgccggggtgcccgccttcctggagacctccgcgccccgcaacctccccttctacgagcggctcggcttcaccgtcaccgccgacgtcgaggtgcccgaaggaccgcgcacctggtgcatgacccgcaagcccggtgcctga

SEQ ID NO: 5972 - DNA, 2601 bp, synthetic construct; identical to SEQ ID NO: 5970
  source 1..2601: mol_type = other DNA

SEQ ID NO: 5973 - DNA, 2925 bp, synthetic construct
  source 1..2925: mol_type = other DNA
atggccttaccagtgaccgccttgctcctgccgctggccttgctgctccacgccgccaggccgctcgaggaggacctgaagaacgtgttcccacctgaggtggccgtgttcgagcctagcgaggccgagatcagccacacccagaaagccaccctcgtgtgcctggctaccggcttctaccccgaccatgtggaactgtcttggtgggtcaacggcaaagaggtgcacagcggcgtgtctaccgacccccagccactgaaagaacagcccgccctgaacgacagccggtactgcctgagcagcagactgagagtgtccgccaccttctggcagaacccccggaaccacttcagatgccaggtgcagttctacggcctgagcgagaacgacgagtggacccaggacagagccaagcccgtgacccagatcgtgtctgccgaagcctggggcagagccgatgatgtgattaagatccactggcaggaaaagaagtccaacaccatcctgggcagccaggaaggcaacaccatgaagaccaacgacacctacatgaagttcagctggctgaccgtgcccgagaagtccctggacaaagaacacagatgcatcgtgcggcacgaaaacaacaagaacggcgtggaccaggaaatcatcttcccacccatcaagaccgatgtgattacaatggaccccaaggacaactgctccaaggacgccaacgataccctgctgctccagctgaccaacaccagcgcctactacatgtacttgttgctgctgctgaagtccgtggtgtacttcgccatcatcacatgctgcctgctgatggctatggtcaagcggaaggacagccggggaagggccaagcgatctggatctggagcaacaaacttctcactactcaaacaagcaggtgacgtggaggagaatcccgggcctactagcatggccttaccagtgaccgccttgctcctgccgctggccttgctgctccacgccgccaggccggacatcgtgatgacacagagccctgatagcctggccgtgtctctgggagagagagccaccattaactgcaaggccagccagagcgtggactacgacggcgacagcttcctgaactggtatcagcagaagcccggccagcctcctaagctgctgatctacgccgccagcaatctggaaagcggcgtgccaagcagattttccggctctggcagcggcaccgatttcaccctgacaatatccagcctccagcctgaggacgtggccgtgtactactgccagcagagcaacgacgaccctctgacctttggacagggcaccaaggtggaaatcaaaggcggaggcggaagtggaggcggaggatctggcggcggaggctctcaagttcagctggttcagagcggagccgaagtgaagaaacctggggcctctgtgaaggtgtcctgcaaagccagcggctacacctttaccagctactggatcaactgggtccgacaggcccctggacaaggactggaatggatgggacagatccttccaggcggaggggacaccaactacaacggcaagttcaagggcagagtgaccatcaccgccgacaccagcacaagcaccgcctacatggaactgagcagcctgagaagcgaggacaccgccgtgtattattgcaccagacgggtgcccatccggctggattattggggacagggaaccctggtcaccgtgtctagtacgcgtatccagaaccctgatcctgccgtgtaccagctgcgggatagcaagagcagcgacaagagcgtgtgtctgttcaccgacttcgacagccagaccaacgtgtcccagagcaaggactccgacgtgtacatcaccgataagaccgtgctggacatgcggagcatggacttcaagagcaactccgccgtggcctggtccaacaagtccgatttcgcctgcgccaacgccttcaacaacagcattatccccgaggacacattcttcccaagccccgagagcagcgactccaccgaccacgtgaagcccaaagagacagagaacaccaagcagcccagcaagagctgccacaagcccaaggccatcgtgcacaccgagaaagtgaacatgatgagcctgaccgtgctgggcctgcggatgctgttcgccaaaaccgtggccgtgaacttcctgctgaccgccaagctgttcttcctcctcaccgcccgcgccaagagaagcggatctggcgtgaagcagaccctgaatttcgacctgctgaagctggctggcgacgtggaatccaacccaggcccttctagaggccatatgaccgagtacaagcccacggtgcgcctcgccacccgcgacgacgtccccagggccgtacgcaccctcgccgccgcgttcgccgactaccccgccacgcgccacaccgtcgatccggaccgccacatcgagcgggtcaccgagctgcaagaactcttcctcacgcgcgtcgggctcgacatcggcaaggtgtgggtcgcggacgacggcgccgcggtggcggtctggaccacgccggagagcgtcgaagcgggggcggtgttcgccgagatcggcccgcgcatggccgagttgagcggttcccggctggccgcgcagcaacagatggaaggcctcctggcgccgcaccggcccaaggagcccgcgtggttcctggccaccgtcggcgtctcgcccgaccaccagggcaagggtctgggcagcgccgtcgtgctccccggagtggaggcggccgagcgcgccggggtgcccgccttcctggagacctccgcgccccgcaacctccccttctacgagcggctcggcttcaccgtcaccgccgacgtcgaggtgcccgaaggaccgcgcacctggtgcatgacccgcaagcccggtgcctga

SEQ ID NO: 5974 - DNA, 2925 bp, synthetic construct
  source 1..2925: mol_type = other DNA
atggccttaccagtgaccgccttgctcctgccgctggccttgctgctccacgccgccaggccgctcgagatccagaaccctgatcctgccgtgtaccagctgcgggatagcaagagcagcgacaagagcgtgtgtctgttcaccgacttcgacagccagaccaacgtgtcccagagcaaggactccgacgtgtacatcaccgataagaccgtgctggacatgcggagcatggacttcaagagcaactccgccgtggcctggtccaacaagtccgatttcgcctgcgccaacgccttcaacaacagcattatccccgaggacacattcttcccaagccccgagagcagcgactccaccgaccacgtgaagcccaaagagacagagaacaccaagcagcccagcaagagctgccacaagcccaaggccatcgtgcacaccgagaaagtgaacatgatgagcctgaccgtgctgggcctgcggatgctgttcgccaaaaccgtggccgtgaacttcctgctgaccgccaagctgttcttcctcctcaccgccagggccaagcgatctggatctggagcaacaaacttctcactactcaaacaagcaggtgacgtggaggagaatcccgggcctactagcatggccttaccagtgaccgccttgctcctgccgctggccttgctgctccacgccgccaggccggacatcgtgatgacacagagccctgatagcctggccgtgtctctgggagagagagccaccattaactgcaaggccagccagagcgtggactacgacggcgacagcttcctgaactggtatcagcagaagcccggccagcctcctaagctgctgatctacgccgccagcaatctggaaagcggcgtgccaagcagattttccggctctggcagcggcaccgatttcaccctgacaatatccagcctccagcctgaggacgtggccgtgtactactgccagcagagcaacgacgaccctctgacctttggacagggcaccaaggtggaaatcaaaggcggaggcggaagtggaggcggaggatctggcggcggaggctctcaagttcagctggttcagagcggagccgaagtgaagaaacctggggcctctgtgaaggtgtcctgcaaagccagcggctacacctttaccagctactggatcaactgggtccgacaggcccctggacaaggactggaatggatgggacagatccttccaggcggaggggacaccaactacaacggcaagttcaagggcagagtgaccatcaccgccgacaccagcacaagcaccgcctacatggaactgagcagcctgagaagcgaggacaccgccgtgtattattgcaccagacgggtgcccatccggctggattattggggacagggaaccctggtcaccgtgtctagtacgcgtgaggacctgaagaacgtgttcccacctgaggtggccgtgttcgagcctagcgaggccgagatcagccacacccagaaagccaccctcgtgtgcctggctaccggcttctaccccgaccatgtggaactgtcttggtgggtcaacggcaaagaggtgcacagcggcgtgtctaccgacccccagccactgaaagaacagcccgccctgaacgacagccggtactgcctgagcagcagactgagagtgtccgccaccttctggcagaacccccggaaccacttcagatgccaggtgcagttctacggcctgagcgagaacgacgagtggacccaggacagagccaagcccgtgacccagatcgtgtctgccgaagcctggggcagagccgatgatgtgattaagatccactggcaggaaaagaagtccaacaccatcctgggcagccaggaaggcaacaccatgaagaccaacgacacctacatgaagttcagctggctgaccgtgcccgagaagtccctggacaaagaacacagatgcatcgtgcggcacgaaaacaacaagaacggcgtggaccaggaaatcatcttcccacccatcaagaccgatgtgattacaatggaccccaaggacaactgctccaaggacgccaacgataccctgctgctccagctgaccaacaccagcgcctactacatgtacttgttgctgctgctgaagtccgtggtgtacttcgccatcatcacatgctgcctgctgatggctatggtcaagcggaaggacagccggggacgcgccaagagaagcggatctggcgtgaagcagaccctgaatttcgacctgctgaagctggctggcgacgtggaatccaacccaggcccttctagaggccatatgaccgagtacaagcccacggtgcgcctcgccacccgcgacgacgtccccagggccgtacgcaccctcgccgccgcgttcgccgactaccccgccacgcgccacaccgtcgatccggaccgccacatcgagcgggtcaccgagctgcaagaactcttcctcacgcgcgtcgggctcgacatcggcaaggtgtgggtcgcggacgacggcgccgcggtggcggtctggaccacgccggagagcgtcgaagcgggggcggtgttcgccgagatcggcccgcgcatggccgagttgagcggttcccggctggccgcgcagcaacagatggaaggcctcctggcgccgcaccggcccaaggagcccgcgtggttcctggccaccgtcggcgtctcgcccgaccaccagggcaagggtctgggcagcgccgtcgtgctccccggagtggaggcggccgagcgcgccggggtgcccgccttcctggagacctccgcgccccgcaacctccccttctacgagcggctcggcttcaccgtcaccgccgacgtcgaggtgcccgaaggaccgcgcacctggtgcatgacccgcaagcccggtgcctga

SEQ ID NO: 5975 - DNA, 2919 bp, synthetic construct
  source 1..2919: mol_type = other DNA
atggccttaccagtgaccgccttgctcctgccgctggccttgctgctccacgccgccaggccgctcgaggaggacctgaagaacgtgttcccacctgaggtggccgtgttcgagcctagcgaggccgagatcagccacacccagaaagccaccctcgtgtgcctggctaccggcttctaccccgaccatgtggaactgtcttggtgggtcaacggcaaagaggtgcacagcggcgtgtgtaccgacccccagccactgaaagaacagcccgccctgaacgacagccggtactgcctgagcagcagactgagagtgtccgccaccttctggcagaacccccggaaccacttcagatgccaggtgcagttctacggcctgagcgagaacgacgagtggacccaggacagagccaagcccgtgacccagatcgtgtctgccgaagcctggggcagagccgatgatgtgattaagatccactggcaggaaaagaagtccaacaccatcctgggcagccaggaaggcaacaccatgaagaccaacgacacctacatgaagttcagctggctgaccgtgcccgagaagtccctggacaaagaacacagatgcatcgtgcggcacgaaaacaacaagaacggcgtggaccaggaaatcatcttcccacccatcaagaccgatgtgattacaatggaccccaaggacaactgctccaaggacgccaacgataccctgctgctccagctgaccaacaccagcgcctactacatgtacttgttgctgctgctgaagtccgtggtgtacttcgccatcatcacatgctgcctgctgcggagaaccgccttctgctgcaacggcgagaagtctagggccaagcgatctggatctggagcaacaaacttctcactactcaaacaagcaggtgacgtggaggagaatcccgggcctactagcatggccttaccagtgaccgccttgctcctgccgctggccttgctgctccacgccgccaggccggacatcgtgatgacacagagccctgatagcctggccgtgtctctgggagagagagccaccattaactgcaaggccagccagagcgtggactacgacggcgacagcttcctgaactggtatcagcagaagcccggccagcctcctaagctgctgatctacgccgccagcaatctggaaagcggcgtgccaagcagattttccggctctggcagcggcaccgatttcaccctgacaatatccagcctccagcctgaggacgtggccgtgtactactgccagcagagcaacgacgaccctctgacctttggacagggcaccaaggtggaaatcaaaggcggaggcggaagtggaggcggaggatctggcggcggaggctctcaagttcagctggttcagagcggagccgaagtgaagaaacctggggcctctgtgaaggtgtcctgcaaagccagcggctacacctttaccagctactggatcaactgggtccgacaggcccctggacaaggactggaatggatgggacagatccttccaggcggaggggacaccaactacaacggcaagttcaagggcagagtgaccatcaccgccgacaccagcacaagcaccgcctacatggaactgagcagcctgagaagcgaggacaccgccgtgtattattgcaccagacgggtgcccatccggctggattattggggacagggaaccctggtcaccgtgtctagtacgcgtatccagaaccctgatcctgccgtgtaccagctgcgggatagcaagagcagcgacaagagcgtgtgtctgttcaccgacttcgacagccagaccaacgtgtcccagagcaaggactccgacgtgtacatcaccgataagtgcgtgctggacatgcggagcatggacttcaagagcaactccgccgtggcctggtccaacaagtccgatttcgcctgcgccaacgccttcaacaacagcattatccccgaggacacattcttcccaagccccgagagcagcgactccaccgaccacgtgaagcccaaagagacagagaacaccaagcagcccagcaagagctgccacaagcccaaggccatcgtgcacaccgagaaagtgaacatgatgagcctgaccgtgctgggcctgcggatgctgttcgccaaaaccgtggccgtgaacttcctgctgaccgccaagctgttcttcctccgcgccaagagaagcggatctggcgtgaagcagaccctgaatttcgacctgctgaagctggctggcgacgtggaatccaacccaggcccttctagaggccatatgaccgagtacaagcccacggtgcgcctcgccacccgcgacgacgtccccagggccgtacgcaccctcgccgccgcgttcgccgactaccccgccacgcgccacaccgtcgatccggaccgccacatcgagcgggtcaccgagctgcaagaactcttcctcacgcgcgtcgggctcgacatcggcaaggtgtgggtcgcggacgacggcgccgcggtggcggtctggaccacgccggagagcgtcgaagcgggggcggtgttcgccgagatcggcccgcgcatggccgagttgagcggttcccggctggccgcgcagcaacagatggaaggcctcctggcgccgcaccggcccaaggagcccgcgtggttcctggccaccgtcggcgtctcgcccgaccaccagggcaagggtctgggcagcgccgtcgtgctccccggagtggaggcggccgagcgcgccggggtgcccgccttcctggagacctccgcgccccgcaacctccccttctacgagcggctcggcttcaccgtcaccgccgacgtcgaggtgcccgaaggaccgcgcacctggtgcatgacccgcaagcccggtgcctga

SEQ ID NO: 5976 - DNA, 2919 bp, synthetic construct
  source 1..2919: mol_type = other DNA
atggccttaccagtgaccgccttgctcctgccgctggccttgctgctccacgccgccaggccgctcgagatccagaaccctgatcctgccgtgtaccagctgcgggatagcaagagcagcgacaagagcgtgtgtctgttcaccgacttcgacagccagaccaacgtgtcccagagcaaggactccgacgtgtacatcaccgataagtgcgtgctggacatgcggagcatggacttcaagagcaactccgccgtggcctggtccaacaagtccgatttcgcctgcgccaacgccttcaacaacagcattatccccgaggacacattcttcccaagccccgagagcagcgactccaccgaccacgtgaagcccaaagagacagagaacaccaagcagcccagcaagagctgccacaagcccaaggccatcgtgcacaccgagaaagtgaacatgatgagcctgaccgtgctgggcctgcggatgctgttcgccaaaaccgtggccgtgaacttcctgctgaccgccaagctgttcttcctcagggccaagcgatctggatctggagcaacaaacttctcactactcaaacaagcaggtgacgtggaggagaatcccgggcctactagcatggccttaccagtgaccgccttgctcctgccgctggccttgctgctccacgccgccaggccggacatcgtgatgacacagagccctgatagcctggccgtgtctctgggagagagagccaccattaactgcaaggccagccagagcgtggactacgacggcgacagcttcctgaactggtatcagcagaagcccggccagcctcctaagctgctgatctacgccgccagcaatctggaaagcggcgtgccaagcagattttccggctctggcagcggcaccgatttcaccctgacaatatccagcctccagcctgaggacgtggccgtgtactactgccagcagagcaacgacgaccctctgacctttggacagggcaccaaggtggaaatcaaaggcggaggcggaagtggaggcggaggatctggcggcggaggctctcaagttcagctggttcagagcggagccgaagtgaagaaacctggggcctctgtgaaggtgtcctgcaaagccagcggctacacctttaccagctactggatcaactgggtccgacaggcccctggacaaggactggaatggatgggacagatccttccaggcggaggggacaccaactacaacggcaagttcaagggcagagtgaccatcaccgccgacaccagcacaagcaccgcctacatggaactgagcagcctgagaagcgaggacaccgccgtgtattattgcaccagacgggtgcccatccggctggattattggggacagggaaccctggtcaccgtgtctagtacgcgtgaggacctgaagaacgtgttcccacctgaggtggccgtgttcgagcctagcgaggccgagatcagccacacccagaaagccaccctcgtgtgcctggctaccggcttctaccccgaccatgtggaactgtcttggtgggtcaacggcaaagaggtgcacagcggcgtgtgtaccgacccccagccactgaaagaacagcccgccctgaacgacagccggtactgcctgagcagcagactgagagtgtccgccaccttctggcagaacccccggaaccacttcagatgccaggtgcagttctacggcctgagcgagaacgacgagtggacccaggacagagccaagcccgtgacccagatcgtgtctgccgaagcctggggcagagccgatgatgtgattaagatccactggcaggaaaagaagtccaacaccatcctgggcagccaggaaggcaacaccatgaagaccaacgacacctacatgaagttcagctggctgaccgtgcccgagaagtccctggacaaagaacacagatgcatcgtgcggcacgaaaacaacaagaacggcgtggaccaggaaatcatcttcccacccatcaagaccgatgtgattacaatggaccccaaggacaactgctccaaggacgccaacgataccctgctgctccagctgaccaacaccagcgcctactacatgtacttgttgctgctgctgaagtccgtggtgtacttcgccatcatcacatgctgcctgctgcggagaaccgccttctgctgcaacggcgagaagtctcgcgccaagagaagcggatctggcgtgaagcagaccctgaatttcgacctgctgaagctggctggcgacgtggaatccaacccaggcccttctagaggccatatgaccgagtacaagcccacggtgcgcctcgccacccgcgacgacgtccccagggccgtacgcaccctcgccgccgcgttcgccgactaccccgccacgcgccacaccgtcgatccggaccgccacatcgagcgggtcaccgagctgcaagaactcttcctcacgcgcgtcgggctcgacatcggcaaggtgtgggtcgcggacgacggcgccgcggtggcggtctggaccacgccggagagcgtcgaagcgggggcggtgttcgccgagatcggcccgcgcatggccgagttgagcggttcccggctggccgcgcagcaacagatggaaggcctcctggcgccgcaccggcccaaggagcccgcgtggttcctggccaccgtcggcgtctcgcccgaccaccagggcaagggtctgggcagcgccgtcgtgctccccggagtggaggcggccgagcgcgccggggtgcccgccttcctggagacctccgcgccccgcaacctccccttctacgagcggctcggcttcaccgtcaccgccgacgtcgaggtgcccgaaggaccgcgcacctggtgcatgacccgcaagcccggtgcctga

SEQ ID NO: 5977 - DNA, 2919 bp, synthetic construct
  source 1..2919: mol_type = other DNA
atggccttaccagtgaccgccttgctcctgccgctggccttgctgctccacgccgccaggccgctcgaggaggacctgaagaacgtgttcccacctgaggtggccgtgttcgagcctagcgaggccgagatcagccacacccagaaagccaccctcgtgtgcctggctaccggcttctaccccgaccatgtggaactgtcttggtgggtcaacggcaaagaggtgcacagcggcgtgtctaccgacccccagccactgaaagaacagcccgccctgaacgacagccggtactgcctgagcagcagactgagagtgtccgccaccttctggcagaacccccggaaccacttcagatgccaggtgcagttctacggcctgagcgagaacgacgagtggacccaggacagagccaagcccgtgacccagatcgtgtctgccgaagcctggggcagagccgatgatgtgattaagatccactggcaggaaaagaagtccaacaccatcctgggcagccaggaaggcaacaccatgaagaccaacgacacctacatgaagttcagctggctgaccgtgcccgagaagtccctggacaaagaacacagatgcatcgtgcggcacgaaaacaacaagaacggcgtggaccaggaaatcatcttcccacccatcaagaccgatgtgattacaatggaccccaaggacaactgctccaaggacgccaacgataccctgctgctccagctgaccaacaccagcgcctactacatgtacttgttgctgctgctgaagtccgtggtgtacttcgccatcatcacatgctgcctgctgcggagaaccgccttctgctgcaacggcgagaagtctagggccaagcgatctggatctggagcaacaaacttctcactactcaaacaagcaggtgacgtggaggagaatcccgggcctactagcatggccttaccagtgaccgccttgctcctgccgctggccttgctgctccacgccgccaggccggacatcgtgatgacacagagccctgatagcctggccgtgtctctgggagagagagccaccattaactgcaaggccagccagagcgtggactacgacggcgacagcttcctgaactggtatcagcagaagcccggccagcctcctaagctgctgatctacgccgccagcaatctggaaagcggcgtgccaagcagattttccggctctggcagcggcaccgatttcaccctgacaatatccagcctccagcctgaggacgtggccgtgtactactgccagcagagcaacgacgaccctctgacctttggacagggcaccaaggtggaaatcaaaggcggaggcggaagtggaggcggaggatctggcggcggaggctctcaagttcagctggttcagagcggagccgaagtgaagaaacctggggcctctgtgaaggtgtcctgcaaagccagcggctacacctttaccagctactggatcaactgggtccgacaggcccctggacaaggactggaatggatgggacagatccttccaggcggaggggacaccaactacaacggcaagttcaagggcagagtgaccatcaccgccgacaccagcacaagcaccgcctacatggaactgagcagcctgagaagcgaggacaccgccgtgtattattgcaccagacgggtgcccatccggctggattattggggacagggaaccctggtcaccgtgtctagtacgcgtatccagaaccctgatcctgccgtgtaccagctgcgggatagcaagagcagcgacaagagcgtgtgtctgttcaccgacttcgacagccagaccaacgtgtcccagagcaaggactccgacgtgtacatcaccgataagaccgtgctggacatgcggagcatggacttcaagagcaactccgccgtggcctggtccaacaagtccgatttcgcctgcgccaacgccttcaacaacagcattatccccgaggacacattcttcccaagccccgagagcagcgactccaccgaccacgtgaagcccaaagagacagagaacaccaagcagcccagcaagagctgccacaagcccaaggccatcgtgcacaccgagaaagtgaacatgatgagcctgaccgtgctgggcctgcggatgctgttcgccaaaaccgtggccgtgaacttcctgctgaccgccaagctgttcttcctccgcgccaagagaagcggatctggcgtgaagcagaccctgaatttcgacctgctgaagctggctggcgacgtggaatccaacccaggcccttctagaggccatatgaccgagtacaagcccacggtgcgcctcgccacccgcgacgacgtccccagggccgtacgcaccctcgccgccgcgttcgccgactaccccgccacgcgccacaccgtcgatccggaccgccacatcgagcgggtcaccgagctgcaagaactcttcctcacgcgcgtcgggctcgacatcggcaaggtgtgggtcgcggacgacggcgccgcggtggcggtctggaccacgccggagagcgtcgaagcgggggcggtgttcgccgagatcggcccgcgcatggccgagttgagcggttcccggctggccgcgcagcaacagatggaaggcctcctggcgccgcaccggcccaaggagcccgcgtggttcctggccaccgtcggcgtctcgcccgaccaccagggcaagggtctgggcagcgccgtcgtgctccccggagtggaggcggccgagcgcgccggggtgcccgccttcctggagacctccgcgccccgcaacctccccttctacgagcggctcggcttcaccgtcaccgccgacgtcgaggtgcccgaaggaccgcgcacctggtgcatgacccgcaagcccggtgcctga

SEQ ID NO: 5978 - DNA, 2919 bp, synthetic construct
  source 1..2919: mol_type = other DNA
atggccttaccagtgaccgccttgctcctgccgctggccttgctgctccacgccgccaggccgctcgagatccagaaccctgatcctgccgtgtaccagctgcgggatagcaagagcagcgacaagagcgtgtgtctgttcaccgacttcgacagccagaccaacgtgtcccagagcaaggactccgacgtgtacatcaccgataagaccgtgctggacatgcggagcatggacttcaagagcaactccgccgtggcctggtccaacaagtccgatttcgcctgcgccaacgccttcaacaacagcattatccccgaggacacattcttcccaagccccgagagcagcgactccaccgaccacgtgaagcccaaagagacagagaacaccaagcagcccagcaagagctgccacaagcccaaggccatcgtgcacaccgagaaagtgaacatgatgagcctgaccgtgctgggcctgcggatgctgttcgccaaaaccgtggccgtgaacttcctgctgaccgccaagctgttcttcctcagggccaagcgatctggatctggagcaacaaacttctcactactcaaacaagcaggtgacgtggaggagaatcccgggcctactagcatggccttaccagtgaccgccttgctcctgccgctggccttgctgctccacgccgccaggccggacatcgtgatgacacagagccctgatagcctggccgtgtctctgggagagagagccaccattaactgcaaggccagccagagcgtggactacgacggcgacagcttcctgaactggtatcagcagaagcccggccagcctcctaagctgctgatctacgccgccagcaatctggaaagcggcgtgccaagcagattttccggctctggcagcggcaccgatttcaccctgacaatatccagcctccagcctgaggacgtggccgtgtactactgccagcagagcaacgacgaccctctgacctttggacagggcaccaaggtggaaatcaaaggcggaggcggaagtggaggcggaggatctggcggcggaggctctcaagttcagctggttcagagcggagccgaagtgaagaaacctggggcctctgtgaaggtgtcctgcaaagccagcggctacacctttaccagctactggatcaactgggtccgacaggcccctggacaaggactggaatggatgggacagatccttccaggcggaggggacaccaactacaacggcaagttcaagggcagagtgaccatcaccgccgacaccagcacaagcaccgcctacatggaactgagcagcctgagaagcgaggacaccgccgtgtattattgcaccagacgggtgcccatccggctggattattggggacagggaaccctggtcaccgtgtctagtacgcgtgaggacctgaagaacgtgttcccacctgaggtggccgtgttcgagcctagcgaggccgagatcagccacacccagaaagccaccctcgtgtgcctggctaccggcttctaccccgaccatgtggaactgtcttggtgggtcaacggcaaagaggtgcacagcggcgtgtctaccgacccccagccactgaaagaacagcccgccctgaacgacagccggtactgcctgagcagcagactgagagtgtccgccaccttctggcagaacccccggaaccacttcagatgccaggtgcagttctacggcctgagcgagaacgacgagtggacccaggacagagccaagcccgtgacccagatcgtgtctgccgaagcctggggcagagccgatgatgtgattaagatccactggcaggaaaagaagtccaacaccatcctgggcagccaggaaggcaacaccatgaagaccaacgacacctacatgaagttcagctggctgaccgtgcccgagaagtccctggacaaagaacacagatgcatcgtgcggcacgaaaacaacaagaacggcgtggaccaggaaatcatcttcccacccatcaagaccgatgtgattacaatggaccccaaggacaactgctccaaggacgccaacgataccctgctgctccagctgaccaacaccagcgcctactacatgtacttgttgctgctgctgaagtccgtggtgtacttcgccatcatcacatgctgcctgctgcggagaaccgccttctgctgcaacggcgagaagtctcgcgccaagagaagcggatctggcgtgaagcagaccctgaatttcgacctgctgaagctggctggcgacgtggaatccaacccaggcccttctagaggccatatgaccgagtacaagcccacggtgcgcctcgccacccgcgacgacgtccccagggccgtacgcaccctcgccgccgcgttcgccgactaccccgccacgcgccacaccgtcgatccggaccgccacatcgagcgggtcaccgagctgcaagaactcttcctcacgcgcgtcgggctcgacatcggcaaggtgtgggtcgcggacgacggcgccgcggtggcggtctggaccacgccggagagcgtcgaagcgggggcggtgttcgccgagatcggcccgcgcatggccgagttgagcggttcccggctggccgcgcagcaacagatggaaggcctcctggcgccgcaccggcccaaggagcccgcgtggttcctggccaccgtcggcgtctcgcccgaccaccagggcaagggtctgggcagcgccgtcgtgctccccggagtggaggcggccgagcgcgccggggtgcccgccttcctggagacctccgcgccccgcaacctccccttctacgagcggctcggcttcaccgtcaccgccgacgtcgaggtgcccgaaggaccgcgcacctggtgcatgacccgcaagcccggtgcctga

SEQ ID NO: 5979 - DNA, 2613 bp, synthetic construct
  source 1..2613: mol_type = other DNA
atggccttaccagtgaccgccttgctcctgccgctggccttgctgctccacgccgccaggccgctcgaggaggacctgaagaacgtgttcccacctgaggtggccgtgttcgagcctagcaaggccgagatcgcccacacccagaaagccaccctcgtgtgcctggctaccggcttctaccccgaccatgtggaactgtcttggtgggtcaacggcaaagaggtgcacagcggcgtgtgtaccgacccccagccactgaaagaacagcccgccctgaacgacagccggtactgcctgagcagcagactgagagtgtccgccaccttctggcagaacccccggaaccacttcagatgccaggtgcagttctacggcctgagcgagaacgacgagtggacccaggacagagccaagcccgtgacccagatcgtgtctgccgaagcctggggcagagccgattgcggcatcaccagcgccagctaccaccagggcgtgctgagcgccaccatcctgtacgagatcctgctgggcaaggccaccctgtacgccgtgctggtgtctgccctggtgctgatggctatggtcaagcggaaggacagccggggaagggccaagcgatctggatctggagcaacaaacttctcactactcaaacaagcaggtgacgtggaggagaatcccgggcctactagcatggccttaccagtgaccgccttgctcctgccgctggccttgctgctccacgccgccaggccggacatcgtgatgacacagagccctgatagcctggccgtgtctctgggagagagagccaccattaactgcaaggccagccagagcgtggactacgacggcgacagcttcctgaactggtatcagcagaagcccggccagcctcctaagctgctgatctacgccgccagcaatctggaaagcggcgtgccaagcagattttccggctctggcagcggcaccgatttcaccctgacaatatccagcctccagcctgaggacgtggccgtgtactactgccagcagagcaacgacgaccctctgacctttggacagggcaccaaggtggaaatcaaaggcggaggcggaagtggaggcggaggatctggcggcggaggctctcaagttcagctggttcagagcggagccgaagtgaagaaacctggggcctctgtgaaggtgtcctgcaaagccagcggctacacctttaccagctactggatcaactgggtccgacaggcccctggacaaggactggaatggatgggacagatccttccaggcggaggggacaccaactacaacggcaagttcaagggcagagtgaccatcaccgccgacaccagcacaagcaccgcctacatggaactgagcagcctgagaagcgaggacaccgccgtgtattattgcaccagacgggtgcccatccggctggattattggggacagggaaccctggtcaccgtgtctagtacgcgtatccagaaccctgatcctgccgtgtaccagctgcgggatagcaagagcagcgacaagagcgtgtgtctgttcaccgacttcgacagccagaccaacgtgtcccagagcaaggactccgacgtgtacatcaccgataagtgcgtgctggacatgcggagcatggacttcaagagcaactccgccgtggcctggtccaacaagtccgatttcgcctgcgccaacgccttcaacaacagcattatccccgaggacacattcttcccaagcagcgacgtgccctgcgacgtgaagctggtggaaaagagcttcgagacagacaccaacctgaacttccagaacctgagcgtgatcggcttcagaatcctgctgctgaaagtggccggctttaacctgctgatgaccctgcggctgtggtccagccgcgccaagagaagcggatctggcgtgaagcagaccctgaatttcgacctgctgaagctggctggcgacgtggaatccaacccaggcccttctagaggccatatgaccgagtacaagcccacggtgcgcctcgccacccgcgacgacgtccccagggccgtacgcaccctcgccgccgcgttcgccgactaccccgccacgcgccacaccgtcgatccggaccgccacatcgagcgggtcaccgagctgcaagaactcttcctcacgcgcgtcgggctcgacatcggcaaggtgtgggtcgcggacgacggcgccgcggtggcggtctggaccacgccggagagcgtcgaagcgggggcggtgttcgccgagatcggcccgcgcatggccgagttgagcggttcccggctggccgcgcagcaacagatggaaggcctcctggcgccgcaccggcccaaggagcccgcgtggttcctggccaccgtcggcgtctcgcccgaccaccagggcaagggtctgggcagcgccgtcgtgctccccggagtggaggcggccgagcgcgccggggtgcccgccttcctggagacctccgcgccccgcaacctccccttctacgagcggctcggcttcaccgtcaccgccgacgtcgaggtgcccgaaggaccgcgcacctggtgcatgacccgcaagcccggtgcctga

SEQ ID NO: 5980 - DNA, 2613 bp, synthetic construct
  source 1..2613: mol_type = other DNA
atggccttaccagtgaccgccttgctcctgccgctggccttgctgctccacgccgccaggccgctcgagatccagaaccctgatcctgccgtgtaccagctgcgggatagcaagagcagcgacaagagcgtgtgtctgttcaccgacttcgacagccagaccaacgtgtcccagagcaaggactccgacgtgtacatcaccgataagtgcgtgctggacatgcggagcatggacttcaagagcaactccgccgtggcctggtccaacaagtccgatttcgcctgcgccaacgccttcaacaacagcattatccccgaggacacattcttcccaagcagcgacgtgccctgcgacgtgaagctggtggaaaagagcttcgagacagacaccaacctgaacttccagaacctgagcgtgatcggcttcagaatcctgctgctgaaagtggccggctttaacctgctgatgaccctgcggctgtggtccagcagggccaagcgatctggatctggagcaacaaacttctcactactcaaacaagcaggtgacgtggaggagaatcccgggcctactagcatggccttaccagtgaccgccttgctcctgccgctggccttgctgctccacgccgccaggccggacatcgtgatgacacagagccctgatagcctggccgtgtctctgggagagagagccaccattaactgcaaggccagccagagcgtggactacgacggcgacagcttcctgaactggtatcagcagaagcccggccagcctcctaagctgctgatctacgccgccagcaatctggaaagcggcgtgccaagcagattttccggctctggcagcggcaccgatttcaccctgacaatatccagcctccagcctgaggacgtggccgtgtactactgccagcagagcaacgacgaccctctgacctttggacagggcaccaaggtggaaatcaaaggcggaggcggaagtggaggcggaggatctggcggcggaggctctcaagttcagctggttcagagcggagccgaagtgaagaaacctggggcctctgtgaaggtgtcctgcaaagccagcggctacacctttaccagctactggatcaactgggtccgacaggcccctggacaaggactggaatggatgggacagatccttccaggcggaggggacaccaactacaacggcaagttcaagggcagagtgaccatcaccgccgacaccagcacaagcaccgcctacatggaactgagcagcctgagaagcgaggacaccgccgtgtattattgcaccagacgggtgcccatccggctggattattggggacagggaaccctggtcaccgtgtctagtacgcgtgaggacctgaagaacgtgttcccacctgaggtggccgtgttcgagcctagcaaggccgagatcgcccacacccagaaagccaccctcgtgtgcctggctaccggcttctaccccgaccatgtggaactgtcttggtgggtcaacggcaaagaggtgcacagcggcgtgtgtaccgacccccagccactgaaagaacagcccgccctgaacgacagccggtactgcctgagcagcagactgagagtgtccgccaccttctggcagaacccccggaaccacttcagatgccaggtgcagttctacggcctgagcgagaacgacgagtggacccaggacagagccaagcccgtgacccagatcgtgtctgccgaagcctggggcagagccgattgcggcatcaccagcgccagctaccaccagggcgtgctgagcgccaccatcctgtacgagatcctgctgggcaaggccaccctgtacgccgtgctggtgtctgccctggtgctgatggctatggtcaagcggaaggacagccggggacgcgccaagagaagcggatctggcgtgaagcagaccctgaatttcgacctgctgaagctggctggcgacgtggaatccaacccaggcccttctagaggccatatgaccgagtacaagcccacggtgcgcctcgccacccgcgacgacgtccccagggccgtacgcaccctcgccgccgcgttcgccgactaccccgccacgcgccacaccgtcgatccggaccgccacatcgagcgggtcaccgagctgcaagaactcttcctcacgcgcgtcgggctcgacatcggcaaggtgtgggtcgcggacgacggcgccgcggtggcggtctggaccacgccggagagcgtcgaagcgggggcggtgttcgccgagatcggcccgcgcatggccgagttgagcggttcccggctggccgcgcagcaacagatggaaggcctcctggcgccgcaccggcccaaggagcccgcgtggttcctggccaccgtcggcgtctcgcccgaccaccagggcaagggtctgggcagcgccgtcgtgctccccggagtggaggcggccgagcgcgccggggtgcccgccttcctggagacctccgcgccccgcaacctccccttctacgagcggctcggcttcaccgtcaccgccgacgtcgaggtgcccgaaggaccgcgcacctggtgcatgacccgcaagcccggtgcctga

SEQ ID NO: 5981 - DNA, 2292 bp, synthetic construct
  source 1..2292: mol_type = other DNA
atggccttaccagtgaccgccttgctcctgccgctggccttgctgctccacgccgccaggccgctcgagcagagttttgggttgttggaccctaaattgtgctatctgttggacggaatcctgttcatttacggagtgatcctgaccgcattgttcctgcgggttaagttttccagatccgcagacgcacccgcttaccaacaagggcagaaccaactctacaatgaacttaatttggggcggagggaagagtacgacgttctggacaaaaggaggggacgagatcccgagatgggcggaaagcctcagcgaaggaagaatccgcaagaggggctttataacgaactccagaaagataaaatggcagaagcctatagtgagattgggatgaagggagaaaggaggaggggtaaaggtcacgatgggttgtaccaaggattgagcacagccactaaagatacctatgatgcgctccacatgcaggccctgccgccaagaagggccaagcgatctggatctggagcaacaaacttctcactactcaaacaagcaggtgacgtggaggagaatcccgggcctactagcatggccttaccagtgaccgccttgctcctgccgctggccttgctgctccacgccgccaggccggacatcgtgatgacacagagccctgatagcctggccgtgtctctgggagagagagccaccattaactgcaaggccagccagagcgtggactacgacggcgacagcttcctgaactggtatcagcagaagcccggccagcctcctaagctgctgatctacgccgccagcaatctggaaagcggcgtgccaagcagattttccggctctggcagcggcaccgatttcaccctgacaatatccagcctccagcctgaggacgtggccgtgtactactgccagcagagcaacgacgaccctctgacctttggacagggcaccaaggtggaaatcaaaggcggaggcggaagtggaggcggaggatctggcggcggaggctctcaagttcagctggttcagagcggagccgaagtgaagaaacctggggcctctgtgaaggtgtcctgcaaagccagcggctacacctttaccagctactggatcaactgggtccgacaggcccctggacaaggactggaatggatgggacagatccttccaggcggaggggacaccaactacaacggcaagttcaagggcagagtgaccatcaccgccgacaccagcacaagcaccgcctacatggaactgagcagcctgagaagcgaggacaccgccgtgtattattgcaccagacgggtgcccatccggctggattattggggacagggaaccctggtcaccgtgtctagtacgcgtgagctgggagagcctcagctgtgctatatcctggacgccatcctgtttctgtacggcatcgtgctgaccctgctgtactgccggctgaagatccaagtgcggaaggccgccatcaccagctacgagaaatccgacggcgtgtacaccggcctgagcaccagaaatcaagagacatacgagacactgaagcacgaaaagcctccacaacgcgccaagagaagcggatctggcgtgaagcagaccctgaatttcgacctgctgaagctggctggcgacgtggaatccaacccaggcccttctagaggccatatgaccgagtacaagcccacggtgcgcctcgccacccgcgacgacgtccccagggccgtacgcaccctcgccgccgcgttcgccgactaccccgccacgcgccacaccgtcgatccggaccgccacatcgagcgggtcaccgagctgcaagaactcttcctcacgcgcgtcgggctcgacatcggcaaggtgtgggtcgcggacgacggcgccgcggtggcggtctggaccacgccggagagcgtcgaagcgggggcggtgttcgccgagatcggcccgcgcatggccgagttgagcggttcccggctggccgcgcagcaacagatggaaggcctcctggcgccgcaccggcccaaggagcccgcgtggttcctggccaccgtcggcgtctcgcccgaccaccagggcaagggtctgggcagcgccgtcgtgctccccggagtggaggcggccgagcgcgccggggtgcccgccttcctggagacctccgcgccccgcaacctccccttctacgagcggctcggcttcaccgtcaccgccgacgtcgaggtgcccgaaggaccgcgcacctggtgcatgacccgcaagcccggtgcctga

SEQ ID NO: 5982 - DNA, 2925 bp, synthetic construct; identical to SEQ ID NO: 5973
  source 1..2925: mol_type = other DNA

SEQ ID NO: 5983 - DNA, 2925 bp, synthetic construct; identical to SEQ ID NO: 5974
  source 1..2925: mol_type = other DNA

SEQ ID NO: 5984 - DNA, 2922 bp, synthetic construct
  source 1..2922: mol_type = other DNA
atggccttaccagtgaccgccttgctcctgccgctggccttgctgctccacgccgccaggccgctcgaggaggaggacctgaagaacgtgttcccacctgaggtggccgtgttcgagcctagcgaggccgagatcagccacacccagaaagccaccctcgtgtgcctggctaccggcttctaccccgaccatgtggaactgtcttggtgggtcaacggcaaagaggtgcacagcggcgtgtgtaccgacccccagccactgaaagaacagcccgccctgaacgacagccggtactgcctgagcagcagactgagagtgtccgccaccttctggcagaacccccggaaccacttcagatgccaggtgcagttctacggcctgagcgagaacgacgagtggacccaggacagagccaagcccgtgacccagatcgtgtctgccgaagcctggggcagagccgatgatgtgattaagatccactggcaggaaaagaagtccaacaccatcctgggcagccaggaaggcaacaccatgaagaccaacgacacctacatgaagttcagctggctgaccgtgcccgagaagtccctggacaaagaacacagatgcatcgtgcggcacgaaaacaacaagaacggcgtggaccaggaaatcatcttcccacccatcaagaccgatgtgattacaatggaccccaaggacaactgctccaaggacgccaacgataccctgctgctccagctgaccaacaccagcgcctactacatgtacttgttgctgctgctgaagtccgtggtgtacttcgccatcatcacatgctgcctgctgcggagaaccgccttctgctgcaacggcgagaagtctagggccaagcgatctggatctggagcaacaaacttctcactactcaaacaagcaggtgacgtggaggagaatcccgggcctactagcatggccttaccagtgaccgccttgctcctgccgctggccttgctgctccacgccgccaggccggacatcgtgatgacacagagccctgatagcctggccgtgtctctgggagagagagccaccattaactgcaaggccagccagagcgtggactacgacggcgacagcttcctgaactggtatcagcagaagcccggccagcctcctaagctgctgatctacgccgccagcaatctggaaagcggcgtgccaagcagattttccggctctggcagcggcaccgatttcaccctgacaatatccagcctccagcctgaggacgtggccgtgtactactgccagcagagcaacgacgaccctctgacctttggacagggcaccaaggtggaaatcaaaggcggaggcggaagtggaggcggaggatctggcggcggaggctctcaagttcagctggttcagagcggagccgaagtgaagaaacctggggcctctgtgaaggtgtcctgcaaagccagcggctacacctttaccagctactggatcaactgggtccgacaggcccctggacaaggactggaatggatgggacagatccttccaggcggaggggacaccaactacaacggcaagttcaagggcagagtgaccatcaccgccgacaccagcacaagcaccgcctacatggaactgagcagcctgagaagcgaggacaccgccgtgtattattgcaccagacgggtgcccatccggctggattattggggacagggaaccctggtcaccgtgtctagtacgcgtatccagaaccctgatcctgccgtgtaccagctgcgggatagcaagagcagcgacaagagcgtgtgtctgttcaccgacttcgacagccagaccaacgtgtcccagagcaaggactccgacgtgtacatcaccgataagtgcgtgctggacatgcggagcatggacttcaagagcaactccgccgtggcctggtccaacaagtccgatttcgcctgcgccaacgccttcaacaacagcattatccccgaggacacattcttcccaagccccgagagcagcgactccaccgaccacgtgaagcccaaagagacagagaacaccaagcagcccagcaagagctgccacaagcccaaggccatcgtgcacaccgagaaagtgaacatgatgagcctgaccgtgctgggcctgcggatgctgttcgccaaaaccgtggccgtgaacttcctgctgaccgccaagctgttcttcctccgcgccaagagaagcggatctggcgtgaagcagaccctgaatttcgacctgctgaagctggctggcgacgtggaatccaacccaggcccttctagaggccatatgaccgagtacaagcccacggtgcgcctcgccacccgcgacgacgtccccagggccgtacgcaccctcgccgccgcgttcgccgactaccccgccacgcgccacaccgtcgatccggaccgccacatcgagcgggtcaccgagctgcaagaactcttcctcacgcgcgtcgggctcgacatcggcaaggtgtgggtcgcggacgacggcgccgcggtggcggtctggaccacgccggagagcgtcgaagcgggggcggtgttcgccgagatcggcccgcgcatggccgagttgagcggttcccggctggccgcgcagcaacagatggaaggcctcctggcgccgcaccggcccaaggagcccgcgtggttcctggccaccgtcggcgtctcgcccgaccaccagggcaagggtctgggcagcgccgtcgtgctccccggagtggaggcggccgagcgcgccggggtgcccgccttcctggagacctccgcgccccgcaacctccccttctacgagcggctcggcttcaccgtcaccgccgacgtcgaggtgcccgaaggaccgcgcacctggtgcatgacccgcaagcccggtgcctga

SEQ ID NO: 5985 - DNA, 2922 bp, synthetic construct
  source 1..2922: mol_type = other DNA
atggccttaccagtgaccgccttgctcctgccgctggccttgctgctccacgccgccaggccgctcgagatccagaaccctgatcctgccgtgtaccagctgcgggatagcaagagcagcgacaagagcgtgtgtctgttcaccgacttcgacagccagaccaacgtgtcccagagcaaggactccgacgtgtacatcaccgataagtgcgtgctggacatgcggagcatggacttcaagagcaactccgccgtggcctggtccaacaagtccgatttcgcctgcgccaacgccttcaacaacagcattatccccgaggacacattcttcccaagccccgagagcagcgactccaccgaccacgtgaagcccaaagagacagagaacaccaagcagcccagcaagagctgccacaagcccaaggccatcgtgcacaccgagaaagtgaacatgatgagcctgaccgtgctgggcctgcggatgctgttcgccaaaaccgtggccgtgaacttcctgctgaccgccaagctgttcttcctcagggccaagcgatctggatctggagcaacaaacttctcactactcaaacaagcaggtgacgtggaggagaatcccgggcctactagcatggccttaccagtgaccgccttgctcctgccgctggccttgctgctccacgccgccaggccggacatcgtgatgacacagagccctgatagcctggccgtgtctctgggagagagagccaccattaactgcaaggccagccagagcgtggactacgacggcgacagcttcctgaactggtatcagcagaagcccggccagcctcctaagctgctgatctacgccgccagcaatctggaaagcggcgtgccaagcagattttccggctctggcagcggcaccgatttcaccctgacaatatccagcctccagcctgaggacgtggccgtgtactactgccagcagagcaacgacgaccctctgacctttggacagggcaccaaggtggaaatcaaaggcggaggcggaagtggaggcggaggatctggcggcggaggctctcaagttcagctggttcagagcggagccgaagtgaagaaacctggggcctctgtgaaggtgtcctgcaaagccagcggctacacctttaccagctactggatcaactgggtccgacaggcccctggacaaggactggaatggatgggacagatccttccaggcggaggggacaccaactacaacggcaagttcaagggcagagtgaccatcaccgccgacaccagcacaagcaccgcctacatggaactgagcagcctgagaagcgaggacaccgccgtgtattattgcaccagacgggtgcccatccggctggattattggggacagggaaccctggtcaccgtgtctagtacgcgtgaggaggacctgaagaacgtgttcccacctgaggtggccgtgttcgagcctagcgaggccgagatcagccacacccagaaagccaccctcgtgtgcctggctaccggcttctaccccgaccatgtggaactgtcttggtgggtcaacggcaaagaggtgcacagcggcgtgtgtaccgacccccagccactgaaagaacagcccgccctgaacgacagccggtactgcctgagcagcagactgagagtgtccgccaccttctggcagaacccccggaaccacttcagatgccaggtgcagttctacggcctgagcgagaacgacgagtggacccaggacagagccaagcccgtgacccagatcgtgtctgccgaagcctggggcagagccgatgatgtgattaagatccactggcaggaaaagaagtccaacaccatcctgggcagccaggaaggcaacaccatgaagaccaacgacacctacatgaagttcagctggctgaccgtgcccgagaagtccctggacaaagaacacagatgcatcgtgcggcacgaaaacaacaagaacggcgtggaccaggaaatcatcttcccacccatcaagaccgatgtgattacaatggaccccaaggacaactgctccaaggacgccaacgataccctgctgctccagctgaccaacaccagcgcctactacatgtacttgttgctgctgctgaagtccgtggtgtacttcgccatcatcacatgctgcctgctgcggagaaccgccttctgctgcaacggcgagaagtctcgcgccaagagaagcggatctggcgtgaagcagaccctgaatttcgacctgctgaagctggctggcgacgtggaatccaacccaggcccttctagaggccatatgaccgagtacaagcccacggtgcgcctcgccacccgcgacgacgtccccagggccgtacgcaccctcgccgccgcgttcgccgactaccccgccacgcgccacaccgtcgatccggaccgccacatcgagcgggtcaccgagctgcaagaactcttcctcacgcgcgtcgggctcgacatcggcaaggtgtgggtcgcggacgacggcgccgcggtggcggtctggaccacgccggagagcgtcgaagcgggggcggtgttcgccgagatcggcccgcgcatggccgagttgagcggttcccggctggccgcgcagcaacagatggaaggcctcctggcgccgcaccggcccaaggagcccgcgtggttcctggccaccgtcggcgtctcgcccgaccaccagggcaagggtctgggcagcgccgtcgtgctccccggagtggaggcggccgagcgcgccggggtgcccgccttcctggagacctccgcgccccgcaacctccccttctacgagcggctcggcttcaccgtcaccgccgacgtcgaggtgcccgaaggaccgcgcacctggtgcatgacccgcaagcccggtgcctga

SEQ ID NO: 5986 - DNA, 2613 bp, synthetic construct
  source 1..2613: mol_type = other DNA
atggccttaccagtgaccgccttgctcctgccgctggccttgctgctccacgccgccaggccgctcgaggaggacctgaagaacgtgttcccacctgaggtggccgtgttcgagcctagcgaggccgagatcagccacacccagaaagccaccctcgtgtgcctggctaccggcttctaccccgaccatgtggaactgtcttggtgggtcaacggcaaagaggtgcacagcggcgtgtctaccgacccccagccactgaaagaacagcccgccctgaacgacagccggtactgcctgagcagcagactgagagtgtccgccaccttctggcagaacccccggaaccacttcagatgccaggtgcagttctacggcctgagcgagaacgacgagtggacccaggacagagccaagcccgtgacccagatcgtgtctgccgaagcctggggcagagccgattgcggctttaccagcgagagctaccagcagggcgtgctgagcgccaccaacctgagcgtgatcggcttcagaatcctgctgctgaaagtggccggctttaacctgctgatgaccctgcggctgtggtccagcagggccaagcgatctggatctggagcaacaaacttctcactactcaaacaagcaggtgacgtggaggagaatcccgggcctactagcatggccttaccagtgaccgccttgctcctgccgctggccttgctgctccacgccgccaggccggacatcgtgatgacacagagccctgatagcctggccgtgtctctgggagagagagccaccattaactgcaaggccagccagagcgtggactacgacggcgacagcttcctgaactggtatcagcagaagcccggccagcctcctaagctgctgatctacgccgccagcaatctggaaagcggcgtgccaagcagattttccggctctggcagcggcaccgatttcaccctgacaatatccagcctccagcctgaggacgtggccgtgtactactgccagcagagcaacgacgaccctctgacctttggacagggcaccaaggtggaaatcaaaggcggaggcggaagtggaggcggaggatctggcggcggaggctctcaagttcagctggttcagagcggagccgaagtgaagaaacctggggcctctgtgaaggtgtcctgcaaagccagcggctacacctttaccagctactggatcaactgggtccgacaggcccctggacaaggactggaatggatgggacagatccttccaggcggaggggacaccaactacaacggcaagttcaagggcagagtgaccatcaccgccgacaccagcacaagcaccgcctacatggaactgagcagcctgagaagcgaggacaccgccgtgtattattgcaccagacgggtgcccatccggctggattattggggacagggaaccctggtcaccgtgtctagtacgcgtatccagaaccctgatcctgccgtgtaccagctgcgggatagcaagagcagcgacaagagcgtgtgtctgttcaccgacttcgacagccagaccaacgtgtcccagagcaaggactccgacgtgtacatcaccgataagaccgtgctggacatgcggagcatggacttcaagagcaactccgccgtggcctggtccaacaagtccgatttcgcctgcgccaacgccttcaacaacagcattatccccgaggacacattcttcccaagccccgagagcagctgcgacgtgaagctggtggaaaagagcttcgagacagacaccaacctgaacttccagatcctgtacgagatcctgctgggcaaggccaccctgtacgccgtgctggtgtctgccctggtgctgatggctatggtcaagcggaaggacagccggggacgcgccaagagaagcggatctggcgtgaagcagaccctgaatttcgacctgctgaagctggctggcgacgtggaatccaacccaggcccttctagaggccatatgaccgagtacaagcccacggtgcgcctcgccacccgcgacgacgtccccagggccgtacgcaccctcgccgccgcgttcgccgactaccccgccacgcgccacaccgtcgatccggaccgccacatcgagcgggtcaccgagctgcaagaactcttcctcacgcgcgtcgggctcgacatcggcaaggtgtgggtcgcggacgacggcgccgcggtggcggtctggaccacgccggagagcgtcgaagcgggggcggtgttcgccgagatcggcccgcgcatggccgagttgagcggttcccggctggccgcgcagcaacagatggaaggcctcctggcgccgcaccggcccaaggagcccgcgtggttcctggccaccgtcggcgtctcgcccgaccaccagggcaagggtctgggcagcgccgtcgtgctccccggagtggaggcggccgagcgcgccggggtgcccgccttcctggagacctccgcgccccgcaacctccccttctacgagcggctcggcttcaccgtcaccgccgacgtcgaggtgcccgaaggaccgcgcacctggtgcatgacccgcaagcccggtgcctga

SEQ ID NO: 5987 - DNA, 2613 bp, synthetic construct
  source 1..2613: mol_type = other DNA
atggccttaccagtgaccgccttgctcctgccgctggccttgctgctccacgccgccaggccgctcgagatccagaaccctgatcctgccgtgtaccagctgcgggatagcaagagcagcgacaagagcgtgtgtctgttcaccgacttcgacagccagaccaacgtgtcccagagcaaggactccgacgtgtacatcaccgataagaccgtgctggacatgcggagcatggacttcaagagcaactccgccgtggcctggtccaacaagtccgatttcgcctgcgccaacgccttcaacaacagcattatccccgaggacacattcttcccaagccccgagagcagctgcgacgtgaagctggtggaaaagagcttcgagacagacaccaacctgaacttccagatcctgtacgagatcctgctgggcaaggccaccctgtacgccgtgctggtgtctgccctggtgctgatggctatggtcaagcggaaggacagccggggaagggccaagcgatctggatctggagcaacaaacttctcactactcaaacaagcaggtgacgtggaggagaatcccgggcctactagcatggccttaccagtgaccgccttgctcctgccgctggccttgctgctccacgccgccaggccggacatcgtgatgacacagagccctgatagcctggccgtgtctctgggagagagagccaccattaactgcaaggccagccagagcgtggactacgacggcgacagcttcctgaactggtatcagcagaagcccggccagcctcctaagctgctgatctacgccgccagcaatctggaaagcggcgtgccaagcagattttccggctctggcagcggcaccgatttcaccctgacaatatccagcctccagcctgaggacgtggccgtgtactactgccagcagagcaacgacgaccctctgacctttggacagggcaccaaggtggaaatcaaaggcggaggcggaagtggaggcggaggatctggcggcggaggctctcaagttcagctggttcagagcggagccgaagtgaagaaacctggggcctctgtgaaggtgtcctgcaaagccagcggctacacctttaccagctactggatcaactgggtccgacaggcccctggacaaggactggaatggatgggacagatccttccaggcggaggggacaccaactacaacggcaagttcaagggcagagtgaccatcaccgccgacaccagcacaagcaccgcctacatggaactgagcagcctgagaagcgaggacaccgccgtgtattattgcaccagacgggtgcccatccggctggattattggggacagggaaccctggtcaccgtgtctagtacgcgtgaggacctgaagaacgtgttcccacctgaggtggccgtgttcgagcctagcgaggccgagatcagccacacccagaaagccaccctcgtgtgcctggctaccggcttctaccccgaccatgtggaactgtcttggtgggtcaacggcaaagaggtgcacagcggcgtgtctaccgacccccagccactgaaagaacagcccgccctgaacgacagccggtactgcctgagcagcagactgagagtgtccgccaccttctggcagaacccccggaaccacttcagatgccaggtgcagttctacggcctgagcgagaacgacgagtggacccaggacagagccaagcccgtgacccagatcgtgtctgccgaagcctggggcagagccgattgcggctttaccagcgagagctaccagcagggcgtgctgagcgccaccaacctgagcgtgatcggcttcagaatcctgctgctgaaagtggccggctttaacctgctgatgaccctgcggctgtggtccagccgcgccaagagaagcggatctggcgtgaagcagaccctgaatttcgacctgctgaagctggctggcgacgtggaatccaacccaggcccttctagaggccatatgaccgagtacaagcccacggtgcgcctcgccacccgcgacgacgtccccagggccgtacgcaccctcgccgccgcgttcgccgactaccccgccacgcgccacaccgtcgatccggaccgccacatcgagcgggtcaccgagctgcaagaactcttcctcacgcgcgtcgggctcgacatcggcaaggtgtgggtcgcggacgacggcgccgcggtggcggtctggaccacgccggagagcgtcgaagcgggggcggtgttcgccgagatcggcccgcgcatggccgagttgagcggttcccggctggccgcgcagcaacagatggaaggcctcctggcgccgcaccggcccaaggagcccgcgtggttcctggccaccgtcggcgtctcgcccgaccaccagggcaagggtctgggcagcgccgtcgtgctccccggagtggaggcggccgagcgcgccggggtgcccgccttcctggagacctccgcgccccgcaacctccccttctacgagcggctcggcttcaccgtcaccgccgacgtcgaggtgcccgaaggaccgcgcacctggtgcatgacccgcaagcccggtgcctga

SEQ ID NO: 5988 - DNA, 2613 bp, synthetic construct
  source 1..2613: mol_type = other DNA
atggccttaccagtgaccgccttgctcctgccgctggccttgctgctccacgccgccaggccgctcgaggaggacctgaagaacgtgttcccacctgaggtggccgtgttcgagcctagcgaggccgagatcagccacacccagaaagccaccctcgtgtgcctggctaccggcttctaccccgaccatgtggaactgtcttggtgggtcaacggcaaagaggtgcacagcggcgtgtgtaccgacccccagccactgaaagaacagcccgccctgaacgacagccggtactgcctgagcagcagactgagagtgtccgccaccttctggcagaacccccggaaccacttcagatgccaggtgcagttctacggcctgagcgagaacgacgagtggacccaggacagagccaagcccgtgacccagatcgtgtctgccgaagcctggggcagagccgattgcgacgtgaagctggtggaaaagagcttcgagacagacaccaacctgaacttccagaacctgagcgtgatcggcttcagaatcctgctgctgaaagtggccggctttaacctgctgatgaccctgcggctgtggtccagcagggccaagcgatctggatctggagcaacaaacttctcactactcaaacaagcaggtgacgtggaggagaatcccgggcctactagcatggccttaccagtgaccgccttgctcctgccgctggccttgctgctccacgccgccaggccggacatcgtgatgacacagagccctgatagcctggccgtgtctctgggagagagagccaccattaactgcaaggccagccagagcgtggactacgacggcgacagcttcctgaactggtatcagcagaagcccggccagcctcctaagctgctgatctacgccgccagcaatctggaaagcggcgtgccaagcagattttccggctctggcagcggcaccgatttcaccctgacaatatccagcctccagcctgaggacgtggccgtgtactactgccagcagagcaacgacgaccctctgacctttggacagggcaccaaggtggaaatcaaaggcggaggcggaagtggaggcggaggatctggcggcggaggctctcaagttcagctggttcagagcggagccgaagtgaagaaacctggggcctctgtgaaggtgtcctgcaaagccagcggctacacctttaccagctactggatcaactgggtccgacaggcccctggacaaggactggaatggatgggacagatccttccaggcggaggggacaccaactacaacggcaagttcaagggcagagtgaccatcaccgccgacaccagcacaagcaccgcctacatggaactgagcagcctgagaagcgaggacaccgccgtgtattattgcaccagacgggtgcccatccggctggattattggggacagggaaccctggtcaccgtgtctagtacgcgtatccagaaccctgatcctgccgtgtaccagctgcgggatagcaagagcagcgacaagagcgtgtgtctgttcaccgacttcgacagccagaccaacgtgtcccagagcaaggactccgacgtgtacatcaccgataagtgcgtgctggacatgcggagcatggacttcaagagcaactccgccgtggcctggtccaacaagtccgatttcgcctgcgccaacgccttcaacaacagcattatccccgaggacacattcttcccaagccccgagagcagctgcggctttaccagcgagagctaccagcagggcgtgctgagcgccaccatcctgtacgagatcctgctgggcaaggccaccctgtacgccgtgctggtgtctgccctggtgctgatggctatggtcaagcggaaggacagccggggacgcgccaagagaagcggatctggcgtgaagcagaccctgaatttcgacctgctgaagctggctggcgacgtggaatccaacccaggcccttctagaggccatatgaccgagtacaagcccacggtgcgcctcgccacccgcgacgacgtccccagggccgtacgcaccctcgccgccgcgttcgccgactaccccgccacgcgccacaccgtcgatccggaccgccacatcgagcgggtcaccgagctgcaagaactcttcctcacgcgcgtcgggctcgacatcggcaaggtgtgggtcgcggacgacggcgccgcggtggcggtctggaccacgccggagagcgtcgaagcgggggcggtgttcgccgagatcggcccgcgcatggccgagttgagcggttcccggctggccgcgcagcaacagatggaaggcctcctggcgccgcaccggcccaaggagcccgcgtggttcctggccaccgtcggcgtctcgcccgaccaccagggcaagggtctgggcagcgccgtcgtgctccccggagtggaggcggccgagcgcgccggggtgcccgccttcctggagacctccgcgccccgcaacctccccttctacgagcggctcggcttcaccgtcaccgccgacgtcgaggtgcccgaaggaccgcgcacctggtgcatgacccgcaagcccggtgcctga

SEQ ID NO: 5989 - DNA, 2613 bp, synthetic construct
  source 1..2613: mol_type = other DNA
atggccttaccagtgaccgccttgctcctgccgctggccttgctgctccacgccgccaggccgctcgaggaggacctgaagaacgtgttcccacctgaggtggccgtgttcgagcctagcgaggccgagatcagccacacccagaaagccaccctcgtgtgcctggctaccggcttctaccccgaccatgtggaactgtcttggtgggtcaacggcaaagaggtgcacagcggcgtgtctaccgacccccagccactgaaagaacagcccgccctgaacgacagccggtactgcctgagcagcagactgagagtgtccgccaccttctggcagaacccccggaaccacttcagatgccaggtgcagttctacggcctgagcgagaacgacgagtggacccaggacagagccaagcccgtgacccagatcgtgtctgccgaagcctggggcagagccgattgcgacgtgaagctggtggaaaagagcttcgagacagacaccaacctgaacttccagaacctgagcgtgatcggcttcagaatcctgctgctgaaagtggccggctttaacctgctgatgaccctgcggctgtggtccagcagggccaagcgatctggatctggagcaacaaacttctcactactcaaacaagcaggtgacgtggaggagaatcccgggcctactagcatggccttaccagtgaccgccttgctcctgccgctggccttgctgctccacgccgccaggccggacatcgtgatgacacagagccctgatagcctggccgtgtctctgggagagagagccaccattaactgcaaggccagccagagcgtggactacgacggcgacagcttcctgaactggtatcagcagaagcccggccagcctcctaagctgctgatctacgccgccagcaatctggaaagcggcgtgccaagcagattttccggctctggcagcggcaccgatttcaccctgacaatatccagcctccagcctgaggacgtggccgtgtactactgccagcagagcaacgacgaccctctgacctttggacagggcaccaaggtggaaatcaaaggcggaggcggaagtggaggcggaggatctggcggcggaggctctcaagttcagctggttcagagcggagccgaagtgaagaaacctggggcctctgtgaaggtgtcctgcaaagccagcggctacacctttaccagctactggatcaactgggtccgacaggcccctggacaaggactggaatggatgggacagatccttccaggcggaggggacaccaactacaacggcaagttcaagggcagagtgaccatcaccgccgacaccagcacaagcaccgcctacatggaactgagcagcctgagaagcgaggacaccgccgtgtattattgcaccagacgggtgcccatccggctggattattggggacagggaaccctggtcaccgtgtctagtacgcgtatccagaaccctgatcctgccgtgtaccagctgcgggatagcaagagcagcgacaagagcgtgtgtctgttcaccgacttcgacagccagaccaacgtgtcccagagcaaggactccgacgtgtacatcaccgataagaccgtgctggacatgcggagcatggacttcaagagcaactccgccgtggcctggtccaacaagtccgatttcgcctgcgccaacgccttcaacaacagcattatccccgaggacacattcttcccaagccccgagagcagctgcggctttaccagcgagagctaccagcagggcgtgctgagcgccaccatcctgtacgagatcctgctgggcaaggccaccctgtacgccgtgctggtgtctgccctggtgctgatggctatggtcaagcggaaggacagccggggacgcgccaagagaagcggatctggcgtgaagcagaccctgaatttcgacctgctgaagctggctggcgacgtggaatccaacccaggcccttctagaggccatatgaccgagtacaagcccacggtgcgcctcgccacccgcgacgacgtccccagggccgtacgcaccctcgccgccgcgttcgccgactaccccgccacgcgccacaccgtcgatccggaccgccacatcgagcgggtcaccgagctgcaagaactcttcctcacgcgcgtcgggctcgacatcggcaaggtgtgggtcgcggacgacggcgccgcggtggcggtctggaccacgccggagagcgtcgaagcgggggcggtgttcgccgagatcggcccgcgcatggccgagttgagcggttcccggctggccgcgcagcaacagatggaaggcctcctggcgccgcaccggcccaaggagcccgcgtggttcctggccaccgtcggcgtctcgcccgaccaccagggcaagggtctgggcagcgccgtcgtgctccccggagtggaggcggccgagcgcgccggggtgcccgccttcctggagacctccgcgccccgcaacctccccttctacgagcggctcggcttcaccgtcaccgccgacgtcgaggtgcccgaaggaccgcgcacctggtgcatgacccgcaagcccggtgcctga

SEQ ID NO: 5990 - DNA, 2922 bp, synthetic construct
  source 1..2922: mol_type = other DNA
atggccttaccagtgaccgccttgctcctgccgctggccttgctgctccacgccgccaggccgctcgaggaggaggacctgaagaacgtgttcccacctgaggtggccgtgttcgagcctagcgaggccgagatcagccacacccagaaagccaccctcgtgtgcctggctaccggcttctaccccgaccatgtggaactgtcttggtgggtcaacggcaaagaggtgcacagcggcgtgtctaccgacccccagccactgaaagaacagcccgccctgaacgacagccggtactgcctgagcagcagactgagagtgtccgccaccttctggcagaacccccggaaccacttcagatgccaggtgcagttctacggcctgagcgagaacgacgagtggacccaggacagagccaagcccgtgacccagatcgtgtctgccgaagcctggggcagagccgatgatgtgattaagatccactggcaggaaaagaagtccaacaccatcctgggcagccaggaaggcaacaccatgaagaccaacgacacctacatgaagttcagctggctgaccgtgcccgagaagtccctggacaaagaacacagatgcatcgtgcggcacgaaaacaacaagaacggcgtggaccaggaaatcatcttcccacccatcaagaccgatgtgattacaatggaccccaaggacaactgctccaaggacgccaacgataccctgctgctccagctgaccaacaccagcgcctactacatgtacttgttgctgctgctgaagtccgtggtgtacttcgccatcatcacatgctgcctgctgcggagaaccgccttctgctgcaacggcgagaagtctagggccaagcgatctggatctggagcaacaaacttctcactactcaaacaagcaggtgacgtggaggagaatcccgggcctactagcatggccttaccagtgaccgccttgctcctgccgctggccttgctgctccacgccgccaggccggacatcgtgatgacacagagccctgatagcctggccgtgtctctgggagagagagccaccattaactgcaaggccagccagagcgtggactacgacggcgacagcttcctgaactggtatcagcagaagcccggccagcctcctaagctgctgatctacgccgccagcaatctggaaagcggcgtgccaagcagattttccggctctggcagcggcaccgatttcaccctgacaatatccagcctccagcctgaggacgtggccgtgtactactgccagcagagcaacgacgaccctctgacctttggacagggcaccaaggtggaaatcaaaggcggaggcggaagtggaggcggaggatctggcggcggaggctctcaagttcagctggttcagagcggagccgaagtgaagaaacctggggcctctgtgaaggtgtcctgcaaagccagcggctacacctttaccagctactggatcaactgggtccgacaggcccctggacaaggactggaatggatgggacagatccttccaggcggaggggacaccaactacaacggcaagttcaagggcagagtgaccatcaccgccgacaccagcacaagcaccgcctacatggaactgagcagcctgagaagcgaggacaccgccgtgtattattgcaccagacgggtgcccatccggctggattattggggacagggaaccctggtcaccgtgtctagtacgcgtatccagaaccctgatcctgccgtgtaccagctgcgggatagcaagagcagcgacaagagcgtgtgtctgttcaccgacttcgacagccagaccaacgtgtcccagagcaaggactccgacgtgtacatcaccgataagaccgtgctggacatgcggagcatggacttcaagagcaactccgccgtggcctggtccaacaagtccgatttcgcctgcgccaacgccttcaacaacagcattatccccgaggacacattcttcccaagccccgagagcagcgactccaccgaccacgtgaagcccaaagagacagagaacaccaagcagcccagcaagagctgccacaagcccaaggccatcgtgcacaccgagaaagtgaacatgatgagcctgaccgtgctgggcctgcggatgctgttcgccaaaaccgtggccgtgaacttcctgctgaccgccaagctgttcttcctccgcgccaagagaagcggatctggcgtgaagcagaccctgaatttcgacctgctgaagctggctggcgacgtggaatccaacccaggcccttctagaggccatatgaccgagtacaagcccacggtgcgcctcgccacccgcgacgacgtccccagggccgtacgcaccctcgccgccgcgttcgccgactaccccgccacgcgccacaccgtcgatccggaccgccacatcgagcgggtcaccgagctgcaagaactcttcctcacgcgcgtcgggctcgacatcggcaaggtgtgggtcgcggacgacggcgccgcggtggcggtctggaccacgccggagagcgtcgaagcgggggcggtgttcgccgagatcggcccgcgcatggccgagttgagcggttcccggctggccgcgcagcaacagatggaaggcctcctggcgccgcaccggcccaaggagcccgcgtggttcctggccaccgtcggcgtctcgcccgaccaccagggcaagggtctgggcagcgccgtcgtgctccccggagtggaggcggccgagcgcgccggggtgcccgccttcctggagacctccgcgccccgcaacctccccttctacgagcggctcggcttcaccgtcaccgccgacgtcgaggtgcccgaaggaccgcgcacctggtgcatgacccgcaagcccggtgcctga

SEQ ID NO: 5991 - DNA, 2613 bp, synthetic construct
  source 1..2613: mol_type = other DNA
atggccttaccagtgaccgccttgctcctgccgctggccttgctgctccacgccgccaggccgctcgaggaggacctgaagaacgtgttcccacctgaggtggccgtgttcgagcctagcgaggccgagatcagccacacccagaaagccaccctcgtgtgcctggctaccggcttctaccccgaccatgtggaactgtcttggtgggtcaacggcaaagaggtgcacagcggcgtgtgtaccgacccccagccactgaaagaacagcccgccctgaacgacagccggtactgcctgagcagcagactgagagtgtccgccaccttctggcagaacccccggaaccacttcagatgccaggtgcagttctacggcctgagcgagaacgacgagtggacccaggacagagccaagcccgtgacccagatcgtgtctgccgaagcctggggcagagccgattgcggctttaccagcgagagctaccagcagggcgtgctgagcgccaccaacctgagcgtgatcggcttcagaatcctgctgctgaaagtggccggctttaacctgctgatgaccctgcggctgtggtccagcagggccaagcgatctggatctggagcaacaaacttctcactactcaaacaagcaggtgacgtggaggagaatcccgggcctactagcatggccttaccagtgaccgccttgctcctgccgctggccttgctgctccacgccgccaggccggacatcgtgatgacacagagccctgatagcctggccgtgtctctgggagagagagccaccattaactgcaaggccagccagagcgtggactacgacggcgacagcttcctgaactggtatcagcagaagcccggccagcctcctaagctgctgatctacgccgccagcaatctggaaagcggcgtgccaagcagattttccggctctggcagcggcaccgatttcaccctgacaatatccagcctccagcctgaggacgtggccgtgtactactgccagcagagcaacgacgaccctctgacctttggacagggcaccaaggtggaaatcaaaggcggaggcggaagtggaggcggaggatctggcggcggaggctctcaagttcagctggttcagagcggagccgaagtgaagaaacctggggcctctgtgaaggtgtcctgcaaagccagcggctacacctttaccagctactggatcaactgggtccgacaggcccctggacaaggactggaatggatgggacagatccttccaggcggaggggacaccaactacaacggcaagttcaagggcagagtgaccatcaccgccgacaccagcacaagcaccgcctacatggaactgagcagcctgagaagcgaggacaccgccgtgtattattgcaccagacgggtgcccatccggctggattattggggacagggaaccctggtcaccgtgtctagtacgcgtatccagaaccctgatcctgccgtgtaccagctgcgggatagcaagagcagcgacaagagcgtgtgtctgttcaccgacttcgacagccagaccaacgtgtcccagagcaaggactccgacgtgtacatcaccgataagtgcgtgctggacatgcggagcatggacttcaagagcaactccgccgtggcctggtccaacaagtccgatttcgcctgcgccaacgccttcaacaacagcattatccccgaggacacattcttcccaagccccgagagcagctgcgacgtgaagctggtggaaaagagcttcgagacagacaccaacctgaacttccagatcctgtacgagatcctgctgggcaaggccaccctgtacgccgtgctggtgtctgccctggtgctgatggctatggtcaagcggaaggacagccggggacgcgccaagagaagcggatctggcgtgaagcagaccctgaatttcgacctgctgaagctggctggcgacgtggaatccaacccaggcccttctagaggccatatgaccgagtacaagcccacggtgcgcctcgccacccgcgacgacgtccccagggccgtacgcaccctcgccgccgcgttcgccgactaccccgccacgcgccacaccgtcgatccggaccgccacatcgagcgggtcaccgagctgcaagaactcttcctcacgcgcgtcgggctcgacatcggcaaggtgtgggtcgcggacgacggcgccgcggtggcggtctggaccacgccggagagcgtcgaagcgggggcggtgttcgccgagatcggcccgcgcatggccgagttgagcggttcccggctggccgcgcagcaacagatggaaggcctcctggcgccgcaccggcccaaggagcccgcgtggttcctggccaccgtcggcgtctcgcccgaccaccagggcaagggtctgggcagcgccgtcgtgctccccggagtggaggcggccgagcgcgccggggtgcccgccttcctggagacctccgcgccccgcaacctccccttctacgagcggctcggcttcaccgtcaccgccgacgtcgaggtgcccgaaggaccgcgcacctggtgcatgacccgcaagcccggtgcctga

SEQ ID NO: 5992 - DNA, 2700 bp, synthetic construct
  source 1..2700: mol_type = other DNA
atggccttaccagtgaccgccttgctcctgccgctggccttgctgctccacgccgccaggccgctcgaggaggaggacctgaagaacgtgttcccacctgaggtggccgtgttcgagcctagcgaggccgagatcagccacacccagaaagccaccctcgtgtgcctggctaccggcttctaccccgaccatgtggaactgtcttggtgggtcaacggcaaagaggtgcacagcggcgtgtgtaccgacccccagccactgaaagaacagcccgccctgaacgacagccggtactgcctgagcagcagactgagagtgtccgccaccttctggcagaacccccggaaccacttcagatgccaggtgcagttctacggcctgagcgagaacgacgagtggacccaggacagagccaagcccgtgacccagatcgtgtctgccgaagcctggggcagagccgattgcggctttaccagcgagagctaccagcagggcgtgctgagcgccaccaacctgagcgtgatcggcttcagaatcctgctgctgaaagtggccggctttaacctgctgatgaccctgcggctgtggtccagcagggccaagcgatctggatctggagcaacaaacttctcactactcaaacaagcaggtgacgtggaggagaatcccgggcctactagcatggccttaccagtgaccgccttgctcctgccgctggccttgctgctccacgccgccaggccggacatcgtgatgacacagagccctgatagcctggccgtgtctctgggagagagagccaccattaactgcaaggccagccagagcgtggactacgacggcgacagcttcctgaactggtatcagcagaagcccggccagcctcctaagctgctgatctacgccgccagcaatctggaaagcggcgtgccaagcagattttccggctctggcagcggcaccgatttcaccctgacaatatccagcctccagcctgaggacgtggccgtgtactactgccagcagagcaacgacgaccctctgacctttggacagggcaccaaggtggaaatcaaaggcggaggcggaagtggaggcggaggatctggcggcggaggctctcaagttcagctggttcagagcggagccgaagtgaagaaacctggggcctctgtgaaggtgtcctgcaaagccagcggctacacctttaccagctactggatcaactgggtccgacaggcccctggacaaggactggaatggatgggacagatccttccaggcggaggggacaccaactacaacggcaagttcaagggcagagtgaccatcaccgccgacaccagcacaagcaccgcctacatggaactgagcagcctgagaagcgaggacaccgccgtgtattattgcaccagacgggtgcccatccggctggattattggggacagggaaccctggtcaccgtgtctagtacgcgtggacagcctaaggccaatcctaccgtgacactgttccctccaagcagcgaagaactccaggccaacaaggccacacttgtgtgcctgatctccgacttctaccctggggctgtgacagtggcttggaaggccgatggatctcctgtgaaagccggcgtggaaaccaccaagccatccaagcagagcaacaacaaatacgccgccagctcctacctgagcctgacacctgagcagtggaagtcccacagatcctacagctgccaagtgacccacgaaggcagcaccgtggaaaagacagtggcccctacagagtgcagccccatcaagaccgatgtgattacaatggaccccaaggacaactgctccaaggacgccaacgataccctgctgctccagctgaccaacaccagcgcctactacatgtacttgttgctgctgctgaagtccgtggtgtacttcgccatcatcacatgctgcctgctgcggagaaccgccttctgctgcaacggcgagaagtctcgcgccaagagaagcggatctggcgtgaagcagaccctgaatttcgacctgctgaagctggctggcgacgtggaatccaacccaggcccttctagaggccatatgaccgagtacaagcccacggtgcgcctcgccacccgcgacgacgtccccagggccgtacgcaccctcgccgccgcgttcgccgactaccccgccacgcgccacaccgtcgatccggaccgccacatcgagcgggtcaccgagctgcaagaactcttcctcacgcgcgtcgggctcgacatcggcaaggtgtgggtcgcggacgacggcgccgcggtggcggtctggaccacgccggagagcgtcgaagcgggggcggtgttcgccgagatcggcccgcgcatggccgagttgagcggttcccggctggccgcgcagcaacagatggaaggcctcctggcgccgcaccggcccaaggagcccgcgtggttcctggccaccgtcggcgtctcgcccgaccaccagggcaagggtctgggcagcgccgtcgtgctccccggagtggaggcggccgagcgcgccggggtgcccgccttcctggagacctccgcgccccgcaacctccccttctacgagcggctcggcttcaccgtcaccgccgacgtcgaggtgcccgaaggaccgcgcacctggtgcatgacccgcaagcccggtgcctga

SEQ ID NO: 5993 - DNA, 2700 bp, synthetic construct
  source 1..2700: mol_type = other DNA
atggccttaccagtgaccgccttgctcctgccgctggccttgctgctccacgccgccaggccgctcgagggacagcctaaggccaatcctaccgtgacactgttccctccaagcagcgaagaactccaggccaacaaggccacacttgtgtgcctgatctccgacttctaccctggggctgtgacagtggcttggaaggccgatggatctcctgtgaaagccggcgtggaaaccaccaagccatccaagcagagcaacaacaaatacgccgccagctcctacctgagcctgacacctgagcagtggaagtcccacagatcctacagctgccaagtgacccacgaaggcagcaccgtggaaaagacagtggcccctacagagtgcagccccatcaagaccgatgtgattacaatggaccccaaggacaactgctccaaggacgccaacgataccctgctgctccagctgaccaacaccagcgcctactacatgtacttgttgctgctgctgaagtccgtggtgtacttcgccatcatcacatgctgcctgctgcggagaaccgccttctgctgcaacggcgagaagtctagggccaagcgatctggatctggagcaacaaacttctcactactcaaacaagcaggtgacgtggaggagaatcccgggcctactagcatggccttaccagtgaccgccttgctcctgccgctggccttgctgctccacgccgccaggccggacatcgtgatgacacagagccctgatagcctggccgtgtctctgggagagagagccaccattaactgcaaggccagccagagcgtggactacgacggcgacagcttcctgaactggtatcagcagaagcccggccagcctcctaagctgctgatctacgccgccagcaatctggaaagcggcgtgccaagcagattttccggctctggcagcggcaccgatttcaccctgacaatatccagcctccagcctgaggacgtggccgtgtactactgccagcagagcaacgacgaccctctgacctttggacagggcaccaaggtggaaatcaaaggcggaggcggaagtggaggcggaggatctggcggcggaggctctcaagttcagctggttcagagcggagccgaagtgaagaaacctggggcctctgtgaaggtgtcctgcaaagccagcggctacacctttaccagctactggatcaactgggtccgacaggcccctggacaaggactggaatggatgggacagatccttccaggcggaggggacaccaactacaacggcaagttcaagggcagagtgaccatcaccgccgacaccagcacaagcaccgcctacatggaactgagcagcctgagaagcgaggacaccgccgtgtattattgcaccagacgggtgcccatccggctggattattggggacagggaaccctggtcaccgtgtctagtacgcgtgaggaggacctgaagaacgtgttcccacctgaggtggccgtgttcgagcctagcgaggccgagatcagccacacccagaaagccaccctcgtgtgcctggctaccggcttctaccccgaccatgtggaactgtcttggtgggtcaacggcaaagaggtgcacagcggcgtgtgtaccgacccccagccactgaaagaacagcccgccctgaacgacagccggtactgcctgagcagcagactgagagtgtccgccaccttctggcagaacccccggaaccacttcagatgccaggtgcagttctacggcctgagcgagaacgacgagtggacccaggacagagccaagcccgtgacccagatcgtgtctgccgaagcctggggcagagccgattgcggctttaccagcgagagctaccagcagggcgtgctgagcgccaccaacctgagcgtgatcggcttcagaatcctgctgctgaaagtggccggctttaacctgctgatgaccctgcggctgtggtccagccgcgccaagagaagcggatctggcgtgaagcagaccctgaatttcgacctgctgaagctggctggcgacgtggaatccaacccaggcccttctagaggccatatgaccgagtacaagcccacggtgcgcctcgccacccgcgacgacgtccccagggccgtacgcaccctcgccgccgcgttcgccgactaccccgccacgcgccacaccgtcgatccggaccgccacatcgagcgggtcaccgagctgcaagaactcttcctcacgcgcgtcgggctcgacatcggcaaggtgtgggtcgcggacgacggcgccgcggtggcggtctggaccacgccggagagcgtcgaagcgggggcggtgttcgccgagatcggcccgcgcatggccgagttgagcggttcccggctggccgcgcagcaacagatggaaggcctcctggcgccgcaccggcccaaggagcccgcgtggttcctggccaccgtcggcgtctcgcccgaccaccagggcaagggtctgggcagcgccgtcgtgctccccggagtggaggcggccgagcgcgccggggtgcccgccttcctggagacctccgcgccccgcaacctccccttctacgagcggctcggcttcaccgtcaccgccgacgtcgaggtgcccgaaggaccgcgcacctggtgcatgacccgcaagcccggtgcctga

SEQ ID NO: 5994 - DNA, 2691 bp, synthetic construct
  source 1..2691: mol_type = other DNA
atggccttaccagtgaccgccttgctcctgccgctggccttgctgctccacgccgccaggccgctcgaggaggcctctacaaagggaccctccgtgtttcctctggctcccagcagcaagtctacaagcggaggaacagccgctctgggctgcctggtcaaggattactttcccgagcctgtgaccgtgtcctggaatagcggagcactgacaagcggcgtgcacacctttccagccgtgctgcaaagcagcggcctgtactctctgagcagcgtggtcacagtgcctagctctagcctgggcacccagacctacatctgcaatgtgaaccacaagcctagcaacaccaaggtggacaagagagtggaacccaagagctgtcccatcaagaccgatgtgattacaatggaccccaaggacaactgctccaaggacgccaacgataccctgctgctccagctgaccaacaccagcgcctactacatgtacttgttgctgctgctgaagtccgtggtgtacttcgccatcatcacatgctgcctgctgcggagaaccgccttctgctgcaacggcgagaagtctagggccaagcgatctggatctggagcaacaaacttctcactactcaaacaagcaggtgacgtggaggagaatcccgggcctactagcatggccttaccagtgaccgccttgctcctgccgctggccttgctgctccacgccgccaggccggacatcgtgatgacacagagccctgatagcctggccgtgtctctgggagagagagccaccattaactgcaaggccagccagagcgtggactacgacggcgacagcttcctgaactggtatcagcagaagcccggccagcctcctaagctgctgatctacgccgccagcaatctggaaagcggcgtgccaagcagattttccggctctggcagcggcaccgatttcaccctgacaatatccagcctccagcctgaggacgtggccgtgtactactgccagcagagcaacgacgaccctctgacctttggacagggcaccaaggtggaaatcaaaggcggaggcggaagtggaggcggaggatctggcggcggaggctctcaagttcagctggttcagagcggagccgaagtgaagaaacctggggcctctgtgaaggtgtcctgcaaagccagcggctacacctttaccagctactggatcaactgggtccgacaggcccctggacaaggactggaatggatgggacagatccttccaggcggaggggacaccaactacaacggcaagttcaagggcagagtgaccatcaccgccgacaccagcacaagcaccgcctacatggaactgagcagcctgagaagcgaggacaccgccgtgtattattgcaccagacgggtgcccatccggctggattattggggacagggaaccctggtcaccgtgtctagtacgcgtggacagcctaaggccaatcctaccgtgacactgttccctccaagcagcgaagaactccaggccaacaaggccacacttgtgtgcctgatctccgacttctaccctggggctgtgacagtggcttggaaggccgatggatctcctgtgaaagccggcgtggaaaccaccaagccatccaagcagagcaacaacaaatacgccgccagctcctacctgagcctgacacctgagcagtggaagtcccacagatcctacagctgccaagtgacccacgaaggcagcaccgtggaaaagacagtggcccctacagagtgcagcgaagtgaaaaccgactccaccgaccacgtgaagcccaaagagacagagaacaccaagcagcccagcaagagctgccacaagcccaaggccatcgtgcacaccgagaaagtgaacatgatgagcctgaccgtgctgggcctgcggatgctgttcgccaaaaccgtggccgtgaacttcctgctgaccgccaagctgttcttcctccgcgccaagagaagcggatctggcgtgaagcagaccctgaatttcgacctgctgaagctggctggcgacgtggaatccaacccaggcccttctagaggccatatgaccgagtacaagcccacggtgcgcctcgccacccgcgacgacgtccccagggccgtacgcaccctcgccgccgcgttcgccgactaccccgccacgcgccacaccgtcgatccggaccgccacatcgagcgggtcaccgagctgcaagaactcttcctcacgcgcgtcgggctcgacatcggcaaggtgtgggtcgcggacgacggcgccgcggtggcggtctggaccacgccggagagcgtcgaagcgggggcggtgttcgccgagatcggcccgcgcatggccgagttgagcggttcccggctggccgcgcagcaacagatggaaggcctcctggcgccgcaccggcccaaggagcccgcgtggttcctggccaccgtcggcgtctcgcccgaccaccagggcaagggtctgggcagcgccgtcgtgctccccggagtggaggcggccgagcgcgccggggtgcccgccttcctggagacctccgcgccccgcaacctccccttctacgagcggctcggcttcaccgtcaccgccgacgtcgaggtgcccgaaggaccgcgcacctggtgcatgacccgcaagcccggtgcctga

SEQ ID NO: 5995 - DNA, 2625 bp, synthetic construct
  source 1..2625: mol_type = other DNA
atggccttaccagtgaccgccttgctcctgccgctggccttgctgctccacgccgccaggccgctcgaggaggcctctacaaagggaccctccgtgtttcctctggctcccagcagcaagtctacaagcggaggaacagccgctctgggctgcctggtcaaggattactttcccgagcctgtgaccgtgtcctggaatagcggagcactgacaagcggcgtgcacacctttccagccgtgctgcaaagcagcggcctgtactctctgagcagcgtggtcacagtgcctagctctagcctgggcacccagacctacatctgcaatgtgaaccacaagcctagcaacaccaaggtggacaagagagtggaacccaagagctgtggcagagccgattgcggctttaccagcgagagctaccagcagggcgtgctgagcgccaccatcctgtacgagatcctgctgggcaaggccaccctgtacgccgtgctggtgtctgccctggtgctgatggctatggtcaagcggaaggacagccggggaagggccaagcgatctggatctggagcaacaaacttctcactactcaaacaagcaggtgacgtggaggagaatcccgggcctactagcatggccttaccagtgaccgccttgctcctgccgctggccttgctgctccacgccgccaggccggacatcgtgatgacacagagccctgatagcctggccgtgtctctgggagagagagccaccattaactgcaaggccagccagagcgtggactacgacggcgacagcttcctgaactggtatcagcagaagcccggccagcctcctaagctgctgatctacgccgccagcaatctggaaagcggcgtgccaagcagattttccggctctggcagcggcaccgatttcaccctgacaatatccagcctccagcctgaggacgtggccgtgtactactgccagcagagcaacgacgaccctctgacctttggacagggcaccaaggtggaaatcaaaggcggaggcggaagtggaggcggaggatctggcggcggaggctctcaagttcagctggttcagagcggagccgaagtgaagaaacctggggcctctgtgaaggtgtcctgcaaagccagcggctacacctttaccagctactggatcaactgggtccgacaggcccctggacaaggactggaatggatgggacagatccttccaggcggaggggacaccaactacaacggcaagttcaagggcagagtgaccatcaccgccgacaccagcacaagcaccgcctacatggaactgagcagcctgagaagcgaggacaccgccgtgtattattgcaccagacgggtgcccatccggctggattattggggacagggaaccctggtcaccgtgtctagtacgcgtggacagcctaaggccaatcctaccgtgacactgttccctccaagcagcgaagaactccaggccaacaaggccacacttgtgtgcctgatctccgacttctaccctggggctgtgacagtggcttggaaggccgatggatctcctgtgaaagccggcgtggaaaccaccaagccatccaagcagagcaacaacaaatacgccgccagctcctacctgagcctgacacctgagcagtggaagtcccacagatcctacagctgccaagtgacccacgaaggcagcaccgtggaaaagacagtggcccctacagagtgcagcatccccgaggacacattcttcccaagccccgagagcagctgcgacgtgaagctggtggaaaagagcttcgagacagacaccaacctgaacttccagaacctgagcgtgatcggcttcagaatcctgctgctgaaagtggccggctttaacctgctgatgaccctgcggctgtggtccagccgcgccaagagaagcggatctggcgtgaagcagaccctgaatttcgacctgctgaagctggctggcgacgtggaatccaacccaggcccttctagaggccatatgaccgagtacaagcccacggtgcgcctcgccacccgcgacgacgtccccagggccgtacgcaccctcgccgccgcgttcgccgactaccccgccacgcgccacaccgtcgatccggaccgccacatcgagcgggtcaccgagctgcaagaactcttcctcacgcgcgtcgggctcgacatcggcaaggtgtgggtcgcggacgacggcgccgcggtggcggtctggaccacgccggagagcgtcgaagcgggggcggtgttcgccgagatcggcccgcgcatggccgagttgagcggttcccggctggccgcgcagcaacagatggaaggcctcctggcgccgcaccggcccaaggagcccgcgtggttcctggccaccgtcggcgtctcgcccgaccaccagggcaagggtctgggcagcgccgtcgtgctccccggagtggaggcggccgagcgcgccggggtgcccgccttcctggagacctccgcgccccgcaacctccccttctacgagcggctcggcttcaccgtcaccgccgacgtcgaggtgcccgaaggaccgcgcacctggtgcatgacccgcaagcccggtgcctga

SEQ ID NO: 5996 - DNA, 2625 bp, synthetic construct
  source 1..2625: mol_type = other DNA
atggccttaccagtgaccgccttgctcctgccgctggccttgctgctccacgccgccaggccgctcgaggaggcctctacaaagggaccctccgtgtttcctctggctcccagcagcaagtctacaagcggaggaacagccgctctgggctgcctggtcaaggattactttcccgagcctgtgaccgtgtcctggaatagcggagcactgacaagcggcgtgcacacctttccagccgtgctgcaaagcagcggcctgtactctctgagcagcgtggtcacagtgcctagctctagcctgggcacccagacctacatctgcaatgtgaaccacaagcctagcaacaccaaggtggacaagagagtggaacccaagagctgtatccccgaggacacattcttcccaagccccgagagcagctgcgacgtgaagctggtggaaaagagcttcgagacagacaccaacctgaacttccagaacctgagcgtgatcggcttcagaatcctgctgctgaaagtggccggctttaacctgctgatgaccctgcggctgtggtccagcagggccaagcgatctggatctggagcaacaaacttctcactactcaaacaagcaggtgacgtggaggagaatcccgggcctactagcatggccttaccagtgaccgccttgctcctgccgctggccttgctgctccacgccgccaggccggacatcgtgatgacacagagccctgatagcctggccgtgtctctgggagagagagccaccattaactgcaaggccagccagagcgtggactacgacggcgacagcttcctgaactggtatcagcagaagcccggccagcctcctaagctgctgatctacgccgccagcaatctggaaagcggcgtgccaagcagattttccggctctggcagcggcaccgatttcaccctgacaatatccagcctccagcctgaggacgtggccgtgtactactgccagcagagcaacgacgaccctctgacctttggacagggcaccaaggtggaaatcaaaggcggaggcggaagtggaggcggaggatctggcggcggaggctctcaagttcagctggttcagagcggagccgaagtgaagaaacctggggcctctgtgaaggtgtcctgcaaagccagcggctacacctttaccagctactggatcaactgggtccgacaggcccctggacaaggactggaatggatgggacagatccttccaggcggaggggacaccaactacaacggcaagttcaagggcagagtgaccatcaccgccgacaccagcacaagcaccgcctacatggaactgagcagcctgagaagcgaggacaccgccgtgtattattgcaccagacgggtgcccatccggctggattattggggacagggaaccctggtcaccgtgtctagtacgcgtggacagcctaaggccaatcctaccgtgacactgttccctccaagcagcgaagaactccaggccaacaaggccacacttgtgtgcctgatctccgacttctaccctggggctgtgacagtggcttggaaggccgatggatctcctgtgaaagccggcgtggaaaccaccaagccatccaagcagagcaacaacaaatacgccgccagctcctacctgagcctgacacctgagcagtggaagtcccacagatcctacagctgccaagtgacccacgaaggcagcaccgtggaaaagacagtggcccctacagagtgcagcggcagagccgattgcggctttaccagcgagagctaccagcagggcgtgctgagcgccaccatcctgtacgagatcctgctgggcaaggccaccctgtacgccgtgctggtgtctgccctggtgctgatggctatggtcaagcggaaggacagccggggacgcgccaagagaagcggatctggcgtgaagcagaccctgaatttcgacctgctgaagctggctggcgacgtggaatccaacccaggcccttctagaggccatatgaccgagtacaagcccacggtgcgcctcgccacccgcgacgacgtccccagggccgtacgcaccctcgccgccgcgttcgccgactaccccgccacgcgccacaccgtcgatccggaccgccacatcgagcgggtcaccgagctgcaagaactcttcctcacgcgcgtcgggctcgacatcggcaaggtgtgggtcgcggacgacggcgccgcggtggcggtctggaccacgccggagagcgtcgaagcgggggcggtgttcgccgagatcggcccgcgcatggccgagttgagcggttcccggctggccgcgcagcaacagatggaaggcctcctggcgccgcaccggcccaaggagcccgcgtggttcctggccaccgtcggcgtctcgcccgaccaccagggcaagggtctgggcagcgccgtcgtgctccccggagtggaggcggccgagcgcgccggggtgcccgccttcctggagacctccgcgccccgcaacctccccttctacgagcggctcggcttcaccgtcaccgccgacgtcgaggtgcccgaaggaccgcgcacctggtgcatgacccgcaagcccggtgcctga

SEQ ID NO: 5997 - DNA, 1863 bp, synthetic construct
  source 1..1863: mol_type = other DNA
atggccttaccagtgaccgccttgctcctgccgctggccttgctgctccacgccgccaggccggacatcgtgatgacacagagccctgatagcctggccgtgtctctgggagagagagccaccattaactgcaaggccagccagagcgtggactacgacggcgacagcttcctgaactggtatcagcagaagcccggccagcctcctaagctgctgatctacgccgccagcaatctggaaagcggcgtgccaagcagattttccggctctggcagcggcaccgatttcaccctgacaatatccagcctccagcctgaggacgtggccgtgtactactgccagcagagcaacgacgaccctctgacctttggacagggcaccaaggtggaaatcaaactcgaggacctgaagaacgtgttcccacctgaggtggccgtgttcgagcctagcgaggccgagatcagccacacccagaaagccaccctcgtgtgcctggctaccggcttctaccccgaccatgtggaactgtcttggtgggtcaacggcaaagaggtgcacagcggcgtgtgtaccgacccccagccactgaaagaacagcccgccctgaacgacagccggtactgcctgagcagcagactgagagtgtccgccaccttctggcagaacccccggaaccacttcagatgccaggtgcagttctacggcctgagcgagaacgacgagtggacccaggacagagccaagcccgtgacccagatcgtgtctgccgaagcctggggcagagccgatagcggctttaccagcgagagctaccagcagggcgtgctgagcgccaccatcctgtacgagatcctgctgggcaaggccaccctgtacgccgtgctggtgtctgccctggtgctgatggctatggtcaagcggaaggacagccggggaagggccaagcgatctggatctggagcaacaaacttctcactactcaaacaagcaggtgacgtggaggagaatcccgggcctactagtatggactggatttggcgcatccttttccttgtcggcgctgctaccggcgcgcattccttcgaacaagttcagctggttcagagcggagccgaagtgaagaaacctggggcctctgtgaaggtgtcctgcaaagccagcggctacacctttaccagctactggatcaactgggtccgacaggcccctggacaaggactggaatggatgggacagatccttccaggcggaggggacaccaactacaacggcaagttcaagggcagagtgaccatcaccgccgacaccagcacaagcaccgcctacatggaactgagcagcctgagaagcgaggacaccgccgtgtattattgcaccagacgggtgcccatccggctggattattggggacagggaaccctggtcaccgtgtctagtacgcgtatccagaaccctgatcctgccgtgtaccagctgcgggatagcaagagcagcgacaagagcgtgtgtctgttcaccgacttcgacagccagaccaacgtgtcccagagcaaggactccgacgtgtacatcaccgataagtgcgtgctggacatgcggagcatggacttcaagagcaactccgccgtggcctggtccaacaagtccgatttcgcctgcgccaacgccttcaacaacagcattatccccgaggacacattcttcccaagccccgagagcagcagcgacgtgaagctggtggaaaagagcttcgagacagacaccaacctgaacttccagaacctgagcgtgatcggcttcagaatcctgctgctgaaagtggccggctttaacctgctgatgaccctgcggctgtggtccagc

SEQ ID NO: 5998 - DNA, 2703 bp, synthetic construct
  source 1..2703: mol_type = other DNA
atggccttaccagtgaccgccttgctcctgccgctggccttgctgctccacgccgccaggccggaggttcagctgcttgagtctggcggaggactggttcaacctggcggaagcctgagactgtcttgtgccgcctctggcagaaccttcagcatgggctggtatagacaggcccctggcaagggcctcgaatttgtgtctgccatcacatacagcggcggcagcccttactacgccgattctgtgaagggcagattcaccatcagccgggacaacagcaagaacaccgtgtacctccagatgaacagcctgagagccgaggacaccgccgtgtactactgtgccgccaatccaacctacggcagcgactggaatgccgagaattggggccagggcacactggtcacagtgtctagtggtaccggcggaggcggatctggcggcggaggtagcggtggcggaggatctgaattcgacatcgtgatgacacagagccctgatagcctggccgtgtctctgggagagagagccaccattaactgcaaggccagccagagcgtggactacgacggcgacagcttcctgaactggtatcagcagaagcccggccagcctcctaagctgctgatctacgccgccagcaatctggaaagcggcgtgccaagcagattttccggctctggcagcggcaccgatttcaccctgacaatatccagcctccagcctgaggacgtggccgtgtactactgccagcagagcaacgacgaccctctgacctttggacagggcaccaaggtggaaatcaaactcgagatccagaaccctgatcctgccgtgtaccagctgcgggatagcaagagcagcgacaagagcgtgtgtctgttcaccgacttcgacagccagaccaacgtgtcccagagcaaggactccgacgtgtacatcaccgataagtgcgtgctggacatgcggagcatggacttcaagagcaactccgccgtggcctggtccaacaagtccgatttcgcctgcgccaacgccttcaacaacagcattatccccgaggacacattcttcccaagcagcgacgtgccctgcgacgtgaagctggtggaaaagagcttcgagacagacaccaacctgaacttccagaacctgagcgtgatcggcttcagaatcctgctgctgaaagtggccggctttaacctgctgatgaccctgcggctgtggtccagccgcgccaagagaagcggatctggcgtgaagcagaccctgaatttcgacctgctgaagctggctggcgacgtggaatccaacccaggccctactagtaccatggactggatttggcgcatccttttccttgtcggcgctgctaccggcacccattccgggcccgaagtgcaactggttgaatccggtggcggcctggtgcaacccggcggatctctcagacttagctgtgccgcctccggcagaaccttcacaatgggatggtacaggcaggctccagggaaagagagagagttcgtcgccgccatctctctgtctcccacactggcctactacgccgactctgtgaaaggccggttcaccatctccagagataatagcaagaacaccgtggtgctgcaaatgaactctctgagagccgaggatacagccctgtactattgtgccgctgaccggaagtccgtgatgagcatcagacccgattactggggacagggcacactggtcacagtgtctagtggatccggcggcggaggatctggcggaggcggatctgggggcggaggctctttcgaacaagttcagctggttcagagcggagccgaagtgaagaaacctggggcctctgtgaaggtgtcctgcaaagccagcggctacacctttaccagctactggatcaactgggtccgacaggcccctggacaaggactggaatggatgggacagatccttccaggcggaggggacaccaactacaacggcaagttcaagggcagagtgaccatcaccgccgacaccagcacaagcaccgcctacatggaactgagcagcctgagaagcgaggacaccgccgtgtattattgcaccagacgggtgcccatccggctggattattggggacagggaaccctggtcaccgtgtctagtacgcgtgaggacctgaagaacgtgttcccacctgaggtggccgtgttcgagcctagcaaggccgagatcgcccacacccagaaagccaccctcgtgtgcctggctaccggcttctaccccgaccatgtggaactgtcttggtgggtcaacggcaaagaggtgcacagcggcgtgtgtaccgacccccagccactgaaagaacagcccgccctgaacgacagccggtactgcctgagcagcagactgagagtgtccgccaccttctggcagaacccccggaaccacttcagatgccaggtgcagttctacggcctgagcgagaacgacgagtggacccaggacagagccaagcccgtgacccagatcgtgtctgccgaagcctggggcagagccgattgcggcatcaccagcgccagctaccaccagggcgtgctgagcgccaccatcctgtacgagatcctgctgggcaaggccaccctgtacgccgtgctggtgtctgccctggtgctgatggctatggtcaagcggaaggacagccggggataa

SEQ ID NO: 5999 - DNA, 2703 bp, synthetic construct
  source 1..2703: mol_type = other DNA
atggccttaccagtgaccgccttgctcctgccgctggccttgctgctccacgccgccaggccggaagtgcagctggttgaatctggcggaggactggttcaggctggcggatctctgagactgtcttgtgccgccagcggcagaacctttagcatgggctggtttagacaggcccctggcaaagagagagagttcgtcgccgccatcacatactctggcggcagcccttactacgccgactctgtgaagggcagattcaccatcagccgggacaacgccaagaacaccgtgtacctccagatgaacagcctgaagcctgaggacaccgccgtgtactactgcgccgccaatccaacatacggcagcgactggaacgccgagaattggggccagggaacccaagtgacagtgtctagcggtaccggcggaggcggatctggcggcggaggtagcggtggcggaggatctgaattcgacatcgtgatgacacagagccctgatagcctggccgtgtctctgggagagagagccaccattaactgcaaggccagccagagcgtggactacgacggcgacagcttcctgaactggtatcagcagaagcccggccagcctcctaagctgctgatctacgccgccagcaatctggaaagcggcgtgccaagcagattttccggctctggcagcggcaccgatttcaccctgacaatatccagcctccagcctgaggacgtggccgtgtactactgccagcagagcaacgacgaccctctgacctttggacagggcaccaaggtggaaatcaaactcgagatccagaaccctgatcctgccgtgtaccagctgcgggatagcaagagcagcgacaagagcgtgtgtctgttcaccgacttcgacagccagaccaacgtgtcccagagcaaggactccgacgtgtacatcaccgataagtgcgtgctggacatgcggagcatggacttcaagagcaactccgccgtggcctggtccaacaagtccgatttcgcctgcgccaacgccttcaacaacagcattatccccgaggacacattcttcccaagcagcgacgtgccctgcgacgtgaagctggtggaaaagagcttcgagacagacaccaacctgaacttccagaacctgagcgtgatcggcttcagaatcctgctgctgaaagtggccggctttaacctgctgatgaccctgcggctgtggtccagccgcgccaagagaagcggatctggcgtgaagcagaccctgaatttcgacctgctgaagctggctggcgacgtggaatccaacccaggccctactagtaccatggactggatttggcgcatccttttccttgtcggcgctgctaccggcgcccattccgggcccgaagtgcaactggttgaatccggtggcggcctggtgcaacccggcggatctctcagacttagctgtgccgcctccggcagaaccttcacaatgggatggtacaggcaggctccagggaaagagagagagttcgtcgccgccatctctctgtctcccacactggcctactacgccgactctgtgaaaggccggttcaccatctccagagataatagcaagaacaccgtggtgctgcaaatgaactctctgagagccgaggatacagccctgtactattgtgccgctgaccggaagtccgtgatgagcatcagacccgattactggggacagggcacactggtcacagtgtctagtggatccggcggcggaggatctggcggaggcggatctgggggcggaggctctttcgaacaagttcagctggttcagagcggagccgaagtgaagaaacctggggcctctgtgaaggtgtcctgcaaagccagcggctacacctttaccagctactggatcaactgggtccgacaggcccctggacaaggactggaatggatgggacagatccttccaggcggaggggacaccaactacaacggcaagttcaagggcagagtgaccatcaccgccgacaccagcacaagcaccgcctacatggaactgagcagcctgagaagcgaggacaccgccgtgtattattgcaccagacgggtgcccatccggctggattattggggacagggaaccctggtcaccgtgtctagtacgcgtgaggacctgaagaacgtgttcccacctgaggtggccgtgttcgagcctagcaaggccgagatcgcccacacccagaaagccaccctcgtgtgcctggctaccggcttctaccccgaccatgtggaactgtcttggtgggtcaacggcaaagaggtgcacagcggcgtgtgtaccgacccccagccactgaaagaacagcccgccctgaacgacagccggtactgcctgagcagcagactgagagtgtccgccaccttctggcagaacccccggaaccacttcagatgccaggtgcagttctacggcctgagcgagaacgacgagtggacccaggacagagccaagcccgtgacccagatcgtgtctgccgaagcctggggcagagccgattgcggcatcaccagcgccagctaccaccagggcgtgctgagcgccaccatcctgtacgagatcctgctgggcaaggccaccctgtacgccgtgctggtgtctgccctggtgctgatggctatggtcaagcggaaggacagccggggataa

SEQ ID NO: 6000 - DNA, 2694 bp, synthetic construct
  source 1..2694: mol_type = other DNA
atggccttaccagtgaccgccttgctcctgccgctggccttgctgctccacgccgccaggccggaagtgcagctggttgaatctggcggaggactggttcaggctggcggatctctgagactgtcttgtgccgccagcggcagaacctttagcatgggctggtttagacaggcccctggcaaagagagagagttcgtcgccgccatcacatactctggcggcagcccttactacgccgactctgtgaagggcagattcaccatcagccgggacaacgccaagaacaccgtgtacctccagatgaacagcctgaagcctgaggacaccgccgtgtactactgcgccgccaatccaacatacggcagcgactggaacgccgagaattggggccagggaacccaagtgacagtgtctagcggtaccggcggaggcggatctggcggcggaggtagcggtggcggaggatctgaattcgacatcgtgatgacacagagccctgatagcctggccgtgtctctgggagagagagccaccattaactgcaaggccagccagagcgtggactacgacggcgacagcttcctgaactggtatcagcagaagcccggccagcctcctaagctgctgatctacgccgccagcaatctggaaagcggcgtgccaagcagattttccggctctggcagcggcaccgatttcaccctgacaatatccagcctccagcctgaggacgtggccgtgtactactgccagcagagcaacgacgaccctctgacctttggacagggcaccaaggtggaaatcaaactcgaggacctgaagaacgtgttcccacctgaggtggccgtgttcgagcctagcgaggccgagatcagccacacccagaaagccaccctcgtgtgcctggctaccggcttctaccccgaccatgtggaactgtcttggtgggtcaacggcaaagaggtgcacagcggcgtgtgtaccgacccccagccactgaaagaacagcccgccctgaacgacagccggtactgcctgagcagcagactgagagtgtccgccaccttctggcagaacccccggaaccacttcagatgccaggtgcagttctacggcctgagcgagaacgacgagtggacccaggacagagccaagcccgtgacccagatcgtgtctgccgaagcctggggcagagccgattgcggctttaccagcgagagctaccagcagggcgtgctgagcgccaccatcctgtacgagatcctgctgggcaaggccaccctgtacgccgtgctggtgtctgccctggtgctgatggctatggtcaagcggaaggacagccggggaagggccaagcgatctggatctggagcaacaaacttctcactactcaaacaagcaggtgacgtggaggagaatcccgggcctactagtgccaccatggactggatttggcgcatccttttccttgtcggcgctgctaccggcgcccattccgggcccgaagtgcaactggttgaatccggtggcggcctggtgcaagcaggcggatctctcagacttagctgtgccgcctccggcagaaccttcacaatgggatggtttaggcaggctccagggaaagagagagagttcgtcgccgccatctctctgtctcccacactggcctactacgccgactctgtgaaaggccggttcaccatctccagagataatgccaagaacaccgtggtgctgcaaatgaactctctgaaacccgaggatacagccctgtactattgtgccgctgaccggaagtccgtgatgagcatcagacccgattactggggacagggcacacaagtcacagtgtcctctggatccggcggcggaggatctggcggaggcggatctgggggcggaggctctttcgaacaagttcagctggttcagagcggagccgaagtgaagaaacctggggcctctgtgaaggtgtcctgcaaagccagcggctacacctttaccagctactggatcaactgggtccgacaggcccctggacaaggactggaatggatgggacagatccttccaggcggaggggacaccaactacaacggcaagttcaagggcagagtgaccatcaccgccgacaccagcacaagcaccgcctacatggaactgagcagcctgagaagcgaggacaccgccgtgtattattgcaccagacgggtgcccatccggctggattattggggacagggaaccctggtcaccgtgtctagtacgcgtatccagaaccctgatcctgccgtgtaccagctgcgggatagcaagagcagcgacaagagcgtgtgtctgttcaccgacttcgacagccagaccaacgtgtcccagagcaaggactccgacgtgtacatcaccgataagtgcgtgctggacatgcggagcatggacttcaagagcaactccgccgtggcctggtccaacaagtccgatttcgcctgcgccaacgccttcaacaacagcattatccccgaggacacattcttcccaagccccgagagcagctgcgacgtgaagctggtggaaaagagcttcgagacagacaccaacctgaacttccagaacctgagcgtgatcggcttcagaatcctgctgctgaaagtggccggctttaacctgctgatgaccctgcggctgtggtccagctaa

SEQ ID NO: 6001 - DNA, 2307 bp, synthetic construct
  source 1..2307: mol_type = other DNA
atggccttaccagtgaccgccttgctcctgccgctggccttgctgctccacgccgccaggccggaagtgcagctggttgaatctggcggaggactggttcagcctggcggatctctgagactgagctgtgaagccagcggcttcgccagcgacgattacatcatcggctggttcagacaggcccctggcaaagagagagagggcgtcagctgcatcagctctaagtacgccaacaccgtgtacaccgacagcgtgaagggcagattcagactgagcagaggcaccgccaagaataccgtgtacctccagatgagcgccctgaagcctgaggataccgccgtgtactactgcgctatggacagccgcagagtgacatgccctgagatcagcaccatgcaccggaacttcgattcttggggccagggcacactggtcacagtgtcatctggtaccggcggaggcggatctggcggcggaggtagcggtggcggaggatctgaattcgacatcgtgatgacacagagccctgatagcctggccgtgtctctgggagagagagccaccattaactgcaaggccagccagagcgtggactacgacggcgacagcttcctgaactggtatcagcagaagcccggccagcctcctaagctgctgatctacgccgccagcaatctggaaagcggcgtgccaagcagattttccggctctggcagcggcaccgatttcaccctgacaatatccagcctccagcctgaggacgtggccgtgtactactgccagcagagcaacgacgaccctctgacctttggacagggcaccaaggtggaaatcaaactcgaggacctgaagaacgtgttcccacctgaggtggccgtgttcgagcctagcaaggccgagatcgcccacacccagaaagccaccctcgtgtgcctggctaccggcttctaccccgaccatgtggaactgtcttggtgggtcaacggcaaagaggtgcacagcggcgtgtgtaccgacccccagccactgaaagaacagcccgccctgaacgacagccggtactgcctgagcagcagactgagagtgtccgccaccttctggcagaacccccggaaccacttcagatgccaggtgcagttctacggcctgagcgagaacgacgagtggacccaggacagagccaagcccgtgacccagatcgtgtctgccgaagcctggggcagagccgattgcggcatcaccagcgccagctaccaccagggcgtgctgagcgccaccatcctgtacgagatcctgctgggcaaggccaccctgtacgccgtgctggtgtctgccctggtgctgatggctatggtcaagcggaaggacagccggggaagggccaagcgatctggatctggagcaacaaacttctcactactcaaacaagcaggtgacgtggaggagaatcccgggcctactagtatggactggatttggcgcatccttttccttgtcggcgctgctaccggcgcgcattccttcgaacaagttcagctggttcagagcggagccgaagtgaagaaacctggggcctctgtgaaggtgtcctgcaaagccagcggctacacctttaccagctactggatcaactgggtccgacaggcccctggacaaggactggaatggatgggacagatccttccaggcggaggggacaccaactacaacggcaagttcaagggcagagtgaccatcaccgccgacaccagcacaagcaccgcctacatggaactgagcagcctgagaagcgaggacaccgccgtgtattattgcaccagacgggtgcccatccggctggattattggggacagggaaccctggtcaccgtgtctagtacgcgtatccagaaccctgatcctgccgtgtaccagctgcgggatagcaagagcagcgacaagagcgtgtgtctgttcaccgacttcgacagccagaccaacgtgtcccagagcaaggactccgacgtgtacatcaccgataagtgcgtgctggacatgcggagcatggacttcaagagcaactccgccgtggcctggtccaacaagtccgatttcgcctgcgccaacgccttcaacaacagcattatccccgaggacacattcttcccaagcagcgacgtgccctgcgacgtgaagctggtggaaaagagcttcgagacagacaccaacctgaacttccagaacctgagcgtgatcggcttcagaatcctgctgctgaaagtggccggctttaacctgctgatgaccctgcggctgtggtccagctaa

SEQ ID NO: 6002 - DNA, 2280 bp, synthetic construct
  source 1..2280: mol_type = other DNA
atggccttaccagtgaccgccttgctcctgccgctggccttgctgctccacgccgccaggccggacatcgtgatgacacagagccctgatagcctggccgtgtctctgggagagagagccaccattaactgcaaggccagccagagcgtggactacgacggcgacagcttcctgaactggtatcagcagaagcccggccagcctcctaagctgctgatctacgccgccagcaatctggaaagcggcgtgccaagcagattttccggctctggcagcggcaccgatttcaccctgacaatatccagcctccagcctgaggacgtggccgtgtactactgccagcagagcaacgacgaccctctgacctttggacagggcaccaaggtggaaatcaaactcgaggacctgaagaacgtgttcccacctgaggtggccgtgttcgagcctagcgaggccgagatcagccacacccagaaagccaccctcgtgtgcctggctaccggcttctaccccgaccatgtggaactgtcttggtgggtcaacggcaaagaggtgcacagcggcgtgtgtaccgacccccagccactgaaagaacagcccgccctgaacgacagccggtactgcctgagcagcagactgagagtgtccgccaccttctggcagaacccccggaaccacttcagatgccaggtgcagttctacggcctgagcgagaacgacgagtggacccaggacagagccaagcccgtgacccagatcgtgtctgccgaagcctggggcagagccgattgcggctttaccagcgagagctaccagcagggcgtgctgagcgccaccatcctgtacgagatcctgctgggcaaggccaccctgtacgccgtgctggtgtctgccctggtgctgatggctatggtcaagcggaaggacagccggggaagggccaagcgatctggatctggagcaacaaacttctcactactcaaacaagcaggtgacgtggaggagaatcccgggcctactagtaccatggactggatttggcgcatccttttccttgtcggcgctgctaccggcgcccattccgggcccgaagtgcaactggttgaatccggtggcggcctggtgcaacccggcggatctctcagacttagctgtgccgcctccggcagaaccttcacaatgggatggtacaggcaggctccagggaaagagagagagttcgtcgccgccatctctctgtctcccacactggcctactacgccgactctgtgaaaggccggttcaccatctccagagataatagcaagaacaccgtggtgctgcaaatgaactctctgagagccgaggatacagccctgtactattgtgccgctgaccggaagtccgtgatgagcatcagacccgattactggggacagggcacactggtcacagtgtctagtggatccggcggcggaggatctggcggaggcggatctgggggcggaggctctttcgaacaagttcagctggttcagagcggagccgaagtgaagaaacctggggcctctgtgaaggtgtcctgcaaagccagcggctacacctttaccagctactggatcaactgggtccgacaggcccctggacaaggactggaatggatgggacagatccttccaggcggaggggacaccaactacaacggcaagttcaagggcagagtgaccatcaccgccgacaccagcacaagcaccgcctacatggaactgagcagcctgagaagcgaggacaccgccgtgtattattgcaccagacgggtgcccatccggctggattattggggacagggaaccctggtcaccgtgtctagtacgcgtatccagaaccctgatcctgccgtgtaccagctgcgggatagcaagagcagcgacaagagcgtgtgtctgttcaccgacttcgacagccagaccaacgtgtcccagagcaaggactccgacgtgtacatcaccgataagtgcgtgctggacatgcggagcatggacttcaagagcaactccgccgtggcctggtccaacaagtccgatttcgcctgcgccaacgccttcaacaacagcattatccccgaggacacattcttcccaagccccgagagcagctgcgacgtgaagctggtggaaaagagcttcgagacagacaccaacctgaacttccagaacctgagcgtgatcggcttcagaatcctgctgctgaaagtggccggctttaacctgctgatgaccctgcggctgtggtccagctaa

SEQ ID NO: 6003 - DNA, 2298 bp, synthetic construct
  source 1..2298: mol_type = other DNA
atggccttaccagtgaccgccttgctcctgccgctggccttgctgctccacgccgccaggccggacatcgtgatgacacagagccctgatagcctggccgtgtctctgggagagagagccaccattaactgcaaggccagccagagcgtggactacgacggcgacagcttcctgaactggtatcagcagaagcccggccagcctcctaagctgctgatctacgccgccagcaatctggaaagcggcgtgccaagcagattttccggctctggcagcggcaccgatttcaccctgacaatatccagcctccagcctgaggacgtggccgtgtactactgccagcagagcaacgacgaccctctgacctttggacagggcaccaaggtggaaatcaaactcgaggacctgaagaacgtgttcccacctgaggtggccgtgttcgagcctagcgaggccgagatcagccacacccagaaagccaccctcgtgtgcctggctaccggcttctaccccgaccatgtggaactgtcttggtgggtcaacggcaaagaggtgcacagcggcgtgtgtaccgacccccagccactgaaagaacagcccgccctgaacgacagccggtactgcctgagcagcagactgagagtgtccgccaccttctggcagaacccccggaaccacttcagatgccaggtgcagttctacggcctgagcgagaacgacgagtggacccaggacagagccaagcccgtgacccagatcgtgtctgccgaagcctggggcagagccgattgcggctttaccagcgagagctaccagcagggcgtgctgagcgccaccatcctgtacgagatcctgctgggcaaggccaccctgtacgccgtgctggtgtctgccctggtgctgatggctatggtcaagcggaaggacagccggggaagggccaagcgatctggatctggagcaacaaacttctcactactcaaacaagcaggtgacgtggaggagaatcccgggcctactagtaccatggactggatttggcgcatccttttccttgtcggcgctgctaccggcgcccattccgggccccaggtgcagctggttgaatctggcggaggactggttcagcctggcggatctctgagactgtcttgtgccgccagcggcaacatcaacagcagaaactgcatgggctggttcagacaggcccctggcaagggaagagaaggcgtggcagctatcggccaagtgaccggcagaacctactacgtggacagcgtgaagggcagattcaccatcagcctggacaacagcaagaacaccctgtacctccagatgaacagcctgagagccgaggacaccgccgtgtactattgtgctgctgcccctggctgtctgctgtctgcacttagaagcgccgactacagaaactggggccagggcacactggtcaccgtttcttctggatccggcggcggaggatctggcggaggcggatctgggggcggaggctctttcgaacaagttcagctggttcagagcggagccgaagtgaagaaacctggggcctctgtgaaggtgtcctgcaaagccagcggctacacctttaccagctactggatcaactgggtccgacaggcccctggacaaggactggaatggatgggacagatccttccaggcggaggggacaccaactacaacggcaagttcaagggcagagtgaccatcaccgccgacaccagcacaagcaccgcctacatggaactgagcagcctgagaagcgaggacaccgccgtgtattattgcaccagacgggtgcccatccggctggattattggggacagggaaccctggtcaccgtgtctagtacgcgtatccagaaccctgatcctgccgtgtaccagctgcgggatagcaagagcagcgacaagagcgtgtgtctgttcaccgacttcgacagccagaccaacgtgtcccagagcaaggactccgacgtgtacatcaccgataagtgcgtgctggacatgcggagcatggacttcaagagcaactccgccgtggcctggtccaacaagtccgatttcgcctgcgccaacgccttcaacaacagcattatccccgaggacacattcttcccaagccccgagagcagctgcgacgtgaagctggtggaaaagagcttcgagacagacaccaacctgaacttccagaacctgagcgtgatcggcttcagaatcctgctgctgaaagtggccggctttaacctgctgatgaccctgcggctgtggtccagc

SEQ ID NO: 6004 - DNA, 2301 bp, synthetic construct
  source 1..2301: mol_type = other DNA
atggccttaccagtgaccgccttgctcctgccgctggccttgctgctccacgccgccaggccggacatcgtgatgacacagagccctgatagcctggccgtgtctctgggagagagagccaccattaactgcaaggccagccagagcgtggactacgacggcgacagcttcctgaactggtatcagcagaagcccggccagcctcctaagctgctgatctacgccgccagcaatctggaaagcggcgtgccaagcagattttccggctctggcagcggcaccgatttcaccctgacaatatccagcctccagcctgaggacgtggccgtgtactactgccagcagagcaacgacgaccctctgacctttggacagggcaccaaggtggaaatcaaactcgaggacctgaagaacgtgttcccacctgaggtggccgtgttcgagcctagcgaggccgagatcagccacacccagaaagccaccctcgtgtgcctggctaccggcttctaccccgaccatgtggaactgtcttggtgggtcaacggcaaagaggtgcacagcggcgtgtgtaccgacccccagccactgaaagaacagcccgccctgaacgacagccggtactgcctgagcagcagactgagagtgtccgccaccttctggcagaacccccggaaccacttcagatgccaggtgcagttctacggcctgagcgagaacgacgagtggacccaggacagagccaagcccgtgacccagatcgtgtctgccgaagcctggggcagagccgattgcggctttaccagcgagagctaccagcagggcgtgctgagcgccaccatcctgtacgagatcctgctgggcaaggccaccctgtacgccgtgctggtgtctgccctggtgctgatggctatggtcaagcggaaggacagccggggaagggccaagcgatctggatctggagcaacaaacttctcactactcaaacaagcaggtgacgtggaggagaatcccgggcctactagtaccatggactggatttggcgcatccttttccttgtcggcgctgctaccggcgcccattccgggccccaggtgcagctggttgaatctggcggaggatctgttcaggctggcggctctctgagactgtcttgtggcgcttccggcaacatcagcagcagaaactgcatgggctggttcagacaggcccctggcaaagagagagaaggcgttgccgccatcggacaagtgaccggcagatcctactacgtggacagcgtgaagggcagattcaccatcagcctggacaacgccaagaacaccctgtacctccagatgaacacactgaagcccgaggacaccgccatgtactactgtgctgctgcccctggctgtctgctgtctgcacttagaagcgccgactacagaaactggggccagggaacccaagtgacagtgtctagtggatccggcggcggaggatctggcggaggcggatctgggggcggaggctctttcgaacaagttcagctggttcagagcggagccgaagtgaagaaacctggggcctctgtgaaggtgtcctgcaaagccagcggctacacctttaccagctactggatcaactgggtccgacaggcccctggacaaggactggaatggatgggacagatccttccaggcggaggggacaccaactacaacggcaagttcaagggcagagtgaccatcaccgccgacaccagcacaagcaccgcctacatggaactgagcagcctgagaagcgaggacaccgccgtgtattattgcaccagacgggtgcccatccggctggattattggggacagggaaccctggtcaccgtgtctagtacgcgtatccagaaccctgatcctgccgtgtaccagctgcgggatagcaagagcagcgacaagagcgtgtgtctgttcaccgacttcgacagccagaccaacgtgtcccagagcaaggactccgacgtgtacatcaccgataagtgcgtgctggacatgcggagcatggacttcaagagcaactccgccgtggcctggtccaacaagtccgatttcgcctgcgccaacgccttcaacaacagcattatccccgaggacacattcttcccaagccccgagagcagctgcgacgtgaagctggtggaaaagagcttcgagacagacaccaacctgaacttccagaacctgagcgtgatcggcttcagaatcctgctgctgaaagtggccggctttaacctgctgatgaccctgcggctgtggtccagctaa

SEQ ID NO: 6005 - DNA, 2724 bp, synthetic construct
  source 1..2724: mol_type = other DNA
atggccttaccagtgaccgccttgctcctgccgctggccttgctgctccacgccgccaggccggaagtgcagctggttgaatctggcggaggactggttcaggctggcggatctctgagactgtcttgtgccgccagcggcagaacctttagcatgggctggtttagacaggcccctggcaaagagagagagttcgtcgccgccatcacatactctggcggcagcccttactacgccgactctgtgaagggcagattcaccatcagccgggacaacgccaagaacaccgtgtacctccagatgaacagcctgaagcctgaggacaccgccgtgtactactgcgccgccaatccaacatacggcagcgactggaacgccgagaattggggccagggaacccaagtgacagtgtctagcggtaccggcggaggcggatctggcggcggaggtagcggtggcggaggatctgaattcgacatcgtgatgacacagagccctgatagcctggccgtgtctctgggagagagagccaccattaactgcaaggccagccagagcgtggactacgacggcgacagcttcctgaactggtatcagcagaagcccggccagcctcctaagctgctgatctacgccgccagcaatctggaaagcggcgtgccaagcagattttccggctctggcagcggcaccgatttcaccctgacaatatccagcctccagcctgaggacgtggccgtgtactactgccagcagagcaacgacgaccctctgacctttggacagggcaccaaggtggaaatcaaactcgagatccagaaccctgatcctgccgtgtaccagctgcgggatagcaagagcagcgacaagagcgtgtgtctgttcaccgacttcgacagccagaccaacgtgtcccagagcaaggactccgacgtgtacatcaccgataagtgcgtgctggacatgcggagcatggacttcaagagcaactccgccgtggcctggtccaacaagtccgatttcgcctgcgccaacgccttcaacaacagcattatccccgaggacacattcttcccaagcagcgacgtgccctgcgacgtgaagctggtggaaaagagcttcgagacagacaccaacctgaacttccagaacctgagcgtgatcggcttcagaatcctgctgctgaaagtggccggctttaacctgctgatgaccctgcggctgtggtccagccgcgccaagagaagcggatctggcgtgaagcagaccctgaatttcgacctgctgaagctggctggcgacgtggaatccaacccaggccctactagtaccatggactggatttggcgcatccttttccttgtcggcgctgctaccggcgcccattccgggccccaggtgcagctggttgaatctggcggaggatctgttcaggctggcggctctctgagactgtcttgtggcgcttccggcaacatcagcagcagaaactgcatgggctggttcagacaggcccctggcaaagagagagaaggcgttgccgccatcggacaagtgaccggcagatcctactacgtggacagcgtgaagggcagattcaccatcagcctggacaacgccaagaacaccctgtacctccagatgaacacactgaagcccgaggacaccgccatgtactactgtgctgctgcccctggctgtctgctgtctgcacttagaagcgccgactacagaaactggggccagggaacccaagtgacagtgtctagtggatccggcggcggaggatctggcggaggcggatctgggggcggaggctctttcgaacaagttcagctggttcagagcggagccgaagtgaagaaacctggggcctctgtgaaggtgtcctgcaaagccagcggctacacctttaccagctactggatcaactgggtccgacaggcccctggacaaggactggaatggatgggacagatccttccaggcggaggggacaccaactacaacggcaagttcaagggcagagtgaccatcaccgccgacaccagcacaagcaccgcctacatggaactgagcagcctgagaagcgaggacaccgccgtgtattattgcaccagacgggtgcccatccggctggattattggggacagggaaccctggtcaccgtgtctagtacgcgtgaggacctgaagaacgtgttcccacctgaggtggccgtgttcgagcctagcaaggccgagatcgcccacacccagaaagccaccctcgtgtgcctggctaccggcttctaccccgaccatgtggaactgtcttggtgggtcaacggcaaagaggtgcacagcggcgtgtgtaccgacccccagccactgaaagaacagcccgccctgaacgacagccggtactgcctgagcagcagactgagagtgtccgccaccttctggcagaacccccggaaccacttcagatgccaggtgcagttctacggcctgagcgagaacgacgagtggacccaggacagagccaagcccgtgacccagatcgtgtctgccgaagcctggggcagagccgattgcggcatcaccagcgccagctaccaccagggcgtgctgagcgccaccatcctgtacgagatcctgctgggcaaggccaccctgtacgccgtgctggtgtctgccctggtgctgatggctatggtcaagcggaaggacagccggggataa

SEQ ID NO: 6006 - DNA, 2715 bp, synthetic construct
  source 1..2715: mol_type = other DNA
atggccttaccagtgaccgccttgctcctgccgctggccttgctgctccacgccgccaggccgcaggtgcagctggttgaatctggcggaggatctgttcaggctggcggctctctgagactgtcttgtggcgcttccggcaacatcagcagcagaaactgcatgggctggttcagacaggcccctggcaaagagagagaaggcgttgccgccatcggacaagtgaccggcagatcctactacgtggacagcgtgaagggcagattcaccatcagcctggacaacgccaagaacaccctgtacctccagatgaacacactgaagcccgaggacaccgccatgtactactgtgctgctgcccctggctgtctgctgtctgcacttagaagcgccgactacagaaactggggccagggaacccaagtgacagtgtctagtggtaccggcggaggcggatctggcggcggaggtagcggtggcggaggatctgaattcgacatcgtgatgacacagagccctgatagcctggccgtgtctctgggagagagagccaccattaactgcaaggccagccagagcgtggactacgacggcgacagcttcctgaactggtatcagcagaagcccggccagcctcctaagctgctgatctacgccgccagcaatctggaaagcggcgtgccaagcagattttccggctctggcagcggcaccgatttcaccctgacaatatccagcctccagcctgaggacgtggccgtgtactactgccagcagagcaacgacgaccctctgacctttggacagggcaccaaggtggaaatcaaactcgaggacctgaagaacgtgttcccacctgaggtggccgtgttcgagcctagcgaggccgagatcagccacacccagaaagccaccctcgtgtgcctggctaccggcttctaccccgaccatgtggaactgtcttggtgggtcaacggcaaagaggtgcacagcggcgtgtgtaccgacccccagccactgaaagaacagcccgccctgaacgacagccggtactgcctgagcagcagactgagagtgtccgccaccttctggcagaacccccggaaccacttcagatgccaggtgcagttctacggcctgagcgagaacgacgagtggacccaggacagagccaagcccgtgacccagatcgtgtctgccgaagcctggggcagagccgattgcggctttaccagcgagagctaccagcagggcgtgctgagcgccaccatcctgtacgagatcctgctgggcaaggccaccctgtacgccgtgctggtgtctgccctggtgctgatggctatggtcaagcggaaggacagccggggaagggccaagcgatctggatctggagcaacaaacttctcactactcaaacaagcaggtgacgtggaggagaatcccgggcctactagtgccaccatggactggatttggcgcatccttttccttgtcggcgctgctaccggcgcccattccgggcccgaagtgcaactggttgaatccggtggcggcctggtgcaagcaggcggatctctcagacttagctgtgccgcctccggcagaaccttcacaatgggatggtttaggcaggctccagggaaagagagagagttcgtcgccgccatctctctgtctcccacactggcctactacgccgactctgtgaaaggccggttcaccatctccagagataatgccaagaacaccgtggtgctgcaaatgaactctctgaaacccgaggatacagccctgtactattgtgccgctgaccggaagtccgtgatgagcatcagacccgattactggggacagggcacacaagtcacagtgtcctctggatccggcggcggaggatctggcggaggcggatctgggggcggaggctctttcgaacaagttcagctggttcagagcggagccgaagtgaagaaacctggggcctctgtgaaggtgtcctgcaaagccagcggctacacctttaccagctactggatcaactgggtccgacaggcccctggacaaggactggaatggatgggacagatccttccaggcggaggggacaccaactacaacggcaagttcaagggcagagtgaccatcaccgccgacaccagcacaagcaccgcctacatggaactgagcagcctgagaagcgaggacaccgccgtgtattattgcaccagacgggtgcccatccggctggattattggggacagggaaccctggtcaccgtgtctagtacgcgtatccagaaccctgatcctgccgtgtaccagctgcgggatagcaagagcagcgacaagagcgtgtgtctgttcaccgacttcgacagccagaccaacgtgtcccagagcaaggactccgacgtgtacatcaccgataagtgcgtgctggacatgcggagcatggacttcaagagcaactccgccgtggcctggtccaacaagtccgatttcgcctgcgccaacgccttcaacaacagcattatccccgaggacacattcttcccaagccccgagagcagctgcgacgtgaagctggtggaaaagagcttcgagacagacaccaacctgaacttccagaacctgagcgtgatcggcttcagaatcctgctgctgaaagtggccggctttaacctgctgatgaccctgcggctgtggtccagctaa

SEQ ID NO: 6007 - DNA, 2304 bp, synthetic construct
  source 1..2304: mol_type = other DNA
atggccttaccagtgaccgccttgctcctgccgctggccttgctgctccacgccgccaggccgcaggtgcagctggttgaatctggcggaggatctgttcaggctggcggctctctgagactgtcttgtggcgcttccggcaacatcagcagcagaaactgcatgggctggttcagacaggcccctggcaaagagagagaaggcgttgccgccatcggacaagtgaccggcagatcctactacgtggacagcgtgaagggcagattcaccatcagcctggacaacgccaagaacaccctgtacctccagatgaacacactgaagcccgaggacaccgccatgtactactgtgctgctgcccctggctgtctgctgtctgcacttagaagcgccgactacagaaactggggccagggaacccaagtgacagtgtctagtggtaccggcggaggcggatctggcggcggaggtagcggtggcggaggatctgaattcgacatcgtgatgacacagagccctgatagcctggccgtgtctctgggagagagagccaccattaactgcaaggccagccagagcgtggactacgacggcgacagcttcctgaactggtatcagcagaagcccggccagcctcctaagctgctgatctacgccgccagcaatctggaaagcggcgtgccaagcagattttccggctctggcagcggcaccgatttcaccctgacaatatccagcctccagcctgaggacgtggccgtgtactactgccagcagagcaacgacgaccctctgacctttggacagggcaccaaggtggaaatcaaactcgaggacctgaagaacgtgttcccacctgaggtggccgtgttcgagcctagcgaggccgagatcagccacacccagaaagccaccctcgtgtgcctggctaccggcttctaccccgaccatgtggaactgtcttggtgggtcaacggcaaagaggtgcacagcggcgtgtgtaccgacccccagccactgaaagaacagcccgccctgaacgacagccggtactgcctgagcagcagactgagagtgtccgccaccttctggcagaacccccggaaccacttcagatgccaggtgcagttctacggcctgagcgagaacgacgagtggacccaggacagagccaagcccgtgacccagatcgtgtctgccgaagcctggggcagagccgattgcggctttaccagcgagagctaccagcagggcgtgctgagcgccaccatcctgtacgagatcctgctgggcaaggccaccctgtacgccgtgctggtgtctgccctggtgctgatggctatggtcaagcggaaggacagccggggaagggccaagcgatctggatctggagcaacaaacttctcactactcaaacaagcaggtgacgtggaggagaatcccgggcctactagtgccaccatggactggatttggcgcatccttttccttgtcggcgctgctaccggcgcccattccttcgaacaagttcagctggttcagagcggagccgaagtgaagaaacctggggcctctgtgaaggtgtcctgcaaagccagcggctacacctttaccagctactggatcaactgggtccgacaggcccctggacaaggactggaatggatgggacagatccttccaggcggaggggacaccaactacaacggcaagttcaagggcagagtgaccatcaccgccgacaccagcacaagcaccgcctacatggaactgagcagcctgagaagcgaggacaccgccgtgtattattgcaccagacgggtgcccatccggctggattattggggacagggaaccctggtcaccgtgtctagtacgcgtatccagaaccctgatcctgccgtgtaccagctgcgggatagcaagagcagcgacaagagcgtgtgtctgttcaccgacttcgacagccagaccaacgtgtcccagagcaaggactccgacgtgtacatcaccgataagtgcgtgctggacatgcggagcatggacttcaagagcaactccgccgtggcctggtccaacaagtccgatttcgcctgcgccaacgccttcaacaacagcattatccccgaggacacattcttcccaagccccgagagcagctgcgacgtgaagctggtggaaaagagcttcgagacagacaccaacctgaacttccagaacctgagcgtgatcggcttcagaatcctgctgctgaaagtggccggctttaacctgctgatgaccctgcggctgtggtccagctaa

SEQ ID NO: 6008 - DNA, 2304 bp, synthetic construct
  source 1..2304: mol_type = other DNA
atggccttaccagtgaccgccttgctcctgccgctggccttgctgctccacgccgccaggccgcaagttcagctggtggaaagcggtggtggcgttgtgcaacctggtggaagtctgaggctgagctgtgccgcttctggcctgagctttagcacctacactgtggcctggttcaggcaggctcccggaaagggtcttgaaggcgtggccgccattccttacaccagccagcacatggtgtacacagacagcgtcagaggccggttcaccatcagcagagacaactccaagaatacgctctatctccagatgaactctctgcgcgccgaagatacagccgtgtattactgcgccaccgacagacggcctggcacctctatgctggctatcaacggctacaacagatggggacagggaaccaccgtgaccgtgtcatctggtaccggcggaggcggatctggcggcggaggtagcggtggcggaggatctgaattcgacatcgtgatgacacagagccctgatagcctggccgtgtctctgggagagagagccaccattaactgcaaggccagccagagcgtggactacgacggcgacagcttcctgaactggtatcagcagaagcccggccagcctcctaagctgctgatctacgccgccagcaatctggaaagcggcgtgccaagcagattttccggctctggcagcggcaccgatttcaccctgacaatatccagcctccagcctgaggacgtggccgtgtactactgccagcagagcaacgacgaccctctgacctttggacagggcaccaaggtggaaatcaaactcgaggacctgaagaacgtgttcccacctgaggtggccgtgttcgagcctagcgaggccgagatcagccacacccagaaagccaccctcgtgtgcctggctaccggcttctaccccgaccatgtggaactgtcttggtgggtcaacggcaaagaggtgcacagcggcgtgtgtaccgacccccagccactgaaagaacagcccgccctgaacgacagccggtactgcctgagcagcagactgagagtgtccgccaccttctggcagaacccccggaaccacttcagatgccaggtgcagttctacggcctgagcgagaacgacgagtggacccaggacagagccaagcccgtgacccagatcgtgtctgccgaagcctggggcagagccgattgcggctttaccagcgagagctaccagcagggcgtgctgagcgccaccatcctgtacgagatcctgctgggcaaggccaccctgtacgccgtgctggtgtctgccctggtgctgatggctatggtcaagcggaaggacagccggggaagggccaagcgatctggatctggagcaacaaacttctcactactcaaacaagcaggtgacgtggaggagaatcccgggcctactagtgccaccatggactggatttggcgcatccttttccttgtcggcgctgctaccggcgcccattccttcgaacaagttcagctggttcagagcggagccgaagtgaagaaacctggggcctctgtgaaggtgtcctgcaaagccagcggctacacctttaccagctactggatcaactgggtccgacaggcccctggacaaggactggaatggatgggacagatccttccaggcggaggggacaccaactacaacggcaagttcaagggcagagtgaccatcaccgccgacaccagcacaagcaccgcctacatggaactgagcagcctgagaagcgaggacaccgccgtgtattattgcaccagacgggtgcccatccggctggattattggggacagggaaccctggtcaccgtgtctagtacgcgtatccagaaccctgatcctgccgtgtaccagctgcgggatagcaagagcagcgacaagagcgtgtgtctgttcaccgacttcgacagccagaccaacgtgtcccagagcaaggactccgacgtgtacatcaccgataagtgcgtgctggacatgcggagcatggacttcaagagcaactccgccgtggcctggtccaacaagtccgatttcgcctgcgccaacgccttcaacaacagcattatccccgaggacacattcttcccaagccccgagagcagctgcgacgtgaagctggtggaaaagagcttcgagacagacaccaacctgaacttccagaacctgagcgtgatcggcttcagaatcctgctgctgaaagtggccggctttaacctgctgatgaccctgcggctgtggtccagctaa

SEQ ID NO: 6009 - DNA, 2301 bp, synthetic construct
  source 1..2301: mol_type = other DNA
atggccttaccagtgaccgccttgctcctgccgctggccttgctgctccacgccgccaggccggacatcgtgatgacacagagccctgatagcctggccgtgtctctgggagagagagccaccattaactgcaaggccagccagagcgtggactacgacggcgacagcttcctgaactggtatcagcagaagcccggccagcctcctaagctgctgatctacgccgccagcaatctggaaagcggcgtgccaagcagattttccggctctggcagcggcaccgatttcaccctgacaatatccagcctccagcctgaggacgtggccgtgtactactgccagcagagcaacgacgaccctctgacctttggacagggcaccaaggtggaaatcaaactcgaggacctgaagaacgtgttcccacctgaggtggccgtgttcgagcctagcgaggccgagatcagccacacccagaaagccaccctcgtgtgcctggctaccggcttctaccccgaccatgtggaactgtcttggtgggtcaacggcaaagaggtgcacagcggcgtgtgtaccgacccccagccactgaaagaacagcccgccctgaacgacagccggtactgcctgagcagcagactgagagtgtccgccaccttctggcagaacccccggaaccacttcagatgccaggtgcagttctacggcctgagcgagaacgacgagtggacccaggacagagccaagcccgtgacccagatcgtgtctgccgaagcctggggcagagccgattgcggctttaccagcgagagctaccagcagggcgtgctgagcgccaccatcctgtacgagatcctgctgggcaaggccaccctgtacgccgtgctggtgtctgccctggtgctgatggctatggtcaagcggaaggacagccggggaagggccaagcgatctggatctggagcaacaaacttctcactactcaaacaagcaggtgacgtggaggagaatcccgggcctactagtaccatggactggatttggcgcatccttttccttgtcggcgctgctaccggcgcccattccgggccccaagttcagctggtggaaagcggtggtggcgttgtgcaacctggtggaagtctgaggctgagctgtgccgcttctggcctgagctttagcacctacactgtggcctggttcaggcaggctcccggaaagggtcttgaaggcgtggccgccattccttacaccagccagcacatggtgtacacagacagcgtcagaggccggttcaccatcagcagagacaactccaagaatacgctctatctccagatgaactctctgcgcgccgaagatacagccgtgtattactgcgccaccgacagacggcctggcacctctatgctggctatcaacggctacaacagatggggacagggaaccaccgtgaccgtgtcatctggatccggcggcggaggatctggcggaggcggatctgggggcggaggctctttcgaacaagttcagctggttcagagcggagccgaagtgaagaaacctggggcctctgtgaaggtgtcctgcaaagccagcggctacacctttaccagctactggatcaactgggtccgacaggcccctggacaaggactggaatggatgggacagatccttccaggcggaggggacaccaactacaacggcaagttcaagggcagagtgaccatcaccgccgacaccagcacaagcaccgcctacatggaactgagcagcctgagaagcgaggacaccgccgtgtattattgcaccagacgggtgcccatccggctggattattggggacagggaaccctggtcaccgtgtctagtacgcgtatccagaaccctgatcctgccgtgtaccagctgcgggatagcaagagcagcgacaagagcgtgtgtctgttcaccgacttcgacagccagaccaacgtgtcccagagcaaggactccgacgtgtacatcaccgataagtgcgtgctggacatgcggagcatggacttcaagagcaactccgccgtggcctggtccaacaagtccgatttcgcctgcgccaacgccttcaacaacagcattatccccgaggacacattcttcccaagccccgagagcagctgcgacgtgaagctggtggaaaagagcttcgagacagacaccaacctgaacttccagaacctgagcgtgatcggcttcagaatcctgctgctgaaagtggccggctttaacctgctgatgaccctgcggctgtggtccagctaa

SEQ ID NO: 6010 - DNA, 2307 bp, synthetic construct
  source 1..2307: mol_type = other DNA
atggccttaccagtgaccgccttgctcctgccgctggccttgctgctccacgccgccaggccggacatcgtgatgacacagagccctgatagcctggccgtgtctctgggagagagagccaccattaactgcaaggccagccagagcgtggactacgacggcgacagcttcctgaactggtatcagcagaagcccggccagcctcctaagctgctgatctacgccgccagcaatctggaaagcggcgtgccaagcagattttccggctctggcagcggcaccgatttcaccctgacaatatccagcctccagcctgaggacgtggccgtgtactactgccagcagagcaacgacgaccctctgacctttggacagggcaccaaggtggaaatcaaactcgaggacctgaagaacgtgttcccacctgaggtggccgtgttcgagcctagcgaggccgagatcagccacacccagaaagccaccctcgtgtgcctggctaccggcttctaccccgaccatgtggaactgtcttggtgggtcaacggcaaagaggtgcacagcggcgtgtgtaccgacccccagccactgaaagaacagcccgccctgaacgacagccggtactgcctgagcagcagactgagagtgtccgccaccttctggcagaacccccggaaccacttcagatgccaggtgcagttctacggcctgagcgagaacgacgagtggacccaggacagagccaagcccgtgacccagatcgtgtctgccgaagcctggggcagagccgattgcggctttaccagcgagagctaccagcagggcgtgctgagcgccaccatcctgtacgagatcctgctgggcaaggccaccctgtacgccgtgctggtgtctgccctggtgctgatggctatggtcaagcggaaggacagccggggaagggccaagcgatctggatctggagcaacaaacttctcactactcaaacaagcaggtgacgtggaggagaatcccgggcctactagtaccatggactggatttggcgcatccttttccttgtcggcgctgctaccggcgcccattccgggcccgaggtgcagctggttgaatctggcggaggatctgttcaggctggcggctctctgagactgtcttgtgccgccagcggctacacctacagcatcaactgcatgggctggttcagacaggcccctggcaaagagagagaaggcgttgccgccatctctaccggcggaggcagaaccgattaccgggattctgtgaagggcagattcaccatcagccaggacaacgccaagaacaccgtgtacctccagatgaacagcctgaagcctgaggacaccgccatgtactactgtgccggcaagaccacctatcctggctacggatgtggcctgggcagaagcgcctacaattattggggccagggcacccaagtgaccgtgtcatctggatccggcggcggaggatctggcggaggcggatctgggggcggaggctctttcgaacaagttcagctggttcagagcggagccgaagtgaagaaacctggggcctctgtgaaggtgtcctgcaaagccagcggctacacctttaccagctactggatcaactgggtccgacaggcccctggacaaggactggaatggatgggacagatccttccaggcggaggggacaccaactacaacggcaagttcaagggcagagtgaccatcaccgccgacaccagcacaagcaccgcctacatggaactgagcagcctgagaagcgaggacaccgccgtgtattattgcaccagacgggtgcccatccggctggattattggggacagggaaccctggtcaccgtgtctagtacgcgtatccagaaccctgatcctgccgtgtaccagctgcgggatagcaagagcagcgacaagagcgtgtgtctgttcaccgacttcgacagccagaccaacgtgtcccagagcaaggactccgacgtgtacatcaccgataagtgcgtgctggacatgcggagcatggacttcaagagcaactccgccgtggcctggtccaacaagtccgatttcgcctgcgccaacgccttcaacaacagcattatccccgaggacacattcttcccaagccccgagagcagctgcgacgtgaagctggtggaaaagagcttcgagacagacaccaacctgaacttccagaacctgagcgtgatcggcttcagaatcctgctgctgaaagtggccggctttaacctgctgatgaccctgcggctgtggtccagctaa

SEQ ID NO: 6011 - DNA, 1863 bp, synthetic construct
  source 1..1863: mol_type = other DNA
atggccttaccagtgaccgccttgctcctgccgctggccttgctgctccacgccgccaggccggacatcgtgatgacacagagccctgatagcctggccgtgtctctgggagagagagccaccattaactgcaaggccagccagagcgtggactacgacggcgacagcttcctgaactggtatcagcagaagcccggccagcctcctaagctgctgatctacgccgccagcaatctggaaagcggcgtgccaagcagattttccggctctggcagcggcaccgatttcaccctgacaatatccagcctccagcctgaggacgtggccgtgtactactgccagcagagcaacgacgaccctctgacctttggacagggcaccaaggtggaaatcaaactcgaggacctgaagcacgtgttcccacctgaggtggccgtgttcgagcctagcgacgccgagatctggcacacccagaaagccaccctcgtgtgcctggctaccggcttctaccccgaccatgtggaactgtcttggtgggtcaacggcaaagaggtgcacagcggcgtgtctaccgacccccagccactgaaagaacagcccgccctgaacgacagccggtactgcctgagcagcagactgagagtgtccgccaccttctggcagaacccccggaaccacttcagatgccaggtgcagttctacggcctgagcgagaacgacgagtggacccaggacagagccaagcccgtgacccagatcgtgtctgccgaagcctggggcagagccgattgcggctttaccagcgagagctaccagcagggcgtgctgagcgccaccatcctgtacgagatcctgctgggcaaggccaccctgtacgccgtgctggtgtctgccctggtgctgatggctatggtcaagcggaaggacagccggggaagggccaagcgatctggatctggagcaacaaacttctcactactcaaacaagcaggtgacgtggaggagaatcccgggcctactagtatggactggatttggcgcatccttttccttgtcggcgctgctaccggcgcgcattccttcgaacaagttcagctggttcagagcggagccgaagtgaagaaacctggggcctctgtgaaggtgtcctgcaaagccagcggctacacctttaccagctactggatcaactgggtccgacaggcccctggacaaggactggaatggatgggacagatccttccaggcggaggggacaccaactacaacggcaagttcaagggcagagtgaccatcaccgccgacaccagcacaagcaccgcctacatggaactgagcagcctgagaagcgaggacaccgccgtgtattattgcaccagacgggtgcccatccggctggattattggggacagggaaccctggtcaccgtgtctagtacgcgtatccagaaccctgatcctgccgtgtaccagctgcgggatagcaagagcagcgacaagagcgtgtgtctgttcaccgacttcgacagccagaccaacgtgtcccagagcaaggactccgacgtgtacatcaccgataagaccgtgctggacatgcggagcatggacttcaagagcaactccgccgtggcctggtccagcaagtccgatttcgcctgcgccaacgccttcaacaacagcattatccccgaggacacattcttcccaagccccgagatggcctgcgacgtgaagctggtggaaaagagcttcgagacagacaccaacctgaacttccagaacctgctcgtgatctggctgagaatcctgctgctgaaagtggccggctttaacctgctgatgaccctgcggctgtggtccagc

SEQ ID NO: 6012 - DNA, 1863 bp, synthetic construct
  source 1..1863: mol_type = other DNA
atggccttaccagtgaccgccttgctcctgccgctggccttgctgctccacgccgccaggccggacatcgtgatgacacagagccctgatagcctggccgtgtctctgggagagagagccaccattaactgcaaggccagccagagcgtggactacgacggcgacagcttcctgaactggtatcagcagaagcccggccagcctcctaagctgctgatctacgccgccagcaatctggaaagcggcgtgccaagcagattttccggctctggcagcggcaccgatttcaccctgacaatatccagcctccagcctgaggacgtggccgtgtactactgccagcagagcaacgacgaccctctgacctttggacagggcaccaaggtggaaatcaaactcgaggacctgaagcacgtgttcccacctgaggtggccgtgttcgagcctagcgacgccgagatctggcacacccagaaagccaccctcgtgtgcctggctaccggcttctaccccgaccatgtggaactgtcttggtgggtcaacggcaaagaggtgcacagcggcgtgtctaccgacccccagccactgaaagaacagcccgccctgaacgacagccggtactgcctgagcagcagactgagagtgtccgccaccttctggcagaacccccggaaccacttcagatgccaggtgcagttctacggcctgagcgagaacgacgagtggacccaggacagagccaagcccgtgacccagatcgtgtctgccgaagcctggggcagagccgattgcggctttaccagcgagagctaccagcagggcgtgctgagcgccaccatcctgtacgagatcctgctgggcaaggccaccctgtacgccgtgctggtgtctgccctggtgctgatggctatggtcaagcggaaggacagccggggaagggccaagcgatctggatctggagcaacaaacttctcactactcaaacaagcaggtgacgtggaggagaatcccgggcctactagtatggactggatttggcgcatccttttccttgtcggcgctgctaccggcgcgcattccttcgaacaagttcagctggttcagagcggagccgaagtgaagaaacctggggcctctgtgaaggtgtcctgcaaagccagcggctacacctttaccagctactggatcaactgggtccgacaggcccctggacaaggactggaatggatgggacagatccttccaggcggaggggacaccaactacaacggcaagttcaagggcagagtgaccatcaccgccgacaccagcacaagcaccgcctacatggaactgagcagcctgagaagcgaggacaccgccgtgtattattgcaccagacgggtgcccatccggctggattattggggacagggaaccctggtcaccgtgtctagtacgcgtatccagaaccctgatcctgccgtgtaccagctgcgggatagcaagagcagcgacaagagcgtgtgtctgttcaccgacttcgacagccagaccaacgtgtcccagagcaaggactccgacgtgtacatcaccgataagaccgtgctggacatgcggagcatggacttcaagagcaactccgccgtggcctggtccaccaagtccgatttcgcctgcgccaacgccttcaacaacagcattatccccgaggacacattcttcccaagccccgaggtggtgtgcgacgtgaagctggtggaaaagagcttcgagacagacaccaacctgaacttccagaacctggtggtgatcggcgccagaatcctgctgctgaaagtggccggctttaacctgctgatgaccctgcggctgtggtccagc

SEQ ID NO: 6013 - DNA, 1863 bp, synthetic construct
  source 1..1863: mol_type = other DNA
atggccttaccagtgaccgccttgctcctgccgctggccttgctgctccacgccgccaggccggacatcgtgatgacacagagccctgatagcctggccgtgtctctgggagagagagccaccattaactgcaaggccagccagagcgtggactacgacggcgacagcttcctgaactggtatcagcagaagcccggccagcctcctaagctgctgatctacgccgccagcaatctggaaagcggcgtgccaagcagattttccggctctggcagcggcaccgatttcaccctgacaatatccagcctccagcctgaggacgtggccgtgtactactgccagcagagcaacgacgaccctctgacctttggacagggcaccaaggtggaaatcaaactcgaggacctgaagaacgtgttcccacctgaggtggccgtgttcgagcctagcaaggccgagatcagcagaacccagaaagccaccctcgtgtgcctggctaccggcttctaccctcctcatgtggaactgtcttggtgggtcaacggcaaagaggtgcacgacggcgtgtgtaccgacccccagccactgaaagaacagcccgccctgaacgacagccggtactgcctgagcagcagactgagagtgtccgccaccttctggcagaacccccggaaccacttcagatgccaggtgcagttctacggcctgagcgagaacgacgagtggacccaggacagagccaagcccgtgacccagatcgtgtctgccgaagcctggggcagagccgattgcggctttaccagcgagagctaccagcagggcgtgctgagcgccaccatcctgtacgagatcctgctgggcaaggccaccctgtacgccgtgctggtgtctgccctggtgctgatggctatggtcaagcggaaggacagccggggaagggccaagcgatctggatctggagcaacaaacttctcactactcaaacaagcaggtgacgtggaggagaatcccgggcctactagtatggactggatttggcgcatccttttccttgtcggcgctgctaccggcgcgcattccttcgaacaagttcagctggttcagagcggagccgaagtgaagaaacctggggcctctgtgaaggtgtcctgcaaagccagcggctacacctttaccagctactggatcaactgggtccgacaggcccctggacaaggactggaatggatgggacagatccttccaggcggaggggacaccaactacaacggcaagttcaagggcagagtgaccatcaccgccgacaccagcacaagcaccgcctacatggaactgagcagcctgagaagcgaggacaccgccgtgtattattgcaccagacgggtgcccatccggctggattattggggacagggaaccctggtcaccgtgtctagtacgcgtatccagaaccctgatcctgccgtgtaccagctgcgggatagcaagagcagcgacaagttcgtgtgtctgttcaccgacttcgacagccagatcaacgtgtcccagagcaaggactccgacgtgtacatcaccgataagtgcgtgctggacatgcggagcatggacttcaagagcaactccgccgtggcctggtccaacaagtccgatttcacctgcgccaacgccttcaacaacagcattatccccgaggacacattcttcccaagccccgagagcagctgcgacgtgaagctggtggaaaagagcttcgagacagacaccaacctgaacttccagaacctgagcgtgatcggcttcagaatcctgctgctgaaagtggccggctttaacctgctgatgaccctgcggctgtggtccagc

SEQ ID NO: 6014 - DNA, 2289 bp, synthetic construct
  source 1..2289: mol_type = other DNA
atggccttaccagtgaccgccttgctcctgccgctggccttgctgctccacgccgccaggccggacatcgtgatgacacagagccctgatagcctggccgtgtctctgggagagagagccaccattaactgcaaggccagccagagcgtggactacgacggcgacagcttcctgaactggtatcagcagaagcccggccagcctcctaagctgctgatctacgccgccagcaatctggaaagcggcgtgccaagcagattttccggctctggcagcggcaccgatttcaccctgacaatatccagcctccagcctgaggacgtggccgtgtactactgccagcagagcaacgacgaccctctgacctttggacagggcaccaaggtggaaatcaaactcgaggacctgaagaacgtgttcccacctgaggtggccgtgttcgagcctagcgaggccgagatcagccacacccagaaagccaccctcgtgtgcctggctaccggcttctaccccgaccatgtggaactgtcttggtgggtcaacggcaaagaggtgcacagcggcgtgtgtaccgacccccagccactgaaagaacagcccgccctgaacgacagccggtactgcctgagcagcagactgagagtgtccgccaccttctggcagaacccccggaaccacttcagatgccaggtgcagttctacggcctgagcgagaacgacgagtggacccaggacagagccaagcccgtgacccagatcgtgtctgccgaagcctggggcagagccgattgcggctttaccagcgagagctaccagcagggcgtgctgagcgccaccatcctgtacgagatcctgctgggcaaggccaccctgtacgccgtgctggtgtctgccctggtgctgatggctatggtcaagcggaaggacagccggggaagggccaagcgatctggatctggagcaacaaacttctcactactcaaacaagcaggtgacgtggaggagaatcccgggcctactagtaccatggactggatttggcgcatccttttccttgtcggcgctgctaccggcgcccattccgggccccaggtgcagctccaagaaagcggacccggactggttaagccctctcagaccctgtctctgacctgcacagttagcggagccagcattaccacaggcgagtattattggaattggtttcggcagccaccaggcaaggggcttgagtggatgggtgctattgctgcctctggcagcaccacctactctcccagctttgagagcagaacctccatcagccgggacacctccaaaaaccagttctctctgaagctgtcctccgtgaccgctgctgacaccgccgtctattattgtggccggtctttcggcgtggcagctgtgaccacaggacagaacagaggccagggaacacttgtgaccgtgtcctctggatccggcggcggaggatctggcggaggcggatctgggggcggaggctctttcgaacaagttcagctggttcagagcggagccgaagtgaagaaacctggggcctctgtgaaggtgtcctgcaaagccagcggctacacctttaccagctactggatcaactgggtccgacaggcccctggacaaggactggaatggatgggacagatccttccaggcggaggggacaccaactacaacggcaagttcaagggcagagtgaccatcaccgccgacaccagcacaagcaccgcctacatggaactgagcagcctgagaagcgaggacaccgccgtgtattattgcaccagacgggtgcccatccggctggattattggggacagggaaccctggtcaccgtgtctagtacgcgtatccagaaccctgatcctgccgtgtaccagctgcgggatagcaagagcagcgacaagagcgtgtgtctgttcaccgacttcgacagccagaccaacgtgtcccagagcaaggactccgacgtgtacatcaccgataagtgcgtgctggacatgcggagcatggacttcaagagcaactccgccgtggcctggtccaacaagtccgatttcgcctgcgccaacgccttcaacaacagcattatccccgaggacacattcttcccaagccccgagagcagctgcgacgtgaagctggtggaaaagagcttcgagacagacaccaacctgaacttccagaacctgagcgtgatcggcttcagaatcctgctgctgaaagtggccggctttaacctgctgatgaccctgcggctgtggtccagc

SEQ ID NO: 6015 - DNA, 2712 bp, synthetic construct
  source 1..2712: mol_type = other DNA
atggccttaccagtgaccgccttgctcctgccgctggccttgctgctccacgccgccaggccgcaggttcagctgcaagagtctggccctggcctggtcaagcctagccaaacactgagcctgacctgtaccgtgtctggcggctctatcaccaccggcgagttctactggaactggttcagacagcctcctggcaaaggactggaatggatgggagccattgccgccagcggcagcacaacatacagccctagcttcgagagccggaccagcatcagcagagacaccagcaagaatcagttcagcctgaagctgagcagcgtgacagccgccgatacagccgtgtattactgcggcagatcctttggagtggccgccgtgacaaccggccagaatagaggacagggcaccctggtcacagtgtctagcggtaccggcggaggcggatctggcggcggaggtagcggtggcggaggatctgaattcgacatcgtgatgacacagagccctgatagcctggccgtgtctctgggagagagagccaccattaactgcaaggccagccagagcgtggactacgacggcgacagcttcctgaactggtatcagcagaagcccggccagcctcctaagctgctgatctacgccgccagcaatctggaaagcggcgtgccaagcagattttccggctctggcagcggcaccgatttcaccctgacaatatccagcctccagcctgaggacgtggccgtgtactactgccagcagagcaacgacgaccctctgacctttggacagggcaccaaggtggaaatcaaactcgagatccagaaccctgatcctgccgtgtaccagctgcgggatagcaagagcagcgacaagagcgtgtgtctgttcaccgacttcgacagccagaccaacgtgtcccagagcaaggactccgacgtgtacatcaccgataagtgcgtgctggacatgcggagcatggacttcaagagcaactccgccgtggcctggtccaacaagtccgatttcgcctgcgccaacgccttcaacaacagcattatccccgaggacacattcttcccaagcagcgacgtgccctgcgacgtgaagctggtggaaaagagcttcgagacagacaccaacctgaacttccagaacctgagcgtgatcggcttcagaatcctgctgctgaaagtggccggctttaacctgctgatgaccctgcggctgtggtccagccgcgccaagagaagcggatctggcgtgaagcagaccctgaatttcgacctgctgaagctggctggcgacgtggaatccaacccaggccctactagtaccatggactggatttggcgcatccttttccttgtcggcgctgctaccggcgcccattccgggcccgaagtgcaactggttgaatccggtggcggcctggtgcaacccggcggatctctcagacttagctgtgccgcctccggcagaaccttcacaatgggatggtacaggcaggctccagggaaagagagagagttcgtcgccgccatctctctgtctcccacactggcctactacgccgactctgtgaaaggccggttcaccatctccagagataatagcaagaacaccgtggtgctgcaaatgaactctctgagagccgaggatacagccctgtactattgtgccgctgaccggaagtccgtgatgagcatcagacccgattactggggacagggcacactggtcacagtgtctagtggatccggcggcggaggatctggcggaggcggatctgggggcggaggctctttcgaacaagttcagctggttcagagcggagccgaagtgaagaaacctggggcctctgtgaaggtgtcctgcaaagccagcggctacacctttaccagctactggatcaactgggtccgacaggcccctggacaaggactggaatggatgggacagatccttccaggcggaggggacaccaactacaacggcaagttcaagggcagagtgaccatcaccgccgacaccagcacaagcaccgcctacatggaactgagcagcctgagaagcgaggacaccgccgtgtattattgcaccagacgggtgcccatccggctggattattggggacagggaaccctggtcaccgtgtctagtacgcgtgaggacctgaagaacgtgttcccacctgaggtggccgtgttcgagcctagcaaggccgagatcgcccacacccagaaagccaccctcgtgtgcctggctaccggcttctaccccgaccatgtggaactgtcttggtgggtcaacggcaaagaggtgcacagcggcgtgtgtaccgacccccagccactgaaagaacagcccgccctgaacgacagccggtactgcctgagcagcagactgagagtgtccgccaccttctggcagaacccccggaaccacttcagatgccaggtgcagttctacggcctgagcgagaacgacgagtggacccaggacagagccaagcccgtgacccagatcgtgtctgccgaagcctggggcagagccgattgcggcatcaccagcgccagctaccaccagggcgtgctgagcgccaccatcctgtacgagatcctgctgggcaaggccaccctgtacgccgtgctggtgtctgccctggtgctgatggctatggtcaagcggaaggacagccgggga

SEQ ID NO: 6016 - DNA, 2301 bp, synthetic construct
  source 1..2301: mol_type = other DNA
atggccttaccagtgaccgccttgctcctgccgctggccttgctgctccacgccgccaggccgcaggttcagctgcaagagtctggccctggcctggtcaagcctagccaaacactgagcctgacctgtaccgtgtctggcggctctatcaccaccggcgagttctactggaactggttcagacagcctcctggcaaaggactggaatggatgggagccattgccgccagcggcagcacaacatacagccctagcttcgagagccggaccagcatcagcagagacaccagcaagaatcagttcagcctgaagctgagcagcgtgacagccgccgatacagccgtgtattactgcggcagatcctttggagtggccgccgtgacaaccggccagaatagaggacagggcaccctggtcacagtgtctagcggtaccggcggaggcggatctggcggcggaggtagcggtggcggaggatctgaattcgacatcgtgatgacacagagccctgatagcctggccgtgtctctgggagagagagccaccattaactgcaaggccagccagagcgtggactacgacggcgacagcttcctgaactggtatcagcagaagcccggccagcctcctaagctgctgatctacgccgccagcaatctggaaagcggcgtgccaagcagattttccggctctggcagcggcaccgatttcaccctgacaatatccagcctccagcctgaggacgtggccgtgtactactgccagcagagcaacgacgaccctctgacctttggacagggcaccaaggtggaaatcaaactcgagatccagaaccctgatcctgccgtgtaccagctgcgggatagcaagagcagcgacaagagcgtgtgtctgttcaccgacttcgacagccagaccaacgtgtcccagagcaaggactccgacgtgtacatcaccgataagtgcgtgctggacatgcggagcatggacttcaagagcaactccgccgtggcctggtccaacaagtccgatttcgcctgcgccaacgccttcaacaacagcattatccccgaggacacattcttcccaagcagcgacgtgccctgcgacgtgaagctggtggaaaagagcttcgagacagacaccaacctgaacttccagaacctgagcgtgatcggcttcagaatcctgctgctgaaagtggccggctttaacctgctgatgaccctgcggctgtggtccagccgcgccaagagaagcggatctggcgtgaagcagaccctgaatttcgacctgctgaagctggctggcgacgtggaatccaacccaggccctactagtaccatggactggatttggcgcatccttttccttgtcggcgctgctaccggcgcccattccttcgaacaagttcagctggttcagagcggagccgaagtgaagaaacctggggcctctgtgaaggtgtcctgcaaagccagcggctacacctttaccagctactggatcaactgggtccgacaggcccctggacaaggactggaatggatgggacagatccttccaggcggaggggacaccaactacaacggcaagttcaagggcagagtgaccatcaccgccgacaccagcacaagcaccgcctacatggaactgagcagcctgagaagcgaggacaccgccgtgtattattgcaccagacgggtgcccatccggctggattattggggacagggaaccctggtcaccgtgtctagtacgcgtgaggacctgaagaacgtgttcccacctgaggtggccgtgttcgagcctagcaaggccgagatcgcccacacccagaaagccaccctcgtgtgcctggctaccggcttctaccccgaccatgtggaactgtcttggtgggtcaacggcaaagaggtgcacagcggcgtgtgtaccgacccccagccactgaaagaacagcccgccctgaacgacagccggtactgcctgagcagcagactgagagtgtccgccaccttctggcagaacccccggaaccacttcagatgccaggtgcagttctacggcctgagcgagaacgacgagtggacccaggacagagccaagcccgtgacccagatcgtgtctgccgaagcctggggcagagccgattgcggcatcaccagcgccagctaccaccagggcgtgctgagcgccaccatcctgtacgagatcctgctgggcaaggccaccctgtacgccgtgctggtgtctgccctggtgctgatggctatggtcaagcggaaggacagccgggga

SEQ ID NO: 6017 - DNA, 2700 bp, synthetic construct
  source 1..2700: mol_type = other DNA
atggccttaccagtgaccgccttgctcctgccgctggccttgctgctccacgccgccaggccggaagtgcagctggttgaatctggcggaggactggttcaggctggcggatctctgagactgtcttgtgccgccagcggcagaacctttagcatgggctggtttagacaggcccctggcaaagagagagagttcgtcgccgccatcacatactctggcggcagcccttactacgccgactctgtgaagggcagattcaccatcagccgggacaacgccaagaacaccgtgtacctccagatgaacagcctgaagcctgaggacaccgccgtgtactactgcgccgccaatccaacatacggcagcgactggaacgccgagaattggggccagggaacccaagtgacagtgtctagcggtaccggcggaggcggatctggcggcggaggtagcggtggcggaggatctgaattcgacatcgtgatgacacagagccctgatagcctggccgtgtctctgggagagagagccaccattaactgcaaggccagccagagcgtggactacgacggcgacagcttcctgaactggtatcagcagaagcccggccagcctcctaagctgctgatctacgccgccagcaatctggaaagcggcgtgccaagcagattttccggctctggcagcggcaccgatttcaccctgacaatatccagcctccagcctgaggacgtggccgtgtactactgccagcagagcaacgacgaccctctgacctttggacagggcaccaaggtggaaatcaaactcgaggacctgaagaacgtgttcccacctgaggtggccgtgttcgagcctagcgaggccgagatcagccacacccagaaagccaccctcgtgtgcctggctaccggcttctaccccgaccatgtggaactgtcttggtgggtcaacggcaaagaggtgcacagcggcgtgtgtaccgacccccagccactgaaagaacagcccgccctgaacgacagccggtactgcctgagcagcagactgagagtgtccgccaccttctggcagaacccccggaaccacttcagatgccaggtgcagttctacggcctgagcgagaacgacgagtggacccaggacagagccaagcccgtgacccagatcgtgtctgccgaagcctggggcagagccgattgcggctttaccagcgagagctaccagcagggcgtgctgagcgccaccatcctgtacgagatcctgctgggcaaggccaccctgtacgccgtgctggtgtctgccctggtgctgatggctatggtcaagcggaaggacagccggggaagggccaagcgatctggatctggagcaacaaacttctcactactcaaacaagcaggtgacgtggaggagaatcccgggcctactagtaccatggactggatttggcgcatccttttccttgtcggcgctgctaccggcgcccattccgggccccaggtgcagctccaagaaagcggacccggactggttaagccctctcagaccctgtctctgacctgcacagttagcggagccagcattaccacaggcgagtattattggaattggtttcggcagccaccaggcaaggggcttgagtggatgggtgctattgctgcctctggcagcaccacctactctcccagctttgagagcagaacctccatcagccgggacacctccaaaaaccagttctctctgaagctgtcctccgtgaccgctgctgacaccgccgtctattattgtggccggtctttcggcgtggcagctgtgaccacaggacagaacagaggccagggaacacttgtgaccgtgtcctctggatccggcggcggaggatctggcggaggcggatctgggggcggaggctctttcgaacaagttcagctggttcagagcggagccgaagtgaagaaacctggggcctctgtgaaggtgtcctgcaaagccagcggctacacctttaccagctactggatcaactgggtccgacaggcccctggacaaggactggaatggatgggacagatccttccaggcggaggggacaccaactacaacggcaagttcaagggcagagtgaccatcaccgccgacaccagcacaagcaccgcctacatggaactgagcagcctgagaagcgaggacaccgccgtgtattattgcaccagacgggtgcccatccggctggattattggggacagggaaccctggtcaccgtgtctagtacgcgtatccagaaccctgatcctgccgtgtaccagctgcgggatagcaagagcagcgacaagagcgtgtgtctgttcaccgacttcgacagccagaccaacgtgtcccagagcaaggactccgacgtgtacatcaccgataagtgcgtgctggacatgcggagcatggacttcaagagcaactccgccgtggcctggtccaacaagtccgatttcgcctgcgccaacgccttcaacaacagcattatccccgaggacacattcttcccaagccccgagagcagctgcgacgtgaagctggtggaaaagagcttcgagacagacaccaacctgaacttccagaacctgagcgtgatcggcttcagaatcctgctgctgaaagtggccggctttaacctgctgatgaccctgcggctgtggtccagc

SEQ ID NO: 6018 - DNA, 2721 bp, synthetic construct
  source 1..2721: mol_type = other DNA
atggccttaccagtgaccgccttgctcctgccgctggccttgctgctccacgccgccaggccggaagtgcagctggttgaatctggcggaggactggttcaggctggcggatctctgagactgtcttgtgccgccagcggcagaacctttagcatgggctggtttagacaggcccctggcaaagagagagagttcgtcgccgccatcacatactctggcggcagcccttactacgccgactctgtgaagggcagattcaccatcagccgggacaacgccaagaacaccgtgtacctccagatgaacagcctgaagcctgaggacaccgccgtgtactactgcgccgccaatccaacatacggcagcgactggaacgccgagaattggggccagggaacccaagtgacagtgtctagcggtaccggcggaggcggatctggcggcggaggtagcggtggcggaggatctgaattcgacatcgtgatgacacagagccctgatagcctggccgtgtctctgggagagagagccaccattaactgcaaggccagccagagcgtggactacgacggcgacagcttcctgaactggtatcagcagaagcccggccagcctcctaagctgctgatctacgccgccagcaatctggaaagcggcgtgccaagcagattttccggctctggcagcggcaccgatttcaccctgacaatatccagcctccagcctgaggacgtggccgtgtactactgccagcagagcaacgacgaccctctgacctttggacagggcaccaaggtggaaatcaaactcgagatccagaaccctgatcctgccgtgtaccagctgcgggatagcaagagcagcgacaagagcgtgtgtctgttcaccgacttcgacagccagaccaacgtgtcccagagcaaggactccgacgtgtacatcaccgataagtgcgtgctggacatgcggagcatggacttcaagagcaactccgccgtggcctggtccaacaagtccgatttcgcctgcgccaacgccttcaacaacagcattatccccgaggacacattcttcccaagcagcgacgtgccctgcgacgtgaagctggtggaaaagagcttcgagacagacaccaacctgaacttccagaacctgagcgtgatcggcttcagaatcctgctgctgaaagtggccggctttaacctgctgatgaccctgcggctgtggtccagccgcgccaagagaagcggatctggcgtgaagcagaccctgaatttcgacctgctgaagctggctggcgacgtggaatccaacccaggccctactagtaccatggactggatttggcgcatccttttccttgtcggcgctgctaccggcgcccattccgggccccaggtgcagctggttgaatctggcggaggactggttcagcctggcggatctctgagactgtcttgtgccgccagcggcaacatcaacagcagaaactgcatgggctggttcagacaggcccctggcaagggaagagaaggcgtggcagctatcggccaagtgaccggcagaacctactacgtggacagcgtgaagggcagattcaccatcagcctggacaacagcaagaacaccctgtacctccagatgaacagcctgagagccgaggacaccgccgtgtactattgtgctgctgcccctggctgtctgctgtctgcacttagaagcgccgactacagaaactggggccagggcacactggtcaccgtttcttctggatccggcggcggaggatctggcggaggcggatctgggggcggaggctctttcgaacaagttcagctggttcagagcggagccgaagtgaagaaacctggggcctctgtgaaggtgtcctgcaaagccagcggctacacctttaccagctactggatcaactgggtccgacaggcccctggacaaggactggaatggatgggacagatccttccaggcggaggggacaccaactacaacggcaagttcaagggcagagtgaccatcaccgccgacaccagcacaagcaccgcctacatggaactgagcagcctgagaagcgaggacaccgccgtgtattattgcaccagacgggtgcccatccggctggattattggggacagggaaccctggtcaccgtgtctagtacgcgtgaggacctgaagaacgtgttcccacctgaggtggccgtgttcgagcctagcaaggccgagatcgcccacacccagaaagccaccctcgtgtgcctggctaccggcttctaccccgaccatgtggaactgtcttggtgggtcaacggcaaagaggtgcacagcggcgtgtgtaccgacccccagccactgaaagaacagcccgccctgaacgacagccggtactgcctgagcagcagactgagagtgtccgccaccttctggcagaacccccggaaccacttcagatgccaggtgcagttctacggcctgagcgagaacgacgagtggacccaggacagagccaagcccgtgacccagatcgtgtctgccgaagcctggggcagagccgattgcggcatcaccagcgccagctaccaccagggcgtgctgagcgccaccatcctgtacgagatcctgctgggcaaggccaccctgtacgccgtgctggtgtctgccctggtgctgatggctatggtcaagcggaaggacagccgggga

SEQ ID NO: 6019 - DNA, 2709 bp, synthetic construct
  source 1..2709: mol_type = other DNA
atggccttaccagtgaccgccttgctcctgccgctggccttgctgctccacgccgccaggccggaagtgcagctggttgaatctggcggaggactggttcaggctggcggatctctgagactgtcttgtgccgccagcggcagaacctttagcatgggctggtttagacaggcccctggcaaagagagagagttcgtcgccgccatcacatactctggcggcagcccttactacgccgactctgtgaagggcagattcaccatcagccgggacaacgccaagaacaccgtgtacctccagatgaacagcctgaagcctgaggacaccgccgtgtactactgcgccgccaatccaacatacggcagcgactggaacgccgagaattggggccagggaacccaagtgacagtgtctagcggtaccggcggaggcggatctggcggcggaggtagcggtggcggaggatctgaattcgacatcgtgatgacacagagccctgatagcctggccgtgtctctgggagagagagccaccattaactgcaaggccagccagagcgtggactacgacggcgacagcttcctgaactggtatcagcagaagcccggccagcctcctaagctgctgatctacgccgccagcaatctggaaagcggcgtgccaagcagattttccggctctggcagcggcaccgatttcaccctgacaatatccagcctccagcctgaggacgtggccgtgtactactgccagcagagcaacgacgaccctctgacctttggacagggcaccaaggtggaaatcaaactcgaggacctgaagaacgtgttcccacctgaggtggccgtgttcgagcctagcgaggccgagatcagccacacccagaaagccaccctcgtgtgcctggctaccggcttctaccccgaccatgtggaactgtcttggtgggtcaacggcaaagaggtgcacagcggcgtgtgtaccgacccccagccactgaaagaacagcccgccctgaacgacagccggtactgcctgagcagcagactgagagtgtccgccaccttctggcagaacccccggaaccacttcagatgccaggtgcagttctacggcctgagcgagaacgacgagtggacccaggacagagccaagcccgtgacccagatcgtgtctgccgaagcctggggcagagccgattgcggctttaccagcgagagctaccagcagggcgtgctgagcgccaccatcctgtacgagatcctgctgggcaaggccaccctgtacgccgtgctggtgtctgccctggtgctgatggctatggtcaagcggaaggacagccggggaagggccaagcgatctggatctggagcaacaaacttctcactactcaaacaagcaggtgacgtggaggagaatcccgggcctactagtaccatggactggatttggcgcatccttttccttgtcggcgctgctaccggcgcccattccgggccccaggtgcagctggttgaatctggcggaggactggttcagcctggcggatctctgagactgtcttgtgccgccagcggcaacatcaacagcagaaactgcatgggctggttcagacaggcccctggcaagggaagagaaggcgtggcagctatcggccaagtgaccggcagaacctactacgtggacagcgtgaagggcagattcaccatcagcctggacaacagcaagaacaccctgtacctccagatgaacagcctgagagccgaggacaccgccgtgtactattgtgctgctgcccctggctgtctgctgtctgcacttagaagcgccgactacagaaactggggccagggcacactggtcaccgtttcttctggatccggcggcggaggatctggcggaggcggatctgggggcggaggctctttcgaacaagttcagctggttcagagcggagccgaagtgaagaaacctggggcctctgtgaaggtgtcctgcaaagccagcggctacacctttaccagctactggatcaactgggtccgacaggcccctggacaaggactggaatggatgggacagatccttccaggcggaggggacaccaactacaacggcaagttcaagggcagagtgaccatcaccgccgacaccagcacaagcaccgcctacatggaactgagcagcctgagaagcgaggacaccgccgtgtattattgcaccagacgggtgcccatccggctggattattggggacagggaaccctggtcaccgtgtctagtacgcgtatccagaaccctgatcctgccgtgtaccagctgcgggatagcaagagcagcgacaagagcgtgtgtctgttcaccgacttcgacagccagaccaacgtgtcccagagcaaggactccgacgtgtacatcaccgataagtgcgtgctggacatgcggagcatggacttcaagagcaactccgccgtggcctggtccaacaagtccgatttcgcctgcgccaacgccttcaacaacagcattatccccgaggacacattcttcccaagccccgagagcagctgcgacgtgaagctggtggaaaagagcttcgagacagacaccaacctgaacttccagaacctgagcgtgatcggcttcagaatcctgctgctgaaagtggccggctttaacctgctgatgaccctgcggctgtggtccagc

SEQ ID NO: 6020 - DNA, 2709 bp, synthetic construct
  source 1..2709: mol_type = other DNA
atggccttaccagtgaccgccttgctcctgccgctggccttgctgctccacgccgccaggccggaagtgcaactggttgaatccggtggcggcctggtgcaagcaggcggatctctcagacttagctgtgccgcctccggcagaaccttcacaatgggatggtttaggcaggctccagggaaagagagagagttcgtcgccgccatctctctgtctcccacactggcctactacgccgactctgtgaaaggccggttcaccatctccagagataatgccaagaacaccgtggtgctgcaaatgaactctctgaaacccgaggatacagccctgtactattgtgccgctgaccggaagtccgtgatgagcatcagacccgattactggggacagggcacacaagtcacagtgtcctctggtaccggcggaggcggatctggcggcggaggtagcggtggcggaggatctgaattcgacatcgtgatgacacagagccctgatagcctggccgtgtctctgggagagagagccaccattaactgcaaggccagccagagcgtggactacgacggcgacagcttcctgaactggtatcagcagaagcccggccagcctcctaagctgctgatctacgccgccagcaatctggaaagcggcgtgccaagcagattttccggctctggcagcggcaccgatttcaccctgacaatatccagcctccagcctgaggacgtggccgtgtactactgccagcagagcaacgacgaccctctgacctttggacagggcaccaaggtggaaatcaaactcgaggacctgaagaacgtgttcccacctgaggtggccgtgttcgagcctagcgaggccgagatcagccacacccagaaagccaccctcgtgtgcctggctaccggcttctaccccgaccatgtggaactgtcttggtgggtcaacggcaaagaggtgcacagcggcgtgtgtaccgacccccagccactgaaagaacagcccgccctgaacgacagccggtactgcctgagcagcagactgagagtgtccgccaccttctggcagaacccccggaaccacttcagatgccaggtgcagttctacggcctgagcgagaacgacgagtggacccaggacagagccaagcccgtgacccagatcgtgtctgccgaagcctggggcagagccgattgcggctttaccagcgagagctaccagcagggcgtgctgagcgccaccatcctgtacgagatcctgctgggcaaggccaccctgtacgccgtgctggtgtctgccctggtgctgatggctatggtcaagcggaaggacagccggggaagggccaagcgatctggatctggagcaacaaacttctcactactcaaacaagcaggtgacgtggaggagaatcccgggcctactagtaccatggactggatttggcgcatccttttccttgtcggcgctgctaccggcgcccattccgggccccaggtgcagctggttgaatctggcggaggactggttcagcctggcggatctctgagactgtcttgtgccgccagcggcaacatcaacagcagaaactgcatgggctggttcagacaggcccctggcaagggaagagaaggcgtggcagctatcggccaagtgaccggcagaacctactacgtggacagcgtgaagggcagattcaccatcagcctggacaacagcaagaacaccctgtacctccagatgaacagcctgagagccgaggacaccgccgtgtactattgtgctgctgcccctggctgtctgctgtctgcacttagaagcgccgactacagaaactggggccagggcacactggtcaccgtttcttctggatccggcggcggaggatctggcggaggcggatctgggggcggaggctctttcgaacaagttcagctggttcagagcggagccgaagtgaagaaacctggggcctctgtgaaggtgtcctgcaaagccagcggctacacctttaccagctactggatcaactgggtccgacaggcccctggacaaggactggaatggatgggacagatccttccaggcggaggggacaccaactacaacggcaagttcaagggcagagtgaccatcaccgccgacaccagcacaagcaccgcctacatggaactgagcagcctgagaagcgaggacaccgccgtgtattattgcaccagacgggtgcccatccggctggattattggggacagggaaccctggtcaccgtgtctagtacgcgtatccagaaccctgatcctgccgtgtaccagctgcgggatagcaagagcagcgacaagagcgtgtgtctgttcaccgacttcgacagccagaccaacgtgtcccagagcaaggactccgacgtgtacatcaccgataagtgcgtgctggacatgcggagcatggacttcaagagcaactccgccgtggcctggtccaacaagtccgatttcgcctgcgccaacgccttcaacaacagcattatccccgaggacacattcttcccaagccccgagagcagctgcgacgtgaagctggtggaaaagagcttcgagacagacaccaacctgaacttccagaacctgagcgtgatcggcttcagaatcctgctgctgaaagtggccggctttaacctgctgatgaccctgcggctgtggtccagc

SEQ ID NO: 6021 - DNA, 2721 bp, synthetic construct
  source 1..2721: mol_type = other DNA
atggccttaccagtgaccgccttgctcctgccgctggccttgctgctccacgccgccaggccgcaggttcagctgcaagagtctggccctggcctggtcaagcctagccaaacactgagcctgacctgtaccgtgtctggcggctctatcaccaccggcgagttctactggaactggttcagacagcctcctggcaaaggactggaatggatgggagccattgccgccagcggcagcacaacatacagccctagcttcgagagccggaccagcatcagcagagacaccagcaagaatcagttcagcctgaagctgagcagcgtgacagccgccgatacagccgtgtattactgcggcagatcctttggagtggccgccgtgacaaccggccagaatagaggacagggcaccctggtcacagtgtctagcggtaccggcggaggcggatctggcggcggaggtagcggtggcggaggatctgaattcgacatcgtgatgacacagagccctgatagcctggccgtgtctctgggagagagagccaccattaactgcaaggccagccagagcgtggactacgacggcgacagcttcctgaactggtatcagcagaagcccggccagcctcctaagctgctgatctacgccgccagcaatctggaaagcggcgtgccaagcagattttccggctctggcagcggcaccgatttcaccctgacaatatccagcctccagcctgaggacgtggccgtgtactactgccagcagagcaacgacgaccctctgacctttggacagggcaccaaggtggaaatcaaactcgaggacctgaagaacgtgttcccacctgaggtggccgtgttcgagcctagcgaggccgagatcagccacacccagaaagccaccctcgtgtgcctggctaccggcttctaccccgaccatgtggaactgtcttggtgggtcaacggcaaagaggtgcacagcggcgtgtgtaccgacccccagccactgaaagaacagcccgccctgaacgacagccggtactgcctgagcagcagactgagagtgtccgccaccttctggcagaacccccggaaccacttcagatgccaggtgcagttctacggcctgagcgagaacgacgagtggacccaggacagagccaagcccgtgacccagatcgtgtctgccgaagcctggggcagagccgattgcggctttaccagcgagagctaccagcagggcgtgctgagcgccaccatcctgtacgagatcctgctgggcaaggccaccctgtacgccgtgctggtgtctgccctggtgctgatggctatggtcaagcggaaggacagccggggaagggccaagcgatctggatctggagcaacaaacttctcactactcaaacaagcaggtgacgtggaggagaatcccgggcctactagtaccatggactggatttggcgcatccttttccttgtcggcgctgctaccggcgcccattccgggccccaggtgcagctggttgaatctggcggaggactggttcagcctggcggatctctgagactgtcttgtgccgccagcggcaacatcaacagcagaaactgcatgggctggttcagacaggcccctggcaagggaagagaaggcgtggcagctatcggccaagtgaccggcagaacctactacgtggacagcgtgaagggcagattcaccatcagcctggacaacagcaagaacaccctgtacctccagatgaacagcctgagagccgaggacaccgccgtgtactattgtgctgctgcccctggctgtctgctgtctgcacttagaagcgccgactacagaaactggggccagggcacactggtcaccgtttcttctggatccggcggcggaggatctggcggaggcggatctgggggcggaggctctttcgaacaagttcagctggttcagagcggagccgaagtgaagaaacctggggcctctgtgaaggtgtcctgcaaagccagcggctacacctttaccagctactggatcaactgggtccgacaggcccctggacaaggactggaatggatgggacagatccttccaggcggaggggacaccaactacaacggcaagttcaagggcagagtgaccatcaccgccgacaccagcacaagcaccgcctacatggaactgagcagcctgagaagcgaggacaccgccgtgtattattgcaccagacgggtgcccatccggctggattattggggacagggaaccctggtcaccgtgtctagtacgcgtatccagaaccctgatcctgccgtgtaccagctgcgggatagcaagagcagcgacaagagcgtgtgtctgttcaccgacttcgacagccagaccaacgtgtcccagagcaaggactccgacgtgtacatcaccgataagtgcgtgctggacatgcggagcatggacttcaagagcaactccgccgtggcctggtccaacaagtccgatttcgcctgcgccaacgccttcaacaacagcattatccccgaggacacattcttcccaagccccgagagcagctgcgacgtgaagctggtggaaaagagcttcgagacagacaccaacctgaacttccagaacctgagcgtgatcggcttcagaatcctgctgctgaaagtggccggctttaacctgctgatgaccctgcggctgtggtccagc

SEQ ID NO: 6022 - DNA, 1458 bp, synthetic construct
  source 1..1458: mol_type = other DNA
atggccttaccagtgaccgccttgctcctgccgctggccttgctgctccacgccgccaggccggacatcgtgatgacacagagccctgatagcctggccgtgtctctgggagagagagccaccattaactgcaaggccagccagagcgtggactacgacggcgacagcttcctgaactggtatcagcagaagcccggccagcctcctaagctgctgatctacgccgccagcaatctggaaagcggcgtgccaagcagattttccggctctggcagcggcaccgatttcaccctgacaatatccagcctccagcctgaggacgtggccgtgtactactgccagcagagcaacgacgaccctctgacctttggacagggcaccaaggtggaaatcaaaggcggaggcggaagtggaggcggaggatctggcggcggaggctctgaagtccaacttgtggagtctggagggggcctggtgcagcccggcggctctctcagactgtcttgtgcggcaagcggctacaccttcacctcttactggatagaatgggtgaggcaggcacctggaaagggactggagtggattggagagattctgccaggagggggagatacaaattacaatgaaatcttcaaggggcgggccaccttttcagcggataccagcaagaatacagcttacctgcagatgaatagcctccgggcagaagataccgctgtttattattgcacgagacgggtgccaataagactggactattgggggcaagggactcttgtcaccgtcagttcaacgcgtaaaattgaagttatgtatcctcctccttacctagacaatgagaagagcaatggaaccattatccatgtgaaagggaaacacctttgtccaagtcccctatttcccggaccttctaagcccttttgggtgctggtggtggttgggggagtcctggcttgctatagcttgctagtaacagtggcctttattattttctgggtgaggagtaagaggagcaggctcctgcacagtgactacatgaacatgactccacgccgccccggacccacccgcaagcattaccagccctatgccccaccacgcgacttcgcagcctatcgctccagagtgaagttcagcaggagcgcagacgcccccgcgtaccagcagggccagaaccagctctataacgagctcaatctaggacgaagagaggagtacgatgttttggacaagagacgtggccgggaccctgagatggggggaaagccgagaaggaagaaccctcaggaaggcctgtacaatgaactgcagaaagataagatggcggaggcctacagtgagattgggatgaaaggcgagcgccggaggggcaaggggcacgatggcctttaccagggtctcagtacagccaccaaggacacctacgacgcccttcacatgcaggccctgccccctcgc

SEQ ID NO: 6023 - DNA, 1476 bp, synthetic construct
  source 1..1476: mol_type = other DNA
atggccttaccagtgaccgccttgctcctgccgctggccttgctgctccacgccgccaggccggacatcgtgatgacacagagccctgatagcctggccgtgtctctgggagagagagccaccattaactgcaaggccagccagagcgtggactacgacggcgacagcttcctgaactggtatcagcagaagcccggccagcctcctaagctgctgatctacgccgccagcaatctggaaagcggcgtgccaagcagattttccggctctggcagcggcaccgatttcaccctgacaatatccagcctccagcctgaggacgtggccgtgtactactgccagcagagcaacgacgaccctctgacctttggacagggcaccaaggtggaaatcaaaggcggaggcggaagtggaggcggaggatctggcggcggaggctctgaagtccaacttgtggagtctggagggggcctggtgcagcccggcggctctctcagactgtcttgtgcggcaagcggctacaccttcacctcttactggatagaatgggtgaggcaggcacctggaaagggactggagtggattggagagattctgccaggagggggagatacaaattacaatgaaatcttcaaggggcgggccaccttttcagcggataccagcaagaatacagcttacctgcagatgaatagcctccgggcagaagataccgctgtttattattgcacgagacgggtgccaataagactggactattgggggcaagggactcttgtcaccgtcagttcaacgcgtgcgaagcccaccacgacgccagcgccgcgaccaccaacaccggcgcccaccatcgcgtcgcagcccctgtccctgcgcccagaggcgtgccggccagcggcggggggcgcagtgcacacgagggggctggacttcgcctgtgacatctacatctgggcgcccttggccgggacttgtggggtccttctcctgtcactggttatcaccctttactgcaaacggggcagaaagaaactcctgtatatattcaaacaaccatttatgagaccagtacaaactactcaagaggaagatggctgtagctgccgatttccagaagaagaagaaggaggatgtgaactgagagtgaagttcagcaggagcgcagacgcccccgcgtaccagcagggccagaaccagctctataacgagctgaatctaggacgaagagaggagtacgatgttttggacaagagacgtggccgggaccctgagatggggggaaagccgagaaggaagaaccctcaggaaggcctgtacaatgaactgcagaaagataagatggcggaggcctacagtgagattgggatgaaaggcgagcgccggaggggcaaggggcacgatggcctttaccagggtctcagtacagccaccaaggacacctacgacgcccttcacatgcaggccctgccccctcgc

SEQ ID NO: 6024 - DNA, 1476 bp, synthetic construct
  source 1..1476: mol_type = other DNA
atggccttaccagtgaccgccttgctcctgccgctggccttgctgctccacgccgccaggccggaagtccaacttgtggagtctggagggggcctggtgcagcccggcggctctctcagactgtcttgtgcggcaagcggctacaccttcacctcttactggatagaatgggtgaggcaggcacctggaaagggactggagtggattggagagattctgccaggagggggagatacaaattacaatgaaatcttcaaggggcgggccaccttttcagcggataccagcaagaatacagcttacctgcagatgaatagcctccgggcagaagataccgctgtttattattgcacgagacgggtgccaataagactggactattgggggcaagggactcttgtcaccgtcagttcaggcggaggcggaagtggaggcggaggatctggcggcggaggctctgacatcgtgatgacacagagccctgatagcctggccgtgtctctgggagagagagccaccattaactgcaaggccagccagagcgtggactacgacggcgacagcttcctgaactggtatcagcagaagcccggccagcctcctaagctgctgatctacgccgccagcaatctggaaagcggcgtgccaagcagattttccggctctggcagcggcaccgatttcaccctgacaatatccagcctccagcctgaggacgtggccgtgtactactgccagcagagcaacgacgaccctctgacctttggacagggcaccaaggtggaaatcaaaacgcgtgcgaagcccaccacgacgccagcgccgcgaccaccaacaccggcgcccaccatcgcgtcgcagcccctgtccctgcgcccagaggcgtgccggccagcggcggggggcgcagtgcacacgagggggctggacttcgcctgtgacatctacatctgggcgcccttggccgggacttgtggggtccttctcctgtcactggttatcaccctttactgcaaacggggcagaaagaaactcctgtatatattcaaacaaccatttatgagaccagtacaaactactcaagaggaagatggctgtagctgccgatttccagaagaagaagaaggaggatgtgaactgagagtgaagttcagcaggagcgcagacgcccccgcgtaccagcagggccagaaccagctctataacgagctgaatctaggacgaagagaggagtacgatgttttggacaagagacgtggccgggaccctgagatggggggaaagccgagaaggaagaaccctcaggaaggcctgtacaatgaactgcagaaagataagatggcggaggcctacagtgagattgggatgaaaggcgagcgccggaggggcaaggggcacgatggcctttaccagggtctcagtacagccaccaaggacacctacgacgcccttcacatgcaggccctgccccctcgc

SEQ ID NO: 6025 - DNA, 1872 bp, synthetic construct
  source 1..1872: mol_type = other DNA
atggccttaccagtgaccgccttgctcctgccgctggccttgctgctccacgccgccaggccggacatcgtgatgacacagagccctgatagcctggccgtgtctctgggagagagagccaccattaactgcaaggccagccagagcgtggactacgacggcgacagcttcctgaactggtatcagcagaagcccggccagcctcctaagctgctgatctacgccgccagcaatctggaaagcggcgtgccaagcagattttccggctctggcagcggcaccgatttcaccctgacaatatccagcctccagcctgaggacgtggccgtgtactactgccagcagagcaacgacgaccctctgacctttggacagggcaccaaggtggaaatcaaactcgagatccagaaccctgatcctgccgtgtaccagctgcgggatagcaagagcagcgacaagagcgtgtgtctgttcaccgacttcgacagccagaccaacgtgtcccagagcaaggactccgacgtgtacatcaccgataagtgcgtgctggacatgcggagcatggacttcaagagcaactccgccgtggcctggtccaacaagtccgatttcgcctgcgccaacgccttcaacaacagcattatccccgaggacacattcttcccaagcagcgacgtgccctgcgacgtgaagctggtggaaaagagcttcgagacagacaccaacctgaacttccagaacctgagcgtgatcggcttcagaatcctgctgctgaaagtggccggctttaacctgctgatgaccctgcggctgtggtccagccgcgccaagagaagcggatctggcgtgaagcagaccctgaatttcgacctgctgaagctggctggcgacgtggaatccaacccaggccctactagtatggactggatttggcgcatccttttccttgtcggcgctgctaccggcgcgcattccttcgaagtccaacttgtggagtctggagggggcctggtgcagcccggcggctctctcagactgtcttgtgcggcaagcggctacaccttcacctcttactggatagaatgggtgaggcaggcacctggaaagggactggagtggattggagagattctgccaggagggggagatacaaattacaatgaaatcttcaaggggcgggccaccttttcagcggataccagcaagaatacagcttacctgcagatgaatagcctccgggcagaagataccgctgtttattattgcacgagacgggtgccaataagactggactattgggggcaagggactcttgtcaccgtcagttcaacgcgtgaggacctgaagaacgtgttcccacctgaggtggccgtgttcgagcctagcaaggccgagatcgcccacacccagaaagccaccctcgtgtgcctggctaccggcttctaccccgaccatgtggaactgtcttggtgggtcaacggcaaagaggtgcacagcggcgtgtgtaccgacccccagccactgaaagaacagcccgccctgaacgacagccggtactgcctgagcagcagactgagagtgtccgccaccttctggcagaacccccggaaccacttcagatgccaggtgcagttctacggcctgagcgagaacgacgagtggacccaggacagagccaagcccgtgacccagatcgtgtctgccgaagcctggggcagagccgattgcggcatcaccagcgccagctaccaccagggcgtgctgagcgccaccatcctgtacgagatcctgctgggcaaggccaccctgtacgccgtgctggtgtctgccctggtgctgatggctatggtcaagcggaaggacagccgggga

SEQ ID NO: 6026 - DNA, 1860 bp, synthetic construct
  source 1..1860: mol_type = other DNA
atggccttaccagtgaccgccttgctcctgccgctggccttgctgctccacgccgccaggccggacatcgtgatgacacagagccctgatagcctggccgtgtctctgggagagagagccaccattaactgcaaggccagccagagcgtggactacgacggcgacagcttcctgaactggtatcagcagaagcccggccagcctcctaagctgctgatctacgccgccagcaatctggaaagcggcgtgccaagcagattttccggctctggcagcggcaccgatttcaccctgacaatatccagcctccagcctgaggacgtggccgtgtactactgccagcagagcaacgacgaccctctgacctttggacagggcaccaaggtggaaatcaaactcgaggacctgaagaacgtgttcccacctgaggtggccgtgttcgagcctagcaaggccgagatcgcccacacccagaaagccaccctcgtgtgcctggctaccggcttctaccccgaccatgtggaactgtcttggtgggtcaacggcaaagaggtgcacagcggcgtgtgtaccgacccccagccactgaaagaacagcccgccctgaacgacagccggtactgcctgagcagcagactgagagtgtccgccaccttctggcagaacccccggaaccacttcagatgccaggtgcagttctacggcctgagcgagaacgacgagtggacccaggacagagccaagcccgtgacccagatcgtgtctgccgaagcctggggcagagccgattgcggcatcaccagcgccagctaccaccagggcgtgctgagcgccaccatcctgtacgagatcctgctgggcaaggccaccctgtacgccgtgctggtgtctgccctggtgctgatggctatggtcaagcggaaggacagccggggaagggccaagcgatctggatctggagcaacaaacttctcactactcaaacaagcaggtgacgtggaggagaatcccgggcctactagtatggactggatttggcgcatccttttccttgtcggcgctgctaccggcgcgcattccttcgaagtccaacttgtggagtctggagggggcctggtgcagcccggcggctctctcagactgtcttgtgcggcaagcggctacaccttcacctcttactggatagaatgggtgaggcaggcacctggaaagggactggagtggattggagagattctgccaggagggggagatacaaattacaatgaaatcttcaaggggcgggccaccttttcagcggataccagcaagaatacagcttacctgcagatgaatagcctccgggcagaagataccgctgtttattattgcacgagacgggtgccaataagactggactattgggggcaagggactcttgtcaccgtcagttcaacgcgtatccagaaccctgatcctgccgtgtaccagctgcgggatagcaagagcagcgacaagagcgtgtgtctgttcaccgacttcgacagccagaccaacgtgtcccagagcaaggactccgacgtgtacatcaccgataagtgcgtgctggacatgcggagcatggacttcaagagcaactccgccgtggcctggtccaacaagtccgatttcgcctgcgccaacgccttcaacaacagcattatccccgaggacacattcttcccaagcagcgacgtgccctgcgacgtgaagctggtggaaaagagcttcgagacagacaccaacctgaacttccagaacctgagcgtgatcggcttcagaatcctgctgctgaaagtggccggctttaacctgctgatgaccctgcggctgtggtccagc

SEQ ID NO: 6027 - DNA, 1860 bp, synthetic construct; identical to SEQ ID NO: 4742
  source 1..1860: mol_type = other DNA

SEQ ID NO: 6028 - DNA, 1872 bp, synthetic construct
  source 1..1872: mol_type = other DNA
atggccttaccagtgaccgccttgctcctgccgctggccttgctgctccacgccgccaggccggacatcgtgatgacacagagccctgatagcctggccgtgtctctgggagagagagccaccattaactgcaaggccagccagagcgtggactacgacggcgacagcttcctgaactggtatcagcagaagcccggccagcctcctaagctgctgatctacgccgccagcaatctggaaagcggcgtgccaagcagattttccggctctggcagcggcaccgatttcaccctgacaatatccagcctccagcctgaggacgtggccgtgtactactgccagcagagcaacgacgaccctctgacctttggacagggcaccaaggtggaaatcaaactcgagatccagaaccctgatcctgccgtgtaccagctgcgggatagcaagagcagcgacaagagcgtgtgtctgttcaccgacttcgacagccagaccaacgtgtcccagagcaaggactccgacgtgtacatcaccgataagtgcgtgctggacatgcggagcatggacttcaagagcaactccgccgtggcctggtccaacaagtccgatttcgcctgcgccaacgccttcaacaacagcattatccccgaggacacattcttcccaagccccgagagcagctgcgacgtgaagctggtggaaaagagcttcgagacagacaccaacctgaacttccagaacctgagcgtgatcggcttcagaatcctgctgctgaaagtggccggctttaacctgctgatgaccctgcggctgtggtccagccgcgccaagagaagcggatctggcgtgaagcagaccctgaatttcgacctgctgaagctggctggcgacgtggaatccaacccaggccctactagtatggactggatttggcgcatccttttccttgtcggcgctgctaccggcgcgcattccttcgaagtccaacttgtggagtctggagggggcctggtgcagcccggcggctctctcagactgtcttgtgcggcaagcggctacaccttcacctcttactggatagaatgggtgaggcaggcacctggaaagggactggagtggattggagagattctgccaggagggggagatacaaattacaatgaaatcttcaaggggcgggccaccttttcagcggataccagcaagaatacagcttacctgcagatgaatagcctccgggcagaagataccgctgtttattattgcacgagacgggtgccaataagactggactattgggggcaagggactcttgtcaccgtcagttcaacgcgtgaggacctgaagaacgtgttcccacctgaggtggccgtgttcgagcctagcgaggccgagatcagccacacccagaaagccaccctcgtgtgcctggctaccggcttctaccccgaccatgtggaactgtcttggtgggtcaacggcaaagaggtgcacagcggcgtgtgtaccgacccccagccactgaaagaacagcccgccctgaacgacagccggtactgcctgagcagcagactgagagtgtccgccaccttctggcagaacccccggaaccacttcagatgccaggtgcagttctacggcctgagcgagaacgacgagtggacccaggacagagccaagcccgtgacccagatcgtgtctgccgaagcctggggcagagccgattgcggctttaccagcgagagctaccagcagggcgtgctgagcgccaccatcctgtacgagatcctgctgggcaaggccaccctgtacgccgtgctggtgtctgccctggtgctgatggctatggtcaagcggaaggacagccgggga

SEQ ID NO: 6029 - DNA, 1911 bp, synthetic construct
  source 1..1911: mol_type = other DNA
atggccttaccagtgaccgccttgctcctgccgctggccttgctgctccacgccgccaggccgctcgaggaggacctgaagaacgtgttcccacctgaggtggccgtgttcgagcctagcaaggccgagatcgcccacacccagaaagccaccctcgtgtgcctggctaccggcttctaccccgaccatgtggaactgtcttggtgggtcaacggcaaagaggtgcacagcggcgtgtgtaccgacccccagccactgaaagaacagcccgccctgaacgacagccggtactgcctgagcagcagactgagagtgtccgccaccttctggcagaacccccggaaccacttcagatgccaggtgcagttctacggcctgagcgagaacgacgagtggacccaggacagagccaagcccgtgacccagatcgtgtctgccgaagcctggggcagagccgattgcggcatcaccagcgccagctaccaccagggcgtgctgagcgccaccatcctgtacgagatcctgctgggcaaggccaccctgtacgccgtgctggtgtctgccctggtgctgatggctatggtcaagcggaaggacagccggggaagggccaagcgatctggatctggagcaacaaacttctcactactcaaacaagcaggtgacgtggaggagaatcccgggcctactagcatggccttaccagtgaccgccttgctcctgccgctggccttgctgctccacgccgccaggccggacatcgtgatgacacagagccctgatagcctggccgtgtctctgggagagagagccaccattaactgcaaggccagccagagcgtggactacgacggcgacagcttcctgaactggtatcagcagaagcccggccagcctcctaagctgctgatctacgccgccagcaatctggaaagcggcgtgccaagcagattttccggctctggcagcggcaccgatttcaccctgacaatatccagcctccagcctgaggacgtggccgtgtactactgccagcagagcaacgacgaccctctgacctttggacagggcaccaaggtggaaatcaaaggcggaggcggaagtggaggcggaggatctggcggcggaggctctgaagtccaacttgtggagtctggagggggcctggtgcagcccggcggctctctcagactgtcttgtgcggcaagcggctacaccttcacctcttactggatagaatgggtgaggcaggcacctggaaagggactggagtggattggagagattctgccaggagggggagatacaaattacaatgaaatcttcaaggggcgggccaccttttcagcggataccagcaagaatacagcttacctgcagatgaatagcctccgggcagaagataccgctgtttattattgcacgagacgggtgccaataagactggactattgggggcaagggactcttgtcaccgtcagttcaacgcgtatccagaaccctgatcctgccgtgtaccagctgcgggatagcaagagcagcgacaagagcgtgtgtctgttcaccgacttcgacagccagaccaacgtgtcccagagcaaggactccgacgtgtacatcaccgataagtgcgtgctggacatgcggagcatggacttcaagagcaactccgccgtggcctggtccaacaagtccgatttcgcctgcgccaacgccttcaacaacagcattatccccgaggacacattcttcccaagcagcgacgtgccctgcgacgtgaagctggtggaaaagagcttcgagacagacaccaacctgaacttccagaacctgagcgtgatcggcttcagaatcctgctgctgaaagtggccggctttaacctgctgatgaccctgcggctgtggtccagc

SEQ ID NO: 6030 - DNA, 1932 bp, synthetic construct
  source 1..1932: mol_type = other DNA
atggccttaccagtgaccgccttgctcctgccgctggccttgctgctccacgccgccaggccgctcgagggctccggcgatcgccctgatcctgccgtgtaccagctgcgggatagcaagagcagcgacaagagcgtgtgtctgttcaccgacttcgacagccagaccaacgtgtcccagagcaaggactccgacgtgtacatcaccgataagtgcgtgctggacatgcggagcatggacttcaagagcaactccgccgtggcctggtccaacaagtccgatttcgcctgcgccaacgccttcaacaacagcattatccccgaggacacattcttcccaagccccgagagcagctgcgacgtgaagctggtggaaaagagcttcgagacagacaccaacctgaacttccagaacctgagcgtgatcggcttcagaatcctgctgctgaaagtggccggctttaacctgctgatgaccctgcggctgtggtccagctctagtcgcgccaagagaagcggatctggcgtgaagcagaccctgaatttcgacctgctgaagctggctggcgacgtggaatccaacccaggccccactagcatggccttaccagtgaccgccttgctcctgccgctggccttgctgctccacgccgccaggccggacatcgtgatgacacagagccctgatagcctggccgtgtctctgggagagagagccaccattaactgcaaggccagccagagcgtggactacgacggcgacagcttcctgaactggtatcagcagaagcccggccagcctcctaagctgctgatctacgccgccagcaatctggaaagcggcgtgccaagcagattttccggctctggcagcggcaccgatttcaccctgacaatatccagcctccagcctgaggacgtggccgtgtactactgccagcagagcaacgacgaccctctgacctttggacagggcaccaaggtggaaatcaaaggcggaggcggaagtggaggcggaggatctggcggcggaggctctgaagtccaacttgtggagtctggagggggcctggtgcagcccggcggctctctcagactgtcttgtgcggcaagcggctacaccttcacctcttactggatagaatgggtgaggcaggcacctggaaagggactggagtggattggagagattctgccaggagggggagatacaaattacaatgaaatcttcaaggggcgggccaccttttcagcggataccagcaagaatacagcttacctgcagatgaatagcctccgggcagaagataccgctgtttattattgcacgagacgggtgccaataagactggactattgggggcaagggactcttgtcaccgtcagttcaacgcgtgaggacctgaagaacgtgttcccacctgaggtggccgtgttcgagcctagcgaggccgagatcagccacacccagaaagccaccctcgtgtgcctggctaccggcttctaccccgaccatgtggaactgtcttggtgggtcaacggcaaagaggtgcacagcggcgtgtgtaccgacccccagccactgaaagaacagcccgccctgaacgacagccggtactgcctgagcagcagactgagagtgtccgccaccttctggcagaacccccggaaccacttcagatgccaggtgcagttctacggcctgagcgagaacgacgagtggacccaggacagagccaagcccgtgacccagatcgtgtctgccgaagcctggggcagagccgattgcggctttaccagcgagagctaccagcagggcgtgctgagcgccaccatcctgtacgagatcctgctgggcaaggccaccctgtacgccgtgctggtgtctgccctggtgctgatggctatggtcaagcggaaggacagccgggga

SEQ ID NO: 6031 - DNA, 1860 bp, synthetic construct
  source 1..1860: mol_type = other DNA
atggccttaccagtgaccgccttgctcctgccgctggccttgctgctccacgccgccaggccggacatcgtgatgacacagagccctgatagcctggccgtgtctctgggagagagagccaccattaactgcaaggccagccagagcgtggactacgacggcgacagcttcctgaactggtatcagcagaagcccggccagcctcctaagctgctgatctacgccgccagcaatctggaaagcggcgtgccaagcagattttccggctctggcagcggcaccgatttcaccctgacaatatccagcctccagcctgaggacgtggccgtgtactactgccagcagagcaacgacgaccctctgacctttggacagggcaccaaggtggaaatcaaactcgaggacctgaagaacgtgttcccacctgaggtggccgtgttcgagcctagcgaggccgagatcagccacacccagaaagccaccctcgtgtgcctggctaccggcttctaccccgaccatgtggaactgtcttggtgggtcaacggcaaagaggtgcacagcggcgtgtctaccgacccccagccactgaaagaacagcccgccctgaacgacagccggtactgcctgagcagcagactgagagtgtccgccaccttctggcagaacccccggaaccacttcagatgccaggtgcagttctacggcctgagcgagaacgacgagtggacccaggacagagccaagcccgtgacccagatcgtgtctgccgaagcctggggcagagccgattgcggctttaccagcgagagctaccagcagggcgtgctgagcgccaccatcctgtacgagatcctgctgggcaaggccaccctgtacgccgtgctggtgtctgccctggtgctgatggctatggtcaagcggaaggacagccggggaagggccaagcgatctggatctggagcaacaaacttctcactactcaaacaagcaggtgacgtggaggagaatcccgggcctactagtatggactggatttggcgcatccttttccttgtcggcgctgctaccggcgcgcattccttcgaagtccaacttgtggagtctggagggggcctggtgcagcccggcggctctctcagactgtcttgtgcggcaagcggctacaccttcacctcttactggatagaatgggtgaggcaggcacctggaaagggactggagtggattggagagattctgccaggagggggagatacaaattacaatgaaatcttcaaggggcgggccaccttttcagcggataccagcaagaatacagcttacctgcagatgaatagcctccgggcagaagataccgctgtttattattgcacgagacgggtgccaataagactggactattgggggcaagggactcttgtcaccgtcagttcaacgcgtatccagaaccctgatcctgccgtgtaccagctgcgggatagcaagagcagcgacaagagcgtgtgtctgttcaccgacttcgacagccagaccaacgtgtcccagagcaaggactccgacgtgtacatcaccgataagaccgtgctggacatgcggagcatggacttcaagagcaactccgccgtggcctggtccaacaagtccgatttcgcctgcgccaacgccttcaacaacagcattatccccgaggacacattcttcccaagccccgagagcagctgcgacgtgaagctggtggaaaagagcttcgagacagacaccaacctgaacttccagaacctgagcgtgatcggcttcagaatcctgctgctgaaagtggccggctttaacctgctgatgaccctgcggctgtggtccagc

SEQ ID NO: 6032 - DNA, 1884 bp, synthetic construct
  source 1..1884: mol_type = other DNA
atggccttaccagtgaccgccttgctcctgccgctggccttgctgctccacgccgccaggccggacatcgtgatgacacagagccctgatagcctggccgtgtctctgggagagagagccaccattaactgcaaggccagccagagcgtggactacgacggcgacagcttcctgaactggtatcagcagaagcccggccagcctcctaagctgctgatctacgccgccagcaatctggaaagcggcgtgccaagcagattttccggctctggcagcggcaccgatttcaccctgacaatatccagcctccagcctgaggacgtggccgtgtactactgccagcagagcaacgacgaccctctgacctttggacagggcaccaaggtggaaatcaaactcgaggacaagcagctggacgccgacgtgtcccccaagcctaccatcttcctgccctctatcgccgagacaaagctccagaaggccggcacctacctgtgcctgctggaaaagttcttcccagatgtgattaagatccactggcaggaaaagaagtccaacaccatcctgggcagccaggaaggcaacaccatgaagaccaacgacacctacatgaagttcagctggctgaccgtgcccgagaagtccctggacaaagaacacagatgcatcgtgcggcacgaaaacaacaagaacggcgtggaccaggaaatcatcttcccacccatcaagaccgatgtgattacaatggaccccaaggacaactgctccaaggacgccaacgataccctgctgctccagctgaccaacaccagcgcctactacatgtacttgttgctgctgctgaagtccgtggtgtacttcgccatcatcacatgctgcctgctgcggagaaccgccttctgctgcaacggcgagaagtctagggccaagcgatctggatctggagcaacaaacttctcactactcaaacaagcaggtgacgtggaggagaatcccgggcctactagtatggactggatttggcgcatccttttccttgtcggcgctgctaccggcgcgcattccttcgaagtccaacttgtggagtctggagggggcctggtgcagcccggcggctctctcagactgtcttgtgcggcaagcggctacaccttcacctcttactggatagaatgggtgaggcaggcacctggaaagggactggagtggattggagagattctgccaggagggggagatacaaattacaatgaaatcttcaaggggcgggccaccttttcagcggataccagcaagaatacagcttacctgcagatgaatagcctccgggcagaagataccgctgtttattattgcacgagacgggtgccaataagactggactattgggggcaagggactcttgtcaccgtcagttcaacgcgtagccagcctcacaccaagcccagcgtgttcgtgatgaagaacggcaccaacgtggcctgcctcgtgaaagagttctaccccaaggacatcaggatcaacctggtgtccagcaagaagatcaccgagttcgaccccgccatcgtgatctcccccagcggcaagtacaacgccgtgaagctggggaagtacgaggacagcaacagcgtgacctgctccgtgcagcacgacaacaagaccgtgcacagcaccgactttgaagtgaaaaccgactccaccgaccacgtgaagcccaaagagacagagaacaccaagcagcccagcaagagctgccacaagcccaaggccatcgtgcacaccgagaaagtgaacatgatgagcctgaccgtgctgggcctgcggatgctgttcgccaaaaccgtggccgtgaacttcctgctgaccgccaagctgttcttcctc

SEQ ID NO: 6033 - DNA, 1884 bp, synthetic construct
  source 1..1884: mol_type = other DNA
atggccttaccagtgaccgccttgctcctgccgctggccttgctgctccacgccgccaggccggacatcgtgatgacacagagccctgatagcctggccgtgtctctgggagagagagccaccattaactgcaaggccagccagagcgtggactacgacggcgacagcttcctgaactggtatcagcagaagcccggccagcctcctaagctgctgatctacgccgccagcaatctggaaagcggcgtgccaagcagattttccggctctggcagcggcaccgatttcaccctgacaatatccagcctccagcctgaggacgtggccgtgtactactgccagcagagcaacgacgaccctctgacctttggacagggcaccaaggtggaaatcaaactcgagagccagcctcacaccaagcccagcgtgttcgtgatgaagaacggcaccaacgtggcctgcctcgtgaaagagttctaccccaaggacatcaggatcaacctggtgtccagcaagaagatcaccgagttcgaccccgccatcgtgatctcccccagcggcaagtacaacgccgtgaagctggggaagtacgaggacagcaacagcgtgacctgctccgtgcagcacgacaacaagaccgtgcacagcaccgactttgaagtgaaaaccgactccaccgaccacgtgaagcccaaagagacagagaacaccaagcagcccagcaagagctgccacaagcccaaggccatcgtgcacaccgagaaagtgaacatgatgagcctgaccgtgctgggcctgcggatgctgttcgccaaaaccgtggccgtgaacttcctgctgaccgccaagctgttcttcctcagggccaagcgatctggatctggagcaacaaacttctcactactcaaacaagcaggtgacgtggaggagaatcccgggcctactagtatggactggatttggcgcatccttttccttgtcggcgctgctaccggcgcgcattccttcgaagtccaacttgtggagtctggagggggcctggtgcagcccggcggctctctcagactgtcttgtgcggcaagcggctacaccttcacctcttactggatagaatgggtgaggcaggcacctggaaagggactggagtggattggagagattctgccaggagggggagatacaaattacaatgaaatcttcaaggggcgggccaccttttcagcggataccagcaagaatacagcttacctgcagatgaatagcctccgggcagaagataccgctgtttattattgcacgagacgggtgccaataagactggactattgggggcaagggactcttgtcaccgtcagttcaacgcgtgacaagcagctggacgccgacgtgtcccccaagcctaccatcttcctgccctctatcgccgagacaaagctccagaaggccggcacctacctgtgcctgctggaaaagttcttcccagatgtgattaagatccactggcaggaaaagaagtccaacaccatcctgggcagccaggaaggcaacaccatgaagaccaacgacacctacatgaagttcagctggctgaccgtgcccgagaagtccctggacaaagaacacagatgcatcgtgcggcacgaaaacaacaagaacggcgtggaccaggaaatcatcttcccacccatcaagaccgatgtgattacaatggaccccaaggacaactgctccaaggacgccaacgataccctgctgctccagctgaccaacaccagcgcctactacatgtacttgttgctgctgctgaagtccgtggtgtacttcgccatcatcacatgctgcctgctgcggagaaccgccttctgctgcaacggcgagaagtct

SEQ ID NO: 6034 - DNA, 1932 bp, synthetic construct
  source 1..1932: mol_type = other DNA
atggccttaccagtgaccgccttgctcctgccgctggccttgctgctccacgccgccaggccgctcgaggacaagcagctggacgccgacgtgtcccccaagcctaccatcttcctgccctctatcgccgagacaaagctccagaaggccggcacctacctgtgcctgctggaaaagttcttcccagatgtgattaagatccactggcaggaaaagaagtccaacaccatcctgggcagccaggaaggcaacaccatgaagaccaacgacacctacatgaagttcagctggctgaccgtgcccgagaagtccctggacaaagaacacagatgcatcgtgcggcacgaaaacaacaagaacggcgtggaccaggaaatcatcttcccacccatcaagaccgatgtgattacaatggaccccaaggacaactgctccaaggacgccaacgataccctgctgctccagctgaccaacaccagcgcctactacatgtacttgttgctgctgctgaagtccgtggtgtacttcgccatcatcacatgctgcctgctgcggagaaccgccttctgctgcaacggcgagaagtctagggccaagcgatctggatctggagcaacaaacttctcactactcaaacaagcaggtgacgtggaggagaatcccgggcctactagcatggccttaccagtgaccgccttgctcctgccgctggccttgctgctccacgccgccaggccggacatcgtgatgacacagagccctgatagcctggccgtgtctctgggagagagagccaccattaactgcaaggccagccagagcgtggactacgacggcgacagcttcctgaactggtatcagcagaagcccggccagcctcctaagctgctgatctacgccgccagcaatctggaaagcggcgtgccaagcagattttccggctctggcagcggcaccgatttcaccctgacaatatccagcctccagcctgaggacgtggccgtgtactactgccagcagagcaacgacgaccctctgacctttggacagggcaccaaggtggaaatcaaaggcggaggcggaagtggaggcggaggatctggcggcggaggctctgaagtccaacttgtggagtctggagggggcctggtgcagcccggcggctctctcagactgtcttgtgcggcaagcggctacaccttcacctcttactggatagaatgggtgaggcaggcacctggaaagggactggagtggattggagagattctgccaggagggggagatacaaattacaatgaaatcttcaaggggcgggccaccttttcagcggataccagcaagaatacagcttacctgcagatgaatagcctccgggcagaagataccgctgtttattattgcacgagacgggtgccaataagactggactattgggggcaagggactcttgtcaccgtcagttcaacgcgtagccagcctcacaccaagcccagcgtgttcgtgatgaagaacggcaccaacgtggcctgcctcgtgaaagagttctaccccaaggacatcaggatcaacctggtgtccagcaagaagatcaccgagttcgaccccgccatcgtgatctcccccagcggcaagtacaacgccgtgaagctggggaagtacgaggacagcaacagcgtgacctgctccgtgcagcacgacaacaagaccgtgcacagcaccgactttgaagtgaaaaccgactccaccgaccacgtgaagcccaaagagacagagaacaccaagcagcccagcaagagctgccacaagcccaaggccatcgtgcacaccgagaaagtgaacatgatgagcctgaccgtgctgggcctgcggatgctgttcgccaaaaccgtggccgtgaacttcctgctgaccgccaagctgttcttcctc

SEQ ID NO: 6035 - DNA, 2391 bp, synthetic construct
  source 1..2391: mol_type = other DNA
atggccttaccagtgaccgccttgctcctgccgctggccttgctgctccacgccgccaggccggacatcgtgatgacacagagccctgatagcctggccgtgtctctgggagagagagccaccattaactgcaaggccagccagagcgtggactacgacggcgacagcttcctgaactggtatcagcagaagcccggccagcctcctaagctgctgatctacgccgccagcaatctggaaagcggcgtgccaagcagattttccggctctggcagcggcaccgatttcaccctgacaatatccagcctccagcctgaggacgtggccgtgtactactgccagcagagcaacgacgaccctctgacctttggacagggcaccaaggtggaaatcaaaggacagcctaaggccaatcctaccgtgacactgttccctccaagcagcgaagaactccaggccaacaaggccacacttgtgtgcctgatctccgacttctaccctggggctgtgacagtggcttggaaggccgatggatctcctgtgaaagccggcgtggaaaccaccaagccatccaagcagagcaacaacaaatacgccgccagctcctacctgagcctgacacctgagcagtggaagtcccacagatcctacagctgccaagtgacccacgaaggcagcaccgtggaaaagacagtggcccctacagagtgcagcggatcccagagcttcggcctgctggaccccaagctgtgctacctgctggatggcatcctgttcatctacggcgtgatcctgaccgccctgttcctgagagtgaagttcagcagaagcgccgacgcccctgcctaccagcagggacagaaccaactgtacaacgagctgaacctgggcagacgggaagagtacgacgtgctggacaagcggagaggcagggaccctgagatgggcggaaagccccagcggagaaagaacccccaggaaggactgtataacgaactccagaaagacaagatggccgaagcctacagcgagatcggcatgaagggcgagcggagaagaggcaagggccacgatggcctgtaccagggcctgagcaccgccaccaaggacacctatgacgccctgcacatgcaggccctgcctccaagaagggccaagcgatctggatctggagcaacaaacttctcactactcaaacaagcaggtgacgtggaggagaatcccgggcctactagtatggactggatttggcgcatccttttccttgtcggcgctgctaccggcgcgcattccttcgaagtccaacttgtggagtctggagggggcctggtgcagcccggcggctctctcagactgtcttgtgcggcaagcggctacaccttcacctcttactggatagaatgggtgaggcaggcacctggaaagggactggagtggattggagagattctgccaggagggggagatacaaattacaatgaaatcttcaaggggcgggccaccttttcagcggataccagcaagaatacagcttacctgcagatgaatagcctccgggcagaagataccgctgtttattattgcacgagacgggtgccaataagactggactattgggggcaagggactcttgtcaccgtcagttcagcctctacaaagggaccctccgtgtttcctctggctcccagcagcaagtctacaagcggaggaacagccgctctgggctgcctggtcaaggattactttcccgagcctgtgaccgtgtcctggaatagcggagcactgacaagcggcgtgcacacctttccagccgtgctgcaaagcagcggcctgtactctctgagcagcgtggtcacagtgcctagctctagcctgggcacccagacctacatctgcaatgtgaaccacaagcctagcaacaccaaggtggacaagagagtggaacccaagagctgtggtacccagagttttgggttgttggaccctaaattgtgctatctgttggacggaatcctgttcatttacggagtgatcctgaccgcattgttcctgcgggttaagttttccagatccgcagacgcacccgcttaccaacaagggcagaaccaactctacaatgaacttaatttggggcggagggaagagtacgacgttctggacaaaaggaggggacgagatcccgagatgggcggaaagcctcagcgaaggaagaatccgcaagaggggctttataacgaactccagaaagataaaatggcagaagcctatagtgagattgggatgaagggagaaaggaggaggggtaaaggtcacgatgggttgtaccaaggattgagcacagccactaaagatacctatgatgcgctccacatgcaggccctgccgccaaga

SEQ ID NO: 6036 - DNA, 2448 bp, synthetic construct
  source 1..2448: mol_type = other DNA
atggccttaccagtgaccgccttgctcctgccgctggccttgctgctccacgccgccaggccggacatcgtgatgacacagagccctgatagcctggccgtgtctctgggagagagagccaccattaactgcaaggccagccagagcgtggactacgacggcgacagcttcctgaactggtatcagcagaagcccggccagcctcctaagctgctgatctacgccgccagcaatctggaaagcggcgtgccaagcagattttccggctctggcagcggcaccgatttcaccctgacaatatccagcctccagcctgaggacgtggccgtgtactactgccagcagagcaacgacgaccctctgacctttggacagggcaccaaggtggaaatcaaactcgaggacctgaagaacgtgttcccacctgaggtggccgtgttcgagcctagcgaggccgagatcagccacacccagaaagccaccctcgtgtgcctggctaccggcttctaccccgaccatgtggaactgtcttggtgggtcaacggcaaagaggtgcacagcggcgtgtctaccgacccccagccactgaaagaacagcccgccctgaacgacagccggtactgcctgagcagcagactgagagtgtccgccaccttctggcagaacccccggaaccacttcagatgccaggtgcagttctacggcctgagcgagaacgacgagtggacccaggacagagccaagcccgtgacccagatcgtgtctgccgaagcctggggcagagccgattgcggatcccagagcttcggcctgctggaccccaagctgtgctacctgctggatggcatcctgttcatctacggcgtgatcctgaccgccctgttcctgagagtgaagttcagcagaagcgccgacgcccctgcctaccagcagggacagaaccaactgtacaacgagctgaacctgggcagacgggaagagtacgacgtgctggacaagcggagaggcagggaccctgagatgggcggaaagccccagcggagaaagaacccccaggaaggactgtataacgaactccagaaagacaagatggccgaagcctacagcgagatcggcatgaagggcgagcggagaagaggcaagggccacgatggcctgtaccagggcctgagcaccgccaccaaggacacctatgacgccctgcacatgcaggccctgcctccaagaagggccaagcgatctggatctggagcaacaaacttctcactactcaaacaagcaggtgacgtggaggagaatcccgggcctactagtatggactggatttggcgcatccttttccttgtcggcgctgctaccggcgcgcattccttcgaagtccaacttgtggagtctggagggggcctggtgcagcccggcggctctctcagactgtcttgtgcggcaagcggctacaccttcacctcttactggatagaatgggtgaggcaggcacctggaaagggactggagtggattggagagattctgccaggagggggagatacaaattacaatgaaatcttcaaggggcgggccaccttttcagcggataccagcaagaatacagcttacctgcagatgaatagcctccgggcagaagataccgctgtttattattgcacgagacgggtgccaataagactggactattgggggcaagggactcttgtcaccgtcagttcaacgcgtatccagaaccctgatcctgccgtgtaccagctgcgggatagcaagagcagcgacaagagcgtgtgtctgttcaccgacttcgacagccagaccaacgtgtcccagagcaaggactccgacgtgtacatcaccgataagaccgtgctggacatgcggagcatggacttcaagagcaactccgccgtggcctggtccaacaagtccgatttcgcctgcgccaacgccttcaacaacagcattatccccgaggacacattcttcccaagccccgagagcagctgcggtacccagagttttgggttgttggaccctaaattgtgctatctgttggacggaatcctgttcatttacggagtgatcctgaccgcattgttcctgcgggttaagttttccagatccgcagacgcacccgcttaccaacaagggcagaaccaactctacaatgaacttaatttggggcggagggaagagtacgacgttctggacaaaaggaggggacgagatcccgagatgggcggaaagcctcagcgaaggaagaatccgcaagaggggctttataacgaactccagaaagataaaatggcagaagcctatagtgagattgggatgaagggagaaaggaggaggggtaaaggtcacgatgggttgtaccaaggattgagcacagccactaaagatacctatgatgcgctccacatgcaggccctgccgccaaga

SEQ ID NO: 6037 - DNA, 2574 bp, synthetic construct
  source 1..2574: mol_type = other DNA
atggccttaccagtgaccgccttgctcctgccgctggccttgctgctccacgccgccaggccggacatcgtgatgacacagagccctgatagcctggccgtgtctctgggagagagagccaccattaactgcaaggccagccagagcgtggactacgacggcgacagcttcctgaactggtatcagcagaagcccggccagcctcctaagctgctgatctacgccgccagcaatctggaaagcggcgtgccaagcagattttccggctctggcagcggcaccgatttcaccctgacaatatccagcctccagcctgaggacgtggccgtgtactactgccagcagagcaacgacgaccctctgacctttggacagggcaccaaggtggaaatcaaactcgaggaggacctgaagaacgtgttcccacctgaggtggccgtgttcgagcctagcgaggccgagatcagccacacccagaaagccaccctcgtgtgcctggctaccggcttctaccccgaccatgtggaactgtcttggtgggtcaacggcaaagaggtgcacagcggcgtgtctaccgacccccagccactgaaagaacagcccgccctgaacgacagccggtactgcctgagcagcagactgagagtgtccgccaccttctggcagaacccccggaaccacttcagatgccaggtgcagttctacggcctgagcgagaacgacgagtggacccaggacagagccaagcccgtgacccagatcgtgtctgccgaagcctggggcagagccgattgcggatcccagagcttcggcctgctggaccccaagctgtgctacctgctggatggcatcctgttcatctacggcgtgatcctgaccgccctgttcctgagagtgaagttcagcagaagcgccgacgcccctgcctaccagcagggacagaaccaactgtacaacgagctgaacctgggcagacgggaagagtacgacgtgctggacaagcggagaggcagggaccctgagatgggcggaaagccccagcggagaaagaacccccaggaaggactgtataacgaactccagaaagacaagatggccgaagcctacagcgagatcggcatgaagggcgagcggagaagaggcaagggccacgatggcctgtaccagggcctgagcaccgccaccaaggacacctatgacgccctgcacatgcaggccctgcctccaagaagggccaagcgatctggatctggagcaacaaacttctcactactcaaacaagcaggtgacgtggaggagaatcccgggcctactagtatggactggatttggcgcatccttttccttgtcggcgctgctaccggcgcgcattccttcgaagtccaacttgtggagtctggagggggcctggtgcagcccggcggctctctcagactgtcttgtgcggcaagcggctacaccttcacctcttactggatagaatgggtgaggcaggcacctggaaagggactggagtggattggagagattctgccaggagggggagatacaaattacaatgaaatcttcaaggggcgggccaccttttcagcggataccagcaagaatacagcttacctgcagatgaatagcctccgggcagaagataccgctgtttattattgcacgagacgggtgccaataagactggactattgggggcaagggactcttgtcaccgtcagttcaacgcgtatccagaaccctgatcctgccgtgtaccagctgcgggatagcaagagcagcgacaagagcgtgtgtctgttcaccgacttcgacagccagaccaacgtgtcccagagcaaggactccgacgtgtacatcaccgataagaccgtgctggacatgcggagcatggacttcaagagcaactccgccgtggcctggtccaacaagtccgatttcgcctgcgccaacgccttcaacaacagcattatccccgaggacacattcttcccaagccccgagagcagctgcggtacccagagttttgggttgttggaccctaaattgtgctatctgttggacggaatcctgttcatttacggagtgatcctgaccgcattgttcctgaggagcaagcggtcacggctgctccacagcgattacatgaatatgacaccacgaagaccgggtcctactcgcaaacactaccaaccctacgcacctccccgcgactttgcagcgtaccgatctcgggttaagttttccagatccgcagacgcacccgcttaccaacaagggcagaaccaactctacaatgaacttaatttggggcggagggaagagtacgacgttctggacaaaaggaggggacgagatcccgagatgggcggaaagcctcagcgaaggaagaatccgcaagaggggctttataacgaactccagaaagataaaatggcagaagcctatagtgagattgggatgaagggagaaaggaggaggggtaaaggtcacgatgggttgtaccaaggattgagcacagccactaaagatacctatgatgcgctccacatgcaggccctgccgccaaga

SEQ ID NO: 6038 - DNA, 2703 bp, synthetic construct
  source 1..2703: mol_type = other DNA
atggccttaccagtgaccgccttgctcctgccgctggccttgctgctccacgccgccaggccggacatcgtgatgacacagagccctgatagcctggccgtgtctctgggagagagagccaccattaactgcaaggccagccagagcgtggactacgacggcgacagcttcctgaactggtatcagcagaagcccggccagcctcctaagctgctgatctacgccgccagcaatctggaaagcggcgtgccaagcagattttccggctctggcagcggcaccgatttcaccctgacaatatccagcctccagcctgaggacgtggccgtgtactactgccagcagagcaacgacgaccctctgacctttggacagggcaccaaggtggaaatcaaactcgaggaggacctgaagaacgtgttcccacctgaggtggccgtgttcgagcctagcgaggccgagatcagccacacccagaaagccaccctcgtgtgcctggctaccggcttctaccccgaccatgtggaactgtcttggtgggtcaacggcaaagaggtgcacagcggcgtgtctaccgacccccagccactgaaagaacagcccgccctgaacgacagccggtactgcctgagcagcagactgagagtgtccgccaccttctggcagaacccccggaaccacttcagatgccaggtgcagttctacggcctgagcgagaacgacgagtggacccaggacagagccaagcccgtgacccagatcgtgtctgccgaagcctggggcagagccgattgcggatcccagagcttcggcctgctggaccccaagctgtgctacctgctggatggcatcctgttcatctacggcgtgatcctgaccgccctgttcctgaaacggggcagaaagaaactcctgtatatattcaaacaaccatttatgagaccagtacaaactactcaagaggaagatggctgtagctgccgatttccagaagaagaagaaggaggatgtgaactgagagtgaagttcagcagaagcgccgacgcccctgcctaccagcagggacagaaccaactgtacaacgagctgaacctgggcagacgggaagagtacgacgtgctggacaagcggagaggcagggaccctgagatgggcggaaagccccagcggagaaagaacccccaggaaggactgtataacgaactccagaaagacaagatggccgaagcctacagcgagatcggcatgaagggcgagcggagaagaggcaagggccacgatggcctgtaccagggcctgagcaccgccaccaaggacacctatgacgccctgcacatgcaggccctgcctccaagaagggccaagcgatctggatctggagcaacaaacttctcactactcaaacaagcaggtgacgtggaggagaatcccgggcctactagtatggactggatttggcgcatccttttccttgtcggcgctgctaccggcgcgcattccttcgaagtccaacttgtggagtctggagggggcctggtgcagcccggcggctctctcagactgtcttgtgcggcaagcggctacaccttcacctcttactggatagaatgggtgaggcaggcacctggaaagggactggagtggattggagagattctgccaggagggggagatacaaattacaatgaaatcttcaaggggcgggccaccttttcagcggataccagcaagaatacagcttacctgcagatgaatagcctccgggcagaagataccgctgtttattattgcacgagacgggtgccaataagactggactattgggggcaagggactcttgtcaccgtcagttcaacgcgtatccagaaccctgatcctgccgtgtaccagctgcgggatagcaagagcagcgacaagagcgtgtgtctgttcaccgacttcgacagccagaccaacgtgtcccagagcaaggactccgacgtgtacatcaccgataagaccgtgctggacatgcggagcatggacttcaagagcaactccgccgtggcctggtccaacaagtccgatttcgcctgcgccaacgccttcaacaacagcattatccccgaggacacattcttcccaagccccgagagcagctgcggtacccagagttttgggttgttggaccctaaattgtgctatctgttggacggaatcctgttcatttacggagtgatcctgaccgcattgttcctgaagagaggccggaagaagctgctgtacatcttcaagcagcctttcatgcggcccgtgcagaccacccaggaagaggacggctgctcctgccggttccccgaggaagaagaaggcggctgcgagctgcgggttaagttttccagatccgcagacgcacccgcttaccaacaagggcagaaccaactctacaatgaacttaatttggggcggagggaagagtacgacgttctggacaaaaggaggggacgagatcccgagatgggcggaaagcctcagcgaaggaagaatccgcaagaggggctttataacgaactccagaaagataaaatggcagaagcctatagtgagattgggatgaagggagaaaggaggaggggtaaaggtcacgatgggttgtaccaaggattgagcacagccactaaagatacctatgatgcgctccacatgcaggccctgccgccaaga

SEQ ID NO: 6039 - DNA, 1764 bp, synthetic construct
  source 1..1764: mol_type = other DNA
atggccttaccagtgaccgccttgctcctgccgctggccttgctgctccacgccgccaggccggacatcgtgatgacacagagccctgatagcctggccgtgtctctgggagagagagccaccattaactgcaaggccagccagagcgtggactacgacggcgacagcttcctgaactggtatcagcagaagcccggccagcctcctaagctgctgatctacgccgccagcaatctggaaagcggcgtgccaagcagattttccggctctggcagcggcaccgatttcaccctgacaatatccagcctccagcctgaggacgtggccgtgtactactgccagcagagcaacgacgaccctctgacctttggacagggcaccaaggtggaaatcaaactcgagcagagcttcggcctgctggaccccaagctgtgctacctgctggatggcatcctgttcatctacggcgtgatcctgaccgccctgttcctgagagtgaagttcagcagaagcgccgacgcccctgcctaccagcagggacagaaccaactgtacaacgagctgaacctgggcagacgggaagagtacgacgtgctggacaagcggagaggcagggaccctgagatgggcggaaagccccagcggagaaagaacccccaggaaggactgtataacgaactccagaaagacaagatggccgaagcctacagcgagatcggcatgaagggcgagcggagaagaggcaagggccacgatggcctgtaccagggcctgagcaccgccaccaaggacacctatgacgccctgcacatgcaggccctgcctccaagaagggccaagcgatctggatctggagcaacaaacttctcactactcaaacaagcaggtgacgtggaggagaatcccgggcctactagtatggactggatttggcgcatccttttccttgtcggcgctgctaccggcgcgcattccttcgaagtccaacttgtggagtctggagggggcctggtgcagcccggcggctctctcagactgtcttgtgcggcaagcggctacaccttcacctcttactggatagaatgggtgaggcaggcacctggaaagggactggagtggattggagagattctgccaggagggggagatacaaattacaatgaaatcttcaaggggcgggccaccttttcagcggataccagcaagaatacagcttacctgcagatgaatagcctccgggcagaagataccgctgtttattattgcacgagacgggtgccaataagactggactattgggggcaagggactcttgtcaccgtcagttcaacgcgtcagagttttgggttgttggaccctaaattgtgctatctgttggacggaatcctgttcatttacggagtgatcctgaccgcattgttcctgcgggttaagttttccagatccgcagacgcacccgcttaccaacaagggcagaaccaactctacaatgaacttaatttggggcggagggaagagtacgacgttctggacaaaaggaggggacgagatcccgagatgggcggaaagcctcagcgaaggaagaatccgcaagaggggctttataacgaactccagaaagataaaatggcagaagcctatagtgagattgggatgaagggagaaaggaggaggggtaaaggtcacgatgggttgtaccaaggattgagcacagccactaaagatacctatgatgcgctccacatgcaggccctgccgccaaga

SEQ ID NO: 6040 - DNA, 1938 bp, synthetic construct
  source 1..1938: mol_type = other DNA
atggccttaccagtgaccgccttgctcctgccgctggccttgctgctccacgccgccaggccggacatcgtgatgacacagagccctgatagcctggccgtgtctctgggagagagagccaccattaactgcaaggccagccagagcgtggactacgacggcgacagcttcctgaactggtatcagcagaagcccggccagcctcctaagctgctgatctacgccgccagcaatctggaaagcggcgtgccaagcagattttccggctctggcagcggcaccgatttcaccctgacaatatccagcctccagcctgaggacgtggccgtgtactactgccagcagagcaacgacgaccctctgacctttggacagggcaccaaggtggaaatcaaactcgagggacagcctaaggccaatcctaccgtgacactgttccctccaagcagcgaagaactccaggccaacaaggccacacttgtgtgcctgatctccgacttctaccctggggctgtgacagtggcttggaaggccgatggatctcctgtgaaagccggcgtggaaaccaccaagccatccaagcagagcaacaacaaatacgccgccagctcctacctgagcctgacacctgagcagtggaagtcccacagatcctacagctgccaagtgacccacgaaggcagcaccgtggaaaagacagtggcccctacagagtgcagccccatcaagaccgatgtgattacaatggaccccaaggacaactgctccaaggacgccaacgataccctgctgctccagctgaccaacaccagcgcctactacatgtacttgttgctgctgctgaagtccgtggtgtacttcgccatcatcacatgctgcctgctgcggagaaccgccttctgctgcaacggcgagaagtctagggccaagcgatctggatctggagcaacaaacttctcactactcaaacaagcaggtgacgtggaggagaatcccgggcctactagtatggactggatttggcgcatccttttccttgtcggcgctgctaccggcgcgcattccttcgaagtccaacttgtggagtctggagggggcctggtgcagcccggcggctctctcagactgtcttgtgcggcaagcggctacaccttcacctcttactggatagaatgggtgaggcaggcacctggaaagggactggagtggattggagagattctgccaggagggggagatacaaattacaatgaaatcttcaaggggcgggccaccttttcagcggataccagcaagaatacagcttacctgcagatgaatagcctccgggcagaagataccgctgtttattattgcacgagacgggtgccaataagactggactattgggggcaagggactcttgtcaccgtcagttcaacgcgtgcctctacaaagggaccctccgtgtttcctctggctcccagcagcaagtctacaagcggaggaacagccgctctgggctgcctggtcaaggattactttcccgagcctgtgaccgtgtcctggaatagcggagcactgacaagcggcgtgcacacctttccagccgtgctgcaaagcagcggcctgtactctctgagcagcgtggtcacagtgcctagctctagcctgggcacccagacctacatctgcaatgtgaaccacaagcctagcaacaccaaggtggacaagagagtggaacccaagagctgtgaagtgaaaaccgactccaccgaccacgtgaagcccaaagagacagagaacaccaagcagcccagcaagagctgccacaagcccaaggccatcgtgcacaccgagaaagtgaacatgatgagcctgaccgtgctgggcctgcggatgctgttcgccaaaaccgtggccgtgaacttcctgctgaccgccaagctgttcttcctc

SEQ ID NO: 6041 - DNA, 1872 bp, synthetic construct
  source 1..1872: mol_type = other DNA
atggccttaccagtgaccgccttgctcctgccgctggccttgctgctccacgccgccaggccggacatcgtgatgacacagagccctgatagcctggccgtgtctctgggagagagagccaccattaactgcaaggccagccagagcgtggactacgacggcgacagcttcctgaactggtatcagcagaagcccggccagcctcctaagctgctgatctacgccgccagcaatctggaaagcggcgtgccaagcagattttccggctctggcagcggcaccgatttcaccctgacaatatccagcctccagcctgaggacgtggccgtgtactactgccagcagagcaacgacgaccctctgacctttggacagggcaccaaggtggaaatcaaactcgagggacagcctaaggccaatcctaccgtgacactgttccctccaagcagcgaagaactccaggccaacaaggccacacttgtgtgcctgatctccgacttctaccctggggctgtgacagtggcttggaaggccgatggatctcctgtgaaagccggcgtggaaaccaccaagccatccaagcagagcaacaacaaatacgccgccagctcctacctgagcctgacacctgagcagtggaagtcccacagatcctacagctgccaagtgacccacgaaggcagcaccgtggaaaagacagtggcccctacagagtgcagcggcagagccgattgcggcatcaccagcgccagctaccaccagggcgtgctgagcgccaccatcctgtacgagatcctgctgggcaaggccaccctgtacgccgtgctggtgtctgccctggtgctgatggctatggtcaagcggaaggacagccggggaagggccaagcgatctggatctggagcaacaaacttctcactactcaaacaagcaggtgacgtggaggagaatcccgggcctactagtatggactggatttggcgcatccttttccttgtcggcgctgctaccggcgcgcattccttcgaagtccaacttgtggagtctggagggggcctggtgcagcccggcggctctctcagactgtcttgtgcggcaagcggctacaccttcacctcttactggatagaatgggtgaggcaggcacctggaaagggactggagtggattggagagattctgccaggagggggagatacaaattacaatgaaatcttcaaggggcgggccaccttttcagcggataccagcaagaatacagcttacctgcagatgaatagcctccgggcagaagataccgctgtttattattgcacgagacgggtgccaataagactggactattgggggcaagggactcttgtcaccgtcagttcaacgcgtgcctctacaaagggaccctccgtgtttcctctggctcccagcagcaagtctacaagcggaggaacagccgctctgggctgcctggtcaaggattactttcccgagcctgtgaccgtgtcctggaatagcggagcactgacaagcggcgtgcacacctttccagccgtgctgcaaagcagcggcctgtactctctgagcagcgtggtcacagtgcctagctctagcctgggcacccagacctacatctgcaatgtgaaccacaagcctagcaacaccaaggtggacaagagagtggaacccaagagctgtatccccgaggacacattcttcccaagcagcgacgtgccctgcgacgtgaagctggtggaaaagagcttcgagacagacaccaacctgaacttccagaacctgagcgtgatcggcttcagaatcctgctgctgaaagtggccggctttaacctgctgatgaccctgcggctgtggtccagc

SEQ ID NO: 6042 - DNA, 1872 bp, synthetic construct
  source 1..1872: mol_type = other DNA
atggccttaccagtgaccgccttgctcctgccgctggccttgctgctccacgccgccaggccggacatcgtgatgacacagagccctgatagcctggccgtgtctctgggagagagagccaccattaactgcaaggccagccagagcgtggactacgacggcgacagcttcctgaactggtatcagcagaagcccggccagcctcctaagctgctgatctacgccgccagcaatctggaaagcggcgtgccaagcagattttccggctctggcagcggcaccgatttcaccctgacaatatccagcctccagcctgaggacgtggccgtgtactactgccagcagagcaacgacgaccctctgacctttggacagggcaccaaggtggaaatcaaactcgagggacagcctaaggccaatcctaccgtgacactgttccctccaagcagcgaagaactccaggccaacaaggccacacttgtgtgcctgatctccgacttctaccctggggctgtgacagtggcttggaaggccgatggatctcctgtgaaagccggcgtggaaaccaccaagccatccaagcagagcaacaacaaatacgccgccagctcctacctgagcctgacacctgagcagtggaagtcccacagatcctacagctgccaagtgacccacgaaggcagcaccgtggaaaagacagtggcccctacagagtgcagcggcagagccgattgcggctttaccagcgagagctaccagcagggcgtgctgagcgccaccatcctgtacgagatcctgctgggcaaggccaccctgtacgccgtgctggtgtctgccctggtgctgatggctatggtcaagcggaaggacagccggggaagggccaagcgatctggatctggagcaacaaacttctcactactcaaacaagcaggtgacgtggaggagaatcccgggcctactagtatggactggatttggcgcatccttttccttgtcggcgctgctaccggcgcgcattccttcgaagtccaacttgtggagtctggagggggcctggtgcagcccggcggctctctcagactgtcttgtgcggcaagcggctacaccttcacctcttactggatagaatgggtgaggcaggcacctggaaagggactggagtggattggagagattctgccaggagggggagatacaaattacaatgaaatcttcaaggggcgggccaccttttcagcggataccagcaagaatacagcttacctgcagatgaatagcctccgggcagaagataccgctgtttattattgcacgagacgggtgccaataagactggactattgggggcaagggactcttgtcaccgtcagttcaacgcgtgcctctacaaagggaccctccgtgtttcctctggctcccagcagcaagtctacaagcggaggaacagccgctctgggctgcctggtcaaggattactttcccgagcctgtgaccgtgtcctggaatagcggagcactgacaagcggcgtgcacacctttccagccgtgctgcaaagcagcggcctgtactctctgagcagcgtggtcacagtgcctagctctagcctgggcacccagacctacatctgcaatgtgaaccacaagcctagcaacaccaaggtggacaagagagtggaacccaagagctgtatccccgaggacacattcttcccaagccccgagagcagctgcgacgtgaagctggtggaaaagagcttcgagacagacaccaacctgaacttccagaacctgagcgtgatcggcttcagaatcctgctgctgaaagtggccggctttaacctgctgatgaccctgcggctgtggtccagc

SEQ ID NO: 6043 - DNA, 1353 bp, synthetic construct
  source 1..1353: mol_type = other DNA
atggccttaccagtgaccgccttgctcctgccgctggccttgctgctccacgccgccaggccggacatcgtgatgacacagagccctgatagcctggccgtgtctctgggagagagagccaccattaactgcaaggccagccagagcgtggactacgacggcgacagcttcctgaactggtatcagcagaagcccggccagcctcctaagctgctgatctacgccgccagcaatctggaaagcggcgtgccaagcagattttccggctctggcagcggcaccgatttcaccctgacaatatccagcctccagcctgaggacgtggccgtgtactactgccagcagagcaacgacgaccctctgacctttggacagggcaccaaggtggaaatcaaaggcggaggcggaagtggaggcggaggatctggcggcggaggctctgaagtccaacttgtggagtctggagggggcctggtgcagcccggcggctctctcagactgtcttgtgcggcaagcggctacaccttcacctcttactggatagaatgggtgaggcaggcacctggaaagggactggagtggattggagagattctgccaggagggggagatacaaattacaatgaaatcttcaaggggcgggccaccttttcagcggataccagcaagaatacagcttacctgcagatgaatagcctccgggcagaagataccgctgtttattattgcacgagacgggtgccaataagactggactattgggggcaagggactcttgtcaccgtcagttcaacgcgtgacggtaacgaggagatgggaggaatcactcaaaccccttacaaagtctcaatttcaggaacaactgttatccttacatgtccccagtatcctggcagcgagatcctttggcagcataacgacaagaatatagggggagatgaagacgataagaatatcggatctgacgaggatcacttgagcctgaaagagttctccgagcttgaacaaagcggatattatgtgtgctatccgcgcgggtcaaagccggaagacgctaacttttacctttatctccgagccagagtgtgcgaaaattgcatggaaatggacgttatgtccgttgctacaatagttatcgtagatatatgcatcacgggtggactgcttctgctggtttattattggtccaagaatagaaaggccaaagctaaacccgtgaccagaggcgctggcgcaggcggaaggcaaaggggacaaaacaaagaacggccaccaccagtgccaaatccagattatgagcctattcggaaaggacagagggacctgtactctggcctgaatcagagaagaatc

SEQ ID NO: 6044 - DNA, 1248 bp, synthetic construct
  source 1..1248: mol_type = other DNA
atggccttaccagtgaccgccttgctcctgccgctggccttgctgctccacgccgccaggccggacatcgtgatgacacagagccctgatagcctggccgtgtctctgggagagagagccaccattaactgcaaggccagccagagcgtggactacgacggcgacagcttcctgaactggtatcagcagaagcccggccagcctcctaagctgctgatctacgccgccagcaatctggaaagcggcgtgccaagcagattttccggctctggcagcggcaccgatttcaccctgacaatatccagcctccagcctgaggacgtggccgtgtactactgccagcagagcaacgacgaccctctgacctttggacagggcaccaaggtggaaatcaaaggcggaggcggaagtggaggcggaggatctggcggcggaggctctgaagtccaacttgtggagtctggagggggcctggtgcagcccggcggctctctcagactgtcttgtgcggcaagcggctacaccttcacctcttactggatagaatgggtgaggcaggcacctggaaagggactggagtggattggagagattctgccaggagggggagatacaaattacaatgaaatcttcaaggggcgggccaccttttcagcggataccagcaagaatacagcttacctgcagatgaatagcctccgggcagaagataccgctgtttattattgcacgagacgggtgccaataagactggactattgggggcaagggactcttgtcaccgtcagttcaacgcgtttcaagatccccatcgaggaactggaagatcgggtgttcgtgaactgcaacacctctatcacctgggtggaaggcaccgtgggaacactgctgagcgacatcaccagactggacctcggcaagcggattctggaccctcggggcatctacagatgcaacggcaccgacatctacaaggacaaagaaagcaccgtgcaggtccactacagaatgtgccagtcctgcgtggaactggaccctgctacagtggccggcatcatcgtgaccgatgtgatcgctactctgctgctggctctgggagtgttctgcttcgccggacacgaaacaggcagactgtctggcgctgccgatacacaggccctgctgagaaacgaccaagtgtatcagcccctgcgcgacagagatgatgcccagtattctcacctcggcggcaactgggctagaaacaag

SEQ ID NO: 6045 - DNA, 1278 bp, synthetic construct
  source 1..1278: mol_type = other DNA
atggccttaccagtgaccgccttgctcctgccgctggccttgctgctccacgccgccaggccggacatcgtgatgacacagagccctgatagcctggccgtgtctctgggagagagagccaccattaactgcaaggccagccagagcgtggactacgacggcgacagcttcctgaactggtatcagcagaagcccggccagcctcctaagctgctgatctacgccgccagcaatctggaaagcggcgtgccaagcagattttccggctctggcagcggcaccgatttcaccctgacaatatccagcctccagcctgaggacgtggccgtgtactactgccagcagagcaacgacgaccctctgacctttggacagggcaccaaggtggaaatcaaaggcggaggcggaagtggaggcggaggatctggcggcggaggctctgaagtccaacttgtggagtctggagggggcctggtgcagcccggcggctctctcagactgtcttgtgcggcaagcggctacaccttcacctcttactggatagaatgggtgaggcaggcacctggaaagggactggagtggattggagagattctgccaggagggggagatacaaattacaatgaaatcttcaaggggcgggccaccttttcagcggataccagcaagaatacagcttacctgcagatgaatagcctccgggcagaagataccgctgtttattattgcacgagacgggtgccaataagactggactattgggggcaagggactcttgtcaccgtcagttcaacgcgtcagagcatcaagggcaaccacctggtcaaggtgtacgactaccaagaggacggcagcgtgctgctgacatgtgatgccgaggccaagaacatcacctggtttaaggacggcaagatgatcggcttcctgaccgaggacaagaagaagtggaacctgggcagcaacgctaaggaccccagaggcatgtatcagtgcaagggcagccagaacaagagcaagcccctccaggtgtactaccggatgtgccagaactgcatcgagctgaacgccgctaccatcagcggctttctgttcgccgagatcgtgtccatcttcgtgctggccgtgggcgtgtactttatcgctggacaggatggcgtgcggcagagcagagcttccgataagcaaaccctgctgcctaacgaccagctgtaccagcctctgaaggacagagaggacgaccagtacagccacctccagggcaatcagctgagaagaaac

SEQ ID NO: 6046 - DNA, 1227 bp, synthetic construct
  source 1..1227: mol_type = other DNA
atggccttaccagtgaccgccttgctcctgccgctggccttgctgctccacgccgccaggccggacatcgtgatgacacagagccctgatagcctggccgtgtctctgggagagagagccaccattaactgcaaggccagccagagcgtggactacgacggcgacagcttcctgaactggtatcagcagaagcccggccagcctcctaagctgctgatctacgccgccagcaatctggaaagcggcgtgccaagcagattttccggctctggcagcggcaccgatttcaccctgacaatatccagcctccagcctgaggacgtggccgtgtactactgccagcagagcaacgacgaccctctgacctttggacagggcaccaaggtggaaatcaaaggcggaggcggaagtggaggcggaggatctggcggcggaggctctgaagtccaacttgtggagtctggagggggcctggtgcagcccggcggctctctcagactgtcttgtgcggcaagcggctacaccttcacctcttactggatagaatgggtgaggcaggcacctggaaagggactggagtggattggagagattctgccaggagggggagatacaaattacaatgaaatcttcaaggggcgggccaccttttcagcggataccagcaagaatacagcttacctgcagatgaatagcctccgggcagaagataccgctgtttattattgcacgagacgggtgccaataagactggactattgggggcaagggactcttgtcaccgtcagttcaacgcgtcagagttttgggttgttggaccctaaattgtgctatctgttggacggaatcctgttcatttacggagtgatcctgaccgcattgttcctgcgggttaagttttccagatccgcagacgcacccgcttaccaacaagggcagaaccaactctacaatgaacttaatttggggcggagggaagagtacgacgttctggacaaaaggaggggacgagatcccgagatgggcggaaagcctcagcgaaggaagaatccgcaagaggggctttataacgaactccagaaagataaaatggcagaagcctatagtgagattgggatgaagggagaaaggaggaggggtaaaggtcacgatgggttgtaccaaggattgagcacagccactaaagatacctatgatgcgctccacatgcaggccctgccgccaaga

SEQ ID NO: 6047 - DNA, 1512 bp, synthetic construct
  source 1..1512: mol_type = other DNA
atggccttaccagtgaccgccttgctcctgccgctggccttgctgctccacgccgccaggccggacatcgtgatgacacagagccctgatagcctggccgtgtctctgggagagagagccaccattaactgcaaggccagccagagcgtggactacgacggcgacagcttcctgaactggtatcagcagaagcccggccagcctcctaagctgctgatctacgccgccagcaatctggaaagcggcgtgccaagcagattttccggctctggcagcggcaccgatttcaccctgacaatatccagcctccagcctgaggacgtggccgtgtactactgccagcagagcaacgacgaccctctgacctttggacagggcaccaaggtggaaatcaaaggcggaggcggaagtggaggcggaggatctggcggcggaggctctgaagtccaacttgtggagtctggagggggcctggtgcagcccggcggctctctcagactgtcttgtgcggcaagcggctacaccttcacctcttactggatagaatgggtgaggcaggcacctggaaagggactggagtggattggagagattctgccaggagggggagatacaaattacaatgaaatcttcaaggggcgggccaccttttcagcggataccagcaagaatacagcttacctgcagatgaatagcctccgggcagaagataccgctgtttattattgcacgagacgggtgccaataagactggactattgggggcaagggactcttgtcaccgtcagttcaacgcgtggaatgaggactgaggatcttcccaaagctgtcgtctttctcgaaccccaatggtatcgggtgctcgaaaaagactctgtgacactgaaatgccaaggggcctactctcccgaggacaactccacacagtggtttcataatgagtccctcatcagctctcaggccagctcttatttcattgatgccgctacagtggacgactccggcgagtatcggtgtcagaccaatctgtctacactgtctgaccccgtgcagcttgaggtccacattggatggttgctcttgcaagccccacgctgggttttcaaagaggaagatccaatccatctgcggtgccacagctggaaaaacaccgctctccacaaagtcacatacctgcaaaatggcaaaggacgcaaatacttccatcacaattccgatttttacattccgaaggctaccctgaaagacagcggcagctatttctgccggggactcgtcggctccaagaatgtgtcctccgaaaccgtgaatatcacgattacccaaggactggctgtgcctacaatctctagcttctttccgcctggataccaagtctccttctgtcttgtgatggtcctcctgtttgctgtggacacaggactgtacttttccgtgaaaacgaacatccgcagctccacacgcgattggaaagatcacaagtttaaatggcgcaaagatccccaggacaag

SEQ ID NO: 6048 - DNA, 1437 bp, synthetic construct
  source 1..1437: mol_type = other DNA
atggccttaccagtgaccgccttgctcctgccgctggccttgctgctccacgccgccaggccggacatcgtgatgacacagagccctgatagcctggccgtgtctctgggagagagagccaccattaactgcaaggccagccagagcgtggactacgacggcgacagcttcctgaactggtatcagcagaagcccggccagcctcctaagctgctgatctacgccgccagcaatctggaaagcggcgtgccaagcagattttccggctctggcagcggcaccgatttcaccctgacaatatccagcctccagcctgaggacgtggccgtgtactactgccagcagagcaacgacgaccctctgacctttggacagggcaccaaggtggaaatcaaaggcggaggcggaagtggaggcggaggatctggcggcggaggctctgaagtccaacttgtggagtctggagggggcctggtgcagcccggcggctctctcagactgtcttgtgcggcaagcggctacaccttcacctcttactggatagaatgggtgaggcaggcacctggaaagggactggagtggattggagagattctgccaggagggggagatacaaattacaatgaaatcttcaaggggcgggccaccttttcagcggataccagcaagaatacagcttacctgcagatgaatagcctccgggcagaagataccgctgtttattattgcacgagacgggtgccaataagactggactattgggggcaagggactcttgtcaccgtcagttcaacgcgtggaatgaggactgaggatcttcccaaagctgtcgtctttctcgaaccccaatggtatcgggtgctcgaaaaagactctgtgacactgaaatgccaaggggcctactctcccgaggacaactccacacagtggtttcataatgagtccctcatcagctctcaggccagctcttatttcattgatgccgctacagtggacgactccggcgagtatcggtgtcagaccaatctgtctacactgtctgaccccgtgcagcttgaggtccacattggatggttgctcttgcaagccccacgctgggttttcaaagaggaagatccaatccatctgcggtgccacagctggaaaaacaccgctctccacaaagtcacatacctgcaaaatggcaaaggacgcaaatacttccatcacaattccgatttttacattccgaaggctaccctgaaagacagcggcagctatttctgccggggactcgtcggctccaagaatgtgtcctccgaaaccgtgaatatcacgattacccaaggactggctgtgcctacaatctctagcttctttccgcctggataccaagtctccttctgtcttgtgatggtcctcctgtttgctgtggacacaggactgtacttttccgtg

SEQ ID NO: 6049 - DNA, 1440 bp, synthetic construct
  source 1..1440: mol_type = other DNA
atggccttaccagtgaccgccttgctcctgccgctggccttgctgctccacgccgccaggccggacatcgtgatgacacagagccctgatagcctggccgtgtctctgggagagagagccaccattaactgcaaggccagccagagcgtggactacgacggcgacagcttcctgaactggtatcagcagaagcccggccagcctcctaagctgctgatctacgccgccagcaatctggaaagcggcgtgccaagcagattttccggctctggcagcggcaccgatttcaccctgacaatatccagcctccagcctgaggacgtggccgtgtactactgccagcagagcaacgacgaccctctgacctttggacagggcaccaaggtggaaatcaaaggcggaggcggaagtggaggcggaggatctggcggcggaggctctgaagtccaacttgtggagtctggagggggcctggtgcagcccggcggctctctcagactgtcttgtgcggcaagcggctacaccttcacctcttactggatagaatgggtgaggcaggcacctggaaagggactggagtggattggagagattctgccaggagggggagatacaaattacaatgaaatcttcaaggggcgggccaccttttcagcggataccagcaagaatacagcttacctgcagatgaatagcctccgggcagaagataccgctgtttattattgcacgagacgggtgccaataagactggactattgggggcaagggactcttgtcaccgtcagttcaacgcgtggaatgaggactgaggatcttcccaaagctgtcgtctttctcgaaccccaatggtatcgggtgctcgaaaaagactctgtgacactgaaatgccaaggggcctactctcccgaggacaactccacacagtggtttcataatgagtccctcatcagctctcaggccagctcttatttcattgatgccgctacagtggacgactccggcgagtatcggtgtcagaccaatctgtctacactgtctgaccccgtgcagcttgaggtccacattggatggttgctcttgcaagccccacgctgggttttcaaagaggaagatccaatccatctgcggtgccacagctggaaaaacaccgctctccacaaagtcacatacctgcaaaatggcaaaggacgcaaatacttccatcacaattccgatttttacattccgaaggctaccctgaaagacagcggcagctatttctgccggggactcgtcggctccaagaatgtgtcctccgaaaccgtgaatatcacgattacccaaggactggctgtgcctacaatctctagcttctttccgcctggataccaagtctccttctgtcttgtgatggtcctcctgtttgctgtggacacaggactgtacttttccgtgaaa

SEQ ID NO: 6050 - DNA, 2169 bp, synthetic construct
  source 1..2169: mol_type = other DNA
atggccttaccagtgaccgccttgctcctgccgctggccttgctgctccacgccgccaggccggacatcgtgatgacacagagccctgatagcctggccgtgtctctgggagagagagccaccattaactgcaaggccagccagagcgtggactacgacggcgacagcttcctgaactggtatcagcagaagcccggccagcctcctaagctgctgatctacgccgccagcaatctggaaagcggcgtgccaagcagattttccggctctggcagcggcaccgatttcaccctgacaatatccagcctccagcctgaggacgtggccgtgtactactgccagcagagcaacgacgaccctctgacctttggacagggcaccaaggtggaaatcaaactcgagggacagcctaaggccaatcctaccgtgacactgttccctccaagcagcgaagaactccaggccaacaaggccacacttgtgtgcctgatctccgacttctaccctggggctgtgacagtggcttggaaggccgatggatctcctgtgaaagccggcgtggaaaccaccaagccatccaagcagagcaacaacaaatacgccgccagctcctacctgagcctgacacctgagcagtggaagtcccacagatcctacagctgccaagtgacccacgaaggcagcaccgtggaaaagacagtggcccctacagagtgcagcggatcccagagcttcggcctgctggaccccaagctgtgctacctgctggatggcatcctgttcatctacggcgtgatcctgaccgccctgttcctgagagtgaagttcagcagaagcgccgacgcccctgcctaccagcagggacagaaccaactgtacaacgagctgaacctgggcagacgggaagagtacgacgtgctggacaagcggagaggcagggaccctgagatgggcggaaagccccagcggagaaagaacccccaggaaggactgtataacgaactccagaaagacaagatggccgaagcctacagcgagatcggcatgaagggcgagcggagaagaggcaagggccacgatggcctgtaccagggcctgagcaccgccaccaaggacacctatgacgccctgcacatgcaggccctgcctccaagaagggccaagcgatctggatctggagcaacaaacttctcactactcaaacaagcaggtgacgtggaggagaatcccgggcctactagtatggactggatttggcgcatccttttccttgtcggcgctgctaccggcgcgcattccttcgaagtccaacttgtggagtctggagggggcctggtgcagcccggcggctctctcagactgtcttgtgcggcaagcggctacaccttcacctcttactggatagaatgggtgaggcaggcacctggaaagggactggagtggattggagagattctgccaggagggggagatacaaattacaatgaaatcttcaaggggcgggccaccttttcagcggataccagcaagaatacagcttacctgcagatgaatagcctccgggcagaagataccgctgtttattattgcacgagacgggtgccaataagactggactattgggggcaagggactcttgtcaccgtcagttcaacgcgtgcctctacaaagggaccctccgtgtttcctctggctcccagcagcaagtctacaagcggaggaacagccgctctgggctgcctggtcaaggattactttcccgagcctgtgaccgtgtcctggaatagcggagcactgacaagcggcgtgcacacctttccagccgtgctgcaaagcagcggcctgtactctctgagcagcgtggtcacagtgcctagctctagcctgggcacccagacctacatctgcaatgtgaaccacaagcctagcaacaccaaggtggacaagagagtggaacccaagagctgtggtaccatcactcaaggtttggcagtgtcaaccatctcatcattctttccacctggctaccaagtgtccttctgcctggtcatggtgctgctgttcgccgtggataccggcctgtacttcagcgtcaagaccaacatccggtccagcaccagagactggaaggaccacaagttcaagtggcggaaggaccctcaggacaag

SEQ ID NO: 6051 - DNA, 2214 bp, synthetic construct; identical to SEQ ID NO: 4670
  source 1..2214: mol_type = other DNA

SEQ ID NO: 6052 - DNA, 2139 bp, synthetic construct
  source 1..2139: mol_type = other DNA
atggccttaccagtgaccgccttgctcctgccgctggccttgctgctccacgccgccaggccggacatcgtgatgacacagagccctgatagcctggccgtgtctctgggagagagagccaccattaactgcaaggccagccagagcgtggactacgacggcgacagcttcctgaactggtatcagcagaagcccggccagcctcctaagctgctgatctacgccgccagcaatctggaaagcggcgtgccaagcagattttccggctctggcagcggcaccgatttcaccctgacaatatccagcctccagcctgaggacgtggccgtgtactactgccagcagagcaacgacgaccctctgacctttggacagggcaccaaggtggaaatcaaactcgaggacctgaagaacgtgttcccacctgaggtggccgtgttcgagcctagcgaggccgagatcagccacacccagaaagccaccctcgtgtgcctggctaccggcttctaccccgaccatgtggaactgtcttggtgggtcaacggcaaagaggtgcacagcggcgtgtctaccgacccccagccactgaaagaacagcccgccctgaacgacagccggtactgcctgagcagcagactgagagtgtccgccaccttctggcagaacccccggaaccacttcagatgccaggtgcagttctacggcctgagcgagaacgacgagtggacccaggacagagccaagcccgtgacccagatcgtgtctgccgaagcctggggcagagccgattgcggatcccagagcttcggcctgctggaccccaagctgtgctacctgctggatggcatcctgttcatctacggcgtgatcctgaccgccctgttcctgagagtgaagttcagcagaagcgccgacgcccctgcctaccagcagggacagaaccaactgtacaacgagctgaacctgggcagacgggaagagtacgacgtgctggacaagcggagaggcagggaccctgagatgggcggaaagccccagcggagaaagaacccccaggaaggactgtataacgaactccagaaagacaagatggccgaagcctacagcgagatcggcatgaagggcgagcggagaagaggcaagggccacgatggcctgtaccagggcctgagcaccgccaccaaggacacctatgacgccctgcacatgcaggccctgcctccaagaagggccaagcgatctggatctggagcaacaaacttctcactactcaaacaagcaggtgacgtggaggagaatcccgggcctactagtatggactggatttggcgcatccttttccttgtcggcgctgctaccggcgcgcattccttcgaagtccaacttgtggagtctggagggggcctggtgcagcccggcggctctctcagactgtcttgtgcggcaagcggctacaccttcacctcttactggatagaatgggtgaggcaggcacctggaaagggactggagtggattggagagattctgccaggagggggagatacaaattacaatgaaatcttcaaggggcgggccaccttttcagcggataccagcaagaatacagcttacctgcagatgaatagcctccgggcagaagataccgctgtttattattgcacgagacgggtgccaataagactggactattgggggcaagggactcttgtcaccgtcagttcaacgcgtatccagaaccctgatcctgccgtgtaccagctgcgggatagcaagagcagcgacaagagcgtgtgtctgttcaccgacttcgacagccagaccaacgtgtcccagagcaaggactccgacgtgtacatcaccgataagaccgtgctggacatgcggagcatggacttcaagagcaactccgccgtggcctggtccaacaagtccgatttcgcctgcgccaacgccttcaacaacagcattatccccgaggacacattcttcccaagccccgagagcagctgcggtaccatcactcaaggtttggcagtgtcaaccatctcatcattctttccacctggctaccaagtgtccttctgcctggtcatggtgctgctgttcgccgtggataccggcctgtacttcagcgtc

SEQ ID NO: 6053 - DNA, 2142 bp, synthetic construct
  source 1..2142: mol_type = other DNA
atggccttaccagtgaccgccttgctcctgccgctggccttgctgctccacgccgccaggccggacatcgtgatgacacagagccctgatagcctggccgtgtctctgggagagagagccaccattaactgcaaggccagccagagcgtggactacgacggcgacagcttcctgaactggtatcagcagaagcccggccagcctcctaagctgctgatctacgccgccagcaatctggaaagcggcgtgccaagcagattttccggctctggcagcggcaccgatttcaccctgacaatatccagcctccagcctgaggacgtggccgtgtactactgccagcagagcaacgacgaccctctgacctttggacagggcaccaaggtggaaatcaaactcgaggacctgaagaacgtgttcccacctgaggtggccgtgttcgagcctagcgaggccgagatcagccacacccagaaagccaccctcgtgtgcctggctaccggcttctaccccgaccatgtggaactgtcttggtgggtcaacggcaaagaggtgcacagcggcgtgtctaccgacccccagccactgaaagaacagcccgccctgaacgacagccggtactgcctgagcagcagactgagagtgtccgccaccttctggcagaacccccggaaccacttcagatgccaggtgcagttctacggcctgagcgagaacgacgagtggacccaggacagagccaagcccgtgacccagatcgtgtctgccgaagcctggggcagagccgattgcggatcccagagcttcggcctgctggaccccaagctgtgctacctgctggatggcatcctgttcatctacggcgtgatcctgaccgccctgttcctgagagtgaagttcagcagaagcgccgacgcccctgcctaccagcagggacagaaccaactgtacaacgagctgaacctgggcagacgggaagagtacgacgtgctggacaagcggagaggcagggaccctgagatgggcggaaagccccagcggagaaagaacccccaggaaggactgtataacgaactccagaaagacaagatggccgaagcctacagcgagatcggcatgaagggcgagcggagaagaggcaagggccacgatggcctgtaccagggcctgagcaccgccaccaaggacacctatgacgccctgcacatgcaggccctgcctccaagaagggccaagcgatctggatctggagcaacaaacttctcactactcaaacaagcaggtgacgtggaggagaatcccgggcctactagtatggactggatttggcgcatccttttccttgtcggcgctgctaccggcgcgcattccttcgaagtccaacttgtggagtctggagggggcctggtgcagcccggcggctctctcagactgtcttgtgcggcaagcggctacaccttcacctcttactggatagaatgggtgaggcaggcacctggaaagggactggagtggattggagagattctgccaggagggggagatacaaattacaatgaaatcttcaaggggcgggccaccttttcagcggataccagcaagaatacagcttacctgcagatgaatagcctccgggcagaagataccgctgtttattattgcacgagacgggtgccaataagactggactattgggggcaagggactcttgtcaccgtcagttcaacgcgtatccagaaccctgatcctgccgtgtaccagctgcgggatagcaagagcagcgacaagagcgtgtgtctgttcaccgacttcgacagccagaccaacgtgtcccagagcaaggactccgacgtgtacatcaccgataagaccgtgctggacatgcggagcatggacttcaagagcaactccgccgtggcctggtccaacaagtccgatttcgcctgcgccaacgccttcaacaacagcattatccccgaggacacattcttcccaagccccgagagcagctgcggtaccatcactcaaggtttggcagtgtcaaccatctcatcattctttccacctggctaccaagtgtccttctgcctggtcatggtgctgctgttcgccgtggataccggcctgtacttcagcgtcaag

SEQ ID NO: 6054 - DNA, 2145 bp, synthetic construct
  source 1..2145: mol_type = other DNA
atggccttaccagtgaccgccttgctcctgccgctggccttgctgctccacgccgccaggccggacatcgtgatgacacagagccctgatagcctggccgtgtctctgggagagagagccaccattaactgcaaggccagccagagcgtggactacgacggcgacagcttcctgaactggtatcagcagaagcccggccagcctcctaagctgctgatctacgccgccagcaatctggaaagcggcgtgccaagcagattttccggctctggcagcggcaccgatttcaccctgacaatatccagcctccagcctgaggacgtggccgtgtactactgccagcagagcaacgacgaccctctgacctttggacagggcaccaaggtggaaatcaaactcgaggacctgaagaacgtgttcccacctgaggtggccgtgttcgagcctagcgaggccgagatcagccacacccagaaagccaccctcgtgtgcctggctaccggcttctaccccgaccatgtggaactgtcttggtgggtcaacggcaaagaggtgcacagcggcgtgtctaccgacccccagccactgaaagaacagcccgccctgaacgacagccggtactgcctgagcagcagactgagagtgtccgccaccttctggcagaacccccggaaccacttcagatgccaggtgcagttctacggcctgagcgagaacgacgagtggacccaggacagagccaagcccgtgacccagatcgtgtctgccgaagcctggggcagagccgattgcggatcccagagcttcggcctgctggaccccaagctgtgctacctgctggatggcatcctgttcatctacggcgtgatcctgaccgccctgttcctgagagtgaagttcagcagaagcgccgacgcccctgcctaccagcagggacagaaccaactgtacaacgagctgaacctgggcagacgggaagagtacgacgtgctggacaagcggagaggcagggaccctgagatgggcggaaagccccagcggagaaagaacccccaggaaggactgtataacgaactccagaaagacaagatggccgaagcctacagcgagatcggcatgaagggcgagcggagaagaggcaagggccacgatggcctgtaccagggcctgagcaccgccaccaaggacacctatgacgccctgcacatgcaggccctgcctccaagaagggccaagcgatctggatctggagcaacaaacttctcactactcaaacaagcaggtgacgtggaggagaatcccgggcctactagtatggactggatttggcgcatccttttccttgtcggcgctgctaccggcgcgcattccttcgaagtccaacttgtggagtctggagggggcctggtgcagcccggcggctctctcagactgtcttgtgcggcaagcggctacaccttcacctcttactggatagaatgggtgaggcaggcacctggaaagggactggagtggattggagagattctgccaggagggggagatacaaattacaatgaaatcttcaaggggcgggccaccttttcagcggataccagcaagaatacagcttacctgcagatgaatagcctccgggcagaagataccgctgtttattattgcacgagacgggtgccaataagactggactattgggggcaagggactcttgtcaccgtcagttcaacgcgtatccagaaccctgatcctgccgtgtaccagctgcgggatagcaagagcagcgacaagagcgtgtgtctgttcaccgacttcgacagccagaccaacgtgtcccagagcaaggactccgacgtgtacatcaccgataagaccgtgctggacatgcggagcatggacttcaagagcaactccgccgtggcctggtccaacaagtccgatttcgcctgcgccaacgccttcaacaacagcattatccccgaggacacattcttcccaagccccgagagcagctgcggtaccatcactcaaggtttggcagtgtcaaccatctcatcattctttccacctggctaccaagtgtccttctgcctggtcatggtgctgctgttcgccgtggataccggcctgtacttcagcgtcaagacc

SEQ ID NO: 6055 - DNA, 1956 bp, synthetic construct
  source 1..1956: mol_type = other DNA
atggccttaccagtgaccgccttgctcctgccgctggccttgctgctccacgccgccaggccggacatcgtgatgacacagagccctgatagcctggccgtgtctctgggagagagagccaccattaactgcaaggccagccagagcgtggactacgacggcgacagcttcctgaactggtatcagcagaagcccggccagcctcctaagctgctgatctacgccgccagcaatctggaaagcggcgtgccaagcagattttccggctctggcagcggcaccgatttcaccctgacaatatccagcctccagcctgaggacgtggccgtgtactactgccagcagagcaacgacgaccctctgacctttggacagggcaccaaggtggaaatcaaactcgagggacagcctaaggccaatcctaccgtgacactgttccctccaagcagcgaagaactccaggccaacaaggccacacttgtgtgcctgatctccgacttctaccctggggctgtgacagtggcttggaaggccgatggatctcctgtgaaagccggcgtggaaaccaccaagccatccaagcagagcaacaacaaatacgccgccagctcctacctgagcctgacacctgagcagtggaagtcccacagatcctacagctgccaagtgacccacgaaggcagcaccgtggaaaagacagtggcccctacagagtgcagcggatccctgggagagcctcagctgtgctatatcctggacgccatcctgtttctgtacggcatcgtgctgaccctgctgtactgccggctgaagatccaagtgcggaaggccgccatcaccagctacgagaaatccgacggcgtgtacaccggcctgagcaccagaaatcaagagacatacgagacactgaagcacgaaaagcctccacaaagggccaagcgatctggatctggagcaacaaacttctcactactcaaacaagcaggtgacgtggaggagaatcccgggcctactagtatggactggatttggcgcatccttttccttgtcggcgctgctaccggcgcgcattccttcgaagtccaacttgtggagtctggagggggcctggtgcagcccggcggctctctcagactgtcttgtgcggcaagcggctacaccttcacctcttactggatagaatgggtgaggcaggcacctggaaagggactggagtggattggagagattctgccaggagggggagatacaaattacaatgaaatcttcaaggggcgggccaccttttcagcggataccagcaagaatacagcttacctgcagatgaatagcctccgggcagaagataccgctgtttattattgcacgagacgggtgccaataagactggactattgggggcaagggactcttgtcaccgtcagttcaacgcgtgcctctacaaagggaccctccgtgtttcctctggctcccagcagcaagtctacaagcggaggaacagccgctctgggctgcctggtcaaggattactttcccgagcctgtgaccgtgtcctggaatagcggagcactgacaagcggcgtgcacacctttccagccgtgctgcaaagcagcggcctgtactctctgagcagcgtggtcacagtgcctagctctagcctgggcacccagacctacatctgcaatgtgaaccacaagcctagcaacaccaaggtggacaagagagtggaacccaagagctgtggtaccctcggagaaccacagctctgttacattctggatgctatcctgttcctctatgggatcgtcctgacactcctgtattgcagactcaaaattcaagttcgcaaagccgccattacctcttacgagaagagtgatggggtgtacacaggactgtctacccggaatcaagaaacctacgaaaccctcaaacatgagaagccacctcagtaa

SEQ ID NO: 6056 - DNA, 1863 bp, synthetic construct
  source 1..1863: mol_type = other DNA
atggccttaccagtgaccgccttgctcctgccgctggccttgctgctccacgccgccaggccggacatcgtgatgacacagagccctgatagcctggccgtgtctctgggagagagagccaccattaactgcaaggccagccagagcgtggactacgacggcgacagcttcctgaactggtatcagcagaagcccggccagcctcctaagctgctgatctacgccgccagcaatctggaaagcggcgtgccaagcagattttccggctctggcagcggcaccgatttcaccctgacaatatccagcctccagcctgaggacgtggccgtgtactactgccagcagagcaacgacgaccctctgacctttggacagggcaccaaggtggaaatcaaactcgaggacctgaagaacgtgttcccacctgaggtggccgtgttcgagcctagcgaggccgagatcagccacacccagaaagccaccctcgtgtgcctggctaccggcttctaccccgaccatgtggaactgtcttggtgggtcaacggcaaagaggtgcacagcggcgtgtgtaccgacccccagccactgaaagaacagcccgccctgaacgacagccggtactgcctgagcagcagactgagagtgtccgccaccttctggcagaacccccggaaccacttcagatgccaggtgcagttctacggcctgagcgagaacgacgagtggacccaggacagagccaagcccgtgacccagatcgtgtctgccgaagcctggggcagagccgattgcggctttaccagcgagagctaccagcagggcgtgctgagcgcctactacatgtacttgttgctgctgctgaagtccgtggtgtacttcgccatcatcacatgctgcctgctgcggagaaccgccttctgctgcaacggcgagaagtctagggccaagcgatctggatctggagcaacaaacttctcactactcaaacaagcaggtgacgtggaggagaatcccgggcctactagtatggactggatttggcgcatccttttccttgtcggcgctgctaccggcgcgcattccttcgaagtccaacttgtggagtctggagggggcctggtgcagcccggcggctctctcagactgtcttgtgcggcaagcggctacaccttcacctcttactggatagaatgggtgaggcaggcacctggaaagggactggagtggattggagagattctgccaggagggggagatacaaattacaatgaaatcttcaaggggcgggccaccttttcagcggataccagcaagaatacagcttacctgcagatgaatagcctccgggcagaagataccgctgtttattattgcacgagacgggtgccaataagactggactattgggggcaagggactcttgtcaccgtcagttcaacgcgtatccagaaccctgatcctgccgtgtaccagctgcgggatagcaagagcagcgacaagagcgtgtgtctgttcaccgacttcgacagccagaccaacgtgtcccagagcaaggactccgacgtgtacatcaccgataagtgcgtgctggacatgcggagcatggacttcaagagcaactccgccgtggcctggtccaacaagtccgatttcgcctgcgccaacgccttcaacaacagcattatccccgaggacacattcttcccaagccccgagagcagctgcgacgtgaagctggtggaaaagagcttcgagacagacaccaacctgaacttccagaacctgagcgtgatcggcttcagaatcctgctgctgaaagtggccggctttaacctgctgatgaccctgcggctgtggtccagc

SEQ ID NO: 6057 - DNA, 1884 bp, synthetic construct
  source 1..1884: mol_type = other DNA
atggccttaccagtgaccgccttgctcctgccgctggccttgctgctccacgccgccaggccggacatcgtgatgacacagagccctgatagcctggccgtgtctctgggagagagagccaccattaactgcaaggccagccagagcgtggactacgacggcgacagcttcctgaactggtatcagcagaagcccggccagcctcctaagctgctgatctacgccgccagcaatctggaaagcggcgtgccaagcagattttccggctctggcagcggcaccgatttcaccctgacaatatccagcctccagcctgaggacgtggccgtgtactactgccagcagagcaacgacgaccctctgacctttggacagggcaccaaggtggaaatcaaactcgaggacaagcagctggacgccgacgtgtcccccaagcctaccatcttcctgccctctatcgccgagacaaagctccagaaggccggcacctacctgtgcctgctggaaaagttcttcccagatgtgattaagatccactggcaggaaaagaagtccaacaccatcctgggcagccaggaaggcaacaccatgaagaccaacgacacctacatgaagttcagctggctgaccgtgcccgagaagtccctggacaaagaacacagatgcatcgtgcggcacgaaaacaacaagaacggcgtggaccaggaaatcatcttcccacccatcaagaccgatgtgattacaatggaccccaaggacaactgctccaaggacgccaacgataccctgctgctccagctgaccaacaccagcgcctactacatgtacgagatcctgctgggcaaggccaccctgtacgccgtgctggtgtctgccctggtgctgatggctatggtcaagcggaaggacagccggggaagggccaagcgatctggatctggagcaacaaacttctcactactcaaacaagcaggtgacgtggaggagaatcccgggcctactagtatggactggatttggcgcatccttttccttgtcggcgctgctaccggcgcgcattccttcgaagtccaacttgtggagtctggagggggcctggtgcagcccggcggctctctcagactgtcttgtgcggcaagcggctacaccttcacctcttactggatagaatgggtgaggcaggcacctggaaagggactggagtggattggagagattctgccaggagggggagatacaaattacaatgaaatcttcaaggggcgggccaccttttcagcggataccagcaagaatacagcttacctgcagatgaatagcctccgggcagaagataccgctgtttattattgcacgagacgggtgccaataagactggactattgggggcaagggactcttgtcaccgtcagttcaacgcgtagccagcctcacaccaagcccagcgtgttcgtgatgaagaacggcaccaacgtggcctgcctcgtgaaagagttctaccccaaggacatcaggatcaacctggtgtccagcaagaagatcaccgagttcgaccccgccatcgtgatctcccccagcggcaagtacaacgccgtgaagctggggaagtatgaggacagcaacagcgtgacctgctccgtgcagcacgacaacaagaccgtgcacagcaccgactttgaagtgaaaaccgactccaccgaccacgtgaagcccaaagagacagagaacaccaagcagcccagcaagagctgccacaagcccaaggccatcgtgcacaccgagaaagtgaacatgatgagcctgaccgtgatcggcttcagaatcctgctgctgaaagtggccggctttaacctgctgatgaccctgcggctgtggtccagctaa

SEQ ID NO: 6058 - DNA, 1884 bp, synthetic construct
  source 1..1884: mol_type = other DNA
atggccttaccagtgaccgccttgctcctgccgctggccttgctgctccacgccgccaggccggacatcgtgatgacacagagccctgatagcctggccgtgtctctgggagagagagccaccattaactgcaaggccagccagagcgtggactacgacggcgacagcttcctgaactggtatcagcagaagcccggccagcctcctaagctgctgatctacgccgccagcaatctggaaagcggcgtgccaagcagattttccggctctggcagcggcaccgatttcaccctgacaatatccagcctccagcctgaggacgtggccgtgtactactgccagcagagcaacgacgaccctctgacctttggacagggcaccaaggtggaaatcaaactcgaggacaagcagctggacgccgacgtgtcccccaagcctaccatcttcctgccctctatcgccgagacaaagctccagaaggccggcacctacctgtgcctgctggaaaagttcttcccagatgtgattaagatccactggcaggaaaagaagtccaacaccatcctgggcagccaggaaggcaacaccatgaagaccaacgacacctacatgaagttcagctggctgaccgtgcccgagaagtccctggacaaagaacacagatgcatcgtgcggcacgaaaacaacaagaacggcgtggaccaggaaatcatcttcccacccatcaagaccgatgtgattacaatggaccccaaggacaactgctccaaggacgccaacgataccctgctgctccagctgaccaacaccagcgccaccatcctgtacgagatcctgctgggcaaggccaccctgtacgccgtgctggtgtctgccctggtgctgatggctatggtcaagcggaaggacagccggggaagggccaagcgatctggatctggagcaacaaacttctcactactcaaacaagcaggtgacgtggaggagaatcccgggcctactagtatggactggatttggcgcatccttttccttgtcggcgctgctaccggcgcgcattccttcgaagtccaacttgtggagtctggagggggcctggtgcagcccggcggctctctcagactgtcttgtgcggcaagcggctacaccttcacctcttactggatagaatgggtgaggcaggcacctggaaagggactggagtggattggagagattctgccaggagggggagatacaaattacaatgaaatcttcaaggggcgggccaccttttcagcggataccagcaagaatacagcttacctgcagatgaatagcctccgggcagaagataccgctgtttattattgcacgagacgggtgccaataagactggactattgggggcaagggactcttgtcaccgtcagttcaacgcgtagccagcctcacaccaagcccagcgtgttcgtgatgaagaacggcaccaacgtggcctgcctcgtgaaagagttctaccccaaggacatcaggatcaacctggtgtccagcaagaagatcaccgagttcgaccccgccatcgtgatctcccccagcggcaagtacaacgccgtgaagctggggaagtatgaggacagcaacagcgtgacctgctccgtgcagcacgacaacaagaccgtgcacagcaccgactttgaagtgaaaaccgactccaccgaccacgtgaagcccaaagagacagagaacaccaagcagcccagcaagagctgccacaagcccaaggccatcgtgcacaccgagaaagtgaacatgatgagcctgaccgtgatcggcttcagaatcctgctgctgaaagtggccggctttaacctgctgatgaccctgcggctgtggtccagctaa

SEQ ID NO: 6059 - DNA, 1884 bp, synthetic construct
  source 1..1884: mol_type = other DNA
atggccttaccagtgaccgccttgctcctgccgctggccttgctgctccacgccgccaggccggacatcgtgatgacacagagccctgatagcctggccgtgtctctgggagagagagccaccattaactgcaaggccagccagagcgtggactacgacggcgacagcttcctgaactggtatcagcagaagcccggccagcctcctaagctgctgatctacgccgccagcaatctggaaagcggcgtgccaagcagattttccggctctggcagcggcaccgatttcaccctgacaatatccagcctccagcctgaggacgtggccgtgtactactgccagcagagcaacgacgaccctctgacctttggacagggcaccaaggtggaaatcaaactcgaggacaagcagctggacgccgacgtgtcccccaagcctaccatcttcctgccctctatcgccgagacaaagctccagaaggccggcacctacctgtgcctgctggaaaagttcttcccagatgtgattaagatccactggcaggaaaagaagtccaacaccatcctgggcagccaggaaggcaacaccatgaagaccaacgacacctacatgaagttcagctggctgaccgtgcccgagaagtccctggacaaagaacacagatgcatcgtgcggcacgaaaacaacaagaacggcgtggaccaggaaatcatcttcccacccatcaagaccgatgtgattacaatggaccccaaggacaactgctccaaggacgccaacgataccctgctgctccagctgaccaacaccagcgcctactacatgtacgagatcctgctgggcaaggccaccctgtacgccgtgctggtgtctgccctggtgctgatggctatggtcaagcggaaggacagccggggaagggccaagcgatctggatctggagcaacaaacttctcactactcaaacaagcaggtgacgtggaggagaatcccgggcctactagtatggactggatttggcgcatccttttccttgtcggcgctgctaccggcgcgcattccttcgaagtccaacttgtggagtctggagggggcctggtgcagcccggcggctctctcagactgtcttgtgcggcaagcggctacaccttcacctcttactggatagaatgggtgaggcaggcacctggaaagggactggagtggattggagagattctgccaggagggggagatacaaattacaatgaaatcttcaaggggcgggccaccttttcagcggataccagcaagaatacagcttacctgcagatgaatagcctccgggcagaagataccgctgtttattattgcacgagacgggtgccaataagactggactattgggggcaagggactcttgtcaccgtcagttcaacgcgtagccagcctcacaccaagcccagcgtgttcgtgatgaagaacggcaccaacgtggcctgcctcgtgaaagagttctaccccaaggacatcaggatcaacctggtgtccagcaagaagatcaccgagttcgaccccgccatcgtgatctcccccagcggcaagtacaacgccgtgaagctggggaagtacgaggacagcaacagcgtgacctgctccgtgcagcacgacaacaagaccgtgcacagcaccgactttgaagtgaaaaccgactccaccgaccacgtgaagcccaaagagacagagaacaccaagcagcccagcaagagctgccacaagcccaaggccatcgtgcacaccgagaaagtgaacatgatgagcctgaccgtgctgggcttcagaatcctgctgctgaaagtggccggctttaacctgctgatgaccctgcggctgtggtccagctaa

SEQ ID NO: 6060 - DNA, 1884 bp, synthetic construct
  source 1..1884: mol_type = other DNA
atggccttaccagtgaccgccttgctcctgccgctggccttgctgctccacgccgccaggccggacatcgtgatgacacagagccctgatagcctggccgtgtctctgggagagagagccaccattaactgcaaggccagccagagcgtggactacgacggcgacagcttcctgaactggtatcagcagaagcccggccagcctcctaagctgctgatctacgccgccagcaatctggaaagcggcgtgccaagcagattttccggctctggcagcggcaccgatttcaccctgacaatatccagcctccagcctgaggacgtggccgtgtactactgccagcagagcaacgacgaccctctgacctttggacagggcaccaaggtggaaatcaaactcgaggacaagcagctggacgccgacgtgtcccccaagcctaccatcttcctgccctctatcgccgagacaaagctccagaaggccggcacctacctgtgcctgctggaaaagttcttcccagatgtgattaagatccactggcaggaaaagaagtccaacaccatcctgggcagccaggaaggcaacaccatgaagaccaacgacacctacatgaagttcagctggctgaccgtgcccgagaagtccctggacaaagaacacagatgcatcgtgcggcacgaaaacaacaagaacggcgtggaccaggaaatcatcttcccacccatcaagaccgatgtgattacaatggaccccaaggacaactgctccaaggacgccaacgataccctgctgctccagctgaccaacaccagcgccaccatcctgtacgagatcctgctgggcaaggccaccctgtacgccgtgctggtgtctgccctggtgctgatggctatggtcaagcggaaggacagccggggaagggccaagcgatctggatctggagcaacaaacttctcactactcaaacaagcaggtgacgtggaggagaatcccgggcctactagtatggactggatttggcgcatccttttccttgtcggcgctgctaccggcgcgcattccttcgaagtccaacttgtggagtctggagggggcctggtgcagcccggcggctctctcagactgtcttgtgcggcaagcggctacaccttcacctcttactggatagaatgggtgaggcaggcacctggaaagggactggagtggattggagagattctgccaggagggggagatacaaattacaatgaaatcttcaaggggcgggccaccttttcagcggataccagcaagaatacagcttacctgcagatgaatagcctccgggcagaagataccgctgtttattattgcacgagacgggtgccaataagactggactattgggggcaagggactcttgtcaccgtcagttcaacgcgtagccagcctcacaccaagcccagcgtgttcgtgatgaagaacggcaccaacgtggcctgcctcgtgaaagagttctaccccaaggacatcaggatcaacctggtgtccagcaagaagatcaccgagttcgaccccgccatcgtgatctcccccagcggcaagtacaacgccgtgaagctggggaagtacgaggacagcaacagcgtgacctgctccgtgcagcacgacaacaagaccgtgcacagcaccgactttgaagtgaaaaccgactccaccgaccacgtgaagcccaaagagacagagaacaccaagcagcccagcaagagctgccacaagcccaaggccatcgtgcacaccgagaaagtgaacatgatgagcctgaccgtgctgggcttcagaatcctgctgctgaaagtggccggctttaacctgctgatgaccctgcggctgtggtccagctaa

SEQ ID NO: 6061 - DNA, 1866 bp, synthetic construct
  source 1..1866: mol_type = other DNA
atggccttaccagtgaccgccttgctcctgccgctggccttgctgctccacgccgccaggccggacatcgtgatgacacagagccctgatagcctggccgtgtctctgggagagagagccaccattaactgcaaggccagccagagcgtggactacgacggcgacagcttcctgaactggtatcagcagaagcccggccagcctcctaagctgctgatctacgccgccagcaatctggaaagcggcgtgccaagcagattttccggctctggcagcggcaccgatttcaccctgacaatatccagcctccagcctgaggacgtggccgtgtactactgccagcagagcaacgacgaccctctgacctttggacagggcaccaaggtggaaatcaaactcgaggacctgaagaacgtgttcccacctgaggtggccgtgttcgagcctagcgaggccgagatcagccacacccagaaagccaccctcgtgtgcctggctaccggcttctaccccgaccatgtggaactgtcttggtgggtcaacggcaaagaggtgcacagcggcgtgtgtaccgacccccagccactgaaagaacagcccgccctgaacgacagccggtactgcctgagcagcagactgagagtgtccgccaccttctggcagaacccccggaaccacttcagatgccaggtgcagttctacggcctgagcgagaacgacgagtggacccaggacagagccaagcccgtgacccagatcgtgtctgccgaagcctggggcagagccgattgcggctttaccagcgagagctaccagcagggcgtgctgagcgccaccatcctgtacttgttgctgctgctgaagtccgtggtgtacttcgccatcatcacatgctgcctgctgcggagaaccgccttctgctgcaacggcgagaagtctagggccaagcgatctggatctggagcaacaaacttctcactactcaaacaagcaggtgacgtggaggagaatcccgggcctactagtatggactggatttggcgcatccttttccttgtcggcgctgctaccggcgcgcattccttcgaagtccaacttgtggagtctggagggggcctggtgcagcccggcggctctctcagactgtcttgtgcggcaagcggctacaccttcacctcttactggatagaatgggtgaggcaggcacctggaaagggactggagtggattggagagattctgccaggagggggagatacaaattacaatgaaatcttcaaggggcgggccaccttttcagcggataccagcaagaatacagcttacctgcagatgaatagcctccgggcagaagataccgctgtttattattgcacgagacgggtgccaataagactggactattgggggcaagggactcttgtcaccgtcagttcaacgcgtatccagaaccctgatcctgccgtgtaccagctgcgggatagcaagagcagcgacaagagcgtgtgtctgttcaccgacttcgacagccagaccaacgtgtcccagagcaaggactccgacgtgtacatcaccgataagtgcgtgctggacatgcggagcatggacttcaagagcaactccgccgtggcctggtccaacaagtccgatttcgcctgcgccaacgccttcaacaacagcattatccccgaggacacattcttcccaagccccgagagcagctgcgacgtgaagctggtggaaaagagcttcgagacagacaccaacctgaacttccagaacctgagcgtgatcggcctgcggatgctgttcgccaaaaccgtggccgtgaacttcctgctgaccgccaagctgttcttcctctaa

SEQ ID NO: 6062 - DNA, 1953 bp, synthetic construct
  source 1..1953: mol_type = other DNA
atggccttaccagtgaccgccttgctcctgccgctggccttgctgctccacgccgccaggccggacatcgtgatgacacagagccctgatagcctggccgtgtctctgggagagagagccaccattaactgcaaggccagccagagcgtggactacgacggcgacagcttcctgaactggtatcagcagaagcccggccagcctcctaagctgctgatctacgccgccagcaatctggaaagcggcgtgccaagcagattttccggctctggcagcggcaccgatttcaccctgacaatatccagcctccagcctgaggacgtggccgtgtactactgccagcagagcaacgacgaccctctgacctttggacagggcaccaaggtggaaatcaaactcgaggacctgaagaacgtgttcccacctgaggtggccgtgttcgagcctagcgaggccgagatcagccacacccagaaagccaccctcgtgtgcctggctaccggcttctaccccgaccatgtggaactgtcttggtgggtcaacggcaaagaggtgcacagcggcgtgtctaccgacccccagccactgaaagaacagcccgccctgaacgacagccggtactgcctgagcagcagactgagagtgtccgccaccttctggcagaacccccggaaccacttcagatgccaggtgcagttctacggcctgagcgagaacgacgagtggacccaggacagagccaagcccgtgacccagatcgtgtctgccgaagcctggggcagagccgattgcggatcctccaaggacgccaacgataccctgctgctccagctgaccaacaccagcgcctactacatgtacttgttgctgctgctgaagtccgtggtgtacttcgccatcatcacatgctgcctgctgcggagaaccgccttctgctgcaacggcgagaagtctagggccaagcgatctggatctggagcaacaaacttctcactactcaaacaagcaggtgacgtggaggagaatcccgggcctactagtatggactggatttggcgcatccttttccttgtcggcgctgctaccggcgcgcattccttcgaagtccaacttgtggagtctggagggggcctggtgcagcccggcggctctctcagactgtcttgtgcggcaagcggctacaccttcacctcttactggatagaatgggtgaggcaggcacctggaaagggactggagtggattggagagattctgccaggagggggagatacaaattacaatgaaatcttcaaggggcgggccaccttttcagcggataccagcaagaatacagcttacctgcagatgaatagcctccgggcagaagataccgctgtttattattgcacgagacgggtgccaataagactggactattgggggcaagggactcttgtcaccgtcagttcaacgcgtatccagaaccctgatcctgccgtgtaccagctgcgggatagcaagagcagcgacaagagcgtgtgtctgttcaccgacttcgacagccagaccaacgtgtcccagagcaaggactccgacgtgtacatcaccgataagaccgtgctggacatgcggagcatggacttcaagagcaactccgccgtggcctggtccaacaagtccgatttcgcctgcgccaacgccttcaacaacagcattatccccgaggacacattcttcccaagccccgagagcagctgcggtaccgaagtgaaaaccgactccaccgaccacgtgaagcccaaagagacagagaacaccaagcagcccagcaagagctgccacaagcccaaggccatcgtgcacaccgagaaagtgaacatgatgagcctgaccgtgctgggcctgcggatgctgttcgccaaaaccgtggccgtgaacttcctgctgaccgccaagctgttcttcctctaa

SEQ ID NO: 6063 - DNA, 1863 bp, synthetic construct
  source 1..1863: mol_type = other DNA
atggccttaccagtgaccgccttgctcctgccgctggccttgctgctccacgccgccaggccggacatcgtgatgacacagagccctgatagcctggccgtgtctctgggagagagagccaccattaactgcaaggccagccagagcgtggactacgacggcgacagcttcctgaactggtatcagcagaagcccggccagcctcctaagctgctgatctacgccgccagcaatctggaaagcggcgtgccaagcagattttccggctctggcagcggcaccgatttcaccctgacaatatccagcctccagcctgaggacgtggccgtgtactactgccagcagagcaacgacgaccctctgacctttggacagggcaccaaggtggaaatcaaactcgaggacctgaagaacgtgttcccacctgaggtggccgtgttcgagcctagcgaggccgagatcagccacacccagaaagccaccctcgtgtgcctggctaccggcttctaccccgaccatgtggaactgtcttggtgggtcaacggcaaagaggtgcacagcggcgtgtgtaccgacccccagccactgaaagaacagcccgccctgaacgacagccggtactgcctgagcagcagactgagagtgtccgccaccttctggcagaacccccggaaccacttcagatgccaggtgcagttctacggcctgagcgagaacgacgagtggacccaggacagagccaagcccgtgacccagatcgtgtctgccgaagcctggggcagagccgattgcgacgtgaagctggtggaaaagagcttcgagacagacaccaacctgaacttccagaacctgagcgtgatcggcttcagaatcctgctgctgaaagtggccggctttaacctgctgatgaccctgcggctgtggtccagcagggccaagcgatctggatctggagcaacaaacttctcactactcaaacaagcaggtgacgtggaggagaatcccgggcctactagtatggactggatttggcgcatccttttccttgtcggcgctgctaccggcgcgcattccttcgaagtccaacttgtggagtctggagggggcctggtgcagcccggcggctctctcagactgtcttgtgcggcaagcggctacaccttcacctcttactggatagaatgggtgaggcaggcacctggaaagggactggagtggattggagagattctgccaggagggggagatacaaattacaatgaaatcttcaaggggcgggccaccttttcagcggataccagcaagaatacagcttacctgcagatgaatagcctccgggcagaagataccgctgtttattattgcacgagacgggtgccaataagactggactattgggggcaagggactcttgtcaccgtcagttcaacgcgtatccagaaccctgatcctgccgtgtaccagctgcgggatagcaagagcagcgacaagagcgtgtgtctgttcaccgacttcgacagccagaccaacgtgtcccagagcaaggactccgacgtgtacatcaccgataagtgcgtgctggacatgcggagcatggacttcaagagcaactccgccgtggcctggtccaacaagtccgatttcgcctgcgccaacgccttcaacaacagcattatccccgaggacacattcttcccaagccccgagagcagctgcggctttaccagcgagagctaccagcagggcgtgctgagcgccaccatcctgtacgagatcctgctgggcaaggccaccctgtacgccgtgctggtgtctgccctggtgctgatggctatggtcaagcggaaggacagccggggataa

SEQ ID NO: 6064 - DNA, 1863 bp, synthetic construct
  source 1..1863: mol_type = other DNA
atggccttaccagtgaccgccttgctcctgccgctggccttgctgctccacgccgccaggccggacatcgtgatgacacagagccctgatagcctggccgtgtctctgggagagagagccaccattaactgcaaggccagccagagcgtggactacgacggcgacagcttcctgaactggtatcagcagaagcccggccagcctcctaagctgctgatctacgccgccagcaatctggaaagcggcgtgccaagcagattttccggctctggcagcggcaccgatttcaccctgacaatatccagcctccagcctgaggacgtggccgtgtactactgccagcagagcaacgacgaccctctgacctttggacagggcaccaaggtggaaatcaaactcgaggacctgaagaacgtgttcccacctgaggtggccgtgttcgagcctagcgaggccgagatcagccacacccagaaagccaccctcgtgtgcctggctaccggcttctaccccgaccatgtggaactgtcttggtgggtcaacggcaaagaggtgcacagcggcgtgtgtaccgacccccagccactgaaagaacagcccgccctgaacgacagccggtactgcctgagcagcagactgagagtgtccgccaccttctggcagaacccccggaaccacttcagatgccaggtgcagttctacggcctgagcgagaacgacgagtggacccaggacagagccaagcccgtgacccagatcgtgtctgccgaagcctggggcagagccgattgcggctttaccagcgagagctaccagcagggcgtgctgagcgccaccaacctgagcgtgatcggcttcagaatcctgctgctgaaagtggccggctttaacctgctgatgaccctgcggctgtggtccagcagggccaagcgatctggatctggagcaacaaacttctcactactcaaacaagcaggtgacgtggaggagaatcccgggcctactagtatggactggatttggcgcatccttttccttgtcggcgctgctaccggcgcgcattccttcgaagtccaacttgtggagtctggagggggcctggtgcagcccggcggctctctcagactgtcttgtgcggcaagcggctacaccttcacctcttactggatagaatgggtgaggcaggcacctggaaagggactggagtggattggagagattctgccaggagggggagatacaaattacaatgaaatcttcaaggggcgggccaccttttcagcggataccagcaagaatacagcttacctgcagatgaatagcctccgggcagaagataccgctgtttattattgcacgagacgggtgccaataagactggactattgggggcaagggactcttgtcaccgtcagttcaacgcgtatccagaaccctgatcctgccgtgtaccagctgcgggatagcaagagcagcgacaagagcgtgtgtctgttcaccgacttcgacagccagaccaacgtgtcccagagcaaggactccgacgtgtacatcaccgataagtgcgtgctggacatgcggagcatggacttcaagagcaactccgccgtggcctggtccaacaagtccgatttcgcctgcgccaacgccttcaacaacagcattatccccgaggacacattcttcccaagccccgagagcagctgcgacgtgaagctggtggaaaagagcttcgagacagacaccaacctgaacttccagatcctgtacgagatcctgctgggcaaggccaccctgtacgccgtgctggtgtctgccctggtgctgatggctatggtcaagcggaaggacagccggggataa

SEQ ID NO: 6065 - DNA, 1863 bp, synthetic construct; identical to SEQ ID NO: 6063
  source 1..1863: mol_type = other DNA

SEQ ID NO: 6066 - DNA, 1863 bp, synthetic construct; identical to SEQ ID NO: 6064
  source 1..1863: mol_type = other DNA

SEQ ID NO: 6067 - DNA, 1860 bp, synthetic construct
  source 1..1860: mol_type = other DNA
atggccttaccagtgaccgccttgctcctgccgctggccttgctgctccacgccgccaggccggacatcgtgatgacacagagccctgatagcctggccgtgtctctgggagagagagccaccattaactgcaaggccagccagagcgtggactacgacggcgacagcttcctgaactggtatcagcagaagcccggccagcctcctaagctgctgatctacgccgccagcaatctggaaagcggcgtgccaagcagattttccggctctggcagcggcaccgatttcaccctgacaatatccagcctccagcctgaggacgtggccgtgtactactgccagcagagcaacgacgaccctctgacctttggacagggcaccaaggtggaaatcaaactcgaggacctgaagaacgtgttcccacctgaggtggccgtgttcgagcctagcgaggccgagatcagccacacccagaaagccaccctcgtgtgcctggctaccggcttctaccccgaccatgtggaactgtcttggtgggtcaacggcaaagaggtgcacagcggcgtgtgtaccgacccccagccactgaaagaacagcccgccctgaacgacagccggtactgcctgagcagcagactgagagtgtccgccaccttctggcagaacccccggaaccacttcagatgccaggtgcagttctacggcctgagcgagaacgacgagtggacccaggacagagccaagcccgtgacccagatcgtgtctgccgaagcctggggcagagccgattgcgacgtgaagctggtggaaaagagcttcgagacagacaccaacctgaacttccagaacctgagcgtgatcggcttcagaatcctgctgctgaaagtggccggctttaacctgctgatgaccctgcggctgtggtccagcagggccaagcgatctggatctggagcaacaaacttctcactactcaaacaagcaggtgacgtggaggagaatcccgggcctactagtatggactggatttggcgcatccttttccttgtcggcgctgctaccggcgcgcattccttcgaagtccaacttgtggagtctggagggggcctggtgcagcccggcggctctctcagactgtcttgtgcggcaagcggctacaccttcacctcttactggatagaatgggtgaggcaggcacctggaaagggactggagtggattggagagattctgccaggagggggagatacaaattacaatgaaatcttcaaggggcgggccaccttttcagcggataccagcaagaatacagcttacctgcagatgaatagcctccgggcagaagataccgctgtttattattgcacgagacgggtgccaataagactggactattgggggcaagggactcttgtcaccgtcagttcaacgcgtatccagaaccctgatcctgccgtgtaccagctgcgggatagcaagagcagcgacaagagcgtgtgtctgttcaccgacttcgacagccagaccaacgtgtcccagagcaaggactccgacgtgtacatcaccgataagtgcgtgctggacatgcggagcatggacttcaagagcaactccgccgtggcctggtccaacaagtccgatttcgcctgcgccaacgccttcaacaacagcattatccccgaggacacattcttcccaagccccgagagcagctgcggctttaccagcgagagctaccagcagggcgtgctgagcgccaccatcctgtacgagatcctgctgggcaaggccaccctgtacgccgtgctggtgtctgccctggtgctgatggctatggtcaagcggaaggacagccgggga

SEQ ID NO: 6068 - DNA, 1872 bp, synthetic construct
  source 1..1872: mol_type = other DNA
atggccttaccagtgaccgccttgctcctgccgctggccttgctgctccacgccgccaggccggacatcgtgatgacacagagccctgatagcctggccgtgtctctgggagagagagccaccattaactgcaaggccagccagagcgtggactacgacggcgacagcttcctgaactggtatcagcagaagcccggccagcctcctaagctgctgatctacgccgccagcaatctggaaagcggcgtgccaagcagattttccggctctggcagcggcaccgatttcaccctgacaatatccagcctccagcctgaggacgtggccgtgtactactgccagcagagcaacgacgaccctctgacctttggacagggcaccaaggtggaaatcaaactcgaggccgacgtgtcccccaagcctaccatcttcctgccctctatcgccgagacaaagctccagaaggccggcacctacctgtgcctgctggaaaagttcttcccagatgtgattaagatccactggcaggaaaagaagtccaacaccatcctgggcagccaggaaggcaacaccatgaagaccaacgacacctacatgaagttcagctggctgaccgtgcccgagaagtccctggacaaagaacacagatgcatcgtgcggcacgaaaacaacaagaacggcgtggaccaggaaatcatcttcccacccatcaagaccgatgtgattacaatggaccccaaggacaactgctccaaggacgccaacgataccctgctgctccagctgaccaacaccagcgcctactacatgtacttgttgctgctgctgaagtccgtggtgtacttcgccatcatcacatgctgcctgctgcggagaaccgccttctgctgcaacggcgagaagtctagggccaagcgatctggatctggagcaacaaacttctcactactcaaacaagcaggtgacgtggaggagaatcccgggcctactagtatggactggatttggcgcatccttttccttgtcggcgctgctaccggcgcgcattccttcgaagtccaacttgtggagtctggagggggcctggtgcagcccggcggctctctcagactgtcttgtgcggcaagcggctacaccttcacctcttactggatagaatgggtgaggcaggcacctggaaagggactggagtggattggagagattctgccaggagggggagatacaaattacaatgaaatcttcaaggggcgggccaccttttcagcggataccagcaagaatacagcttacctgcagatgaatagcctccgggcagaagataccgctgtttattattgcacgagacgggtgccaataagactggactattgggggcaagggactcttgtcaccgtcagttcaacgcgtagccagcctcacaccaagcccagcgtgttcgtgatgaagaacggcaccaacgtggcctgcctcgtgaaagagttctaccccaaggacatcaggatcaacctggtgtccagcaagaagatcaccgagttcgaccccgccatcgtgatctcccccagcggcaagtacaacgccgtgaagctggggaagtatgaggacagcaacagcgtgacctgctccgtgcagcacgacaacaagaccgtgcacagcaccgactttgaagtgaaaaccgactccaccgaccacgtgaagcccaaagagacagagaacaccaagcagcccagcaagagctgccacaagcccaaggccatcgtgcacaccgagaaagtgaacatgatgagcctgaccgtgatcggcttcagaatcctgctgctgaaagtggccggctttaacctgctgatgaccctgcggctgtggtccagctaa

SEQ ID NO: 6069 - DNA, 1872 bp, synthetic construct
  source 1..1872: mol_type = other DNA
atggccttaccagtgaccgccttgctcctgccgctggccttgctgctccacgccgccaggccggacatcgtgatgacacagagccctgatagcctggccgtgtctctgggagagagagccaccattaactgcaaggccagccagagcgtggactacgacggcgacagcttcctgaactggtatcagcagaagcccggccagcctcctaagctgctgatctacgccgccagcaatctggaaagcggcgtgccaagcagattttccggctctggcagcggcaccgatttcaccctgacaatatccagcctccagcctgaggacgtggccgtgtactactgccagcagagcaacgacgaccctctgacctttggacagggcaccaaggtggaaatcaaactcgaggccgacgtgtcccccaagcctaccatcttcctgccctctatcgccgagacaaagctccagaaggccggcacctacctgtgcctgctggaaaagttcttcccagatgtgattaagatccactggcaggaaaagaagtccaacaccatcctgggcagccaggaaggcaacaccatgaagaccaacgacacctacatgaagttcagctggctgaccgtgcccgagaagtccctggacaaagaacacagatgcatcgtgcggcacgaaaacaacaagaacggcgtggaccaggaaatcatcttcccacccatcaagaccgatgtgattacaatggaccccaaggacaactgctccaaggacgccaacgataccctgctgctccagctgaccaacaccagcgcctactacatgtacttgttgctgctgctgaagtccgtggtgtacttcgccatcatcacatgctgcctgctgcggagaaccgccttctgctgcaacggcgagaagtctagggccaagcgatctggatctggagcaacaaacttctcactactcaaacaagcaggtgacgtggaggagaatcccgggcctactagtatggactggatttggcgcatccttttccttgtcggcgctgctaccggcgcgcattccttcgaagtccaacttgtggagtctggagggggcctggtgcagcccggcggctctctcagactgtcttgtgcggcaagcggctacaccttcacctcttactggatagaatgggtgaggcaggcacctggaaagggactggagtggattggagagattctgccaggagggggagatacaaattacaatgaaatcttcaaggggcgggccaccttttcagcggataccagcaagaatacagcttacctgcagatgaatagcctccgggcagaagataccgctgtttattattgcacgagacgggtgccaataagactggactattgggggcaagggactcttgtcaccgtcagttcaacgcgtagccagcctcacaccaagcccagcgtgttcgtgatgaagaacggcaccaacgtggcctgcctcgtgaaagagttctaccccaaggacatcaggatcaacctggtgtccagcaagaagatcaccgagttcgaccccgccatcgtgatctcccccagcggcaagtacaacgccgtgaagctggggaagtacgaggacagcaacagcgtgacctgctccgtgcagcacgacaacaagaccgtgcacagcaccgactttgaagtgaaaaccgactccaccgaccacgtgaagcccaaagagacagagaacaccaagcagcccagcaagagctgccacaagcccaaggccatcgtgcacaccgagaaagtgaacatgatgagcctgaccgtgctgggcttcagaatcctgctgctgaaagtggccggctttaacctgctgatgaccctgcggctgtggtccagctaa

SEQ ID NO: 6070 - DNA, 1860 bp, synthetic construct; identical to SEQ ID NO: 6067
  source 1..1860: mol_type = other DNA

SEQ ID NO: 6071 - DNA, 1872 bp, synthetic construct
  source 1..1872: mol_type = other DNA
atggccttaccagtgaccgccttgctcctgccgctggccttgctgctccacgccgccaggccggacatcgtgatgacacagagccctgatagcctggccgtgtctctgggagagagagccaccattaactgcaaggccagccagagcgtggactacgacggcgacagcttcctgaactggtatcagcagaagcccggccagcctcctaagctgctgatctacgccgccagcaatctggaaagcggcgtgccaagcagattttccggctctggcagcggcaccgatttcaccctgacaatatccagcctccagcctgaggacgtggccgtgtactactgccagcagagcaacgacgaccctctgacctttggacagggcaccaaggtggaaatcaaactcgagatccagaaccctgatcctgccgtgtaccagctgcgggatagcaagagcagcgacaagagcgtgtgtctgttcaccgacttcgacagccagaccaacgtgtcccagagcaaggactccgacgtgtacatcaccgataagtgcgtgctggacatgcggagcatggacttcaagagcaactccgccgtggcctggtccaacaagtccgatttcgcctgcgccaacgccttcaacaacagcattatccccgaggacacattcttcccaagccccgagagcagctgcggctttaccagcgagagctaccagcagggcgtgctgagcgccaccatcctgtacgagatcctgctgggcaaggccaccctgtacgccgtgctggtgtctgccctggtgctgatggctatggtcaagcggaaggacagccggggacgcgccaagagaagcggatctggcgtgaagcagaccctgaatttcgacctgctgaagctggctggcgacgtggaatccaacccaggccctactagtatggactggatttggcgcatccttttccttgtcggcgctgctaccggcgcgcattccttcgaagtccaacttgtggagtctggagggggcctggtgcagcccggcggctctctcagactgtcttgtgcggcaagcggctacaccttcacctcttactggatagaatgggtgaggcaggcacctggaaagggactggagtggattggagagattctgccaggagggggagatacaaattacaatgaaatcttcaaggggcgggccaccttttcagcggataccagcaagaatacagcttacctgcagatgaatagcctccgggcagaagataccgctgtttattattgcacgagacgggtgccaataagactggactattgggggcaagggactcttgtcaccgtcagttcaacgcgtgaggacctgaagaacgtgttcccacctgaggtggccgtgttcgagcctagcgaggccgagatcagccacacccagaaagccaccctcgtgtgcctggctaccggcttctaccccgaccatgtggaactgtcttggtgggtcaacggcaaagaggtgcacagcggcgtgtgtaccgacccccagccactgaaagaacagcccgccctgaacgacagccggtactgcctgagcagcagactgagagtgtccgccaccttctggcagaacccccggaaccacttcagatgccaggtgcagttctacggcctgagcgagaacgacgagtggacccaggacagagccaagcccgtgacccagatcgtgtctgccgaagcctggggcagagccgattgcgacgtgaagctggtggaaaagagcttcgagacagacaccaacctgaacttccagaacctgagcgtgatcggcttcagaatcctgctgctgaaagtggccggctttaacctgctgatgaccctgcggctgtggtccagc

SEQ ID NO: 6072 - DNA, 2265 bp, synthetic construct
  source 1..2265: mol_type = other DNA
atggccttaccagtgaccgccttgctcctgccgctggccttgctgctccacgccgccaggccggaagtgcagctggttgaatctggcggaggactggttcagcctggcggatctctgagactgtcttgtgccgccagcggcttcagcttcagcgacttttggatgagctgggtccgacaggcccctggcaaaggacttgaatgggtcgccacaatcagccaggccggcagcgagaaggactacgtggactctgtgaagggcagattcaccatcagccgggacaacgccaagaagtccctgtacctccagatgaacagcctgagagccgaggacaccgccgtgtactattgtgcctctggcgtgtacagcttcgactacagaggccagggcaccctggtcacagtctcttctggtaccggcggaggcggatctggcggcggaggtagcggtggcggaggatctgaattcgacatcgtgatgacacagagccctgatagcctggccgtgtctctgggagagagagccaccattaactgcaaggccagccagagcgtggactacgacggcgacagcttcctgaactggtatcagcagaagcccggccagcctcctaagctgctgatctacgccgccagcaatctggaaagcggcgtgccaagcagattttccggctctggcagcggcaccgatttcaccctgacaatatccagcctccagcctgaggacgtggccgtgtactactgccagcagagcaacgacgaccctctgacctttggacagggcaccaaggtggaaatcaaactcgaggacctgaagaacgtgttcccacctgaggtggccgtgttcgagcctagcgaggccgagatcagccacacccagaaagccaccctcgtgtgcctggctaccggcttctaccccgaccatgtggaactgtcttggtgggtcaacggcaaagaggtgcacagcggcgtgtgtaccgacccccagccactgaaagaacagcccgccctgaacgacagccggtactgcctgagcagcagactgagagtgtccgccaccttctggcagaacccccggaaccacttcagatgccaggtgcagttctacggcctgagcgagaacgacgagtggacccaggacagagccaagcccgtgacccagatcgtgtctgccgaagcctggggcagagccgattgcgacgtgaagctggtggaaaagagcttcgagacagacaccaacctgaacttccagaacctgagcgtgatcggcttcagaatcctgctgctgaaagtggccggctttaacctgctgatgaccctgcggctgtggtccagcagggccaagcgatctggatctggagcaacaaacttctcactactcaaacaagcaggtgacgtggaggagaatcccgggcctactagtatggactggatttggcgcatccttttccttgtcggcgctgctaccggcgcgcattccttcgaagtccaacttgtggagtctggagggggcctggtgcagcccggcggctctctcagactgtcttgtgcggcaagcggctacaccttcacctcttactggatagaatgggtgaggcaggcacctggaaagggactggagtggattggagagattctgccaggagggggagatacaaattacaatgaaatcttcaaggggcgggccaccttttcagcggataccagcaagaatacagcttacctgcagatgaatagcctccgggcagaagataccgctgtttattattgcacgagacgggtgccaataagactggactattgggggcaagggactcttgtcaccgtcagttcaacgcgtatccagaaccctgatcctgccgtgtaccagctgcgggatagcaagagcagcgacaagagcgtgtgtctgttcaccgacttcgacagccagaccaacgtgtcccagagcaaggactccgacgtgtacatcaccgataagtgcgtgctggacatgcggagcatggacttcaagagcaactccgccgtggcctggtccaacaagtccgatttcgcctgcgccaacgccttcaacaacagcattatccccgaggacacattcttcccaagccccgagagcagctgcggctttaccagcgagagctaccagcagggcgtgctgagcgccaccatcctgtacgagatcctgctgggcaaggccaccctgtacgccgtgctggtgtctgccctggtgctgatggctatggtcaagcggaaggacagccgggga

SEQ ID NO: 6073 - DNA, 2277 bp, synthetic construct
  source 1..2277: mol_type = other DNA
atggccttaccagtgaccgccttgctcctgccgctggccttgctgctccacgccgccaggccggaagtgcagctggttgaatctggcggaggactggttcagcctggcggatctctgagactgtcttgtgccgccagcggcttcagcttcagcgacttttggatgagctgggtccgacaggcccctggcaaaggacttgaatgggtcgccacaatcagccaggccggcagcgagaaggactacgtggactctgtgaagggcagattcaccatcagccgggacaacgccaagaagtccctgtacctccagatgaacagcctgagagccgaggacaccgccgtgtactattgtgcctctggcgtgtacagcttcgactacagaggccagggcaccctggtcacagtctcttctggtaccggcggaggcggatctggcggcggaggtagcggtggcggaggatctgaattcgacatcgtgatgacacagagccctgatagcctggccgtgtctctgggagagagagccaccattaactgcaaggccagccagagcgtggactacgacggcgacagcttcctgaactggtatcagcagaagcccggccagcctcctaagctgctgatctacgccgccagcaatctggaaagcggcgtgccaagcagattttccggctctggcagcggcaccgatttcaccctgacaatatccagcctccagcctgaggacgtggccgtgtactactgccagcagagcaacgacgaccctctgacctttggacagggcaccaaggtggaaatcaaactcgagatccagaaccctgatcctgccgtgtaccagctgcgggatagcaagagcagcgacaagagcgtgtgtctgttcaccgacttcgacagccagaccaacgtgtcccagagcaaggactccgacgtgtacatcaccgataagtgcgtgctggacatgcggagcatggacttcaagagcaactccgccgtggcctggtccaacaagtccgatttcgcctgcgccaacgccttcaacaacagcattatccccgaggacacattcttcccaagccccgagagcagctgcggctttaccagcgagagctaccagcagggcgtgctgagcgccaccatcctgtacgagatcctgctgggcaaggccaccctgtacgccgtgctggtgtctgccctggtgctgatggctatggtcaagcggaaggacagccggggacgcgccaagagaagcggatctggcgtgaagcagaccctgaatttcgacctgctgaagctggctggcgacgtggaatccaacccaggccctactagtatggactggatttggcgcatccttttccttgtcggcgctgctaccggcgcgcattccttcgaagtccaacttgtggagtctggagggggcctggtgcagcccggcggctctctcagactgtcttgtgcggcaagcggctacaccttcacctcttactggatagaatgggtgaggcaggcacctggaaagggactggagtggattggagagattctgccaggagggggagatacaaattacaatgaaatcttcaaggggcgggccaccttttcagcggataccagcaagaatacagcttacctgcagatgaatagcctccgggcagaagataccgctgtttattattgcacgagacgggtgccaataagactggactattgggggcaagggactcttgtcaccgtcagttcaacgcgtgaggacctgaagaacgtgttcccacctgaggtggccgtgttcgagcctagcgaggccgagatcagccacacccagaaagccaccctcgtgtgcctggctaccggcttctaccccgaccatgtggaactgtcttggtgggtcaacggcaaagaggtgcacagcggcgtgtgtaccgacccccagccactgaaagaacagcccgccctgaacgacagccggtactgcctgagcagcagactgagagtgtccgccaccttctggcagaacccccggaaccacttcagatgccaggtgcagttctacggcctgagcgagaacgacgagtggacccaggacagagccaagcccgtgacccagatcgtgtctgccgaagcctggggcagagccgattgcgacgtgaagctggtggaaaagagcttcgagacagacaccaacctgaacttccagaacctgagcgtgatcggcttcagaatcctgctgctgaaagtggccggctttaacctgctgatgaccctgcggctgtggtccagc

SEQ ID NO: 6074 - DNA, 2676 bp, synthetic construct
  source 1..2676: mol_type = other DNA
atggccttaccagtgaccgccttgctcctgccgctggccttgctgctccacgccgccaggccggaagtgcagctggttgaatctggcggaggactggttcagcctggcggatctctgagactgtcttgtgccgccagcggcttcagcttcagcgacttttggatgagctgggtccgacaggcccctggcaaaggacttgaatgggtcgccacaatcagccaggccggcagcgagaaggactacgtggactctgtgaagggcagattcaccatcagccgggacaacgccaagaagtccctgtacctccagatgaacagcctgagagccgaggacaccgccgtgtactattgtgcctctggcgtgtacagcttcgactacagaggccagggcaccctggtcacagtctcttctggtaccggcggaggcggatctggcggcggaggtagcggtggcggaggatctgaattcgacatcgtgatgacacagagccctgatagcctggccgtgtctctgggagagagagccaccattaactgcaaggccagccagagcgtggactacgacggcgacagcttcctgaactggtatcagcagaagcccggccagcctcctaagctgctgatctacgccgccagcaatctggaaagcggcgtgccaagcagattttccggctctggcagcggcaccgatttcaccctgacaatatccagcctccagcctgaggacgtggccgtgtactactgccagcagagcaacgacgaccctctgacctttggacagggcaccaaggtggaaatcaaactcgaggacctgaagaacgtgttcccacctgaggtggccgtgttcgagcctagcgaggccgagatcagccacacccagaaagccaccctcgtgtgcctggctaccggcttctaccccgaccatgtggaactgtcttggtgggtcaacggcaaagaggtgcacagcggcgtgtgtaccgacccccagccactgaaagaacagcccgccctgaacgacagccggtactgcctgagcagcagactgagagtgtccgccaccttctggcagaacccccggaaccacttcagatgccaggtgcagttctacggcctgagcgagaacgacgagtggacccaggacagagccaagcccgtgacccagatcgtgtctgccgaagcctggggcagagccgattgcgacgtgaagctggtggaaaagagcttcgagacagacaccaacctgaacttccagaacctgagcgtgatcggcttcagaatcctgctgctgaaagtggccggctttaacctgctgatgaccctgcggctgtggtccagcagggccaagcgatctggatctggagcaacaaacttctcactactcaaacaagcaggtgacgtggaggagaatcccgggcctactagtatggactggatttggcgcatccttttccttgtcggcgctgctaccggcgcgcattccgggccccagctccagctgcaagagtctggacctggcctggtcaagcctagcgagacactgagcctgacctgtaccgtgtccggcgatagcatcagcagcggcgattactactggggctggatcagacagcctcctggcaaaggactggaatggatcggccacatctactacagcggcgtgacctactacaaccccagcctgaagtccagagtgaccatcagcgtggacaccagccggaaccagttctccctgaagctgtctagcgtgacagccgccgataccgccgtgtactactgcaccagagaggacagcagcaactggcggagtagaggccagggaacactggtcacagttagctctggatccggcggaggcggaagtggaggcggaggatctggcggcggaggctctttcgaagtccaacttgtggagtctggagggggcctggtgcagcccggcggctctctcagactgtcttgtgcggcaagcggctacaccttcacctcttactggatagaatgggtgaggcaggcacctggaaagggactggagtggattggagagattctgccaggagggggagatacaaattacaatgaaatcttcaaggggcgggccaccttttcagcggataccagcaagaatacagcttacctgcagatgaatagcctccgggcagaagataccgctgtttattattgcacgagacgggtgccaataagactggactattgggggcaagggactcttgtcaccgtcagttcaacgcgtatccagaaccctgatcctgccgtgtaccagctgcgggatagcaagagcagcgacaagagcgtgtgtctgttcaccgacttcgacagccagaccaacgtgtcccagagcaaggactccgacgtgtacatcaccgataagtgcgtgctggacatgcggagcatggacttcaagagcaactccgccgtggcctggtccaacaagtccgatttcgcctgcgccaacgccttcaacaacagcattatccccgaggacacattcttcccaagccccgagagcagctgcggctttaccagcgagagctaccagcagggcgtgctgagcgccaccatcctgtacgagatcctgctgggcaaggccaccctgtacgccgtgctggtgtctgccctggtgctgatggctatggtcaagcggaaggacagccgggga

SEQ ID NO: 6075 - DNA, 2688 bp, synthetic construct
  source 1..2688: mol_type = other DNA
atggccttaccagtgaccgccttgctcctgccgctggccttgctgctccacgccgccaggccggaagtgcagctggttgaatctggcggaggactggttcagcctggcggatctctgagactgtcttgtgccgccagcggcttcagcttcagcgacttttggatgagctgggtccgacaggcccctggcaaaggacttgaatgggtcgccacaatcagccaggccggcagcgagaaggactacgtggactctgtgaagggcagattcaccatcagccgggacaacgccaagaagtccctgtacctccagatgaacagcctgagagccgaggacaccgccgtgtactattgtgcctctggcgtgtacagcttcgactacagaggccagggcaccctggtcacagtctcttctggtaccggcggaggcggatctggcggcggaggtagcggtggcggaggatctgaattcgacatcgtgatgacacagagccctgatagcctggccgtgtctctgggagagagagccaccattaactgcaaggccagccagagcgtggactacgacggcgacagcttcctgaactggtatcagcagaagcccggccagcctcctaagctgctgatctacgccgccagcaatctggaaagcggcgtgccaagcagattttccggctctggcagcggcaccgatttcaccctgacaatatccagcctccagcctgaggacgtggccgtgtactactgccagcagagcaacgacgaccctctgacctttggacagggcaccaaggtggaaatcaaactcgagatccagaaccctgatcctgccgtgtaccagctgcgggatagcaagagcagcgacaagagcgtgtgtctgttcaccgacttcgacagccagaccaacgtgtcccagagcaaggactccgacgtgtacatcaccgataagtgcgtgctggacatgcggagcatggacttcaagagcaactccgccgtggcctggtccaacaagtccgatttcgcctgcgccaacgccttcaacaacagcattatccccgaggacacattcttcccaagccccgagagcagctgcggctttaccagcgagagctaccagcagggcgtgctgagcgccaccatcctgtacgagatcctgctgggcaaggccaccctgtacgccgtgctggtgtctgccctggtgctgatggctatggtcaagcggaaggacagccggggacgcgccaagagaagcggatctggcgtgaagcagaccctgaatttcgacctgctgaagctggctggcgacgtggaatccaacccaggccctactagtatggactggatttggcgcatccttttccttgtcggcgctgctaccggcgcgcattccgggccccagctccagctgcaagagtctggacctggcctggtcaagcctagcgagacactgagcctgacctgtaccgtgtccggcgatagcatcagcagcggcgattactactggggctggatcagacagcctcctggcaaaggactggaatggatcggccacatctactacagcggcgtgacctactacaaccccagcctgaagtccagagtgaccatcagcgtggacaccagccggaaccagttctccctgaagctgtctagcgtgacagccgccgataccgccgtgtactactgcaccagagaggacagcagcaactggcggagtagaggccagggaacactggtcacagttagctctggatccggcggaggcggaagtggaggcggaggatctggcggcggaggctctttcgaagtccaacttgtggagtctggagggggcctggtgcagcccggcggctctctcagactgtcttgtgcggcaagcggctacaccttcacctcttactggatagaatgggtgaggcaggcacctggaaagggactggagtggattggagagattctgccaggagggggagatacaaattacaatgaaatcttcaaggggcgggccaccttttcagcggataccagcaagaatacagcttacctgcagatgaatagcctccgggcagaagataccgctgtttattattgcacgagacgggtgccaataagactggactattgggggcaagggactcttgtcaccgtcagttcaacgcgtgaggacctgaagaacgtgttcccacctgaggtggccgtgttcgagcctagcgaggccgagatcagccacacccagaaagccaccctcgtgtgcctggctaccggcttctaccccgaccatgtggaactgtcttggtgggtcaacggcaaagaggtgcacagcggcgtgtgtaccgacccccagccactgaaagaacagcccgccctgaacgacagccggtactgcctgagcagcagactgagagtgtccgccaccttctggcagaacccccggaaccacttcagatgccaggtgcagttctacggcctgagcgagaacgacgagtggacccaggacagagccaagcccgtgacccagatcgtgtctgccgaagcctggggcagagccgattgcgacgtgaagctggtggaaaagagcttcgagacagacaccaacctgaacttccagaacctgagcgtgatcggcttcagaatcctgctgctgaaagtggccggctttaacctgctgatgaccctgcggctgtggtccagc

SEQ ID NO: 6076 - DNA, 2070 bp, synthetic construct
  source 1..2070: mol_type = other DNA
atggccttaccagtgaccgccttgctcctgccgctggccttgctgctccacgccgccaggccggacatcgtgatgacacagagccctgatagcctggccgtgtctctgggagagagagccaccattaactgcaaggccagccagagcgtggactacgacggcgacagcttcctgaactggtatcagcagaagcccggccagcctcctaagctgctgatctacgccgccagcaatctggaaagcggcgtgccaagcagattttccggctctggcagcggcaccgatttcaccctgacaatatccagcctccagcctgaggacgtggccgtgtactactgccagcagagcaacgacgaccctctgacctttggacagggcaccaaggtggaaatcaaactcgaggacctgaagaacgtgttcccacctgaggtggccgtgttcgagcctagcgaggccgagatcagccacacccagaaagccaccctcgtgtgcctggctaccggcttctaccccgaccatgtggaactgtcttggtgggtcaacggcaaagaggtgcacagcggcgtgtgtaccgacccccagccactgaaagaacagcccgccctgaacgacagccggtactgcctgagcagcagactgagagtgtccgccaccttctggcagaacccccggaaccacttcagatgccaggtgcagttctacggcctgagcgagaacgacgagtggacccaggacagagccaagcccgtgacccagatcgtgtctgccgaagcctggggcagagccgattgcgacgtgaagctggtggaaaagagcttcgagacagacaccaacctgaacttccagaacctgagcgtgatcggcttcagaatcctgctgctgaaagtggccggctttaacctgctgatgaccctgcggctgtggtccagcagggccaagcgatctggatctggagcaacaaacttctcactactcaaacaagcaggtgacgtggaggagaatcccgggcctactagtatggactggatttggcgcatccttttccttgtcggcgctgctaccggcgcccattccgggcccatggaccccgacctggaaatcagagccgccttcctgcggcagagaaacacagccctgagaacagaggtggccgagctggaacaagaggtgcagcggctggaaaacgaggtgtcccagtacgagacaagatacggccctctcggaggcggaaaaggatccggcggcggaggatctggcggaggcggatctgggggcggaggctctttcgaagtccaacttgtggagtctggagggggcctggtgcagcccggcggctctctcagactgtcttgtgcggcaagcggctacaccttcacctcttactggatagaatgggtgaggcaggcacctggaaagggactggagtggattggagagattctgccaggagggggagatacaaattacaatgaaatcttcaaggggcgggccaccttttcagcggataccagcaagaatacagcttacctgcagatgaatagcctccgggcagaagataccgctgtttattattgcacgagacgggtgccaataagactggactattgggggcaagggactcttgtcaccgtcagttcaacgcgtatccagaaccctgatcctgccgtgtaccagctgcgggatagcaagagcagcgacaagagcgtgtgtctgttcaccgacttcgacagccagaccaacgtgtcccagagcaaggactccgacgtgtacatcaccgataagtgcgtgctggacatgcggagcatggacttcaagagcaactccgccgtggcctggtccaacaagtccgatttcgcctgcgccaacgccttcaacaacagcattatccccgaggacacattcttcccaagccccgagagcagctgcggctttaccagcgagagctaccagcagggcgtgctgagcgccaccatcctgtacgagatcctgctgggcaaggccaccctgtacgccgtgctggtgtctgccctggtgctgatggctatggtcaagcggaaggacagccgggga

SEQ ID NO: 6077 - DNA, 2082 bp, synthetic construct
  source 1..2082: mol_type = other DNA
atggccttaccagtgaccgccttgctcctgccgctggccttgctgctccacgccgccaggccggacatcgtgatgacacagagccctgatagcctggccgtgtctctgggagagagagccaccattaactgcaaggccagccagagcgtggactacgacggcgacagcttcctgaactggtatcagcagaagcccggccagcctcctaagctgctgatctacgccgccagcaatctggaaagcggcgtgccaagcagattttccggctctggcagcggcaccgatttcaccctgacaatatccagcctccagcctgaggacgtggccgtgtactactgccagcagagcaacgacgaccctctgacctttggacagggcaccaaggtggaaatcaaactcgagatccagaaccctgatcctgccgtgtaccagctgcgggatagcaagagcagcgacaagagcgtgtgtctgttcaccgacttcgacagccagaccaacgtgtcccagagcaaggactccgacgtgtacatcaccgataagtgcgtgctggacatgcggagcatggacttcaagagcaactccgccgtggcctggtccaacaagtccgatttcgcctgcgccaacgccttcaacaacagcattatccccgaggacacattcttcccaagccccgagagcagctgcggctttaccagcgagagctaccagcagggcgtgctgagcgccaccatcctgtacgagatcctgctgggcaaggccaccctgtacgccgtgctggtgtctgccctggtgctgatggctatggtcaagcggaaggacagccggggacgcgccaagagaagcggatctggcgtgaagcagaccctgaatttcgacctgctgaagctggctggcgacgtggaatccaacccaggccctactagtatggactggatttggcgcatccttttccttgtcggcgctgctaccggcgcccattccgggcccatggaccccgacctggaaatcagagccgccttcctgcggcagagaaacacagccctgagaacagaggtggccgagctggaacaagaggtgcagcggctggaaaacgaggtgtcccagtacgagacaagatacggccctctcggaggcggaaaaggatccggcggcggaggatctggcggaggcggatctgggggcggaggctctttcgaagtccaacttgtggagtctggagggggcctggtgcagcccggcggctctctcagactgtcttgtgcggcaagcggctacaccttcacctcttactggatagaatgggtgaggcaggcacctggaaagggactggagtggattggagagattctgccaggagggggagatacaaattacaatgaaatcttcaaggggcgggccaccttttcagcggataccagcaagaatacagcttacctgcagatgaatagcctccgggcagaagataccgctgtttattattgcacgagacgggtgccaataagactggactattgggggcaagggactcttgtcaccgtcagttcaacgcgtgaggacctgaagaacgtgttcccacctgaggtggccgtgttcgagcctagcgaggccgagatcagccacacccagaaagccaccctcgtgtgcctggctaccggcttctaccccgaccatgtggaactgtcttggtgggtcaacggcaaagaggtgcacagcggcgtgtgtaccgacccccagccactgaaagaacagcccgccctgaacgacagccggtactgcctgagcagcagactgagagtgtccgccaccttctggcagaacccccggaaccacttcagatgccaggtgcagttctacggcctgagcgagaacgacgagtggacccaggacagagccaagcccgtgacccagatcgtgtctgccgaagcctggggcagagccgattgcgacgtgaagctggtggaaaagagcttcgagacagacaccaacctgaacttccagaacctgagcgtgatcggcttcagaatcctgctgctgaaagtggccggctttaacctgctgatgaccctgcggctgtggtccagc

SEQ ID NO: 6078 - DNA, 2001 bp, synthetic construct
  source 1..2001: mol_type = other DNA
atggccttaccagtgaccgccttgctcctgccgctggccttgctgctccacgccgccaggccggacatcgtgatgacacagagccctgatagcctggccgtgtctctgggagagagagccaccattaactgcaaggccagccagagcgtggactacgacggcgacagcttcctgaactggtatcagcagaagcccggccagcctcctaagctgctgatctacgccgccagcaatctggaaagcggcgtgccaagcagattttccggctctggcagcggcaccgatttcaccctgacaatatccagcctccagcctgaggacgtggccgtgtactactgccagcagagcaacgacgaccctctgacctttggacagggcaccaaggtggaaatcaaactcgaggacctgaagaacgtgttcccacctgaggtggccgtgttcgagcctagcgaggccgagatcagccacacccagaaagccaccctcgtgtgcctggctaccggcttctaccccgaccatgtggaactgtcttggtgggtcaacggcaaagaggtgcacagcggcgtgtgtaccgacccccagccactgaaagaacagcccgccctgaacgacagccggtactgcctgagcagcagactgagagtgtccgccaccttctggcagaacccccggaaccacttcagatgccaggtgcagttctacggcctgagcgagaacgacgagtggacccaggacagagccaagcccgtgacccagatcgtgtctgccgaagcctggggcagagccgattgcgacgtgaagctggtggaaaagagcttcgagacagacaccaacctgaacttccagaacctgagcgtgatcggcttcagaatcctgctgctgaaagtggccggctttaacctgctgatgaccctgcggctgtggtccagcagggccaagcgatctggatctggagcaacaaacttctcactactcaaacaagcaggtgacgtggaggagaatcccgggcctactagtatggactggatttggcgcatccttttccttgtcggcgctgctaccggcgcccattccgggcccgaagttgctgccctcgagaaggaggtagcagctttggaaaaagaagtcgcagcccttgagaaagaagttgcggctctggagaagggatccggcggcggaggatctggcggaggcggatctgggggcggaggctctttcgaagtccaacttgtggagtctggagggggcctggtgcagcccggcggctctctcagactgtcttgtgcggcaagcggctacaccttcacctcttactggatagaatgggtgaggcaggcacctggaaagggactggagtggattggagagattctgccaggagggggagatacaaattacaatgaaatcttcaaggggcgggccaccttttcagcggataccagcaagaatacagcttacctgcagatgaatagcctccgggcagaagataccgctgtttattattgcacgagacgggtgccaataagactggactattgggggcaagggactcttgtcaccgtcagttcaacgcgtatccagaaccctgatcctgccgtgtaccagctgcgggatagcaagagcagcgacaagagcgtgtgtctgttcaccgacttcgacagccagaccaacgtgtcccagagcaaggactccgacgtgtacatcaccgataagtgcgtgctggacatgcggagcatggacttcaagagcaactccgccgtggcctggtccaacaagtccgatttcgcctgcgccaacgccttcaacaacagcattatccccgaggacacattcttcccaagccccgagagcagctgcggctttaccagcgagagctaccagcagggcgtgctgagcgccaccatcctgtacgagatcctgctgggcaaggccaccctgtacgccgtgctggtgtctgccctggtgctgatggctatggtcaagcggaaggacagccgggga

SEQ ID NO: 6079 - DNA, 2013 bp, synthetic construct
  source 1..2013: mol_type = other DNA
atggccttaccagtgaccgccttgctcctgccgctggccttgctgctccacgccgccaggccggacatcgtgatgacacagagccctgatagcctggccgtgtctctgggagagagagccaccattaactgcaaggccagccagagcgtggactacgacggcgacagcttcctgaactggtatcagcagaagcccggccagcctcctaagctgctgatctacgccgccagcaatctggaaagcggcgtgccaagcagattttccggctctggcagcggcaccgatttcaccctgacaatatccagcctccagcctgaggacgtggccgtgtactactgccagcagagcaacgacgaccctctgacctttggacagggcaccaaggtggaaatcaaactcgagatccagaaccctgatcctgccgtgtaccagctgcgggatagcaagagcagcgacaagagcgtgtgtctgttcaccgacttcgacagccagaccaacgtgtcccagagcaaggactccgacgtgtacatcaccgataagtgcgtgctggacatgcggagcatggacttcaagagcaactccgccgtggcctggtccaacaagtccgatttcgcctgcgccaacgccttcaacaacagcattatccccgaggacacattcttcccaagccccgagagcagctgcggctttaccagcgagagctaccagcagggcgtgctgagcgccaccatcctgtacgagatcctgctgggcaaggccaccctgtacgccgtgctggtgtctgccctggtgctgatggctatggtcaagcggaaggacagccggggacgcgccaagagaagcggatctggcgtgaagcagaccctgaatttcgacctgctgaagctggctggcgacgtggaatccaacccaggccctactagtatggactggatttggcgcatccttttccttgtcggcgctgctaccggcgcccattccgggcccgaagttgctgccctcgagaaggaggtagcagctttggaaaaagaagtcgcagcccttgagaaagaagttgcggctctggagaagggatccggcggcggaggatctggcggaggcggatctgggggcggaggctctttcgaagtccaacttgtggagtctggagggggcctggtgcagcccggcggctctctcagactgtcttgtgcggcaagcggctacaccttcacctcttactggatagaatgggtgaggcaggcacctggaaagggactggagtggattggagagattctgccaggagggggagatacaaattacaatgaaatcttcaaggggcgggccaccttttcagcggataccagcaagaatacagcttacctgcagatgaatagcctccgggcagaagataccgctgtttattattgcacgagacgggtgccaataagactggactattgggggcaagggactcttgtcaccgtcagttcaacgcgtgaggacctgaagaacgtgttcccacctgaggtggccgtgttcgagcctagcgaggccgagatcagccacacccagaaagccaccctcgtgtgcctggctaccggcttctaccccgaccatgtggaactgtcttggtgggtcaacggcaaagaggtgcacagcggcgtgtgtaccgacccccagccactgaaagaacagcccgccctgaacgacagccggtactgcctgagcagcagactgagagtgtccgccaccttctggcagaacccccggaaccacttcagatgccaggtgcagttctacggcctgagcgagaacgacgagtggacccaggacagagccaagcccgtgacccagatcgtgtctgccgaagcctggggcagagccgattgcgacgtgaagctggtggaaaagagcttcgagacagacaccaacctgaacttccagaacctgagcgtgatcggcttcagaatcctgctgctgaaagtggccggctttaacctgctgatgaccctgcggctgtggtccagc

SEQ ID NO: 6080 - DNA, 2271 bp, synthetic construct
  source 1..2271: mol_type = other DNA
atggccttaccagtgaccgccttgctcctgccgctggccttgctgctccacgccgccaggccggacatcgtgatgacacagagccctgatagcctggccgtgtctctgggagagagagccaccattaactgcaaggccagccagagcgtggactacgacggcgacagcttcctgaactggtatcagcagaagcccggccagcctcctaagctgctgatctacgccgccagcaatctggaaagcggcgtgccaagcagattttccggctctggcagcggcaccgatttcaccctgacaatatccagcctccagcctgaggacgtggccgtgtactactgccagcagagcaacgacgaccctctgacctttggacagggcaccaaggtggaaatcaaactcgaggacctgaagaacgtgttcccacctgaggtggccgtgttcgagcctagcgaggccgagatcagccacacccagaaagccaccctcgtgtgcctggctaccggcttctaccccgaccatgtggaactgtcttggtgggtcaacggcaaagaggtgcacagcggcgtgtgtaccgacccccagccactgaaagaacagcccgccctgaacgacagccggtactgcctgagcagcagactgagagtgtccgccaccttctggcagaacccccggaaccacttcagatgccaggtgcagttctacggcctgagcgagaacgacgagtggacccaggacagagccaagcccgtgacccagatcgtgtctgccgaagcctggggcagagccgattgcgacgtgaagctggtggaaaagagcttcgagacagacaccaacctgaacttccagaacctgagcgtgatcggcttcagaatcctgctgctgaaagtggccggctttaacctgctgatgaccctgcggctgtggtccagcagggccaagcgatctggatctggagcaacaaacttctcactactcaaacaagcaggtgacgtggaggagaatcccgggcctactagtatggactggatttggcgcatccttttccttgtcggcgctgctaccggcgcccattccgggccccaggttcagctgcaagagtctggcggaggacttgctcaagctggcggaagcctgagactgtcttgtgccgcctctggcagaaccttcagcatgggctggtttagacaggcccctggcaaagagagagagttcgtcgccgccatcacatacagcggcggcagcccttactacgcctcttctgtcagaggccggttcaccatcagccgggacaacgccaagaacaccgtgtacctccagatgaacagcctgaagccagaggacaccgccgtgtactactgtgccgccaatccaacctacggcagcgactggaatgccgagaattggggccagggcacccaagtgacagtgtctagtggatccggcggcggaggatctggcggaggcggatctgggggcggaggctctttcgaagtccaacttgtggagtctggagggggcctggtgcagcccggcggctctctcagactgtcttgtgcggcaagcggctacaccttcacctcttactggatagaatgggtgaggcaggcacctggaaagggactggagtggattggagagattctgccaggagggggagatacaaattacaatgaaatcttcaaggggcgggccaccttttcagcggataccagcaagaatacagcttacctgcagatgaatagcctccgggcagaagataccgctgtttattattgcacgagacgggtgccaataagactggactattgggggcaagggactcttgtcaccgtcagttcaacgcgtatccagaaccctgatcctgccgtgtaccagctgcgggatagcaagagcagcgacaagagcgtgtgtctgttcaccgacttcgacagccagaccaacgtgtcccagagcaaggactccgacgtgtacatcaccgataagtgcgtgctggacatgcggagcatggacttcaagagcaactccgccgtggcctggtccaacaagtccgatttcgcctgcgccaacgccttcaacaacagcattatccccgaggacacattcttcccaagccccgagagcagctgcggctttaccagcgagagctaccagcagggcgtgctgagcgccaccatcctgtacgagatcctgctgggcaaggccaccctgtacgccgtgctggtgtctgccctggtgctgatggctatggtcaagcggaaggacagccgggga

SEQ ID NO: 6081 - DNA, 2283 bp, synthetic construct
  source 1..2283: mol_type = other DNA
atggccttaccagtgaccgccttgctcctgccgctggccttgctgctccacgccgccaggccggacatcgtgatgacacagagccctgatagcctggccgtgtctctgggagagagagccaccattaactgcaaggccagccagagcgtggactacgacggcgacagcttcctgaactggtatcagcagaagcccggccagcctcctaagctgctgatctacgccgccagcaatctggaaagcggcgtgccaagcagattttccggctctggcagcggcaccgatttcaccctgacaatatccagcctccagcctgaggacgtggccgtgtactactgccagcagagcaacgacgaccctctgacctttggacagggcaccaaggtggaaatcaaactcgagatccagaaccctgatcctgccgtgtaccagctgcgggatagcaagagcagcgacaagagcgtgtgtctgttcaccgacttcgacagccagaccaacgtgtcccagagcaaggactccgacgtgtacatcaccgataagtgcgtgctggacatgcggagcatggacttcaagagcaactccgccgtggcctggtccaacaagtccgatttcgcctgcgccaacgccttcaacaacagcattatccccgaggacacattcttcccaagccccgagagcagctgcggctttaccagcgagagctaccagcagggcgtgctgagcgccaccatcctgtacgagatcctgctgggcaaggccaccctgtacgccgtgctggtgtctgccctggtgctgatggctatggtcaagcggaaggacagccggggacgcgccaagagaagcggatctggcgtgaagcagaccctgaatttcgacctgctgaagctggctggcgacgtggaatccaacccaggccctactagtatggactggatttggcgcatccttttccttgtcggcgctgctaccggcgcccattccgggccccaggttcagctgcaagagtctggcggaggacttgctcaagctggcggaagcctgagactgtcttgtgccgcctctggcagaaccttcagcatgggctggtttagacaggcccctggcaaagagagagagttcgtcgccgccatcacatacagcggcggcagcccttactacgcctcttctgtcagaggccggttcaccatcagccgggacaacgccaagaacaccgtgtacctccagatgaacagcctgaagccagaggacaccgccgtgtactactgtgccgccaatccaacctacggcagcgactggaatgccgagaattggggccagggcacccaagtgacagtgtctagtggatccggcggcggaggatctggcggaggcggatctgggggcggaggctctttcgaagtccaacttgtggagtctggagggggcctggtgcagcccggcggctctctcagactgtcttgtgcggcaagcggctacaccttcacctcttactggatagaatgggtgaggcaggcacctggaaagggactggagtggattggagagattctgccaggagggggagatacaaattacaatgaaatcttcaaggggcgggccaccttttcagcggataccagcaagaatacagcttacctgcagatgaatagcctccgggcagaagataccgctgtttattattgcacgagacgggtgccaataagactggactattgggggcaagggactcttgtcaccgtcagttcaacgcgtgaggacctgaagaacgtgttcccacctgaggtggccgtgttcgagcctagcgaggccgagatcagccacacccagaaagccaccctcgtgtgcctggctaccggcttctaccccgaccatgtggaactgtcttggtgggtcaacggcaaagaggtgcacagcggcgtgtgtaccgacccccagccactgaaagaacagcccgccctgaacgacagccggtactgcctgagcagcagactgagagtgtccgccaccttctggcagaacccccggaaccacttcagatgccaggtgcagttctacggcctgagcgagaacgacgagtggacccaggacagagccaagcccgtgacccagatcgtgtctgccgaagcctggggcagagccgattgcgacgtgaagctggtggaaaagagcttcgagacagacaccaacctgaacttccagaacctgagcgtgatcggcttcagaatcctgctgctgaaagtggccggctttaacctgctgatgaccctgcggctgtggtccagc

SEQ ID NO: 6082 - DNA, 2289 bp, synthetic construct
  source 1..2289: mol_type = other DNA
atggccttaccagtgaccgccttgctcctgccgctggccttgctgctccacgccgccaggccggaagtgcaactggtggaatctggaggctctctggtgcagccagggggaagcctgagactgtcttgtgccgcttccggcttcaccttcgacgactacgccatgagctgggtgcgccaggtgccaggcaaaggcctggaatgggtgtccagcatcaactggagcggcacccacaccgattacgccgactccgtgaaaggcagattcacaatcagcagaaacaacgccaacaataccctgtacctgcagatgaactccctgaagtctgaggatacagcagtgtattattgcgccaagaactggcgggacgccggcaccacttggtttgagaaaagcggctctgccggacagggaacccaagtgacagtgtcctccggtaccggcggaggcggatctggcggcggaggtagcggtggcggaggatctgaattcgacatcgtgatgacacagagccctgatagcctggccgtgtctctgggagagagagccaccattaactgcaaggccagccagagcgtggactacgacggcgacagcttcctgaactggtatcagcagaagcccggccagcctcctaagctgctgatctacgccgccagcaatctggaaagcggcgtgccaagcagattttccggctctggcagcggcaccgatttcaccctgacaatatccagcctccagcctgaggacgtggccgtgtactactgccagcagagcaacgacgaccctctgacctttggacagggcaccaaggtggaaatcaaactcgaggacctgaagaacgtgttcccacctgaggtggccgtgttcgagcctagcgaggccgagatcagccacacccagaaagccaccctcgtgtgcctggctaccggcttctaccccgaccatgtggaactgtcttggtgggtcaacggcaaagaggtgcacagcggcgtgtgtaccgacccccagccactgaaagaacagcccgccctgaacgacagccggtactgcctgagcagcagactgagagtgtccgccaccttctggcagaacccccggaaccacttcagatgccaggtgcagttctacggcctgagcgagaacgacgagtggacccaggacagagccaagcccgtgacccagatcgtgtctgccgaagcctggggcagagccgattgcgacgtgaagctggtggaaaagagcttcgagacagacaccaacctgaacttccagaacctgagcgtgatcggcttcagaatcctgctgctgaaagtggccggctttaacctgctgatgaccctgcggctgtggtccagcagggccaagcgatctggatctggagcaacaaacttctcactactcaaacaagcaggtgacgtggaggagaatcccgggcctactagtatggactggatttggcgcatccttttccttgtcggcgctgctaccggcgcgcattccttcgaagtccaacttgtggagtctggagggggcctggtgcagcccggcggctctctcagactgtcttgtgcggcaagcggctacaccttcacctcttactggatagaatgggtgaggcaggcacctggaaagggactggagtggattggagagattctgccaggagggggagatacaaattacaatgaaatcttcaaggggcgggccaccttttcagcggataccagcaagaatacagcttacctgcagatgaatagcctccgggcagaagataccgctgtttattattgcacgagacgggtgccaataagactggactattgggggcaagggactcttgtcaccgtcagttcaacgcgtatccagaaccctgatcctgccgtgtaccagctgcgggatagcaagagcagcgacaagagcgtgtgtctgttcaccgacttcgacagccagaccaacgtgtcccagagcaaggactccgacgtgtacatcaccgataagtgcgtgctggacatgcggagcatggacttcaagagcaactccgccgtggcctggtccaacaagtccgatttcgcctgcgccaacgccttcaacaacagcattatccccgaggacacattcttcccaagccccgagagcagctgcggctttaccagcgagagctaccagcagggcgtgctgagcgccaccatcctgtacgagatcctgctgggcaaggccaccctgtacgccgtgctggtgtctgccctggtgctgatggctatggtcaagcggaaggacagccgggga

SEQ ID NO: 6083 - DNA, 2301 bp, synthetic construct
  source 1..2301: mol_type = other DNA
atggccttaccagtgaccgccttgctcctgccgctggccttgctgctccacgccgccaggccggaagtgcaactggtggaatctggaggctctctggtgcagccagggggaagcctgagactgtcttgtgccgcttccggcttcaccttcgacgactacgccatgagctgggtgcgccaggtgccaggcaaaggcctggaatgggtgtccagcatcaactggagcggcacccacaccgattacgccgactccgtgaaaggcagattcacaatcagcagaaacaacgccaacaataccctgtacctgcagatgaactccctgaagtctgaggatacagcagtgtattattgcgccaagaactggcgggacgccggcaccacttggtttgagaaaagcggctctgccggacagggaacccaagtgacagtgtcctccggtaccggcggaggcggatctggcggcggaggtagcggtggcggaggatctgaattcgacatcgtgatgacacagagccctgatagcctggccgtgtctctgggagagagagccaccattaactgcaaggccagccagagcgtggactacgacggcgacagcttcctgaactggtatcagcagaagcccggccagcctcctaagctgctgatctacgccgccagcaatctggaaagcggcgtgccaagcagattttccggctctggcagcggcaccgatttcaccctgacaatatccagcctccagcctgaggacgtggccgtgtactactgccagcagagcaacgacgaccctctgacctttggacagggcaccaaggtggaaatcaaactcgagatccagaaccctgatcctgccgtgtaccagctgcgggatagcaagagcagcgacaagagcgtgtgtctgttcaccgacttcgacagccagaccaacgtgtcccagagcaaggactccgacgtgtacatcaccgataagtgcgtgctggacatgcggagcatggacttcaagagcaactccgccgtggcctggtccaacaagtccgatttcgcctgcgccaacgccttcaacaacagcattatccccgaggacacattcttcccaagccccgagagcagctgcggctttaccagcgagagctaccagcagggcgtgctgagcgccaccatcctgtacgagatcctgctgggcaaggccaccctgtacgccgtgctggtgtctgccctggtgctgatggctatggtcaagcggaaggacagccggggacgcgccaagagaagcggatctggcgtgaagcagaccctgaatttcgacctgctgaagctggctggcgacgtggaatccaacccaggccctactagtatggactggatttggcgcatccttttccttgtcggcgctgctaccggcgcgcattccttcgaagtccaacttgtggagtctggagggggcctggtgcagcccggcggctctctcagactgtcttgtgcggcaagcggctacaccttcacctcttactggatagaatgggtgaggcaggcacctggaaagggactggagtggattggagagattctgccaggagggggagatacaaattacaatgaaatcttcaaggggcgggccaccttttcagcggataccagcaagaatacagcttacctgcagatgaatagcctccgggcagaagataccgctgtttattattgcacgagacgggtgccaataagactggactattgggggcaagggactcttgtcaccgtcagttcaacgcgtgaggacctgaagaacgtgttcccacctgaggtggccgtgttcgagcctagcgaggccgagatcagccacacccagaaagccaccctcgtgtgcctggctaccggcttctaccccgaccatgtggaactgtcttggtgggtcaacggcaaagaggtgcacagcggcgtgtgtaccgacccccagccactgaaagaacagcccgccctgaacgacagccggtactgcctgagcagcagactgagagtgtccgccaccttctggcagaacccccggaaccacttcagatgccaggtgcagttctacggcctgagcgagaacgacgagtggacccaggacagagccaagcccgtgacccagatcgtgtctgccgaagcctggggcagagccgattgcgacgtgaagctggtggaaaagagcttcgagacagacaccaacctgaacttccagaacctgagcgtgatcggcttcagaatcctgctgctgaaagtggccggctttaacctgctgatgaccctgcggctgtggtccagc

SEQ ID NO: 6084 - DNA, 2283 bp, synthetic construct
  source 1..2283: mol_type = other DNA
atggccttaccagtgaccgccttgctcctgccgctggccttgctgctccacgccgccaggccggaagttcagctgcttgagtctggcggaggactggttcaacctggcggaagcctgagactgtcttgtgccgccagcggcttcatcttcagcagctacgccatgagctgggtccgacaggctcctggaaagggccaagaatgggtttccggcgttagcggcacaggcgtgaacacctactacgccgatagcgtgaagggcagattcaccatcagccgggacaacagcaagaacaccctgtacctccagatgaacagcctgagagccgaggacaccgccgtgtactattgtgcctctggcaaaggctgggacagcggctcttggtacgaggactatagaggccagggcaccctggtcacagtttcttcaggtaccggcggaggcggatctggcggcggaggtagcggtggcggaggatctgaattcgacatcgtgatgacacagagccctgatagcctggccgtgtctctgggagagagagccaccattaactgcaaggccagccagagcgtggactacgacggcgacagcttcctgaactggtatcagcagaagcccggccagcctcctaagctgctgatctacgccgccagcaatctggaaagcggcgtgccaagcagattttccggctctggcagcggcaccgatttcaccctgacaatatccagcctccagcctgaggacgtggccgtgtactactgccagcagagcaacgacgaccctctgacctttggacagggcaccaaggtggaaatcaaactcgaggacctgaagaacgtgttcccacctgaggtggccgtgttcgagcctagcgaggccgagatcagccacacccagaaagccaccctcgtgtgcctggctaccggcttctaccccgaccatgtggaactgtcttggtgggtcaacggcaaagaggtgcacagcggcgtgtgtaccgacccccagccactgaaagaacagcccgccctgaacgacagccggtactgcctgagcagcagactgagagtgtccgccaccttctggcagaacccccggaaccacttcagatgccaggtgcagttctacggcctgagcgagaacgacgagtggacccaggacagagccaagcccgtgacccagatcgtgtctgccgaagcctggggcagagccgattgcgacgtgaagctggtggaaaagagcttcgagacagacaccaacctgaacttccagaacctgagcgtgatcggcttcagaatcctgctgctgaaagtggccggctttaacctgctgatgaccctgcggctgtggtccagcagggccaagcgatctggatctggagcaacaaacttctcactactcaaacaagcaggtgacgtggaggagaatcccgggcctactagtatggactggatttggcgcatccttttccttgtcggcgctgctaccggcgcgcattccttcgaagtccaacttgtggagtctggagggggcctggtgcagcccggcggctctctcagactgtcttgtgcggcaagcggctacaccttcacctcttactggatagaatgggtgaggcaggcacctggaaagggactggagtggattggagagattctgccaggagggggagatacaaattacaatgaaatcttcaaggggcgggccaccttttcagcggataccagcaagaatacagcttacctgcagatgaatagcctccgggcagaagataccgctgtttattattgcacgagacgggtgccaataagactggactattgggggcaagggactcttgtcaccgtcagttcaacgcgtatccagaaccctgatcctgccgtgtaccagctgcgggatagcaagagcagcgacaagagcgtgtgtctgttcaccgacttcgacagccagaccaacgtgtcccagagcaaggactccgacgtgtacatcaccgataagtgcgtgctggacatgcggagcatggacttcaagagcaactccgccgtggcctggtccaacaagtccgatttcgcctgcgccaacgccttcaacaacagcattatccccgaggacacattcttcccaagccccgagagcagctgcggctttaccagcgagagctaccagcagggcgtgctgagcgccaccatcctgtacgagatcctgctgggcaaggccaccctgtacgccgtgctggtgtctgccctggtgctgatggctatggtcaagcggaaggacagccgggga

SEQ ID NO: 6085 - DNA, 2295 bp, synthetic construct
  source 1..2295: mol_type = other DNA
atggccttaccagtgaccgccttgctcctgccgctggccttgctgctccacgccgccaggccggaagttcagctgcttgagtctggcggaggactggttcaacctggcggaagcctgagactgtcttgtgccgccagcggcttcatcttcagcagctacgccatgagctgggtccgacaggctcctggaaagggccaagaatgggtttccggcgttagcggcacaggcgtgaacacctactacgccgatagcgtgaagggcagattcaccatcagccgggacaacagcaagaacaccctgtacctccagatgaacagcctgagagccgaggacaccgccgtgtactattgtgcctctggcaaaggctgggacagcggctcttggtacgaggactatagaggccagggcaccctggtcacagtttcttcaggtaccggcggaggcggatctggcggcggaggtagcggtggcggaggatctgaattcgacatcgtgatgacacagagccctgatagcctggccgtgtctctgggagagagagccaccattaactgcaaggccagccagagcgtggactacgacggcgacagcttcctgaactggtatcagcagaagcccggccagcctcctaagctgctgatctacgccgccagcaatctggaaagcggcgtgccaagcagattttccggctctggcagcggcaccgatttcaccctgacaatatccagcctccagcctgaggacgtggccgtgtactactgccagcagagcaacgacgaccctctgacctttggacagggcaccaaggtggaaatcaaactcgagatccagaaccctgatcctgccgtgtaccagctgcgggatagcaagagcagcgacaagagcgtgtgtctgttcaccgacttcgacagccagaccaacgtgtcccagagcaaggactccgacgtgtacatcaccgataagtgcgtgctggacatgcggagcatggacttcaagagcaactccgccgtggcctggtccaacaagtccgatttcgcctgcgccaacgccttcaacaacagcattatccccgaggacacattcttcccaagccccgagagcagctgcggctttaccagcgagagctaccagcagggcgtgctgagcgccaccatcctgtacgagatcctgctgggcaaggccaccctgtacgccgtgctggtgtctgccctggtgctgatggctatggtcaagcggaaggacagccggggacgcgccaagagaagcggatctggcgtgaagcagaccctgaatttcgacctgctgaagctggctggcgacgtggaatccaacccaggccctactagtatggactggatttggcgcatccttttccttgtcggcgctgctaccggcgcgcattccttcgaagtccaacttgtggagtctggagggggcctggtgcagcccggcggctctctcagactgtcttgtgcggcaagcggctacaccttcacctcttactggatagaatgggtgaggcaggcacctggaaagggactggagtggattggagagattctgccaggagggggagatacaaattacaatgaaatcttcaaggggcgggccaccttttcagcggataccagcaagaatacagcttacctgcagatgaatagcctccgggcagaagataccgctgtttattattgcacgagacgggtgccaataagactggactattgggggcaagggactcttgtcaccgtcagttcaacgcgtgaggacctgaagaacgtgttcccacctgaggtggccgtgttcgagcctagcgaggccgagatcagccacacccagaaagccaccctcgtgtgcctggctaccggcttctaccccgaccatgtggaactgtcttggtgggtcaacggcaaagaggtgcacagcggcgtgtgtaccgacccccagccactgaaagaacagcccgccctgaacgacagccggtactgcctgagcagcagactgagagtgtccgccaccttctggcagaacccccggaaccacttcagatgccaggtgcagttctacggcctgagcgagaacgacgagtggacccaggacagagccaagcccgtgacccagatcgtgtctgccgaagcctggggcagagccgattgcgacgtgaagctggtggaaaagagcttcgagacagacaccaacctgaacttccagaacctgagcgtgatcggcttcagaatcctgctgctgaaagtggccggctttaacctgctgatgaccctgcggctgtggtccagc

SEQ ID NO: 6086 - DNA, 2187 bp, synthetic construct
  source 1..2187: mol_type = other DNA
atggccttaccagtgaccgccttgctcctgccgctggccttgctgctccacgccgccaggccgatgctgcccgctcctaagaatctggtggtgtccagaatcaccgaggacagcgccagactgtcttggacagctcctgatgccgccttcgacagcttccccatccggtacatcgagacactgatctggggcgaagccatctggctggatgtgcctggaagcgagagaagctacgacctgaccggactgaagcctggcacagagtatgccgtggtcatcaccggcgtgaaaggcggcagattctctagccctctggtggcctctttcaccaccggtaccggcggaggcggatctggcggcggaggtagcggtggcggaggatctgaattcgacatcgtgatgacacagagccctgatagcctggccgtgtctctgggagagagagccaccattaactgcaaggccagccagagcgtggactacgacggcgacagcttcctgaactggtatcagcagaagcccggccagcctcctaagctgctgatctacgccgccagcaatctggaaagcggcgtgccaagcagattttccggctctggcagcggcaccgatttcaccctgacaatatccagcctccagcctgaggacgtggccgtgtactactgccagcagagcaacgacgaccctctgacctttggacagggcaccaaggtggaaatcaaactcgaggacctgaagaacgtgttcccacctgaggtggccgtgttcgagcctagcgaggccgagatcagccacacccagaaagccaccctcgtgtgcctggctaccggcttctaccccgaccatgtggaactgtcttggtgggtcaacggcaaagaggtgcacagcggcgtgtgtaccgacccccagccactgaaagaacagcccgccctgaacgacagccggtactgcctgagcagcagactgagagtgtccgccaccttctggcagaacccccggaaccacttcagatgccaggtgcagttctacggcctgagcgagaacgacgagtggacccaggacagagccaagcccgtgacccagatcgtgtctgccgaagcctggggcagagccgattgcgacgtgaagctggtggaaaagagcttcgagacagacaccaacctgaacttccagaacctgagcgtgatcggcttcagaatcctgctgctgaaagtggccggctttaacctgctgatgaccctgcggctgtggtccagcagggccaagcgatctggatctggagcaacaaacttctcactactcaaacaagcaggtgacgtggaggagaatcccgggcctactagtatggactggatttggcgcatccttttccttgtcggcgctgctaccggcgcgcattccttcgaagtccaacttgtggagtctggagggggcctggtgcagcccggcggctctctcagactgtcttgtgcggcaagcggctacaccttcacctcttactggatagaatgggtgaggcaggcacctggaaagggactggagtggattggagagattctgccaggagggggagatacaaattacaatgaaatcttcaaggggcgggccaccttttcagcggataccagcaagaatacagcttacctgcagatgaatagcctccgggcagaagataccgctgtttattattgcacgagacgggtgccaataagactggactattgggggcaagggactcttgtcaccgtcagttcaacgcgtatccagaaccctgatcctgccgtgtaccagctgcgggatagcaagagcagcgacaagagcgtgtgtctgttcaccgacttcgacagccagaccaacgtgtcccagagcaaggactccgacgtgtacatcaccgataagtgcgtgctggacatgcggagcatggacttcaagagcaactccgccgtggcctggtccaacaagtccgatttcgcctgcgccaacgccttcaacaacagcattatccccgaggacacattcttcccaagccccgagagcagctgcggctttaccagcgagagctaccagcagggcgtgctgagcgccaccatcctgtacgagatcctgctgggcaaggccaccctgtacgccgtgctggtgtctgccctggtgctgatggctatggtcaagcggaaggacagccgggga

SEQ ID NO: 6087 - DNA, 2199 bp, synthetic construct
  source 1..2199: mol_type = other DNA
atggccttaccagtgaccgccttgctcctgccgctggccttgctgctccacgccgccaggccgatgctgcccgctcctaagaatctggtggtgtccagaatcaccgaggacagcgccagactgtcttggacagctcctgatgccgccttcgacagcttccccatccggtacatcgagacactgatctggggcgaagccatctggctggatgtgcctggaagcgagagaagctacgacctgaccggactgaagcctggcacagagtatgccgtggtcatcaccggcgtgaaaggcggcagattctctagccctctggtggcctctttcaccaccggtaccggcggaggcggatctggcggcggaggtagcggtggcggaggatctgaattcgacatcgtgatgacacagagccctgatagcctggccgtgtctctgggagagagagccaccattaactgcaaggccagccagagcgtggactacgacggcgacagcttcctgaactggtatcagcagaagcccggccagcctcctaagctgctgatctacgccgccagcaatctggaaagcggcgtgccaagcagattttccggctctggcagcggcaccgatttcaccctgacaatatccagcctccagcctgaggacgtggccgtgtactactgccagcagagcaacgacgaccctctgacctttggacagggcaccaaggtggaaatcaaactcgagatccagaaccctgatcctgccgtgtaccagctgcgggatagcaagagcagcgacaagagcgtgtgtctgttcaccgacttcgacagccagaccaacgtgtcccagagcaaggactccgacgtgtacatcaccgataagtgcgtgctggacatgcggagcatggacttcaagagcaactccgccgtggcctggtccaacaagtccgatttcgcctgcgccaacgccttcaacaacagcattatccccgaggacacattcttcccaagccccgagagcagctgcggctttaccagcgagagctaccagcagggcgtgctgagcgccaccatcctgtacgagatcctgctgggcaaggccaccctgtacgccgtgctggtgtctgccctggtgctgatggctatggtcaagcggaaggacagccggggacgcgccaagagaagcggatctggcgtgaagcagaccctgaatttcgacctgctgaagctggctggcgacgtggaatccaacccaggccctactagtatggactggatttggcgcatccttttccttgtcggcgctgctaccggcgcgcattccttcgaagtccaacttgtggagtctggagggggcctggtgcagcccggcggctctctcagactgtcttgtgcggcaagcggctacaccttcacctcttactggatagaatgggtgaggcaggcacctggaaagggactggagtggattggagagattctgccaggagggggagatacaaattacaatgaaatcttcaaggggcgggccaccttttcagcggataccagcaagaatacagcttacctgcagatgaatagcctccgggcagaagataccgctgtttattattgcacgagacgggtgccaataagactggactattgggggcaagggactcttgtcaccgtcagttcaacgcgtgaggacctgaagaacgtgttcccacctgaggtggccgtgttcgagcctagcgaggccgagatcagccacacccagaaagccaccctcgtgtgcctggctaccggcttctaccccgaccatgtggaactgtcttggtgggtcaacggcaaagaggtgcacagcggcgtgtgtaccgacccccagccactgaaagaacagcccgccctgaacgacagccggtactgcctgagcagcagactgagagtgtccgccaccttctggcagaacccccggaaccacttcagatgccaggtgcagttctacggcctgagcgagaacgacgagtggacccaggacagagccaagcccgtgacccagatcgtgtctgccgaagcctggggcagagccgattgcgacgtgaagctggtggaaaagagcttcgagacagacaccaacctgaacttccagaacctgagcgtgatcggcttcagaatcctgctgctgaaagtggccggctttaacctgctgatgaccctgcggctgtggtccagc

SEQ ID NO: 6088 - DNA, 2274 bp, synthetic construct
  source 1..2274: mol_type = other DNA
atggccttaccagtgaccgccttgctcctgccgctggccttgctgctccacgccgccaggccggaggtgcagctggttgaatctggcggaggactggttcagcctggcggatctctgagactgtcttgtgccgccagcggcttcaacatcaaggatacctgtatcggctgggttcgcagagcccctggcaaagaggaagaactggtcgccaaaatctgcaagtacagcggccacaccagatacgccgacagcgtgaagggcagattcaccatcagcgccgacaccagcaagaacaccgcctacctccagatgaacagcctgagagccgaggacaccgccgtgtactattgtgccgctgtgtccgtcagagatgggcactacaattactggggccagggcaccaccgtgaccgtttcttcaggtaccggcggaggcggatctggcggcggaggtagcggtggcggaggatctgaattcgacatcgtgatgacacagagccctgatagcctggccgtgtctctgggagagagagccaccattaactgcaaggccagccagagcgtggactacgacggcgacagcttcctgaactggtatcagcagaagcccggccagcctcctaagctgctgatctacgccgccagcaatctggaaagcggcgtgccaagcagattttccggctctggcagcggcaccgatttcaccctgacaatatccagcctccagcctgaggacgtggccgtgtactactgccagcagagcaacgacgaccctctgacctttggacagggcaccaaggtggaaatcaaactcgaggacctgaagaacgtgttcccacctgaggtggccgtgttcgagcctagcgaggccgagatcagccacacccagaaagccaccctcgtgtgcctggctaccggcttctaccccgaccatgtggaactgtcttggtgggtcaacggcaaagaggtgcacagcggcgtgtgtaccgacccccagccactgaaagaacagcccgccctgaacgacagccggtactgcctgagcagcagactgagagtgtccgccaccttctggcagaacccccggaaccacttcagatgccaggtgcagttctacggcctgagcgagaacgacgagtggacccaggacagagccaagcccgtgacccagatcgtgtctgccgaagcctggggcagagccgattgcgacgtgaagctggtggaaaagagcttcgagacagacaccaacctgaacttccagaacctgagcgtgatcggcttcagaatcctgctgctgaaagtggccggctttaacctgctgatgaccctgcggctgtggtccagcagggccaagcgatctggatctggagcaacaaacttctcactactcaaacaagcaggtgacgtggaggagaatcccgggcctactagtatggactggatttggcgcatccttttccttgtcggcgctgctaccggcgcgcattccttcgaagtccaacttgtggagtctggagggggcctggtgcagcccggcggctctctcagactgtcttgtgcggcaagcggctacaccttcacctcttactggatagaatgggtgaggcaggcacctggaaagggactggagtggattggagagattctgccaggagggggagatacaaattacaatgaaatcttcaaggggcgggccaccttttcagcggataccagcaagaatacagcttacctgcagatgaatagcctccgggcagaagataccgctgtttattattgcacgagacgggtgccaataagactggactattgggggcaagggactcttgtcaccgtcagttcaacgcgtatccagaaccctgatcctgccgtgtaccagctgcgggatagcaagagcagcgacaagagcgtgtgtctgttcaccgacttcgacagccagaccaacgtgtcccagagcaaggactccgacgtgtacatcaccgataagtgcgtgctggacatgcggagcatggacttcaagagcaactccgccgtggcctggtccaacaagtccgatttcgcctgcgccaacgccttcaacaacagcattatccccgaggacacattcttcccaagccccgagagcagctgcggctttaccagcgagagctaccagcagggcgtgctgagcgccaccatcctgtacgagatcctgctgggcaaggccaccctgtacgccgtgctggtgtctgccctggtgctgatggctatggtcaagcggaaggacagccgggga

SEQ ID NO: 6089 - DNA, 2286 bp, synthetic construct
  source 1..2286: mol_type = other DNA
atggccttaccagtgaccgccttgctcctgccgctggccttgctgctccacgccgccaggccggaggtgcagctggttgaatctggcggaggactggttcagcctggcggatctctgagactgtcttgtgccgccagcggcttcaacatcaaggatacctgtatcggctgggttcgcagagcccctggcaaagaggaagaactggtcgccaaaatctgcaagtacagcggccacaccagatacgccgacagcgtgaagggcagattcaccatcagcgccgacaccagcaagaacaccgcctacctccagatgaacagcctgagagccgaggacaccgccgtgtactattgtgccgctgtgtccgtcagagatgggcactacaattactggggccagggcaccaccgtgaccgtttcttcaggtaccggcggaggcggatctggcggcggaggtagcggtggcggaggatctgaattcgacatcgtgatgacacagagccctgatagcctggccgtgtctctgggagagagagccaccattaactgcaaggccagccagagcgtggactacgacggcgacagcttcctgaactggtatcagcagaagcccggccagcctcctaagctgctgatctacgccgccagcaatctggaaagcggcgtgccaagcagattttccggctctggcagcggcaccgatttcaccctgacaatatccagcctccagcctgaggacgtggccgtgtactactgccagcagagcaacgacgaccctctgacctttggacagggcaccaaggtggaaatcaaactcgagatccagaaccctgatcctgccgtgtaccagctgcgggatagcaagagcagcgacaagagcgtgtgtctgttcaccgacttcgacagccagaccaacgtgtcccagagcaaggactccgacgtgtacatcaccgataagtgcgtgctggacatgcggagcatggacttcaagagcaactccgccgtggcctggtccaacaagtccgatttcgcctgcgccaacgccttcaacaacagcattatccccgaggacacattcttcccaagccccgagagcagctgcggctttaccagcgagagctaccagcagggcgtgctgagcgccaccatcctgtacgagatcctgctgggcaaggccaccctgtacgccgtgctggtgtctgccctggtgctgatggctatggtcaagcggaaggacagccggggacgcgccaagagaagcggatctggcgtgaagcagaccctgaatttcgacctgctgaagctggctggcgacgtggaatccaacccaggccctactagtatggactggatttggcgcatccttttccttgtcggcgctgctaccggcgcgcattccttcgaagtccaacttgtggagtctggagggggcctggtgcagcccggcggctctctcagactgtcttgtgcggcaagcggctacaccttcacctcttactggatagaatgggtgaggcaggcacctggaaagggactggagtggattggagagattctgccaggagggggagatacaaattacaatgaaatcttcaaggggcgggccaccttttcagcggataccagcaagaatacagcttacctgcagatgaatagcctccgggcagaagataccgctgtttattattgcacgagacgggtgccaataagactggactattgggggcaagggactcttgtcaccgtcagttcaacgcgtgaggacctgaagaacgtgttcccacctgaggtggccgtgttcgagcctagcgaggccgagatcagccacacccagaaagccaccctcgtgtgcctggctaccggcttctaccccgaccatgtggaactgtcttggtgggtcaacggcaaagaggtgcacagcggcgtgtgtaccgacccccagccactgaaagaacagcccgccctgaacgacagccggtactgcctgagcagcagactgagagtgtccgccaccttctggcagaacccccggaaccacttcagatgccaggtgcagttctacggcctgagcgagaacgacgagtggacccaggacagagccaagcccgtgacccagatcgtgtctgccgaagcctggggcagagccgattgcgacgtgaagctggtggaaaagagcttcgagacagacaccaacctgaacttccagaacctgagcgtgatcggcttcagaatcctgctgctgaaagtggccggctttaacctgctgatgaccctgcggctgtggtccagc

SEQ ID NO: 6090 - DNA, 3390 bp, synthetic construct
  source 1..3390: mol_type = other DNA
atggccttaccagtgaccgccttgctcctgccgctggccttgctgctccacgccgccaggccggaagtgcagctggttgaatctggcggaggactggttcaggctggcggatctctgagactgtcttgtgccgccagcggcagaacctttagcatgggctggtttagacaggcccctggcaaagagagagagttcgtcgccgccatcacatactctggcggcagcccttactacgccgactctgtgaagggcagattcaccatcagccgggacaacgccaagaacaccgtgtacctccagatgaacagcctgaagcctgaggacaccgccgtgtactactgcgccgccaatccaacatacggcagcgactggaacgccgagaattggggccagggaacccaagtgacagtgtctagcggtaccggcggaggcggatctggcggcggaggtagcggtggcggaggatctgaattcgacatcgtgatgacacagagccctgatagcctggccgtgtctctgggagagagagccaccattaactgcaaggccagccagagcgtggactacgacggcgacagcttcctgaactggtatcagcagaagcccggccagcctcctaagctgctgatctacgccgccagcaatctggaaagcggcgtgccaagcagattttccggctctggcagcggcaccgatttcaccctgacaatatccagcctccagcctgaggacgtggccgtgtactactgccagcagagcaacgacgaccctctgacctttggacagggcaccaaggtggaaatcaaactcgaggacctgaagaacgtgttcccacctgaggtggccgtgttcgagcctagcgaggccgagatcagccacacccagaaagccaccctcgtgtgcctggctaccggcttctaccccgaccatgtggaactgtcttggtgggtcaacggcaaagaggtgcacagcggcgtgtgtaccgacccccagccactgaaagaacagcccgccctgaacgacagccggtactgcctgagcagcagactgagagtgtccgccaccttctggcagaacccccggaaccacttcagatgccaggtgcagttctacggcctgagcgagaacgacgagtggacccaggacagagccaagcccgtgacccagatcgtgtctgccgaagcctggggcagagccgattgcgacgtgaagctggtggaaaagagcttcgagacagacaccaacctgaacttccagaacctgagcgtgatcggcttcagaatcctgctgctgaaagtggccggctttaacctgctgatgaccctgcggctgtggtccagcagggccaagcgatctggatctggagcaacaaacttctcactactcaaacaagcaggtgacgtggaggagaatcccgggcctactagtgccaccatggactggatttggcgcatccttttccttgtcggcgctgctaccggcgcccattccgggcccgaagtgcaactggttgaatccggtggcggcctggtgcaagcaggcggatctctcagacttagctgtgccgcctccggcagaaccttcacaatgggatggtttaggcaggctccagggaaagagagagagttcgtcgccgccatctctctgtctcccacactggcctactacgccgactctgtgaaaggccggttcaccatctccagagataatgccaagaacaccgtggtgctgcaaatgaactctctgaaacccgaggatacagccctgtactattgtgccgctgaccggaagtccgtgatgagcatcagacccgattactggggacagggcacacaagtcacagtgtcctctggatccggcggcggaggatctggcggaggcggatctgggggcggaggctctttcgaagtccaacttgtggagtctggagggggcctggtgcagcccggcggctctctcagactgtcttgtgcggcaagcggctacaccttcacctcttactggatagaatgggtgaggcaggcacctggaaagggactggagtggattggagagattctgccaggagggggagatacaaattacaatgaaatcttcaaggggcgggccaccttttcagcggataccagcaagaatacagcttacctgcagatgaatagcctccgggcagaagataccgctgtttattattgcacgagacgggtgccaataagactggactattgggggcaagggactcttgtcaccgtcagttcaacgcgtatccagaaccctgatcctgccgtgtaccagctgcgggatagcaagagcagcgacaagagcgtgtgtctgttcaccgacttcgacagccagaccaacgtgtcccagagcaaggactccgacgtgtacatcaccgataagtgcgtgctggacatgcggagcatggacttcaagagcaactccgccgtggcctggtccaacaagtccgatttcgcctgcgccaacgccttcaacaacagcattatccccgaggacacattcttcccaagccccgagagcagctgcggctttaccagcgagagctaccagcagggcgtgctgagcgccaccatcctgtacgagatcctgctgggcaaggccaccctgtacgccgtgctggtgtctgccctggtgctgatggctatggtcaagcggaaggacagccggggacgcgccaagagaagcggatctggcgtgaagcagaccctgaatttcgacctgctgaagctggctggcgacgtggaatccaacccaggcccttctagaggccatatgaccgagtacaagcccacggtgcgcctcgccacccgcgacgacgtccccagggccgtacgcaccctcgccgccgcgttcgccgactaccccgccacgcgccacaccgtcgatccggaccgccacatcgagcgggtcaccgagctgcaagaactcttcctcacgcgcgtcgggctcgacatcggcaaggtgtgggtcgcggacgacggcgccgcggtggcggtctggaccacgccggagagcgtcgaagcgggggcggtgttcgccgagatcggcccgcgcatggccgagttgagcggttcccggctggccgcgcagcaacagatggaaggcctcctggcgccgcaccggcccaaggagcccgcgtggttcctggccaccgtcggcgtctcgcccgaccaccagggcaagggtctgggcagcgccgtcgtgctccccggagtggaggcggccgagcgcgccggggtgcccgccttcctggagacctccgcgccccgcaacctccccttctacgagcggctcggcttcaccgtcaccgccgacgtcgaggtgcccgaaggaccgcgcacctggtgcatgacccgcaagcccggtgcctga

SEQ ID NO: 6091 - DNA, 2304 bp, synthetic construct
  source 1..2304: mol_type = other DNA
atggccttaccagtgaccgccttgctcctgccgctggccttgctgctccacgccgccaggccggaagtgcagctggttgaatctggcggaggactggttcagcctggcggatctctgagactgtcttgtgccgcctctggcttcgccagcgactactatatcatcggctggttcagacaggcccctggcaaagagagagagggcgtcagctgtatcagcagcagatacgccaacaccaactacgccgacagcgtgaagggcagattcaccatcagccgggacaacgccaagaacaccgtgtacctccagatgaacagcctgaagcctgaggacaccgccgtgtactactgtgccgccgacaccagaagatacacctgtcctgacattgccaccatgcaccggaacttcgattcttggggccagggcacactggtcaccgtttcttctggtaccggcggaggcggatctggcggcggaggtagcggtggcggaggatctgaattcgacatcgtgatgacacagagccctgatagcctggccgtgtctctgggagagagagccaccattaactgcaaggccagccagagcgtggactacgacggcgacagcttcctgaactggtatcagcagaagcccggccagcctcctaagctgctgatctacgccgccagcaatctggaaagcggcgtgccaagcagattttccggctctggcagcggcaccgatttcaccctgacaatatccagcctccagcctgaggacgtggccgtgtactactgccagcagagcaacgacgaccctctgacctttggacagggcaccaaggtggaaatcaaactcgaggacctgaagaacgtgttcccacctgaggtggccgtgttcgagcctagcgaggccgagatcagccacacccagaaagccaccctcgtgtgcctggctaccggcttctaccccgaccatgtggaactgtcttggtgggtcaacggcaaagaggtgcacagcggcgtgtgtaccgacccccagccactgaaagaacagcccgccctgaacgacagccggtactgcctgagcagcagactgagagtgtccgccaccttctggcagaacccccggaaccacttcagatgccaggtgcagttctacggcctgagcgagaacgacgagtggacccaggacagagccaagcccgtgacccagatcgtgtctgccgaagcctggggcagagccgattgcgacgtgaagctggtggaaaagagcttcgagacagacaccaacctgaacttccagaacctgagcgtgatcggcttcagaatcctgctgctgaaagtggccggctttaacctgctgatgaccctgcggctgtggtccagcagggccaagcgatctggatctggagcaacaaacttctcactactcaaacaagcaggtgacgtggaggagaatcccgggcctactagtatggactggatttggcgcatccttttccttgtcggcgctgctaccggcgcgcattccttcgaagtccaacttgtggagtctggagggggcctggtgcagcccggcggctctctcagactgtcttgtgcggcaagcggctacaccttcacctcttactggatagaatgggtgaggcaggcacctggaaagggactggagtggattggagagattctgccaggagggggagatacaaattacaatgaaatcttcaaggggcgggccaccttttcagcggataccagcaagaatacagcttacctgcagatgaatagcctccgggcagaagataccgctgtttattattgcacgagacgggtgccaataagactggactattgggggcaagggactcttgtcaccgtcagttcaacgcgtatccagaaccctgatcctgccgtgtaccagctgcgggatagcaagagcagcgacaagagcgtgtgtctgttcaccgacttcgacagccagaccaacgtgtcccagagcaaggactccgacgtgtacatcaccgataagtgcgtgctggacatgcggagcatggacttcaagagcaactccgccgtggcctggtccaacaagtccgatttcgcctgcgccaacgccttcaacaacagcattatccccgaggacacattcttcccaagccccgagagcagctgcggctttaccagcgagagctaccagcagggcgtgctgagcgccaccatcctgtacgagatcctgctgggcaaggccaccctgtacgccgtgctggtgtctgccctggtgctgatggctatggtcaagcggaaggacagccggggataa

SEQ ID NO: 6092 - DNA, 2304 bp, synthetic construct
  source 1..2304: mol_type = other DNA
atggccttaccagtgaccgccttgctcctgccgctggccttgctgctccacgccgccaggccggaagtgcagctggttgaatctggcggaggactggttcagcctggcggatctctgagactgagctgtgaagccagcggcttcgccagcgacgattacatcatcggctggttcagacaggcccctggcaaagagagagagggcgtcagctgcatcagctctaagtacgccaacaccgtgtacaccgacagcgtgaagggcagattcagactgagcagaggcaccgccaagaataccgtgtacctccagatgagcgccctgaagcctgaggataccgccgtgtactactgcgctatggacagccgcagagtgacatgccctgagatcagcaccatgcaccggaacttcgattcttggggccagggcacactggtcacagtgtcatctggtaccggcggaggcggatctggcggcggaggtagcggtggcggaggatctgaattcgacatcgtgatgacacagagccctgatagcctggccgtgtctctgggagagagagccaccattaactgcaaggccagccagagcgtggactacgacggcgacagcttcctgaactggtatcagcagaagcccggccagcctcctaagctgctgatctacgccgccagcaatctggaaagcggcgtgccaagcagattttccggctctggcagcggcaccgatttcaccctgacaatatccagcctccagcctgaggacgtggccgtgtactactgccagcagagcaacgacgaccctctgacctttggacagggcaccaaggtggaaatcaaactcgaggacctgaagaacgtgttcccacctgaggtggccgtgttcgagcctagcgaggccgagatcagccacacccagaaagccaccctcgtgtgcctggctaccggcttctaccccgaccatgtggaactgtcttggtgggtcaacggcaaagaggtgcacagcggcgtgtgtaccgacccccagccactgaaagaacagcccgccctgaacgacagccggtactgcctgagcagcagactgagagtgtccgccaccttctggcagaacccccggaaccacttcagatgccaggtgcagttctacggcctgagcgagaacgacgagtggacccaggacagagccaagcccgtgacccagatcgtgtctgccgaagcctggggcagagccgattgcgacgtgaagctggtggaaaagagcttcgagacagacaccaacctgaacttccagaacctgagcgtgatcggcttcagaatcctgctgctgaaagtggccggctttaacctgctgatgaccctgcggctgtggtccagcagggccaagcgatctggatctggagcaacaaacttctcactactcaaacaagcaggtgacgtggaggagaatcccgggcctactagtatggactggatttggcgcatccttttccttgtcggcgctgctaccggcgcgcattccttcgaagtccaacttgtggagtctggagggggcctggtgcagcccggcggctctctcagactgtcttgtgcggcaagcggctacaccttcacctcttactggatagaatgggtgaggcaggcacctggaaagggactggagtggattggagagattctgccaggagggggagatacaaattacaatgaaatcttcaaggggcgggccaccttttcagcggataccagcaagaatacagcttacctgcagatgaatagcctccgggcagaagataccgctgtttattattgcacgagacgggtgccaataagactggactattgggggcaagggactcttgtcaccgtcagttcaacgcgtatccagaaccctgatcctgccgtgtaccagctgcgggatagcaagagcagcgacaagagcgtgtgtctgttcaccgacttcgacagccagaccaacgtgtcccagagcaaggactccgacgtgtacatcaccgataagtgcgtgctggacatgcggagcatggacttcaagagcaactccgccgtggcctggtccaacaagtccgatttcgcctgcgccaacgccttcaacaacagcattatccccgaggacacattcttcccaagccccgagagcagctgcggctttaccagcgagagctaccagcagggcgtgctgagcgccaccatcctgtacgagatcctgctgggcaaggccaccctgtacgccgtgctggtgtctgccctggtgctgatggctatggtcaagcggaaggacagccggggataa

SEQ ID NO: 6093 - DNA, 2301 bp, synthetic construct
  source 1..2301: mol_type = other DNA
atggccttaccagtgaccgccttgctcctgccgctggccttgctgctccacgccgccaggccggaagtgcagctggttgaatctggcggaggactggttcagcctggcggatctctgagactgtcttgtgccgcctctggcttcgccagcgactactatatcatcggctggttcagacaggcccctggcaaagagagagagggcgtcagctgtatcagcagcagatacgccaacaccaactacgccgacagcgtgaagggcagattcaccatcagccgggacaacgccaagaacaccgtgtacctccagatgaacagcctgaagcctgaggacaccgccgtgtactactgtgccgccgacaccagaagatacacctgtcctgacattgccaccatgcaccggaacttcgattcttggggccagggcacactggtcaccgtttcttctggtaccggcggaggcggatctggcggcggaggtagcggtggcggaggatctgaattcgacatcgtgatgacacagagccctgatagcctggccgtgtctctgggagagagagccaccattaactgcaaggccagccagagcgtggactacgacggcgacagcttcctgaactggtatcagcagaagcccggccagcctcctaagctgctgatctacgccgccagcaatctggaaagcggcgtgccaagcagattttccggctctggcagcggcaccgatttcaccctgacaatatccagcctccagcctgaggacgtggccgtgtactactgccagcagagcaacgacgaccctctgacctttggacagggcaccaaggtggaaatcaaactcgagatccagaaccctgatcctgccgtgtaccagctgcgggatagcaagagcagcgacaagagcgtgtgtctgttcaccgacttcgacagccagaccaacgtgtcccagagcaaggactccgacgtgtacatcaccgataagtgcgtgctggacatgcggagcatggacttcaagagcaactccgccgtggcctggtccaacaagtccgatttcgcctgcgccaacgccttcaacaacagcattatccccgaggacacattcttcccaagccccgagagcagctgcggctttaccagcgagagctaccagcagggcgtgctgagcgccaccatcctgtacgagatcctgctgggcaaggccaccctgtacgccgtgctggtgtctgccctggtgctgatggctatggtcaagcggaaggacagccggggaagggccaagcgatctggatctggagcaacaaacttctcactactcaaacaagcaggtgacgtggaggagaatcccgggcctactagtatggactggatttggcgcatccttttccttgtcggcgctgctaccggcgcgcattccttcgaagtccaacttgtggagtctggagggggcctggtgcagcccggcggctctctcagactgtcttgtgcggcaagcggctacaccttcacctcttactggatagaatgggtgaggcaggcacctggaaagggactggagtggattggagagattctgccaggagggggagatacaaattacaatgaaatcttcaaggggcgggccaccttttcagcggataccagcaagaatacagcttacctgcagatgaatagcctccgggcagaagataccgctgtttattattgcacgagacgggtgccaataagactggactattgggggcaagggactcttgtcaccgtcagttcaacgcgtgacctgaagaacgtgttcccacctgaggtggccgtgttcgagcctagcgaggccgagatcagccacacccagaaagccaccctcgtgtgcctggctaccggcttctaccccgaccatgtggaactgtcttggtgggtcaacggcaaagaggtgcacagcggcgtgtgtaccgacccccagccactgaaagaacagcccgccctgaacgacagccggtactgcctgagcagcagactgagagtgtccgccaccttctggcagaacccccggaaccacttcagatgccaggtgcagttctacggcctgagcgagaacgacgagtggacccaggacagagccaagcccgtgacccagatcgtgtctgccgaagcctggggcagagccgattgcgacgtgaagctggtggaaaagagcttcgagacagacaccaacctgaacttccagaacctgagcgtgatcggcttcagaatcctgctgctgaaagtggccggctttaacctgctgatgaccctgcggctgtggtccagc

SEQ ID NO: 6094 - DNA, 2301 bp, synthetic construct
  source 1..2301: mol_type = other DNA
atggccttaccagtgaccgccttgctcctgccgctggccttgctgctccacgccgccaggccggaagtgcagctggttgaatctggcggaggactggttcagcctggcggatctctgagactgagctgtgaagccagcggcttcgccagcgacgattacatcatcggctggttcagacaggcccctggcaaagagagagagggcgtcagctgcatcagctctaagtacgccaacaccgtgtacaccgacagcgtgaagggcagattcagactgagcagaggcaccgccaagaataccgtgtacctccagatgagcgccctgaagcctgaggataccgccgtgtactactgcgctatggacagccgcagagtgacatgccctgagatcagcaccatgcaccggaacttcgattcttggggccagggcacactggtcacagtgtcatctggtaccggcggaggcggatctggcggcggaggtagcggtggcggaggatctgaattcgacatcgtgatgacacagagccctgatagcctggccgtgtctctgggagagagagccaccattaactgcaaggccagccagagcgtggactacgacggcgacagcttcctgaactggtatcagcagaagcccggccagcctcctaagctgctgatctacgccgccagcaatctggaaagcggcgtgccaagcagattttccggctctggcagcggcaccgatttcaccctgacaatatccagcctccagcctgaggacgtggccgtgtactactgccagcagagcaacgacgaccctctgacctttggacagggcaccaaggtggaaatcaaactcgagatccagaaccctgatcctgccgtgtaccagctgcgggatagcaagagcagcgacaagagcgtgtgtctgttcaccgacttcgacagccagaccaacgtgtcccagagcaaggactccgacgtgtacatcaccgataagtgcgtgctggacatgcggagcatggacttcaagagcaactccgccgtggcctggtccaacaagtccgatttcgcctgcgccaacgccttcaacaacagcattatccccgaggacacattcttcccaagccccgagagcagctgcggctttaccagcgagagctaccagcagggcgtgctgagcgccaccatcctgtacgagatcctgctgggcaaggccaccctgtacgccgtgctggtgtctgccctggtgctgatggctatggtcaagcggaaggacagccggggaagggccaagcgatctggatctggagcaacaaacttctcactactcaaacaagcaggtgacgtggaggagaatcccgggcctactagtatggactggatttggcgcatccttttccttgtcggcgctgctaccggcgcgcattccttcgaagtccaacttgtggagtctggagggggcctggtgcagcccggcggctctctcagactgtcttgtgcggcaagcggctacaccttcacctcttactggatagaatgggtgaggcaggcacctggaaagggactggagtggattggagagattctgccaggagggggagatacaaattacaatgaaatcttcaaggggcgggccaccttttcagcggataccagcaagaatacagcttacctgcagatgaatagcctccgggcagaagataccgctgtttattattgcacgagacgggtgccaataagactggactattgggggcaagggactcttgtcaccgtcagttcaacgcgtgacctgaagaacgtgttcccacctgaggtggccgtgttcgagcctagcgaggccgagatcagccacacccagaaagccaccctcgtgtgcctggctaccggcttctaccccgaccatgtggaactgtcttggtgggtcaacggcaaagaggtgcacagcggcgtgtgtaccgacccccagccactgaaagaacagcccgccctgaacgacagccggtactgcctgagcagcagactgagagtgtccgccaccttctggcagaacccccggaaccacttcagatgccaggtgcagttctacggcctgagcgagaacgacgagtggacccaggacagagccaagcccgtgacccagatcgtgtctgccgaagcctggggcagagccgattgcgacgtgaagctggtggaaaagagcttcgagacagacaccaacctgaacttccagaacctgagcgtgatcggcttcagaatcctgctgctgaaagtggccggctttaacctgctgatgaccctgcggctgtggtccagc

SEQ ID NO: 6095 - DNA, 2274 bp, synthetic construct
  source 1..2274: mol_type = other DNA
atggccttaccagtgaccgccttgctcctgccgctggccttgctgctccacgccgccaggccgcaagtcaaactggaagaaagcggtggcggcctggtgcaacctggcgaatctctgagactgagctgtagcgccagcggctccatcttcaaggtgttcagagtgttcgccatgagctggtacaggcaaggccctggcaagcagagagagctggtcgcctctatcagcagcggcgagacaaccacatacgccgaatctgtgaaaggccggttcaccatcagccgggataatgccaagaataccgcctatctccagatggactccctgaagcctgaagatacagctgtgtactactgcaacgccgaccataccttcaccggcgatttttggggccagggaacccaagtgaccgtgtctagtggtaccggcggaggcggatctggcggcggaggtagcggtggcggaggatctgaattcgacatcgtgatgacacagagccctgatagcctggccgtgtctctgggagagagagccaccattaactgcaaggccagccagagcgtggactacgacggcgacagcttcctgaactggtatcagcagaagcccggccagcctcctaagctgctgatctacgccgccagcaatctggaaagcggcgtgccaagcagattttccggctctggcagcggcaccgatttcaccctgacaatatccagcctccagcctgaggacgtggccgtgtactactgccagcagagcaacgacgaccctctgacctttggacagggcaccaaggtggaaatcaaactcgagatccagaaccctgatcctgccgtgtaccagctgcgggatagcaagagcagcgacaagagcgtgtgtctgttcaccgacttcgacagccagaccaacgtgtcccagagcaaggactccgacgtgtacatcaccgataagtgcgtgctggacatgcggagcatggacttcaagagcaactccgccgtggcctggtccaacaagtccgatttcgcctgcgccaacgccttcaacaacagcattatccccgaggacacattcttcccaagccccgagagcagctgcggctttaccagcgagagctaccagcagggcgtgctgagcgccaccatcctgtacgagatcctgctgggcaaggccaccctgtacgccgtgctggtgtctgccctggtgctgatggctatggtcaagcggaaggacagccggggaagggccaagcgatctggatctggagcaacaaacttctcactactcaaacaagcaggtgacgtggaggagaatcccgggcctactagtatggactggatttggcgcatccttttccttgtcggcgctgctaccggcgcgcattccttcgaagtccaacttgtggagtctggagggggcctggtgcagcccggcggctctctcagactgtcttgtgcggcaagcggctacaccttcacctcttactggatagaatgggtgaggcaggcacctggaaagggactggagtggattggagagattctgccaggagggggagatacaaattacaatgaaatcttcaaggggcgggccaccttttcagcggataccagcaagaatacagcttacctgcagatgaatagcctccgggcagaagataccgctgtttattattgcacgagacgggtgccaataagactggactattgggggcaagggactcttgtcaccgtcagttcaacgcgtgacctgaagaacgtgttcccacctgaggtggccgtgttcgagcctagcgaggccgagatcagccacacccagaaagccaccctcgtgtgcctggctaccggcttctaccccgaccatgtggaactgtcttggtgggtcaacggcaaagaggtgcacagcggcgtgtgtaccgacccccagccactgaaagaacagcccgccctgaacgacagccggtactgcctgagcagcagactgagagtgtccgccaccttctggcagaacccccggaaccacttcagatgccaggtgcagttctacggcctgagcgagaacgacgagtggacccaggacagagccaagcccgtgacccagatcgtgtctgccgaagcctggggcagagccgattgcgacgtgaagctggtggaaaagagcttcgagacagacaccaacctgaacttccagaacctgagcgtgatcggcttcagaatcctgctgctgaaagtggccggctttaacctgctgatgaccctgcggctgtggtccagc

SEQ ID NO: 6096 - DNA, 2280 bp, synthetic construct
  source 1..2280: mol_type = other DNA
atggccttaccagtgaccgccttgctcctgccgctggccttgctgctccacgccgccaggccggacatcgtgatgacacagagccctgatagcctggccgtgtctctgggagagagagccaccattaactgcaaggccagccagagcgtggactacgacggcgacagcttcctgaactggtatcagcagaagcccggccagcctcctaagctgctgatctacgccgccagcaatctggaaagcggcgtgccaagcagattttccggctctggcagcggcaccgatttcaccctgacaatatccagcctccagcctgaggacgtggccgtgtactactgccagcagagcaacgacgaccctctgacctttggacagggcaccaaggtggaaatcaaactcgaggacctgaagaacgtgttcccacctgaggtggccgtgttcgagcctagcgaggccgagatcagccacacccagaaagccaccctcgtgtgcctggctaccggcttctaccccgaccatgtggaactgtcttggtgggtcaacggcaaagaggtgcacagcggcgtgtgtaccgacccccagccactgaaagaacagcccgccctgaacgacagccggtactgcctgagcagcagactgagagtgtccgccaccttctggcagaacccccggaaccacttcagatgccaggtgcagttctacggcctgagcgagaacgacgagtggacccaggacagagccaagcccgtgacccagatcgtgtctgccgaagcctggggcagagccgattgcgacgtgaagctggtggaaaagagcttcgagacagacaccaacctgaacttccagaacctgagcgtgatcggcttcagaatcctgctgctgaaagtggccggctttaacctgctgatgaccctgcggctgtggtccagcagggccaagcgatctggatctggagcaacaaacttctcactactcaaacaagcaggtgacgtggaggagaatcccgggcctactagtgccaccatggactggatttggcgcatccttttccttgtcggcgctgctaccggcgcccattccgggcccgaagtgcagctggttgaatctggcggaggactggttcaggctggcggatctctgagactgtcttgtgccgccagcggcagaacctttagcatgggctggtttagacaggcccctggcaaagagagagagttcgtcgccgccatcacatactctggcggcagcccttactacgccgactctgtgaagggcagattcaccatcagccgggacaacgccaagaacaccgtgtacctccagatgaacagcctgaagcctgaggacaccgccgtgtactactgcgccgccaatccaacatacggcagcgactggaacgccgagaattggggccagggaacccaagtgacagtgtctagcggatccggcggcggaggatctggcggaggcggatctgggggcggaggctctttcgaagtccaacttgtggagtctggagggggcctggtgcagcccggcggctctctcagactgtcttgtgcggcaagcggctacaccttcacctcttactggatagaatgggtgaggcaggcacctggaaagggactggagtggattggagagattctgccaggagggggagatacaaattacaatgaaatcttcaaggggcgggccaccttttcagcggataccagcaagaatacagcttacctgcagatgaatagcctccgggcagaagataccgctgtttattattgcacgagacgggtgccaataagactggactattgggggcaagggactcttgtcaccgtcagttcaacgcgtatccagaaccctgatcctgccgtgtaccagctgcgggatagcaagagcagcgacaagagcgtgtgtctgttcaccgacttcgacagccagaccaacgtgtcccagagcaaggactccgacgtgtacatcaccgataagtgcgtgctggacatgcggagcatggacttcaagagcaactccgccgtggcctggtccaacaagtccgatttcgcctgcgccaacgccttcaacaacagcattatccccgaggacacattcttcccaagccccgagagcagctgcggctttaccagcgagagctaccagcagggcgtgctgagcgccaccatcctgtacgagatcctgctgggcaaggccaccctgtacgccgtgctggtgtctgccctggtgctgatggctatggtcaagcggaaggacagccggggataa

SEQ ID NO: 6097 - DNA, 2283 bp, synthetic construct
  source 1..2283: mol_type = other DNA
atggccttaccagtgaccgccttgctcctgccgctggccttgctgctccacgccgccaggccggacatcgtgatgacacagagccctgatagcctggccgtgtctctgggagagagagccaccattaactgcaaggccagccagagcgtggactacgacggcgacagcttcctgaactggtatcagcagaagcccggccagcctcctaagctgctgatctacgccgccagcaatctggaaagcggcgtgccaagcagattttccggctctggcagcggcaccgatttcaccctgacaatatccagcctccagcctgaggacgtggccgtgtactactgccagcagagcaacgacgaccctctgacctttggacagggcaccaaggtggaaatcaaactcgaggacctgaagaacgtgttcccacctgaggtggccgtgttcgagcctagcgaggccgagatcagccacacccagaaagccaccctcgtgtgcctggctaccggcttctaccccgaccatgtggaactgtcttggtgggtcaacggcaaagaggtgcacagcggcgtgtgtaccgacccccagccactgaaagaacagcccgccctgaacgacagccggtactgcctgagcagcagactgagagtgtccgccaccttctggcagaacccccggaaccacttcagatgccaggtgcagttctacggcctgagcgagaacgacgagtggacccaggacagagccaagcccgtgacccagatcgtgtctgccgaagcctggggcagagccgattgcgacgtgaagctggtggaaaagagcttcgagacagacaccaacctgaacttccagaacctgagcgtgatcggcttcagaatcctgctgctgaaagtggccggctttaacctgctgatgaccctgcggctgtggtccagcagggccaagcgatctggatctggagcaacaaacttctcactactcaaacaagcaggtgacgtggaggagaatcccgggcctactagtgccaccatggactggatttggcgcatccttttccttgtcggcgctgctaccggcgcccattccgggcccgaagtgcaactggtggaatctgggggcggactggtgcagccaggcggaagtctgaggctgtcttgtgccgcctccggcagcatcttcggcttcaacgacatggcctggtatcggcaggctcccggaaaacagcgcgagctggtggctctgattagcagagtgggcgtgaccagcagcgccgactctgtgaagggcagattcacaatctccagagtgaacgccaaggatacagtgtacctccagatgaactctctgaaacctgaggatacagcagtgtactattgctacatggaccagcggctggacggcagcacactggcctactggggacagggaactcaagtgacagtgtctagcggatccggcggcggaggatctggcggaggcggatctgggggcggaggctctttcgaagtccaacttgtggagtctggagggggcctggtgcagcccggcggctctctcagactgtcttgtgcggcaagcggctacaccttcacctcttactggatagaatgggtgaggcaggcacctggaaagggactggagtggattggagagattctgccaggagggggagatacaaattacaatgaaatcttcaaggggcgggccaccttttcagcggataccagcaagaatacagcttacctgcagatgaatagcctccgggcagaagataccgctgtttattattgcacgagacgggtgccaataagactggactattgggggcaagggactcttgtcaccgtcagttcaacgcgtatccagaaccctgatcctgccgtgtaccagctgcgggatagcaagagcagcgacaagagcgtgtgtctgttcaccgacttcgacagccagaccaacgtgtcccagagcaaggactccgacgtgtacatcaccgataagtgcgtgctggacatgcggagcatggacttcaagagcaactccgccgtggcctggtccaacaagtccgatttcgcctgcgccaacgccttcaacaacagcattatccccgaggacacattcttcccaagccccgagagcagctgcggctttaccagcgagagctaccagcagggcgtgctgagcgccaccatcctgtacgagatcctgctgggcaaggccaccctgtacgccgtgctggtgtctgccctggtgctgatggctatggtcaagcggaaggacagccggggataa

SEQ ID NO: 6098 - DNA, 2271 bp, synthetic construct
  source 1..2271: mol_type = other DNA
atggccttaccagtgaccgccttgctcctgccgctggccttgctgctccacgccgccaggccggacatcgtgatgacacagagccctgatagcctggccgtgtctctgggagagagagccaccattaactgcaaggccagccagagcgtggactacgacggcgacagcttcctgaactggtatcagcagaagcccggccagcctcctaagctgctgatctacgccgccagcaatctggaaagcggcgtgccaagcagattttccggctctggcagcggcaccgatttcaccctgacaatatccagcctccagcctgaggacgtggccgtgtactactgccagcagagcaacgacgaccctctgacctttggacagggcaccaaggtggaaatcaaactcgaggacctgaagaacgtgttcccacctgaggtggccgtgttcgagcctagcgaggccgagatcagccacacccagaaagccaccctcgtgtgcctggctaccggcttctaccccgaccatgtggaactgtcttggtgggtcaacggcaaagaggtgcacagcggcgtgtgtaccgacccccagccactgaaagaacagcccgccctgaacgacagccggtactgcctgagcagcagactgagagtgtccgccaccttctggcagaacccccggaaccacttcagatgccaggtgcagttctacggcctgagcgagaacgacgagtggacccaggacagagccaagcccgtgacccagatcgtgtctgccgaagcctggggcagagccgattgcgacgtgaagctggtggaaaagagcttcgagacagacaccaacctgaacttccagaacctgagcgtgatcggcttcagaatcctgctgctgaaagtggccggctttaacctgctgatgaccctgcggctgtggtccagcagggccaagcgatctggatctggagcaacaaacttctcactactcaaacaagcaggtgacgtggaggagaatcccgggcctactagtgccaccatggactggatttggcgcatccttttccttgtcggcgctgctaccggcgcccattccgggcccgaggtgcagctggttgaatctggcggaggactggttcaggctggcggatctctgagactgtcttgtgccgccagcggctctgtgttcagcggcaatgtgatgggctggtacagacaggcccctggcaaagaaagagagtgggttgccgccattgccagcggcggcagcatctactacagagactctgtgaagggcagattcaccatcagccgggacaacgccaagaacaccgtgtacctccagatgaacagcctgaagcctgaggacaccgccgtgtactactgcaactctcaccctcctacactgccctattggggcctgggaacccaagtgacagtgtcctctggatccggcggcggaggatctggcggaggcggatctgggggcggaggctctttcgaagtccaacttgtggagtctggagggggcctggtgcagcccggcggctctctcagactgtcttgtgcggcaagcggctacaccttcacctcttactggatagaatgggtgaggcaggcacctggaaagggactggagtggattggagagattctgccaggagggggagatacaaattacaatgaaatcttcaaggggcgggccaccttttcagcggataccagcaagaatacagcttacctgcagatgaatagcctccgggcagaagataccgctgtttattattgcacgagacgggtgccaataagactggactattgggggcaagggactcttgtcaccgtcagttcaacgcgtatccagaaccctgatcctgccgtgtaccagctgcgggatagcaagagcagcgacaagagcgtgtgtctgttcaccgacttcgacagccagaccaacgtgtcccagagcaaggactccgacgtgtacatcaccgataagtgcgtgctggacatgcggagcatggacttcaagagcaactccgccgtggcctggtccaacaagtccgatttcgcctgcgccaacgccttcaacaacagcattatccccgaggacacattcttcccaagccccgagagcagctgcggctttaccagcgagagctaccagcagggcgtgctgagcgccaccatcctgtacgagatcctgctgggcaaggccaccctgtacgccgtgctggtgtctgccctggtgctgatggctatggtcaagcggaaggacagccggggataa

SEQ ID NO: 6099 - DNA, 2265 bp, synthetic construct
  source 1..2265: mol_type = other DNA
atggccttaccagtgaccgccttgctcctgccgctggccttgctgctccacgccgccaggccggacatcgtgatgacacagagccctgatagcctggccgtgtctctgggagagagagccaccattaactgcaaggccagccagagcgtggactacgacggcgacagcttcctgaactggtatcagcagaagcccggccagcctcctaagctgctgatctacgccgccagcaatctggaaagcggcgtgccaagcagattttccggctctggcagcggcaccgatttcaccctgacaatatccagcctccagcctgaggacgtggccgtgtactactgccagcagagcaacgacgaccctctgacctttggacagggcaccaaggtggaaatcaaactcgaggacctgaagaacgtgttcccacctgaggtggccgtgttcgagcctagcgaggccgagatcagccacacccagaaagccaccctcgtgtgcctggctaccggcttctaccccgaccatgtggaactgtcttggtgggtcaacggcaaagaggtgcacagcggcgtgtgtaccgacccccagccactgaaagaacagcccgccctgaacgacagccggtactgcctgagcagcagactgagagtgtccgccaccttctggcagaacccccggaaccacttcagatgccaggtgcagttctacggcctgagcgagaacgacgagtggacccaggacagagccaagcccgtgacccagatcgtgtctgccgaagcctggggcagagccgattgcgacgtgaagctggtggaaaagagcttcgagacagacaccaacctgaacttccagaacctgagcgtgatcggcttcagaatcctgctgctgaaagtggccggctttaacctgctgatgaccctgcggctgtggtccagcagggccaagcgatctggatctggagcaacaaacttctcactactcaaacaagcaggtgacgtggaggagaatcccgggcctactagtgccaccatggactggatttggcgcatccttttccttgtcggcgctgctaccggcgcccattccgggcccgaagttcagctgctggaatctggcggaggactcgttcaacctggcggctctctgagactgagctgtgccgcttctggcttcagcttctctagctacgccctgagctgggttcgacaagctcccggaaagggccttgaatgggtgtccagcatcggcgagaatgacggcaccacagactatgccgatgccgtgaaaggccggtttaccatcagcagagacaattccaagaacacgctctatctgcaaatgaactccctgcgcgtggaagatacagccgtgtattattgcgtgaaggacggcatccactggggacagggaaccctggttacagtgtctagcggatccggcggcggaggatctggcggaggcggatctgggggcggaggctctttcgaagtccaacttgtggagtctggagggggcctggtgcagcccggcggctctctcagactgtcttgtgcggcaagcggctacaccttcacctcttactggatagaatgggtgaggcaggcacctggaaagggactggagtggattggagagattctgccaggagggggagatacaaattacaatgaaatcttcaaggggcgggccaccttttcagcggataccagcaagaatacagcttacctgcagatgaatagcctccgggcagaagataccgctgtttattattgcacgagacgggtgccaataagactggactattgggggcaagggactcttgtcaccgtcagttcaacgcgtatccagaaccctgatcctgccgtgtaccagctgcgggatagcaagagcagcgacaagagcgtgtgtctgttcaccgacttcgacagccagaccaacgtgtcccagagcaaggactccgacgtgtacatcaccgataagtgcgtgctggacatgcggagcatggacttcaagagcaactccgccgtggcctggtccaacaagtccgatttcgcctgcgccaacgccttcaacaacagcattatccccgaggacacattcttcccaagccccgagagcagctgcggctttaccagcgagagctaccagcagggcgtgctgagcgccaccatcctgtacgagatcctgctgggcaaggccaccctgtacgccgtgctggtgtctgccctggtgctgatggctatggtcaagcggaaggacagccggggataa

SEQ ID NO: 6100 - DNA, 3372 bp, synthetic construct
  source 1..3372: mol_type = other DNA
atgggacccagactgctgttttgggctctgctgtgtctgctcggcacaggacctgttgaagctggcgtgacacagagccccacacacctgattaagaccagaggccagcaggccacactgagatgcagccctatcagcggccacaccagcgtgtactggtatcagcaggctctcggactgggcctccagttcctgctttggtacgacgagggcgaagagagaaaccggggcaacttccctcctcggttttccggcagacagttccccaactacagcagcgagctgaacgtgaacgccctggaactggaagatagcgccctgtacctgtgtgcctcttctcttggtggacctcgcggactggctggactgagaggggatgagcagtttttcggccctggcaccagactgaccgtgctggaaggtaccggcggaggcggatctggcggcggagaattcgacatcgtgatgacacagagccctgatagcctggccgtgtctctgggagagagagccaccattaactgcaaggccagccagagcgtggactacgacggcgacagcttcctgaactggtatcagcagaagcccggccagcctcctaagctgctgatctacgccgccagcaatctggaaagcggcgtgccaagcagattttccggctctggcagcggcaccgatttcaccctgacaatatccagcctccagcctgaggacgtggccgtgtactactgccagcagagcaacgacgaccctctgacctttggacagggcaccaaggtggaaatcaaactcgaggacctgaagaacgtgttcccacctgaggtggccgtgttcgagcctagcgaggccgagatcagccacacccagaaagccaccctcgtgtgcctggctaccggcttctaccccgaccatgtggaactgtcttggtgggtcaacggcaaagaggtgcacagcggcgtgtgtaccgacccccagccactgaaagaacagcccgccctgaacgacagccggtactgcctgagcagcagactgagagtgtccgccaccttctggcagaacccccggaaccacttcagatgccaggtgcagttctacggcctgagcgagaacgacgagtggacccaggacagagccaagcccgtgacccagatcgtgtctgccgaagcctggggcagagccgattgcgacgtgaagctggtggaaaagagcttcgagacagacaccaacctgaacttccagaacctgagcgtgatcggcttcagaatcctgctgctgaaagtggccggctttaacctgctgatgaccctgcggctgtggtccagcagggccaagcgatctggatctggagcaacaaacttctcactactcaaacaagcaggtgacgtggaggagaatcccgggcctactagtgccaccatggactggatttggcgcatccttttccttgtcggcgctgctaccggcgcccattccgggcccgaagtgcagctggttgaatctggcggaggactggttcaggctggcggatctctgagactgtcttgtgccgccagcggcagaacctttagcatgggctggtttagacaggcccctggcaaagagagagagttcgtcgccgccatcacatactctggcggcagcccttactacgccgactctgtgaagggcagattcaccatcagccgggacaacgccaagaacaccgtgtacctccagatgaacagcctgaagcctgaggacaccgccgtgtactactgcgccgccaatccaacatacggcagcgactggaacgccgagaattggggccagggaacccaagtgacagtgtctagcggatccggcggcggaggatctggcggaggcggatctgggggcggaggctctttcgaagtccaacttgtggagtctggagggggcctggtgcagcccggcggctctctcagactgtcttgtgcggcaagcggctacaccttcacctcttactggatagaatgggtgaggcaggcacctggaaagggactggagtggattggagagattctgccaggagggggagatacaaattacaatgaaatcttcaaggggcgggccaccttttcagcggataccagcaagaatacagcttacctgcagatgaatagcctccgggcagaagataccgctgtttattattgcacgagacgggtgccaataagactggactattgggggcaagggactcttgtcaccgtcagttcaacgcgtatccagaaccctgatcctgccgtgtaccagctgcgggatagcaagagcagcgacaagagcgtgtgtctgttcaccgacttcgacagccagaccaacgtgtcccagagcaaggactccgacgtgtacatcaccgataagtgcgtgctggacatgcggagcatggacttcaagagcaactccgccgtggcctggtccaacaagtccgatttcgcctgcgccaacgccttcaacaacagcattatccccgaggacacattcttcccaagccccgagagcagctgcggctttaccagcgagagctaccagcagggcgtgctgagcgccaccatcctgtacgagatcctgctgggcaaggccaccctgtacgccgtgctggtgtctgccctggtgctgatggctatggtcaagcggaaggacagccggggacgcgccaagagaagcggatctggcgtgaagcagaccctgaatttcgacctgctgaagctggctggcgacgtggaatccaacccaggcccttctagaggccatatgaccgagtacaagcccacggtgcgcctcgccacccgcgacgacgtccccagggccgtacgcaccctcgccgccgcgttcgccgactaccccgccacgcgccacaccgtcgatccggaccgccacatcgagcgggtcaccgagctgcaagaactcttcctcacgcgcgtcgggctcgacatcggcaaggtgtgggtcgcggacgacggcgccgcggtggcggtctggaccacgccggagagcgtcgaagcgggggcggtgttcgccgagatcggcccgcgcatggccgagttgagcggttcccggctggccgcgcagcaacagatggaaggcctcctggcgccgcaccggcccaaggagcccgcgtggttcctggccaccgtcggcgtctcgcccgaccaccagggcaagggtctgggcagcgccgtcgtgctccccggagtggaggcggccgagcgcgccggggtgcccgccttcctggagacctccgcgccccgcaacctccccttctacgagcggctcggcttcaccgtcaccgccgacgtcgaggtgcccgaaggaccgcgcacctggtgcatgacccgcaagcccggtgcctga

SEQ ID NO: 6101 - DNA, 3369 bp, synthetic construct
  source 1..3369: mol_type = other DNA
atgggacccagactgctgttttgggctctgctgtgtctgctcggcacaggacctgttgaagctggcgtgacacagagccccacacacctgattaagaccagaggccagcaggccacactgagatgcagccctatcagcggccacaccagcgtgtactggtatcagcaggctctcggactgggcctccagttcctgctttggtacgacgagggcgaagagagaaaccggggcaacttccctcctcggttttccggcagacagttccccaactacagcagcgagctgaacgtgaacgccctggaactggaagatagcgccctgtacctgtgtgccagctctctcggcggagatgaactgggagccgatggcaacgagcagttctttggccctggcaccagactgaccgtgctggaaggtaccggcggaggcggatctggcggcggaagcgaattcgacatcgtgatgacacagagccctgatagcctggccgtgtctctgggagagagagccaccattaactgcaaggccagccagagcgtggactacgacggcgacagcttcctgaactggtatcagcagaagcccggccagcctcctaagctgctgatctacgccgccagcaatctggaaagcggcgtgccaagcagattttccggctctggcagcggcaccgatttcaccctgacaatatccagcctccagcctgaggacgtggccgtgtactactgccagcagagcaacgacgaccctctgacctttggacagggcaccaaggtggaaatcaaactcgaggacctgaagaacgtgttcccacctgaggtggccgtgttcgagcctagcgaggccgagatcagccacacccagaaagccaccctcgtgtgcctggctaccggcttctaccccgaccatgtggaactgtcttggtgggtcaacggcaaagaggtgcacagcggcgtgtgtaccgacccccagccactgaaagaacagcccgccctgaacgacagccggtactgcctgagcagcagactgagagtgtccgccaccttctggcagaacccccggaaccacttcagatgccaggtgcagttctacggcctgagcgagaacgacgagtggacccaggacagagccaagcccgtgacccagatcgtgtctgccgaagcctggggcagagccgattgcgacgtgaagctggtggaaaagagcttcgagacagacaccaacctgaacttccagaacctgagcgtgatcggcttcagaatcctgctgctgaaagtggccggctttaacctgctgatgaccctgcggctgtggtccagcagggccaagcgatctggatctggagcaacaaacttctcactactcaaacaagcaggtgacgtggaggagaatcccgggcctactagtgccaccatggactggatttggcgcatccttttccttgtcggcgctgctaccggcgcccattccgggcccgaagtgcagctggttgaatctggcggaggactggttcaggctggcggatctctgagactgtcttgtgccgccagcggcagaacctttagcatgggctggtttagacaggcccctggcaaagagagagagttcgtcgccgccatcacatactctggcggcagcccttactacgccgactctgtgaagggcagattcaccatcagccgggacaacgccaagaacaccgtgtacctccagatgaacagcctgaagcctgaggacaccgccgtgtactactgcgccgccaatccaacatacggcagcgactggaacgccgagaattggggccagggaacccaagtgacagtgtctagcggatccggcggcggaggatctggcggaggcggatctgggggcggaggctctttcgaagtccaacttgtggagtctggagggggcctggtgcagcccggcggctctctcagactgtcttgtgcggcaagcggctacaccttcacctcttactggatagaatgggtgaggcaggcacctggaaagggactggagtggattggagagattctgccaggagggggagatacaaattacaatgaaatcttcaaggggcgggccaccttttcagcggataccagcaagaatacagcttacctgcagatgaatagcctccgggcagaagataccgctgtttattattgcacgagacgggtgccaataagactggactattgggggcaagggactcttgtcaccgtcagttcaacgcgtatccagaaccctgatcctgccgtgtaccagctgcgggatagcaagagcagcgacaagagcgtgtgtctgttcaccgacttcgacagccagaccaacgtgtcccagagcaaggactccgacgtgtacatcaccgataagtgcgtgctggacatgcggagcatggacttcaagagcaactccgccgtggcctggtccaacaagtccgatttcgcctgcgccaacgccttcaacaacagcattatccccgaggacacattcttcccaagccccgagagcagctgcggctttaccagcgagagctaccagcagggcgtgctgagcgccaccatcctgtacgagatcctgctgggcaaggccaccctgtacgccgtgctggtgtctgccctggtgctgatggctatggtcaagcggaaggacagccggggacgcgccaagagaagcggatctggcgtgaagcagaccctgaatttcgacctgctgaagctggctggcgacgtggaatccaacccaggcccttctagaggccatatgaccgagtacaagcccacggtgcgcctcgccacccgcgacgacgtccccagggccgtacgcaccctcgccgccgcgttcgccgactaccccgccacgcgccacaccgtcgatccggaccgccacatcgagcgggtcaccgagctgcaagaactcttcctcacgcgcgtcgggctcgacatcggcaaggtgtgggtcgcggacgacggcgccgcggtggcggtctggaccacgccggagagcgtcgaagcgggggcggtgttcgccgagatcggcccgcgcatggccgagttgagcggttcccggctggccgcgcagcaacagatggaaggcctcctggcgccgcaccggcccaaggagcccgcgtggttcctggccaccgtcggcgtctcgcccgaccaccagggcaagggtctgggcagcgccgtcgtgctccccggagtggaggcggccgagcgcgccggggtgcccgccttcctggagacctccgcgccccgcaacctccccttctacgagcggctcggcttcaccgtcaccgccgacgtcgaggtgcccgaaggaccgcgcacctggtgcatgacccgcaagcccggtgcctga

SEQ ID NO: 6102 - DNA, 2844 bp, synthetic construct
  source 1..2844: mol_type = other DNA
atggccttaccagtgaccgccttgctcctgccgctggccttgctgctccacgccgccaggccggacatcgtgatgacacagagccctgatagcctggccgtgtctctgggagagagagccaccattaactgcaaggccagccagagcgtggactacgacggcgacagcttcctgaactggtatcagcagaagcccggccagcctcctaagctgctgatctacgccgccagcaatctggaaagcggcgtgccaagcagattttccggctctggcagcggcaccgatttcaccctgacaatatccagcctccagcctgaggacgtggccgtgtactactgccagcagagcaacgacgaccctctgacctttggacagggcaccaaggtggaaatcaaactcgaggacctgaagaacgtgttcccacctgaggtggccgtgttcgagcctagcgaggccgagatcagccacacccagaaagccaccctcgtgtgcctggctaccggcttctaccccgaccatgtggaactgtcttggtgggtcaacggcaaagaggtgcacagcggcgtgtgtaccgacccccagccactgaaagaacagcccgccctgaacgacagccggtactgcctgagcagcagactgagagtgtccgccaccttctggcagaacccccggaaccacttcagatgccaggtgcagttctacggcctgagcgagaacgacgagtggacccaggacagagccaagcccgtgacccagatcgtgtctgccgaagcctggggcagagccgattgcgacgtgaagctggtggaaaagagcttcgagacagacaccaacctgaacttccagaacctgagcgtgatcggcttcagaatcctgctgctgaaagtggccggctttaacctgctgatgaccctgcggctgtggtccagcagggccaagcgatctggatctggagcaacaaacttctcactactcaaacaagcaggtgacgtggaggagaatcccgggcctactagtgccaccatggactggatttggcgcatccttttccttgtcggcgctgctaccggcgcccattccgggcccatgggaagctggcttgagttctaccacagactcaacgccattgacagcaggctgtgggcacttggcggaagcgaagctgaactcgccgcttttgaaaaagaaattgccgctttcgagtccgagcttcaggcttacaaaggcaaagggaatcctgaggtcgagagcctgagagatcacgctgcccacattagagagtggttgcaggcataccggcacaatggatccggcggcggaggatctggcggaggcggatctgggggcggaggctctttcgaagtccaacttgtggagtctggagggggcctggtgcagcccggcggctctctcagactgtcttgtgcggcaagcggctacaccttcacctcttactggatagaatgggtgaggcaggcacctggaaagggactggagtggattggagagattctgccaggagggggagatacaaattacaatgaaatcttcaaggggcgggccaccttttcagcggataccagcaagaatacagcttacctgcagatgaatagcctccgggcagaagataccgctgtttattattgcacgagacgggtgccaataagactggactattgggggcaagggactcttgtcaccgtcagttcaacgcgtatccagaaccctgatcctgccgtgtaccagctgcgggatagcaagagcagcgacaagagcgtgtgtctgttcaccgacttcgacagccagaccaacgtgtcccagagcaaggactccgacgtgtacatcaccgataagtgcgtgctggacatgcggagcatggacttcaagagcaactccgccgtggcctggtccaacaagtccgatttcgcctgcgccaacgccttcaacaacagcattatccccgaggacacattcttcccaagccccgagagcagctgcggctttaccagcgagagctaccagcagggcgtgctgagcgccaccatcctgtacgagatcctgctgggcaaggccaccctgtacgccgtgctggtgtctgccctggtgctgatggctatggtcaagcggaaggacagccggggacgcgccaagagaagcggatctggcgtgaagcagaccctgaatttcgacctgctgaagctggctggcgacgtggaatccaacccaggcccttctagaggccatatgaccgagtacaagcccacggtgcgcctcgccacccgcgacgacgtccccagggccgtacgcaccctcgccgccgcgttcgccgactaccccgccacgcgccacaccgtcgatccggaccgccacatcgagcgggtcaccgagctgcaagaactcttcctcacgcgcgtcgggctcgacatcggcaaggtgtgggtcgcggacgacggcgccgcggtggcggtctggaccacgccggagagcgtcgaagcgggggcggtgttcgccgagatcggcccgcgcatggccgagttgagcggttcccggctggccgcgcagcaacagatggaaggcctcctggcgccgcaccggcccaaggagcccgcgtggttcctggccaccgtcggcgtctcgcccgaccaccagggcaagggtctgggcagcgccgtcgtgctccccggagtggaggcggccgagcgcgccggggtgcccgccttcctggagacctccgcgccccgcaacctccccttctacgagcggctcggcttcaccgtcaccgccgacgtcgaggtgcccgaaggaccgcgcacctggtgcatgacccgcaagcccggtgcctga

SEQ ID NO: 6103 - DNA, 2844 bp, synthetic construct
  source 1..2844: mol_type = other DNA
atggccttaccagtgaccgccttgctcctgccgctggccttgctgctccacgccgccaggccggcatgcatgggcagttggttcgagttctacgaccggctgaatgccatcgacgccagactgtgggctctcggaggatctgaagctgagctggccgccttcgagaaagagatcgccgcctttgagagcgagctgcaagcctacaaaggcaagggcaaccccgaggtggaaaacctgagagtgcacgccgctgccatcagagaatggctccaggcttacagacacaacggtaccggcggaggcggatctggcggcggaggtagcggtggcggaggatctgaattcgacatcgtgatgacacagagccctgatagcctggccgtgtctctgggagagagagccaccattaactgcaaggccagccagagcgtggactacgacggcgacagcttcctgaactggtatcagcagaagcccggccagcctcctaagctgctgatctacgccgccagcaatctggaaagcggcgtgccaagcagattttccggctctggcagcggcaccgatttcaccctgacaatatccagcctccagcctgaggacgtggccgtgtactactgccagcagagcaacgacgaccctctgacctttggacagggcaccaaggtggaaatcaaactcgaggacctgaagaacgtgttcccacctgaggtggccgtgttcgagcctagcgaggccgagatcagccacacccagaaagccaccctcgtgtgcctggctaccggcttctaccccgaccatgtggaactgtcttggtgggtcaacggcaaagaggtgcacagcggcgtgtgtaccgacccccagccactgaaagaacagcccgccctgaacgacagccggtactgcctgagcagcagactgagagtgtccgccaccttctggcagaacccccggaaccacttcagatgccaggtgcagttctacggcctgagcgagaacgacgagtggacccaggacagagccaagcccgtgacccagatcgtgtctgccgaagcctggggcagagccgattgcgacgtgaagctggtggaaaagagcttcgagacagacaccaacctgaacttccagaacctgagcgtgatcggcttcagaatcctgctgctgaaagtggccggctttaacctgctgatgaccctgcggctgtggtccagcagggccaagcgatctggatctggagcaacaaacttctcactactcaaacaagcaggtgacgtggaggagaatcccgggcctactagtatggactggatttggcgcatccttttccttgtcggcgctgctaccggcgcgcattccttcgaagtccaacttgtggagtctggagggggcctggtgcagcccggcggctctctcagactgtcttgtgcggcaagcggctacaccttcacctcttactggatagaatgggtgaggcaggcacctggaaagggactggagtggattggagagattctgccaggagggggagatacaaattacaatgaaatcttcaaggggcgggccaccttttcagcggataccagcaagaatacagcttacctgcagatgaatagcctccgggcagaagataccgctgtttattattgcacgagacgggtgccaataagactggactattgggggcaagggactcttgtcaccgtcagttcaacgcgtatccagaaccctgatcctgccgtgtaccagctgcgggatagcaagagcagcgacaagagcgtgtgtctgttcaccgacttcgacagccagaccaacgtgtcccagagcaaggactccgacgtgtacatcaccgataagtgcgtgctggacatgcggagcatggacttcaagagcaactccgccgtggcctggtccaacaagtccgatttcgcctgcgccaacgccttcaacaacagcattatccccgaggacacattcttcccaagccccgagagcagctgcggctttaccagcgagagctaccagcagggcgtgctgagcgccaccatcctgtacgagatcctgctgggcaaggccaccctgtacgccgtgctggtgtctgccctggtgctgatggctatggtcaagcggaaggacagccggggacgcgccaagagaagcggatctggcgtgaagcagaccctgaatttcgacctgctgaagctggctggcgacgtggaatccaacccaggcccttctagaggccatatgaccgagtacaagcccacggtgcgcctcgccacccgcgacgacgtccccagggccgtacgcaccctcgccgccgcgttcgccgactaccccgccacgcgccacaccgtcgatccggaccgccacatcgagcgggtcaccgagctgcaagaactcttcctcacgcgcgtcgggctcgacatcggcaaggtgtgggtcgcggacgacggcgccgcggtggcggtctggaccacgccggagagcgtcgaagcgggggcggtgttcgccgagatcggcccgcgcatggccgagttgagcggttcccggctggccgcgcagcaacagatggaaggcctcctggcgccgcaccggcccaaggagcccgcgtggttcctggccaccgtcggcgtctcgcccgaccaccagggcaagggtctgggcagcgccgtcgtgctccccggagtggaggcggccgagcgcgccggggtgcccgccttcctggagacctccgcgccccgcaacctccccttctacgagcggctcggcttcaccgtcaccgccgacgtcgaggtgcccgaaggaccgcgcacctggtgcatgacccgcaagcccggtgcctga

SEQ ID NO: 6104 - DNA, 3195 bp, synthetic construct
  source 1..3195: mol_type = other DNA
atggccttaccagtgaccgccttgctcctgccgctggccttgctgctccacgccgccaggccggcatgcatggaccccgacctggaaatcagagccgccttcctgcggcagagaaacacagccctgagaacagaggtggccgagctggaacaagaggtgcagcggctggaaaacgaggtgtcccagtacgagacaagatacggccctctcggaggcggaaaaggtaccggcggaggcggatctggcggcggaggtagcggtggcggaggatctgaattcgacatcgtgatgacacagagccctgatagcctggccgtgtctctgggagagagagccaccattaactgcaaggccagccagagcgtggactacgacggcgacagcttcctgaactggtatcagcagaagcccggccagcctcctaagctgctgatctacgccgccagcaatctggaaagcggcgtgccaagcagattttccggctctggcagcggcaccgatttcaccctgacaatatccagcctccagcctgaggacgtggccgtgtactactgccagcagagcaacgacgaccctctgacctttggacagggcaccaaggtggaaatcaaactcgaggacctgaagaacgtgttcccacctgaggtggccgtgttcgagcctagcgaggccgagatcagccacacccagaaagccaccctcgtgtgcctggctaccggcttctaccccgaccatgtggaactgtcttggtgggtcaacggcaaagaggtgcacagcggcgtgtgtaccgacccccagccactgaaagaacagcccgccctgaacgacagccggtactgcctgagcagcagactgagagtgtccgccaccttctggcagaacccccggaaccacttcagatgccaggtgcagttctacggcctgagcgagaacgacgagtggacccaggacagagccaagcccgtgacccagatcgtgtctgccgaagcctggggcagagccgattgcgacgtgaagctggtggaaaagagcttcgagacagacaccaacctgaacttccagaacctgagcgtgatcggcttcagaatcctgctgctgaaagtggccggctttaacctgctgatgaccctgcggctgtggtccagcagggccaagcgatctggatctggagcaacaaacttctcactactcaaacaagcaggtgacgtggaggagaatcccgggcctactagtgccaccatggactggatttggcgcatccttttccttgtcggcgctgctaccggcgcccattccgggcccgaagtgcagctggttgaatctggcggaggactggttcaggctggcggatctctgagactgtcttgtgccgccagcggcagaacctttagcatgggctggtttagacaggcccctggcaaagagagagagttcgtcgccgccatcacatactctggcggcagcccttactacgccgactctgtgaagggcagattcaccatcagccgggacaacgccaagaacaccgtgtacctccagatgaacagcctgaagcctgaggacaccgccgtgtactactgcgccgccaatccaacatacggcagcgactggaacgccgagaattggggccagggaacccaagtgacagtgtctagcggatccggcggcggaggatctggcggaggcggatctgggggcggaggctctttcgaagtccaacttgtggagtctggagggggcctggtgcagcccggcggctctctcagactgtcttgtgcggcaagcggctacaccttcacctcttactggatagaatgggtgaggcaggcacctggaaagggactggagtggattggagagattctgccaggagggggagatacaaattacaatgaaatcttcaaggggcgggccaccttttcagcggataccagcaagaatacagcttacctgcagatgaatagcctccgggcagaagataccgctgtttattattgcacgagacgggtgccaataagactggactattgggggcaagggactcttgtcaccgtcagttcaacgcgtatccagaaccctgatcctgccgtgtaccagctgcgggatagcaagagcagcgacaagagcgtgtgtctgttcaccgacttcgacagccagaccaacgtgtcccagagcaaggactccgacgtgtacatcaccgataagtgcgtgctggacatgcggagcatggacttcaagagcaactccgccgtggcctggtccaacaagtccgatttcgcctgcgccaacgccttcaacaacagcattatccccgaggacacattcttcccaagccccgagagcagctgcggctttaccagcgagagctaccagcagggcgtgctgagcgccaccatcctgtacgagatcctgctgggcaaggccaccctgtacgccgtgctggtgtctgccctggtgctgatggctatggtcaagcggaaggacagccggggacgcgccaagagaagcggatctggcgtgaagcagaccctgaatttcgacctgctgaagctggctggcgacgtggaatccaacccaggcccttctagaggccatatgaccgagtacaagcccacggtgcgcctcgccacccgcgacgacgtccccagggccgtacgcaccctcgccgccgcgttcgccgactaccccgccacgcgccacaccgtcgatccggaccgccacatcgagcgggtcaccgagctgcaagaactcttcctcacgcgcgtcgggctcgacatcggcaaggtgtgggtcgcggacgacggcgccgcggtggcggtctggaccacgccggagagcgtcgaagcgggggcggtgttcgccgagatcggcccgcgcatggccgagttgagcggttcccggctggccgcgcagcaacagatggaaggcctcctggcgccgcaccggcccaaggagcccgcgtggttcctggccaccgtcggcgtctcgcccgaccaccagggcaagggtctgggcagcgccgtcgtgctccccggagtggaggcggccgagcgcgccggggtgcccgccttcctggagacctccgcgccccgcaacctccccttctacgagcggctcggcttcaccgtcaccgccgacgtcgaggtgcccgaaggaccgcgcacctggtgcatgacccgcaagcccggtgcctga

SEQ ID NO: 6105 - DNA, 2844 bp, synthetic construct
  source 1..2844: mol_type = other DNA
atggccttaccagtgaccgccttgctcctgccgctggccttgctgctccacgccgccaggccggacatcgtgatgacacagagccctgatagcctggccgtgtctctgggagagagagccaccattaactgcaaggccagccagagcgtggactacgacggcgacagcttcctgaactggtatcagcagaagcccggccagcctcctaagctgctgatctacgccgccagcaatctggaaagcggcgtgccaagcagattttccggctctggcagcggcaccgatttcaccctgacaatatccagcctccagcctgaggacgtggccgtgtactactgccagcagagcaacgacgaccctctgacctttggacagggcaccaaggtggaaatcaaactcgaggacctgaagaacgtgttcccacctgaggtggccgtgttcgagcctagcgaggccgagatcagccacacccagaaagccaccctcgtgtgcctggctaccggcttctaccccgaccatgtggaactgtcttggtgggtcaacggcaaagaggtgcacagcggcgtgtgtaccgacccccagccactgaaagaacagcccgccctgaacgacagccggtactgcctgagcagcagactgagagtgtccgccaccttctggcagaacccccggaaccacttcagatgccaggtgcagttctacggcctgagcgagaacgacgagtggacccaggacagagccaagcccgtgacccagatcgtgtctgccgaagcctggggcagagccgattgcgacgtgaagctggtggaaaagagcttcgagacagacaccaacctgaacttccagaacctgagcgtgatcggcttcagaatcctgctgctgaaagtggccggctttaacctgctgatgaccctgcggctgtggtccagcagggccaagcgatctggatctggagcaacaaacttctcactactcaaacaagcaggtgacgtggaggagaatcccgggcctactagtgccaccatggactggatttggcgcatccttttccttgtcggcgctgctaccggcgcccattccgggcccatgggatcttggagcgagttttacgatcggctgcacgccattcaccaccggctgtatgctctcggaggaagcgaagctgagctggccgcttttgaaaaagaaattgccgctttcgagtccgagcttcaggcttacaaaggcaaagggaatcctgaggtcgaggccctgagagataccgccgccttcatcagaacccggttgcaggcataccggcacaacggatccggcggcggaggatctggcggaggcggatctgggggcggaggctctttcgaagtccaacttgtggagtctggagggggcctggtgcagcccggcggctctctcagactgtcttgtgcggcaagcggctacaccttcacctcttactggatagaatgggtgaggcaggcacctggaaagggactggagtggattggagagattctgccaggagggggagatacaaattacaatgaaatcttcaaggggcgggccaccttttcagcggataccagcaagaatacagcttacctgcagatgaatagcctccgggcagaagataccgctgtttattattgcacgagacgggtgccaataagactggactattgggggcaagggactcttgtcaccgtcagttcaacgcgtatccagaaccctgatcctgccgtgtaccagctgcgggatagcaagagcagcgacaagagcgtgtgtctgttcaccgacttcgacagccagaccaacgtgtcccagagcaaggactccgacgtgtacatcaccgataagtgcgtgctggacatgcggagcatggacttcaagagcaactccgccgtggcctggtccaacaagtccgatttcgcctgcgccaacgccttcaacaacagcattatccccgaggacacattcttcccaagccccgagagcagctgcggctttaccagcgagagctaccagcagggcgtgctgagcgccaccatcctgtacgagatcctgctgggcaaggccaccctgtacgccgtgctggtgtctgccctggtgctgatggctatggtcaagcggaaggacagccggggacgcgccaagagaagcggatctggcgtgaagcagaccctgaatttcgacctgctgaagctggctggcgacgtggaatccaacccaggcccttctagaggccatatgaccgagtacaagcccacggtgcgcctcgccacccgcgacgacgtccccagggccgtacgcaccctcgccgccgcgttcgccgactaccccgccacgcgccacaccgtcgatccggaccgccacatcgagcgggtcaccgagctgcaagaactcttcctcacgcgcgtcgggctcgacatcggcaaggtgtgggtcgcggacgacggcgccgcggtggcggtctggaccacgccggagagcgtcgaagcgggggcggtgttcgccgagatcggcccgcgcatggccgagttgagcggttcccggctggccgcgcagcaacagatggaaggcctcctggcgccgcaccggcccaaggagcccgcgtggttcctggccaccgtcggcgtctcgcccgaccaccagggcaagggtctgggcagcgccgtcgtgctccccggagtggaggcggccgagcgcgccggggtgcccgccttcctggagacctccgcgccccgcaacctccccttctacgagcggctcggcttcaccgtcaccgccgacgtcgaggtgcccgaaggaccgcgcacctggtgcatgacccgcaagcccggtgcctga

SEQ ID NO: 6106 - DNA, 3474 bp, synthetic construct
  source 1..3474: mol_type = other DNA
atggccttaccagtgaccgccttgctcctgccgctggccttgctgctccacgccgccaggccggacatcgtgatgacacagagccctgatagcctggccgtgtctctgggagagagagccaccattaactgcaaggccagccagagcgtggactacgacggcgacagcttcctgaactggtatcagcagaagcccggccagcctcctaagctgctgatctacgccgccagcaatctggaaagcggcgtgccaagcagattttccggctctggcagcggcaccgatttcaccctgacaatatccagcctccagcctgaggacgtggccgtgtactactgccagcagagcaacgacgaccctctgacctttggacagggcaccaaggtggaaatcaaactcgaggacctgaagaacgtgttcccacctgaggtggccgtgttcgagcctagcgaggccgagatcagccacacccagaaagccaccctcgtgtgcctggctaccggcttctaccccgaccatgtggaactgtcttggtgggtcaacggcaaagaggtgcacagcggcgtgtgtaccgacccccagccactgaaagaacagcccgccctgaacgacagccggtactgcctgagcagcagactgagagtgtccgccaccttctggcagaacccccggaaccacttcagatgccaggtgcagttctacggcctgagcgagaacgacgagtggacccaggacagagccaagcccgtgacccagatcgtgtctgccgaagcctggggcagagccgattgcgacgtgaagctggtggaaaagagcttcgagacagacaccaacctgaacttccagaacctgagcgtgatcggcttcagaatcctgctgctgaaagtggccggctttaacctgctgatgaccctgcggctgtggtccagcagggccaagcgatctggatctggagcaacaaacttctcactactcaaacaagcaggtgacgtggaggagaatcccgggcctactagtaccatggactggatttggcgcatccttttccttgtcggcgctgctaccggcgcccattccctgttcaatcaagaggtgcagatccctctgaccgagagctactgtggcccctgtcctaagaactggatctgctacaagaacaactgctaccagttcttcgacgagagcaagaattggtacgagagccaggccagctgcatgagccagaatgccagcctgctgaaggtgtacagcaaagaggaccaggacctgctgaaactggtcaagagcgcccactggatgggccttgtgcacatccccaccaatggctcttggcagtgggaggacggcagcattctgagccctaacctgctgaccatcatcgagatgcagaagggcgactgcgccctgtacgccagcagctttaagggctacatcgagaattgcagcaccccgaacacctacatctgtatgcagagaaccgtttctggcggaggcggctctggaggaggcggaagtggcggcggaggcgacctctttaatcaagaagtccagattccactcaccgaatcctactgcggaccttgtccaaaaaattggatttgttataagaacaactgttatcaattctttgatgagtctaaaaattggtatgagtcccaggcttcctgcatgtctcagaacgcttctctgctgaaagtctactctaaagaagatcaggatctcctgaagctcgtcaagtctgcccattggatggggctcgtccacattcctaccaacggaagctggcaatgggaagatggctccatcctgtctccaaatctgctcacgattattgaaatgcagaaaggggattgtgctctctacgccagctccttcaagggatatattgagaactgtagcacgcccaatacttatatctgtatgcaacggaccgtgggatccggcggcggaggatctggcggaggcggatctgggggcggaggctctttcgaagtccaacttgtggagtctggagggggcctggtgcagcccggcggctctctcagactgtcttgtgcggcaagcggctacaccttcacctcttactggatagaatgggtgaggcaggcacctggaaagggactggagtggattggagagattctgccaggagggggagatacaaattacaatgaaatcttcaaggggcgggccaccttttcagcggataccagcaagaatacagcttacctgcagatgaatagcctccgggcagaagataccgctgtttattattgcacgagacgggtgccaataagactggactattgggggcaagggactcttgtcaccgtcagttcaacgcgtatccagaaccctgatcctgccgtgtaccagctgcgggatagcaagagcagcgacaagagcgtgtgtctgttcaccgacttcgacagccagaccaacgtgtcccagagcaaggactccgacgtgtacatcaccgataagtgcgtgctggacatgcggagcatggacttcaagagcaactccgccgtggcctggtccaacaagtccgatttcgcctgcgccaacgccttcaacaacagcattatccccgaggacacattcttcccaagccccgagagcagctgcggctttaccagcgagagctaccagcagggcgtgctgagcgccaccatcctgtacgagatcctgctgggcaaggccaccctgtacgccgtgctggtgtctgccctggtgctgatggctatggtcaagcggaaggacagccggggacgcgccaagagaagcggatctggcgtgaagcagaccctgaatttcgacctgctgaagctggctggcgacgtggaatccaacccaggcccttctagaggccatatgaccgagtacaagcccacggtgcgcctcgccacccgcgacgacgtccccagggccgtacgcaccctcgccgccgcgttcgccgactaccccgccacgcgccacaccgtcgatccggaccgccacatcgagcgggtcaccgagctgcaagaactcttcctcacgcgcgtcgggctcgacatcggcaaggtgtgggtcgcggacgacggcgccgcggtggcggtctggaccacgccggagagcgtcgaagcgggggcggtgttcgccgagatcggcccgcgcatggccgagttgagcggttcccggctggccgcgcagcaacagatggaaggcctcctggcgccgcaccggcccaaggagcccgcgtggttcctggccaccgtcggcgtctcgcccgaccaccagggcaagggtctgggcagcgccgtcgtgctccccggagtggaggcggccgagcgcgccggggtgcccgccttcctggagacctccgcgccccgcaacctccccttctacgagcggctcggcttcaccgtcaccgccgacgtcgaggtgcccgaaggaccgcgcacctggtgcatgacccgcaagcccggtgcctga

SEQ ID NO: 6107 - DNA, 1860 bp, synthetic construct
  source 1..1860: mol_type = other DNA
atggccttaccagtgaccgccttgctcctgccgctggccttgctgctccacgccgccaggccggacatcgtgatgacacagagccctgatagcctggccgtgtctctgggagagagagccaccattaactgcaaggccagccagagcgtggactacgacggcgacagcttcctgaactggtatcagcagaagcccggccagcctcctaagctgctgatctacgccgccagcaatctggaaagcggcgtgccaagcagattttccggctctggcagcggcaccgatttcaccctgacaatatccagcctccagcctgaggacgtggccgtgtactactgccagcagagcaacgacgaccctctgacctttggacagggcaccaaggtggaaatcaaactcgaggacctgaagaacgtgttcccacctgaggtggccgtgttcgagcctagcgaggccgagatcagccacacccagaaagccaccctcgtgtgcctggctaccggcttctaccccgaccatgtggaactgtcttggtgggtcaacggcaaagaggtgcacagcggcgtgtgtaccgacccccagccactgaaagaacagcccgccctgaacgacagccggtactgcctgagcagcagactgagagtgtccgccaccttctggcagaacccccggaaccacttcagatgccaggtgcagttctacggcctgagcgagaacgacgagtggacccaggacagagccaagcccgtgacccagatcgtgtctgccgaagcctggggcagagccgattgcggctttaccagcgagagctaccagcagggcgtgctgagcgccaccaacctgagcgtgatcggcttcagaatcctgctgctgaaagtggccggctttaacctgctgatgaccctgcggctgtggtccagcagggccaagcgatctggatctggagcaacaaacttctcactactcaaacaagcaggtgacgtggaggagaatcccgggcctactagtatggactggatttggcgcatccttttccttgtcggcgctgctaccggcgcgcattccttcgaagtccaacttgtggagtctggagggggcctggtgcagcccggcggctctctcagactgtcttgtgcggcaagcggctacaccttcacctcttactggatagaatgggtgaggcaggcacctggaaagggactggagtggattggagagattctgccaggagggggagatacaaattacaatgaaatcttcaaggggcgggccaccttttcagcggataccagcaagaatacagcttacctgcagatgaatagcctccgggcagaagataccgctgtttattattgcacgagacgggtgccaataagactggactattgggggcaagggactcttgtcaccgtcagttcaacgcgtatccagaaccctgatcctgccgtgtaccagctgcgggatagcaagagcagcgacaagagcgtgtgtctgttcaccgacttcgacagccagaccaacgtgtcccagagcaaggactccgacgtgtacatcaccgataagtgcgtgctggacatgcggagcatggacttcaagagcaactccgccgtggcctggtccaacaagtccgatttcgcctgcgccaacgccttcaacaacagcattatccccgaggacacattcttcccaagccccgagagcagctgcgacgtgaagctggtggaaaagagcttcgagacagacaccaacctgaacttccagatcctgtacgagatcctgctgggcaaggccaccctgtacgccgtgctggtgtctgccctggtgctgatggctatggtcaagcggaaggacagccgggga

SEQ ID NO: 6108 - DNA, 1872 bp, synthetic construct
  source 1..1872: mol_type = other DNA
atggccttaccagtgaccgccttgctcctgccgctggccttgctgctccacgccgccaggccggacatcgtgatgacacagagccctgatagcctggccgtgtctctgggagagagagccaccattaactgcaaggccagccagagcgtggactacgacggcgacagcttcctgaactggtatcagcagaagcccggccagcctcctaagctgctgatctacgccgccagcaatctggaaagcggcgtgccaagcagattttccggctctggcagcggcaccgatttcaccctgacaatatccagcctccagcctgaggacgtggccgtgtactactgccagcagagcaacgacgaccctctgacctttggacagggcaccaaggtggaaatcaaactcgagatccagaaccctgatcctgccgtgtaccagctgcgggatagcaagagcagcgacaagagcgtgtgtctgttcaccgacttcgacagccagaccaacgtgtcccagagcaaggactccgacgtgtacatcaccgataagtgcgtgctggacatgcggagcatggacttcaagagcaactccgccgtggcctggtccaacaagtccgatttcgcctgcgccaacgccttcaacaacagcattatccccgaggacacattcttcccaagccccgagagcagctgcgacgtgaagctggtggaaaagagcttcgagacagacaccaacctgaacttccagatcctgtacgagatcctgctgggcaaggccaccctgtacgccgtgctggtgtctgccctggtgctgatggctatggtcaagcggaaggacagccggggacgcgccaagagaagcggatctggcgtgaagcagaccctgaatttcgacctgctgaagctggctggcgacgtggaatccaacccaggccctactagtatggactggatttggcgcatccttttccttgtcggcgctgctaccggcgcgcattccttcgaagtccaacttgtggagtctggagggggcctggtgcagcccggcggctctctcagactgtcttgtgcggcaagcggctacaccttcacctcttactggatagaatgggtgaggcaggcacctggaaagggactggagtggattggagagattctgccaggagggggagatacaaattacaatgaaatcttcaaggggcgggccaccttttcagcggataccagcaagaatacagcttacctgcagatgaatagcctccgggcagaagataccgctgtttattattgcacgagacgggtgccaataagactggactattgggggcaagggactcttgtcaccgtcagttcaacgcgtgaggacctgaagaacgtgttcccacctgaggtggccgtgttcgagcctagcgaggccgagatcagccacacccagaaagccaccctcgtgtgcctggctaccggcttctaccccgaccatgtggaactgtcttggtgggtcaacggcaaagaggtgcacagcggcgtgtgtaccgacccccagccactgaaagaacagcccgccctgaacgacagccggtactgcctgagcagcagactgagagtgtccgccaccttctggcagaacccccggaaccacttcagatgccaggtgcagttctacggcctgagcgagaacgacgagtggacccaggacagagccaagcccgtgacccagatcgtgtctgccgaagcctggggcagagccgattgcggctttaccagcgagagctaccagcagggcgtgctgagcgccaccaacctgagcgtgatcggcttcagaatcctgctgctgaaagtggccggctttaacctgctgatgaccctgcggctgtggtccagc

SEQ ID NO: 6109 - DNA, 2265 bp, synthetic construct
  source 1..2265: mol_type = other DNA
atggccttaccagtgaccgccttgctcctgccgctggccttgctgctccacgccgccaggccggaagtgcagctggttgaatctggcggaggactggttcagcctggcggatctctgagactgtcttgtgccgccagcggcttcagcttcagcgacttttggatgagctgggtccgacaggcccctggcaaaggacttgaatgggtcgccacaatcagccaggccggcagcgagaaggactacgtggactctgtgaagggcagattcaccatcagccgggacaacgccaagaagtccctgtacctccagatgaacagcctgagagccgaggacaccgccgtgtactattgtgcctctggcgtgtacagcttcgactacagaggccagggcaccctggtcacagtctcttctggtaccggcggaggcggatctggcggcggaggtagcggtggcggaggatctgaattcgacatcgtgatgacacagagccctgatagcctggccgtgtctctgggagagagagccaccattaactgcaaggccagccagagcgtggactacgacggcgacagcttcctgaactggtatcagcagaagcccggccagcctcctaagctgctgatctacgccgccagcaatctggaaagcggcgtgccaagcagattttccggctctggcagcggcaccgatttcaccctgacaatatccagcctccagcctgaggacgtggccgtgtactactgccagcagagcaacgacgaccctctgacctttggacagggcaccaaggtggaaatcaaactcgaggacctgaagaacgtgttcccacctgaggtggccgtgttcgagcctagcgaggccgagatcagccacacccagaaagccaccctcgtgtgcctggctaccggcttctaccccgaccatgtggaactgtcttggtgggtcaacggcaaagaggtgcacagcggcgtgtgtaccgacccccagccactgaaagaacagcccgccctgaacgacagccggtactgcctgagcagcagactgagagtgtccgccaccttctggcagaacccccggaaccacttcagatgccaggtgcagttctacggcctgagcgagaacgacgagtggacccaggacagagccaagcccgtgacccagatcgtgtctgccgaagcctggggcagagccgattgcggctttaccagcgagagctaccagcagggcgtgctgagcgccaccaacctgagcgtgatcggcttcagaatcctgctgctgaaagtggccggctttaacctgctgatgaccctgcggctgtggtccagcagggccaagcgatctggatctggagcaacaaacttctcactactcaaacaagcaggtgacgtggaggagaatcccgggcctactagtatggactggatttggcgcatccttttccttgtcggcgctgctaccggcgcgcattccttcgaagtccaacttgtggagtctggagggggcctggtgcagcccggcggctctctcagactgtcttgtgcggcaagcggctacaccttcacctcttactggatagaatgggtgaggcaggcacctggaaagggactggagtggattggagagattctgccaggagggggagatacaaattacaatgaaatcttcaaggggcgggccaccttttcagcggataccagcaagaatacagcttacctgcagatgaatagcctccgggcagaagataccgctgtttattattgcacgagacgggtgccaataagactggactattgggggcaagggactcttgtcaccgtcagttcaacgcgtatccagaaccctgatcctgccgtgtaccagctgcgggatagcaagagcagcgacaagagcgtgtgtctgttcaccgacttcgacagccagaccaacgtgtcccagagcaaggactccgacgtgtacatcaccgataagtgcgtgctggacatgcggagcatggacttcaagagcaactccgccgtggcctggtccaacaagtccgatttcgcctgcgccaacgccttcaacaacagcattatccccgaggacacattcttcccaagccccgagagcagctgcgacgtgaagctggtggaaaagagcttcgagacagacaccaacctgaacttccagatcctgtacgagatcctgctgggcaaggccaccctgtacgccgtgctggtgtctgccctggtgctgatggctatggtcaagcggaaggacagccgggga

SEQ ID NO: 6110 - DNA, 2277 bp, synthetic construct
  source 1..2277: mol_type = other DNA
atggccttaccagtgaccgccttgctcctgccgctggccttgctgctccacgccgccaggccggaagtgcagctggttgaatctggcggaggactggttcagcctggcggatctctgagactgtcttgtgccgccagcggcttcagcttcagcgacttttggatgagctgggtccgacaggcccctggcaaaggacttgaatgggtcgccacaatcagccaggccggcagcgagaaggactacgtggactctgtgaagggcagattcaccatcagccgggacaacgccaagaagtccctgtacctccagatgaacagcctgagagccgaggacaccgccgtgtactattgtgcctctggcgtgtacagcttcgactacagaggccagggcaccctggtcacagtctcttctggtaccggcggaggcggatctggcggcggaggtagcggtggcggaggatctgaattcgacatcgtgatgacacagagccctgatagcctggccgtgtctctgggagagagagccaccattaactgcaaggccagccagagcgtggactacgacggcgacagcttcctgaactggtatcagcagaagcccggccagcctcctaagctgctgatctacgccgccagcaatctggaaagcggcgtgccaagcagattttccggctctggcagcggcaccgatttcaccctgacaatatccagcctccagcctgaggacgtggccgtgtactactgccagcagagcaacgacgaccctctgacctttggacagggcaccaaggtggaaatcaaactcgagatccagaaccctgatcctgccgtgtaccagctgcgggatagcaagagcagcgacaagagcgtgtgtctgttcaccgacttcgacagccagaccaacgtgtcccagagcaaggactccgacgtgtacatcaccgataagtgcgtgctggacatgcggagcatggacttcaagagcaactccgccgtggcctggtccaacaagtccgatttcgcctgcgccaacgccttcaacaacagcattatccccgaggacacattcttcccaagccccgagagcagctgcgacgtgaagctggtggaaaagagcttcgagacagacaccaacctgaacttccagatcctgtacgagatcctgctgggcaaggccaccctgtacgccgtgctggtgtctgccctggtgctgatggctatggtcaagcggaaggacagccggggacgcgccaagagaagcggatctggcgtgaagcagaccctgaatttcgacctgctgaagctggctggcgacgtggaatccaacccaggccctactagtatggactggatttggcgcatccttttccttgtcggcgctgctaccggcgcgcattccttcgaagtccaacttgtggagtctggagggggcctggtgcagcccggcggctctctcagactgtcttgtgcggcaagcggctacaccttcacctcttactggatagaatgggtgaggcaggcacctggaaagggactggagtggattggagagattctgccaggagggggagatacaaattacaatgaaatcttcaaggggcgggccaccttttcagcggataccagcaagaatacagcttacctgcagatgaatagcctccgggcagaagataccgctgtttattattgcacgagacgggtgccaataagactggactattgggggcaagggactcttgtcaccgtcagttcaacgcgtgaggacctgaagaacgtgttcccacctgaggtggccgtgttcgagcctagcgaggccgagatcagccacacccagaaagccaccctcgtgtgcctggctaccggcttctaccccgaccatgtggaactgtcttggtgggtcaacggcaaagaggtgcacagcggcgtgtgtaccgacccccagccactgaaagaacagcccgccctgaacgacagccggtactgcctgagcagcagactgagagtgtccgccaccttctggcagaacccccggaaccacttcagatgccaggtgcagttctacggcctgagcgagaacgacgagtggacccaggacagagccaagcccgtgacccagatcgtgtctgccgaagcctggggcagagccgattgcggctttaccagcgagagctaccagcagggcgtgctgagcgccaccaacctgagcgtgatcggcttcagaatcctgctgctgaaagtggccggctttaacctgctgatgaccctgcggctgtggtccagc

SEQ ID NO: 6111 - DNA, 2676 bp, synthetic construct
  source 1..2676: mol_type = other DNA
atggccttaccagtgaccgccttgctcctgccgctggccttgctgctccacgccgccaggccggaagtgcagctggttgaatctggcggaggactggttcagcctggcggatctctgagactgtcttgtgccgccagcggcttcagcttcagcgacttttggatgagctgggtccgacaggcccctggcaaaggacttgaatgggtcgccacaatcagccaggccggcagcgagaaggactacgtggactctgtgaagggcagattcaccatcagccgggacaacgccaagaagtccctgtacctccagatgaacagcctgagagccgaggacaccgccgtgtactattgtgcctctggcgtgtacagcttcgactacagaggccagggcaccctggtcacagtctcttctggtaccggcggaggcggatctggcggcggaggtagcggtggcggaggatctgaattcgacatcgtgatgacacagagccctgatagcctggccgtgtctctgggagagagagccaccattaactgcaaggccagccagagcgtggactacgacggcgacagcttcctgaactggtatcagcagaagcccggccagcctcctaagctgctgatctacgccgccagcaatctggaaagcggcgtgccaagcagattttccggctctggcagcggcaccgatttcaccctgacaatatccagcctccagcctgaggacgtggccgtgtactactgccagcagagcaacgacgaccctctgacctttggacagggcaccaaggtggaaatcaaactcgaggacctgaagaacgtgttcccacctgaggtggccgtgttcgagcctagcgaggccgagatcagccacacccagaaagccaccctcgtgtgcctggctaccggcttctaccccgaccatgtggaactgtcttggtgggtcaacggcaaagaggtgcacagcggcgtgtgtaccgacccccagccactgaaagaacagcccgccctgaacgacagccggtactgcctgagcagcagactgagagtgtccgccaccttctggcagaacccccggaaccacttcagatgccaggtgcagttctacggcctgagcgagaacgacgagtggacccaggacagagccaagcccgtgacccagatcgtgtctgccgaagcctggggcagagccgattgcggctttaccagcgagagctaccagcagggcgtgctgagcgccaccaacctgagcgtgatcggcttcagaatcctgctgctgaaagtggccggctttaacctgctgatgaccctgcggctgtggtccagcagggccaagcgatctggatctggagcaacaaacttctcactactcaaacaagcaggtgacgtggaggagaatcccgggcctactagtatggactggatttggcgcatccttttccttgtcggcgctgctaccggcgcgcattccgggccccagctccagctgcaagagtctggacctggcctggtcaagcctagcgagacactgagcctgacctgtaccgtgtccggcgatagcatcagcagcggcgattactactggggctggatcagacagcctcctggcaaaggactggaatggatcggccacatctactacagcggcgtgacctactacaaccccagcctgaagtccagagtgaccatcagcgtggacaccagccggaaccagttctccctgaagctgtctagcgtgacagccgccgataccgccgtgtactactgcaccagagaggacagcagcaactggcggagtagaggccagggaacactggtcacagttagctctggatccggcggaggcggaagtggaggcggaggatctggcggcggaggctctttcgaagtccaacttgtggagtctggagggggcctggtgcagcccggcggctctctcagactgtcttgtgcggcaagcggctacaccttcacctcttactggatagaatgggtgaggcaggcacctggaaagggactggagtggattggagagattctgccaggagggggagatacaaattacaatgaaatcttcaaggggcgggccaccttttcagcggataccagcaagaatacagcttacctgcagatgaatagcctccgggcagaagataccgctgtttattattgcacgagacgggtgccaataagactggactattgggggcaagggactcttgtcaccgtcagttcaacgcgtatccagaaccctgatcctgccgtgtaccagctgcgggatagcaagagcagcgacaagagcgtgtgtctgttcaccgacttcgacagccagaccaacgtgtcccagagcaaggactccgacgtgtacatcaccgataagtgcgtgctggacatgcggagcatggacttcaagagcaactccgccgtggcctggtccaacaagtccgatttcgcctgcgccaacgccttcaacaacagcattatccccgaggacacattcttcccaagccccgagagcagctgcgacgtgaagctggtggaaaagagcttcgagacagacaccaacctgaacttccagatcctgtacgagatcctgctgggcaaggccaccctgtacgccgtgctggtgtctgccctggtgctgatggctatggtcaagcggaaggacagccgggga

SEQ ID NO: 6112 - DNA, 2688 bp, synthetic construct
  source 1..2688: mol_type = other DNA
atggccttaccagtgaccgccttgctcctgccgctggccttgctgctccacgccgccaggccggaagtgcagctggttgaatctggcggaggactggttcagcctggcggatctctgagactgtcttgtgccgccagcggcttcagcttcagcgacttttggatgagctgggtccgacaggcccctggcaaaggacttgaatgggtcgccacaatcagccaggccggcagcgagaaggactacgtggactctgtgaagggcagattcaccatcagccgggacaacgccaagaagtccctgtacctccagatgaacagcctgagagccgaggacaccgccgtgtactattgtgcctctggcgtgtacagcttcgactacagaggccagggcaccctggtcacagtctcttctggtaccggcggaggcggatctggcggcggaggtagcggtggcggaggatctgaattcgacatcgtgatgacacagagccctgatagcctggccgtgtctctgggagagagagccaccattaactgcaaggccagccagagcgtggactacgacggcgacagcttcctgaactggtatcagcagaagcccggccagcctcctaagctgctgatctacgccgccagcaatctggaaagcggcgtgccaagcagattttccggctctggcagcggcaccgatttcaccctgacaatatccagcctccagcctgaggacgtggccgtgtactactgccagcagagcaacgacgaccctctgacctttggacagggcaccaaggtggaaatcaaactcgagatccagaaccctgatcctgccgtgtaccagctgcgggatagcaagagcagcgacaagagcgtgtgtctgttcaccgacttcgacagccagaccaacgtgtcccagagcaaggactccgacgtgtacatcaccgataagtgcgtgctggacatgcggagcatggacttcaagagcaactccgccgtggcctggtccaacaagtccgatttcgcctgcgccaacgccttcaacaacagcattatccccgaggacacattcttcccaagccccgagagcagctgcgacgtgaagctggtggaaaagagcttcgagacagacaccaacctgaacttccagatcctgtacgagatcctgctgggcaaggccaccctgtacgccgtgctggtgtctgccctggtgctgatggctatggtcaagcggaaggacagccggggacgcgccaagagaagcggatctggcgtgaagcagaccctgaatttcgacctgctgaagctggctggcgacgtggaatccaacccaggccctactagtatggactggatttggcgcatccttttccttgtcggcgctgctaccggcgcgcattccgggccccagctccagctgcaagagtctggacctggcctggtcaagcctagcgagacactgagcctgacctgtaccgtgtccggcgatagcatcagcagcggcgattactactggggctggatcagacagcctcctggcaaaggactggaatggatcggccacatctactacagcggcgtgacctactacaaccccagcctgaagtccagagtgaccatcagcgtggacaccagccggaaccagttctccctgaagctgtctagcgtgacagccgccgataccgccgtgtactactgcaccagagaggacagcagcaactggcggagtagaggccagggaacactggtcacagttagctctggatccggcggaggcggaagtggaggcggaggatctggcggcggaggctctttcgaagtccaacttgtggagtctggagggggcctggtgcagcccggcggctctctcagactgtcttgtgcggcaagcggctacaccttcacctcttactggatagaatgggtgaggcaggcacctggaaagggactggagtggattggagagattctgccaggagggggagatacaaattacaatgaaatcttcaaggggcgggccaccttttcagcggataccagcaagaatacagcttacctgcagatgaatagcctccgggcagaagataccgctgtttattattgcacgagacgggtgccaataagactggactattgggggcaagggactcttgtcaccgtcagttcaacgcgtgaggacctgaagaacgtgttcccacctgaggtggccgtgttcgagcctagcgaggccgagatcagccacacccagaaagccaccctcgtgtgcctggctaccggcttctaccccgaccatgtggaactgtcttggtgggtcaacggcaaagaggtgcacagcggcgtgtgtaccgacccccagccactgaaagaacagcccgccctgaacgacagccggtactgcctgagcagcagactgagagtgtccgccaccttctggcagaacccccggaaccacttcagatgccaggtgcagttctacggcctgagcgagaacgacgagtggacccaggacagagccaagcccgtgacccagatcgtgtctgccgaagcctggggcagagccgattgcggctttaccagcgagagctaccagcagggcgtgctgagcgccaccaacctgagcgtgatcggcttcagaatcctgctgctgaaagtggccggctttaacctgctgatgaccctgcggctgtggtccagc

SEQ ID NO: 6113 - DNA, 2172 bp, synthetic construct
  source 1..2172: mol_type = other DNA
atggccttaccagtgaccgccttgctcctgccgctggccttgctgctccacgccgccaggccggacatcgtgatgacacagagccctgatagcctggccgtgtctctgggagagagagccaccattaactgcaaggccagccagagcgtggactacgacggcgacagcttcctgaactggtatcagcagaagcccggccagcctcctaagctgctgatctacgccgccagcaatctggaaagcggcgtgccaagcagattttccggctctggcagcggcaccgatttcaccctgacaatatccagcctccagcctgaggacgtggccgtgtactactgccagcagagcaacgacgaccctctgacctttggacagggcaccaaggtggaaatcaaactcgaggacctgaagaacgtgttcccacctgaggtggccgtgttcgagcctagcgaggccgagatcagccacacccagaaagccaccctcgtgtgcctggctaccggcttctaccccgaccatgtggaactgtcttggtgggtcaacggcaaagaggtgcacagcggcgtgtgtaccgacccccagccactgaaagaacagcccgccctgaacgacagccggtactgcctgagcagcagactgagagtgtccgccaccttctggcagaacccccggaaccacttcagatgccaggtgcagttctacggcctgagcgagaacgacgagtggacccaggacagagccaagcccgtgacccagatcgtgtctgccgaagcctggggcagagccgatgatgtgattaagatccactggcaggaaaagaagtccaacaccatcctgggcagccaggaaggcaacaccatgaagaccaacgacacctacatgaagttcagctggctgaccgtgcccgagaagtccctggacaaagaacacagatgcatcgtgcggcacgaaaacaacaagaacggcgtggaccaggaaatcatcttcccacccatcaagaccgatgtgattacaatggaccccaaggacaactgctccaaggacgccaacgataccctgctgctccagctgaccaacaccagcgcctactacatgtacttgttgctgctgctgaagtccgtggtgtacttcgccatcatcacatgctgcctgctgatggctatggtcaagcggaaggacagccggggaagggccaagcgatctggatctggagcaacaaacttctcactactcaaacaagcaggtgacgtggaggagaatcccgggcctactagtatggactggatttggcgcatccttttccttgtcggcgctgctaccggcgcgcattccttcgaagtccaacttgtggagtctggagggggcctggtgcagcccggcggctctctcagactgtcttgtgcggcaagcggctacaccttcacctcttactggatagaatgggtgaggcaggcacctggaaagggactggagtggattggagagattctgccaggagggggagatacaaattacaatgaaatcttcaaggggcgggccaccttttcagcggataccagcaagaatacagcttacctgcagatgaatagcctccgggcagaagataccgctgtttattattgcacgagacgggtgccaataagactggactattgggggcaagggactcttgtcaccgtcagttcaacgcgtatccagaaccctgatcctgccgtgtaccagctgcgggatagcaagagcagcgacaagagcgtgtgtctgttcaccgacttcgacagccagaccaacgtgtcccagagcaaggactccgacgtgtacatcaccgataagtgcgtgctggacatgcggagcatggacttcaagagcaactccgccgtggcctggtccaacaagtccgatttcgcctgcgccaacgccttcaacaacagcattatccccgaggacacattcttcccaagccccgagagcagcgactccaccgaccacgtgaagcccaaagagacagagaacaccaagcagcccagcaagagctgccacaagcccaaggccatcgtgcacaccgagaaagtgaacatgatgagcctgaccgtgctgggcctgcggatgctgttcgccaaaaccgtggccgtgaacttcctgctgaccgccaagctgttcttcctcctcaccgcc

SEQ ID NO: 6114 - DNA, 2184 bp, synthetic construct
  source 1..2184: mol_type = other DNA
atggccttaccagtgaccgccttgctcctgccgctggccttgctgctccacgccgccaggccggacatcgtgatgacacagagccctgatagcctggccgtgtctctgggagagagagccaccattaactgcaaggccagccagagcgtggactacgacggcgacagcttcctgaactggtatcagcagaagcccggccagcctcctaagctgctgatctacgccgccagcaatctggaaagcggcgtgccaagcagattttccggctctggcagcggcaccgatttcaccctgacaatatccagcctccagcctgaggacgtggccgtgtactactgccagcagagcaacgacgaccctctgacctttggacagggcaccaaggtggaaatcaaactcgagatccagaaccctgatcctgccgtgtaccagctgcgggatagcaagagcagcgacaagagcgtgtgtctgttcaccgacttcgacagccagaccaacgtgtcccagagcaaggactccgacgtgtacatcaccgataagtgcgtgctggacatgcggagcatggacttcaagagcaactccgccgtggcctggtccaacaagtccgatttcgcctgcgccaacgccttcaacaacagcattatccccgaggacacattcttcccaagccccgagagcagcgactccaccgaccacgtgaagcccaaagagacagagaacaccaagcagcccagcaagagctgccacaagcccaaggccatcgtgcacaccgagaaagtgaacatgatgagcctgaccgtgctgggcctgcggatgctgttcgccaaaaccgtggccgtgaacttcctgctgaccgccaagctgttcttcctcctcaccgcccgcgccaagagaagcggatctggcgtgaagcagaccctgaatttcgacctgctgaagctggctggcgacgtggaatccaacccaggccctactagtatggactggatttggcgcatccttttccttgtcggcgctgctaccggcgcgcattccttcgaagtccaacttgtggagtctggagggggcctggtgcagcccggcggctctctcagactgtcttgtgcggcaagcggctacaccttcacctcttactggatagaatgggtgaggcaggcacctggaaagggactggagtggattggagagattctgccaggagggggagatacaaattacaatgaaatcttcaaggggcgggccaccttttcagcggataccagcaagaatacagcttacctgcagatgaatagcctccgggcagaagataccgctgtttattattgcacgagacgggtgccaataagactggactattgggggcaagggactcttgtcaccgtcagttcaacgcgtgaggacctgaagaacgtgttcccacctgaggtggccgtgttcgagcctagcgaggccgagatcagccacacccagaaagccaccctcgtgtgcctggctaccggcttctaccccgaccatgtggaactgtcttggtgggtcaacggcaaagaggtgcacagcggcgtgtgtaccgacccccagccactgaaagaacagcccgccctgaacgacagccggtactgcctgagcagcagactgagagtgtccgccaccttctggcagaacccccggaaccacttcagatgccaggtgcagttctacggcctgagcgagaacgacgagtggacccaggacagagccaagcccgtgacccagatcgtgtctgccgaagcctggggcagagccgatgatgtgattaagatccactggcaggaaaagaagtccaacaccatcctgggcagccaggaaggcaacaccatgaagaccaacgacacctacatgaagttcagctggctgaccgtgcccgagaagtccctggacaaagaacacagatgcatcgtgcggcacgaaaacaacaagaacggcgtggaccaggaaatcatcttcccacccatcaagaccgatgtgattacaatggaccccaaggacaactgctccaaggacgccaacgataccctgctgctccagctgaccaacaccagcgcctactacatgtacttgttgctgctgctgaagtccgtggtgtacttcgccatcatcacatgctgcctgctgatggctatggtcaagcggaaggacagccgggga

SEQ ID NO: 6115 - DNA, 2577 bp, synthetic construct
  source 1..2577: mol_type = other DNA
atggccttaccagtgaccgccttgctcctgccgctggccttgctgctccacgccgccaggccggaagtgcagctggttgaatctggcggaggactggttcagcctggcggatctctgagactgtcttgtgccgccagcggcttcagcttcagcgacttttggatgagctgggtccgacaggcccctggcaaaggacttgaatgggtcgccacaatcagccaggccggcagcgagaaggactacgtggactctgtgaagggcagattcaccatcagccgggacaacgccaagaagtccctgtacctccagatgaacagcctgagagccgaggacaccgccgtgtactattgtgcctctggcgtgtacagcttcgactacagaggccagggcaccctggtcacagtctcttctggtaccggcggaggcggatctggcggcggaggtagcggtggcggaggatctgaattcgacatcgtgatgacacagagccctgatagcctggccgtgtctctgggagagagagccaccattaactgcaaggccagccagagcgtggactacgacggcgacagcttcctgaactggtatcagcagaagcccggccagcctcctaagctgctgatctacgccgccagcaatctggaaagcggcgtgccaagcagattttccggctctggcagcggcaccgatttcaccctgacaatatccagcctccagcctgaggacgtggccgtgtactactgccagcagagcaacgacgaccctctgacctttggacagggcaccaaggtggaaatcaaactcgaggacctgaagaacgtgttcccacctgaggtggccgtgttcgagcctagcgaggccgagatcagccacacccagaaagccaccctcgtgtgcctggctaccggcttctaccccgaccatgtggaactgtcttggtgggtcaacggcaaagaggtgcacagcggcgtgtgtaccgacccccagccactgaaagaacagcccgccctgaacgacagccggtactgcctgagcagcagactgagagtgtccgccaccttctggcagaacccccggaaccacttcagatgccaggtgcagttctacggcctgagcgagaacgacgagtggacccaggacagagccaagcccgtgacccagatcgtgtctgccgaagcctggggcagagccgatgatgtgattaagatccactggcaggaaaagaagtccaacaccatcctgggcagccaggaaggcaacaccatgaagaccaacgacacctacatgaagttcagctggctgaccgtgcccgagaagtccctggacaaagaacacagatgcatcgtgcggcacgaaaacaacaagaacggcgtggaccaggaaatcatcttcccacccatcaagaccgatgtgattacaatggaccccaaggacaactgctccaaggacgccaacgataccctgctgctccagctgaccaacaccagcgcctactacatgtacttgttgctgctgctgaagtccgtggtgtacttcgccatcatcacatgctgcctgctgatggctatggtcaagcggaaggacagccggggaagggccaagcgatctggatctggagcaacaaacttctcactactcaaacaagcaggtgacgtggaggagaatcccgggcctactagtatggactggatttggcgcatccttttccttgtcggcgctgctaccggcgcgcattccttcgaagtccaacttgtggagtctggagggggcctggtgcagcccggcggctctctcagactgtcttgtgcggcaagcggctacaccttcacctcttactggatagaatgggtgaggcaggcacctggaaagggactggagtggattggagagattctgccaggagggggagatacaaattacaatgaaatcttcaaggggcgggccaccttttcagcggataccagcaagaatacagcttacctgcagatgaatagcctccgggcagaagataccgctgtttattattgcacgagacgggtgccaataagactggactattgggggcaagggactcttgtcaccgtcagttcaacgcgtatccagaaccctgatcctgccgtgtaccagctgcgggatagcaagagcagcgacaagagcgtgtgtctgttcaccgacttcgacagccagaccaacgtgtcccagagcaaggactccgacgtgtacatcaccgataagtgcgtgctggacatgcggagcatggacttcaagagcaactccgccgtggcctggtccaacaagtccgatttcgcctgcgccaacgccttcaacaacagcattatccccgaggacacattcttcccaagccccgagagcagcgactccaccgaccacgtgaagcccaaagagacagagaacaccaagcagcccagcaagagctgccacaagcccaaggccatcgtgcacaccgagaaagtgaacatgatgagcctgaccgtgctgggcctgcggatgctgttcgccaaaaccgtggccgtgaacttcctgctgaccgccaagctgttcttcctcctcaccgcc

SEQ ID NO: 6116 - DNA, 2589 bp, synthetic construct
  source 1..2589: mol_type = other DNA
atggccttaccagtgaccgccttgctcctgccgctggccttgctgctccacgccgccaggccggaagtgcagctggttgaatctggcggaggactggttcagcctggcggatctctgagactgtcttgtgccgccagcggcttcagcttcagcgacttttggatgagctgggtccgacaggcccctggcaaaggacttgaatgggtcgccacaatcagccaggccggcagcgagaaggactacgtggactctgtgaagggcagattcaccatcagccgggacaacgccaagaagtccctgtacctccagatgaacagcctgagagccgaggacaccgccgtgtactattgtgcctctggcgtgtacagcttcgactacagaggccagggcaccctggtcacagtctcttctggtaccggcggaggcggatctggcggcggaggtagcggtggcggaggatctgaattcgacatcgtgatgacacagagccctgatagcctggccgtgtctctgggagagagagccaccattaactgcaaggccagccagagcgtggactacgacggcgacagcttcctgaactggtatcagcagaagcccggccagcctcctaagctgctgatctacgccgccagcaatctggaaagcggcgtgccaagcagattttccggctctggcagcggcaccgatttcaccctgacaatatccagcctccagcctgaggacgtggccgtgtactactgccagcagagcaacgacgaccctctgacctttggacagggcaccaaggtggaaatcaaactcgagatccagaaccctgatcctgccgtgtaccagctgcgggatagcaagagcagcgacaagagcgtgtgtctgttcaccgacttcgacagccagaccaacgtgtcccagagcaaggactccgacgtgtacatcaccgataagtgcgtgctggacatgcggagcatggacttcaagagcaactccgccgtggcctggtccaacaagtccgatttcgcctgcgccaacgccttcaacaacagcattatccccgaggacacattcttcccaagccccgagagcagcgactccaccgaccacgtgaagcccaaagagacagagaacaccaagcagcccagcaagagctgccacaagcccaaggccatcgtgcacaccgagaaagtgaacatgatgagcctgaccgtgctgggcctgcggatgctgttcgccaaaaccgtggccgtgaacttcctgctgaccgccaagctgttcttcctcctcaccgcccgcgccaagagaagcggatctggcgtgaagcagaccctgaatttcgacctgctgaagctggctggcgacgtggaatccaacccaggccctactagtatggactggatttggcgcatccttttccttgtcggcgctgctaccggcgcgcattccttcgaagtccaacttgtggagtctggagggggcctggtgcagcccggcggctctctcagactgtcttgtgcggcaagcggctacaccttcacctcttactggatagaatgggtgaggcaggcacctggaaagggactggagtggattggagagattctgccaggagggggagatacaaattacaatgaaatcttcaaggggcgggccaccttttcagcggataccagcaagaatacagcttacctgcagatgaatagcctccgggcagaagataccgctgtttattattgcacgagacgggtgccaataagactggactattgggggcaagggactcttgtcaccgtcagttcaacgcgtgaggacctgaagaacgtgttcccacctgaggtggccgtgttcgagcctagcgaggccgagatcagccacacccagaaagccaccctcgtgtgcctggctaccggcttctaccccgaccatgtggaactgtcttggtgggtcaacggcaaagaggtgcacagcggcgtgtgtaccgacccccagccactgaaagaacagcccgccctgaacgacagccggtactgcctgagcagcagactgagagtgtccgccaccttctggcagaacccccggaaccacttcagatgccaggtgcagttctacggcctgagcgagaacgacgagtggacccaggacagagccaagcccgtgacccagatcgtgtctgccgaagcctggggcagagccgatgatgtgattaagatccactggcaggaaaagaagtccaacaccatcctgggcagccaggaaggcaacaccatgaagaccaacgacacctacatgaagttcagctggctgaccgtgcccgagaagtccctggacaaagaacacagatgcatcgtgcggcacgaaaacaacaagaacggcgtggaccaggaaatcatcttcccacccatcaagaccgatgtgattacaatggaccccaaggacaactgctccaaggacgccaacgataccctgctgctccagctgaccaacaccagcgcctactacatgtacttgttgctgctgctgaagtccgtggtgtacttcgccatcatcacatgctgcctgctgatggctatggtcaagcggaaggacagccgggga

SEQ ID NO: 6117 - DNA, 2988 bp, synthetic construct
  source 1..2988: mol_type = other DNA
atggccttaccagtgaccgccttgctcctgccgctggccttgctgctccacgccgccaggccggaagtgcagctggttgaatctggcggaggactggttcagcctggcggatctctgagactgtcttgtgccgccagcggcttcagcttcagcgacttttggatgagctgggtccgacaggcccctggcaaaggacttgaatgggtcgccacaatcagccaggccggcagcgagaaggactacgtggactctgtgaagggcagattcaccatcagccgggacaacgccaagaagtccctgtacctccagatgaacagcctgagagccgaggacaccgccgtgtactattgtgcctctggcgtgtacagcttcgactacagaggccagggcaccctggtcacagtctcttctggtaccggcggaggcggatctggcggcggaggtagcggtggcggaggatctgaattcgacatcgtgatgacacagagccctgatagcctggccgtgtctctgggagagagagccaccattaactgcaaggccagccagagcgtggactacgacggcgacagcttcctgaactggtatcagcagaagcccggccagcctcctaagctgctgatctacgccgccagcaatctggaaagcggcgtgccaagcagattttccggctctggcagcggcaccgatttcaccctgacaatatccagcctccagcctgaggacgtggccgtgtactactgccagcagagcaacgacgaccctctgacctttggacagggcaccaaggtggaaatcaaactcgaggacctgaagaacgtgttcccacctgaggtggccgtgttcgagcctagcgaggccgagatcagccacacccagaaagccaccctcgtgtgcctggctaccggcttctaccccgaccatgtggaactgtcttggtgggtcaacggcaaagaggtgcacagcggcgtgtgtaccgacccccagccactgaaagaacagcccgccctgaacgacagccggtactgcctgagcagcagactgagagtgtccgccaccttctggcagaacccccggaaccacttcagatgccaggtgcagttctacggcctgagcgagaacgacgagtggacccaggacagagccaagcccgtgacccagatcgtgtctgccgaagcctggggcagagccgatgatgtgattaagatccactggcaggaaaagaagtccaacaccatcctgggcagccaggaaggcaacaccatgaagaccaacgacacctacatgaagttcagctggctgaccgtgcccgagaagtccctggacaaagaacacagatgcatcgtgcggcacgaaaacaacaagaacggcgtggaccaggaaatcatcttcccacccatcaagaccgatgtgattacaatggaccccaaggacaactgctccaaggacgccaacgataccctgctgctccagctgaccaacaccagcgcctactacatgtacttgttgctgctgctgaagtccgtggtgtacttcgccatcatcacatgctgcctgctgatggctatggtcaagcggaaggacagccggggaagggccaagcgatctggatctggagcaacaaacttctcactactcaaacaagcaggtgacgtggaggagaatcccgggcctactagtatggactggatttggcgcatccttttccttgtcggcgctgctaccggcgcgcattccgggccccagctccagctgcaagagtctggacctggcctggtcaagcctagcgagacactgagcctgacctgtaccgtgtccggcgatagcatcagcagcggcgattactactggggctggatcagacagcctcctggcaaaggactggaatggatcggccacatctactacagcggcgtgacctactacaaccccagcctgaagtccagagtgaccatcagcgtggacaccagccggaaccagttctccctgaagctgtctagcgtgacagccgccgataccgccgtgtactactgcaccagagaggacagcagcaactggcggagtagaggccagggaacactggtcacagttagctctggatccggcggaggcggaagtggaggcggaggatctggcggcggaggctctttcgaagtccaacttgtggagtctggagggggcctggtgcagcccggcggctctctcagactgtcttgtgcggcaagcggctacaccttcacctcttactggatagaatgggtgaggcaggcacctggaaagggactggagtggattggagagattctgccaggagggggagatacaaattacaatgaaatcttcaaggggcgggccaccttttcagcggataccagcaagaatacagcttacctgcagatgaatagcctccgggcagaagataccgctgtttattattgcacgagacgggtgccaataagactggactattgggggcaagggactcttgtcaccgtcagttcaacgcgtatccagaaccctgatcctgccgtgtaccagctgcgggatagcaagagcagcgacaagagcgtgtgtctgttcaccgacttcgacagccagaccaacgtgtcccagagcaaggactccgacgtgtacatcaccgataagtgcgtgctggacatgcggagcatggacttcaagagcaactccgccgtggcctggtccaacaagtccgatttcgcctgcgccaacgccttcaacaacagcattatccccgaggacacattcttcccaagccccgagagcagcgactccaccgaccacgtgaagcccaaagagacagagaacaccaagcagcccagcaagagctgccacaagcccaaggccatcgtgcacaccgagaaagtgaacatgatgagcctgaccgtgctgggcctgcggatgctgttcgccaaaaccgtggccgtgaacttcctgctgaccgccaagctgttcttcctcctcaccgcc

SEQ ID NO: 6118 - DNA, 3000 bp, synthetic construct
  source 1..3000: mol_type = other DNA
atggccttaccagtgaccgccttgctcctgccgctggccttgctgctccacgccgccaggccggaagtgcagctggttgaatctggcggaggactggttcagcctggcggatctctgagactgtcttgtgccgccagcggcttcagcttcagcgacttttggatgagctgggtccgacaggcccctggcaaaggacttgaatgggtcgccacaatcagccaggccggcagcgagaaggactacgtggactctgtgaagggcagattcaccatcagccgggacaacgccaagaagtccctgtacctccagatgaacagcctgagagccgaggacaccgccgtgtactattgtgcctctggcgtgtacagcttcgactacagaggccagggcaccctggtcacagtctcttctggtaccggcggaggcggatctggcggcggaggtagcggtggcggaggatctgaattcgacatcgtgatgacacagagccctgatagcctggccgtgtctctgggagagagagccaccattaactgcaaggccagccagagcgtggactacgacggcgacagcttcctgaactggtatcagcagaagcccggccagcctcctaagctgctgatctacgccgccagcaatctggaaagcggcgtgccaagcagattttccggctctggcagcggcaccgatttcaccctgacaatatccagcctccagcctgaggacgtggccgtgtactactgccagcagagcaacgacgaccctctgacctttggacagggcaccaaggtggaaatcaaactcgagatccagaaccctgatcctgccgtgtaccagctgcgggatagcaagagcagcgacaagagcgtgtgtctgttcaccgacttcgacagccagaccaacgtgtcccagagcaaggactccgacgtgtacatcaccgataagtgcgtgctggacatgcggagcatggacttcaagagcaactccgccgtggcctggtccaacaagtccgatttcgcctgcgccaacgccttcaacaacagcattatccccgaggacacattcttcccaagccccgagagcagcgactccaccgaccacgtgaagcccaaagagacagagaacaccaagcagcccagcaagagctgccacaagcccaaggccatcgtgcacaccgagaaagtgaacatgatgagcctgaccgtgctgggcctgcggatgctgttcgccaaaaccgtggccgtgaacttcctgctgaccgccaagctgttcttcctcctcaccgcccgcgccaagagaagcggatctggcgtgaagcagaccctgaatttcgacctgctgaagctggctggcgacgtggaatccaacccaggccctactagtatggactggatttggcgcatccttttccttgtcggcgctgctaccggcgcgcattccgggccccagctccagctgcaagagtctggacctggcctggtcaagcctagcgagacactgagcctgacctgtaccgtgtccggcgatagcatcagcagcggcgattactactggggctggatcagacagcctcctggcaaaggactggaatggatcggccacatctactacagcggcgtgacctactacaaccccagcctgaagtccagagtgaccatcagcgtggacaccagccggaaccagttctccctgaagctgtctagcgtgacagccgccgataccgccgtgtactactgcaccagagaggacagcagcaactggcggagtagaggccagggaacactggtcacagttagctctggatccggcggaggcggaagtggaggcggaggatctggcggcggaggctctttcgaagtccaacttgtggagtctggagggggcctggtgcagcccggcggctctctcagactgtcttgtgcggcaagcggctacaccttcacctcttactggatagaatgggtgaggcaggcacctggaaagggactggagtggattggagagattctgccaggagggggagatacaaattacaatgaaatcttcaaggggcgggccaccttttcagcggataccagcaagaatacagcttacctgcagatgaatagcctccgggcagaagataccgctgtttattattgcacgagacgggtgccaataagactggactattgggggcaagggactcttgtcaccgtcagttcaacgcgtgaggacctgaagaacgtgttcccacctgaggtggccgtgttcgagcctagcgaggccgagatcagccacacccagaaagccaccctcgtgtgcctggctaccggcttctaccccgaccatgtggaactgtcttggtgggtcaacggcaaagaggtgcacagcggcgtgtgtaccgacccccagccactgaaagaacagcccgccctgaacgacagccggtactgcctgagcagcagactgagagtgtccgccaccttctggcagaacccccggaaccacttcagatgccaggtgcagttctacggcctgagcgagaacgacgagtggacccaggacagagccaagcccgtgacccagatcgtgtctgccgaagcctggggcagagccgatgatgtgattaagatccactggcaggaaaagaagtccaacaccatcctgggcagccaggaaggcaacaccatgaagaccaacgacacctacatgaagttcagctggctgaccgtgcccgagaagtccctggacaaagaacacagatgcatcgtgcggcacgaaaacaacaagaacggcgtggaccaggaaatcatcttcccacccatcaagaccgatgtgattacaatggaccccaaggacaactgctccaaggacgccaacgataccctgctgctccagctgaccaacaccagcgcctactacatgtacttgttgctgctgctgaagtccgtggtgtacttcgccatcatcacatgctgcctgctgatggctatggtcaagcggaaggacagccgggga

SEQ ID NO: 6119 - DNA, 2166 bp, synthetic construct
  source 1..2166: mol_type = other DNA
atggccttaccagtgaccgccttgctcctgccgctggccttgctgctccacgccgccaggccggacatcgtgatgacacagagccctgatagcctggccgtgtctctgggagagagagccaccattaactgcaaggccagccagagcgtggactacgacggcgacagcttcctgaactggtatcagcagaagcccggccagcctcctaagctgctgatctacgccgccagcaatctggaaagcggcgtgccaagcagattttccggctctggcagcggcaccgatttcaccctgacaatatccagcctccagcctgaggacgtggccgtgtactactgccagcagagcaacgacgaccctctgacctttggacagggcaccaaggtggaaatcaaactcgaggacctgaagaacgtgttcccacctgaggtggccgtgttcgagcctagcgaggccgagatcagccacacccagaaagccaccctcgtgtgcctggctaccggcttctaccccgaccatgtggaactgtcttggtgggtcaacggcaaagaggtgcacagcggcgtgtgtaccgacccccagccactgaaagaacagcccgccctgaacgacagccggtactgcctgagcagcagactgagagtgtccgccaccttctggcagaacccccggaaccacttcagatgccaggtgcagttctacggcctgagcgagaacgacgagtggacccaggacagagccaagcccgtgacccagatcgtgtctgccgaagcctggggcagagccgatgatgtgattaagatccactggcaggaaaagaagtccaacaccatcctgggcagccaggaaggcaacaccatgaagaccaacgacacctacatgaagttcagctggctgaccgtgcccgagaagtccctggacaaagaacacagatgcatcgtgcggcacgaaaacaacaagaacggcgtggaccaggaaatcatcttcccacccatcaagaccgatgtgattacaatggaccccaaggacaactgctccaaggacgccaacgataccctgctgctccagctgaccaacaccagcgcctactacatgtacttgttgctgctgctgaagtccgtggtgtacttcgccatcatcacatgctgcctgctgcggagaaccgccttctgctgcaacggcgagaagtctagggccaagcgatctggatctggagcaacaaacttctcactactcaaacaagcaggtgacgtggaggagaatcccgggcctactagtatggactggatttggcgcatccttttccttgtcggcgctgctaccggcgcgcattccttcgaagtccaacttgtggagtctggagggggcctggtgcagcccggcggctctctcagactgtcttgtgcggcaagcggctacaccttcacctcttactggatagaatgggtgaggcaggcacctggaaagggactggagtggattggagagattctgccaggagggggagatacaaattacaatgaaatcttcaaggggcgggccaccttttcagcggataccagcaagaatacagcttacctgcagatgaatagcctccgggcagaagataccgctgtttattattgcacgagacgggtgccaataagactggactattgggggcaagggactcttgtcaccgtcagttcaacgcgtatccagaaccctgatcctgccgtgtaccagctgcgggatagcaagagcagcgacaagagcgtgtgtctgttcaccgacttcgacagccagaccaacgtgtcccagagcaaggactccgacgtgtacatcaccgataagtgcgtgctggacatgcggagcatggacttcaagagcaactccgccgtggcctggtccaacaagtccgatttcgcctgcgccaacgccttcaacaacagcattatccccgaggacacattcttcccaagccccgagagcagcgactccaccgaccacgtgaagcccaaagagacagagaacaccaagcagcccagcaagagctgccacaagcccaaggccatcgtgcacaccgagaaagtgaacatgatgagcctgaccgtgctgggcctgcggatgctgttcgccaaaaccgtggccgtgaacttcctgctgaccgccaagctgttcttcctc

SEQ ID NO: 6120 - DNA, 2178 bp, synthetic construct
  source 1..2178: mol_type = other DNA
atggccttaccagtgaccgccttgctcctgccgctggccttgctgctccacgccgccaggccggacatcgtgatgacacagagccctgatagcctggccgtgtctctgggagagagagccaccattaactgcaaggccagccagagcgtggactacgacggcgacagcttcctgaactggtatcagcagaagcccggccagcctcctaagctgctgatctacgccgccagcaatctggaaagcggcgtgccaagcagattttccggctctggcagcggcaccgatttcaccctgacaatatccagcctccagcctgaggacgtggccgtgtactactgccagcagagcaacgacgaccctctgacctttggacagggcaccaaggtggaaatcaaactcgagatccagaaccctgatcctgccgtgtaccagctgcgggatagcaagagcagcgacaagagcgtgtgtctgttcaccgacttcgacagccagaccaacgtgtcccagagcaaggactccgacgtgtacatcaccgataagtgcgtgctggacatgcggagcatggacttcaagagcaactccgccgtggcctggtccaacaagtccgatttcgcctgcgccaacgccttcaacaacagcattatccccgaggacacattcttcccaagccccgagagcagcgactccaccgaccacgtgaagcccaaagagacagagaacaccaagcagcccagcaagagctgccacaagcccaaggccatcgtgcacaccgagaaagtgaacatgatgagcctgaccgtgctgggcctgcggatgctgttcgccaaaaccgtggccgtgaacttcctgctgaccgccaagctgttcttcctccgcgccaagagaagcggatctggcgtgaagcagaccctgaatttcgacctgctgaagctggctggcgacgtggaatccaacccaggccctactagtatggactggatttggcgcatccttttccttgtcggcgctgctaccggcgcgcattccttcgaagtccaacttgtggagtctggagggggcctggtgcagcccggcggctctctcagactgtcttgtgcggcaagcggctacaccttcacctcttactggatagaatgggtgaggcaggcacctggaaagggactggagtggattggagagattctgccaggagggggagatacaaattacaatgaaatcttcaaggggcgggccaccttttcagcggataccagcaagaatacagcttacctgcagatgaatagcctccgggcagaagataccgctgtttattattgcacgagacgggtgccaataagactggactattgggggcaagggactcttgtcaccgtcagttcaacgcgtgaggacctgaagaacgtgttcccacctgaggtggccgtgttcgagcctagcgaggccgagatcagccacacccagaaagccaccctcgtgtgcctggctaccggcttctaccccgaccatgtggaactgtcttggtgggtcaacggcaaagaggtgcacagcggcgtgtgtaccgacccccagccactgaaagaacagcccgccctgaacgacagccggtactgcctgagcagcagactgagagtgtccgccaccttctggcagaacccccggaaccacttcagatgccaggtgcagttctacggcctgagcgagaacgacgagtggacccaggacagagccaagcccgtgacccagatcgtgtctgccgaagcctggggcagagccgatgatgtgattaagatccactggcaggaaaagaagtccaacaccatcctgggcagccaggaaggcaacaccatgaagaccaacgacacctacatgaagttcagctggctgaccgtgcccgagaagtccctggacaaagaacacagatgcatcgtgcggcacgaaaacaacaagaacggcgtggaccaggaaatcatcttcccacccatcaagaccgatgtgattacaatggaccccaaggacaactgctccaaggacgccaacgataccctgctgctccagctgaccaacaccagcgcctactacatgtacttgttgctgctgctgaagtccgtggtgtacttcgccatcatcacatgctgcctgctgcggagaaccgccttctgctgcaacggcgagaagtct

SEQ ID NO: 6121 - DNA, 2571 bp, synthetic construct
  source 1..2571: mol_type = other DNA
atggccttaccagtgaccgccttgctcctgccgctggccttgctgctccacgccgccaggccggaagtgcagctggttgaatctggcggaggactggttcagcctggcggatctctgagactgtcttgtgccgccagcggcttcagcttcagcgacttttggatgagctgggtccgacaggcccctggcaaaggacttgaatgggtcgccacaatcagccaggccggcagcgagaaggactacgtggactctgtgaagggcagattcaccatcagccgggacaacgccaagaagtccctgtacctccagatgaacagcctgagagccgaggacaccgccgtgtactattgtgcctctggcgtgtacagcttcgactacagaggccagggcaccctggtcacagtctcttctggtaccggcggaggcggatctggcggcggaggtagcggtggcggaggatctgaattcgacatcgtgatgacacagagccctgatagcctggccgtgtctctgggagagagagccaccattaactgcaaggccagccagagcgtggactacgacggcgacagcttcctgaactggtatcagcagaagcccggccagcctcctaagctgctgatctacgccgccagcaatctggaaagcggcgtgccaagcagattttccggctctggcagcggcaccgatttcaccctgacaatatccagcctccagcctgaggacgtggccgtgtactactgccagcagagcaacgacgaccctctgacctttggacagggcaccaaggtggaaatcaaactcgaggacctgaagaacgtgttcccacctgaggtggccgtgttcgagcctagcgaggccgagatcagccacacccagaaagccaccctcgtgtgcctggctaccggcttctaccccgaccatgtggaactgtcttggtgggtcaacggcaaagaggtgcacagcggcgtgtgtaccgacccccagccactgaaagaacagcccgccctgaacgacagccggtactgcctgagcagcagactgagagtgtccgccaccttctggcagaacccccggaaccacttcagatgccaggtgcagttctacggcctgagcgagaacgacgagtggacccaggacagagccaagcccgtgacccagatcgtgtctgccgaagcctggggcagagccgatgatgtgattaagatccactggcaggaaaagaagtccaacaccatcctgggcagccaggaaggcaacaccatgaagaccaacgacacctacatgaagttcagctggctgaccgtgcccgagaagtccctggacaaagaacacagatgcatcgtgcggcacgaaaacaacaagaacggcgtggaccaggaaatcatcttcccacccatcaagaccgatgtgattacaatggaccccaaggacaactgctccaaggacgccaacgataccctgctgctccagctgaccaacaccagcgcctactacatgtacttgttgctgctgctgaagtccgtggtgtacttcgccatcatcacatgctgcctgctgcggagaaccgccttctgctgcaacggcgagaagtctagggccaagcgatctggatctggagcaacaaacttctcactactcaaacaagcaggtgacgtggaggagaatcccgggcctactagtatggactggatttggcgcatccttttccttgtcggcgctgctaccggcgcgcattccttcgaagtccaacttgtggagtctggagggggcctggtgcagcccggcggctctctcagactgtcttgtgcggcaagcggctacaccttcacctcttactggatagaatgggtgaggcaggcacctggaaagggactggagtggattggagagattctgccaggagggggagatacaaattacaatgaaatcttcaaggggcgggccaccttttcagcggataccagcaagaatacagcttacctgcagatgaatagcctccgggcagaagataccgctgtttattattgcacgagacgggtgccaataagactggactattgggggcaagggactcttgtcaccgtcagttcaacgcgtatccagaaccctgatcctgccgtgtaccagctgcgggatagcaagagcagcgacaagagcgtgtgtctgttcaccgacttcgacagccagaccaacgtgtcccagagcaaggactccgacgtgtacatcaccgataagtgcgtgctggacatgcggagcatggacttcaagagcaactccgccgtggcctggtccaacaagtccgatttcgcctgcgccaacgccttcaacaacagcattatccccgaggacacattcttcccaagccccgagagcagcgactccaccgaccacgtgaagcccaaagagacagagaacaccaagcagcccagcaagagctgccacaagcccaaggccatcgtgcacaccgagaaagtgaacatgatgagcctgaccgtgctgggcctgcggatgctgttcgccaaaaccgtggccgtgaacttcctgctgaccgccaagctgttcttcctc

SEQ ID NO: 6122 - DNA, 2982 bp, synthetic construct
  source 1..2982: mol_type = other DNA
atggccttaccagtgaccgccttgctcctgccgctggccttgctgctccacgccgccaggccggaagtgcagctggttgaatctggcggaggactggttcagcctggcggatctctgagactgtcttgtgccgccagcggcttcagcttcagcgacttttggatgagctgggtccgacaggcccctggcaaaggacttgaatgggtcgccacaatcagccaggccggcagcgagaaggactacgtggactctgtgaagggcagattcaccatcagccgggacaacgccaagaagtccctgtacctccagatgaacagcctgagagccgaggacaccgccgtgtactattgtgcctctggcgtgtacagcttcgactacagaggccagggcaccctggtcacagtctcttctggtaccggcggaggcggatctggcggcggaggtagcggtggcggaggatctgaattcgacatcgtgatgacacagagccctgatagcctggccgtgtctctgggagagagagccaccattaactgcaaggccagccagagcgtggactacgacggcgacagcttcctgaactggtatcagcagaagcccggccagcctcctaagctgctgatctacgccgccagcaatctggaaagcggcgtgccaagcagattttccggctctggcagcggcaccgatttcaccctgacaatatccagcctccagcctgaggacgtggccgtgtactactgccagcagagcaacgacgaccctctgacctttggacagggcaccaaggtggaaatcaaactcgaggacctgaagaacgtgttcccacctgaggtggccgtgttcgagcctagcgaggccgagatcagccacacccagaaagccaccctcgtgtgcctggctaccggcttctaccccgaccatgtggaactgtcttggtgggtcaacggcaaagaggtgcacagcggcgtgtgtaccgacccccagccactgaaagaacagcccgccctgaacgacagccggtactgcctgagcagcagactgagagtgtccgccaccttctggcagaacccccggaaccacttcagatgccaggtgcagttctacggcctgagcgagaacgacgagtggacccaggacagagccaagcccgtgacccagatcgtgtctgccgaagcctggggcagagccgatgatgtgattaagatccactggcaggaaaagaagtccaacaccatcctgggcagccaggaaggcaacaccatgaagaccaacgacacctacatgaagttcagctggctgaccgtgcccgagaagtccctggacaaagaacacagatgcatcgtgcggcacgaaaacaacaagaacggcgtggaccaggaaatcatcttcccacccatcaagaccgatgtgattacaatggaccccaaggacaactgctccaaggacgccaacgataccctgctgctccagctgaccaacaccagcgcctactacatgtacttgttgctgctgctgaagtccgtggtgtacttcgccatcatcacatgctgcctgctgcggagaaccgccttctgctgcaacggcgagaagtctagggccaagcgatctggatctggagcaacaaacttctcactactcaaacaagcaggtgacgtggaggagaatcccgggcctactagtatggactggatttggcgcatccttttccttgtcggcgctgctaccggcgcgcattccgggccccagctccagctgcaagagtctggacctggcctggtcaagcctagcgagacactgagcctgacctgtaccgtgtccggcgatagcatcagcagcggcgattactactggggctggatcagacagcctcctggcaaaggactggaatggatcggccacatctactacagcggcgtgacctactacaaccccagcctgaagtccagagtgaccatcagcgtggacaccagccggaaccagttctccctgaagctgtctagcgtgacagccgccgataccgccgtgtactactgcaccagagaggacagcagcaactggcggagtagaggccagggaacactggtcacagttagctctggatccggcggaggcggaagtggaggcggaggatctggcggcggaggctctttcgaagtccaacttgtggagtctggagggggcctggtgcagcccggcggctctctcagactgtcttgtgcggcaagcggctacaccttcacctcttactggatagaatgggtgaggcaggcacctggaaagggactggagtggattggagagattctgccaggagggggagatacaaattacaatgaaatcttcaaggggcgggccaccttttcagcggataccagcaagaatacagcttacctgcagatgaatagcctccgggcagaagataccgctgtttattattgcacgagacgggtgccaataagactggactattgggggcaagggactcttgtcaccgtcagttcaacgcgtatccagaaccctgatcctgccgtgtaccagctgcgggatagcaagagcagcgacaagagcgtgtgtctgttcaccgacttcgacagccagaccaacgtgtcccagagcaaggactccgacgtgtacatcaccgataagtgcgtgctggacatgcggagcatggacttcaagagcaactccgccgtggcctggtccaacaagtccgatttcgcctgcgccaacgccttcaacaacagcattatccccgaggacacattcttcccaagccccgagagcagcgactccaccgaccacgtgaagcccaaagagacagagaacaccaagcagcccagcaagagctgccacaagcccaaggccatcgtgcacaccgagaaagtgaacatgatgagcctgaccgtgctgggcctgcggatgctgttcgccaaaaccgtggccgtgaacttcctgctgaccgccaagctgttcttcctc

SEQ ID NO: 6123 - DNA, 1860 bp, synthetic construct
  source 1..1860: mol_type = other DNA
atggccttaccagtgaccgccttgctcctgccgctggccttgctgctccacgccgccaggccggacatcgtgatgacacagagccctgatagcctggccgtgtctctgggagagagagccaccattaactgcaaggccagccagagcgtggactacgacggcgacagcttcctgaactggtatcagcagaagcccggccagcctcctaagctgctgatctacgccgccagcaatctggaaagcggcgtgccaagcagattttccggctctggcagcggcaccgatttcaccctgacaatatccagcctccagcctgaggacgtggccgtgtactactgccagcagagcaacgacgaccctctgacctttggacagggcaccaaggtggaaatcaaactcgaggacctgaagaacgtgttcccacctgaggtggccgtgttcgagcctagcgaggccgagatcagccacacccagaaagccaccctcgtgtgcctggctaccggcttctaccccgaccatgtggaactgtcttggtgggtcaacggcaaagaggtgcacagcggcgtgtctaccgacccccagccactgaaagaacagcccgccctgaacgacagccggtactgcctgagcagcagactgagagtgtccgccaccttctggcagaacccccggaaccacttcagatgccaggtgcagttctacggcctgagcgagaacgacgagtggacccaggacagagccaagcccgtgacccagatcgtgtctgccgaagcctggggcagagccgattgcgacgtgaagctggtggaaaagagcttcgagacagacaccaacctgaacttccagaacctgagcgtgatcggcttcagaatcctgctgctgaaagtggccggctttaacctgctgatgaccctgcggctgtggtccagcagggccaagcgatctggatctggagcaacaaacttctcactactcaaacaagcaggtgacgtggaggagaatcccgggcctactagtatggactggatttggcgcatccttttccttgtcggcgctgctaccggcgcgcattccttcgaagtccaacttgtggagtctggagggggcctggtgcagcccggcggctctctcagactgtcttgtgcggcaagcggctacaccttcacctcttactggatagaatgggtgaggcaggcacctggaaagggactggagtggattggagagattctgccaggagggggagatacaaattacaatgaaatcttcaaggggcgggccaccttttcagcggataccagcaagaatacagcttacctgcagatgaatagcctccgggcagaagataccgctgtttattattgcacgagacgggtgccaataagactggactattgggggcaagggactcttgtcaccgtcagttcaacgcgtatccagaaccctgatcctgccgtgtaccagctgcgggatagcaagagcagcgacaagagcgtgtgtctgttcaccgacttcgacagccagaccaacgtgtcccagagcaaggactccgacgtgtacatcaccgataagaccgtgctggacatgcggagcatggacttcaagagcaactccgccgtggcctggtccaacaagtccgatttcgcctgcgccaacgccttcaacaacagcattatccccgaggacacattcttcccaagccccgagagcagctgcggctttaccagcgagagctaccagcagggcgtgctgagcgccaccatcctgtacgagatcctgctgggcaaggccaccctgtacgccgtgctggtgtctgccctggtgctgatggctatggtcaagcggaaggacagccgggga

SEQ ID NO: 6124 - DNA, 1860 bp, synthetic construct
  source 1..1860: mol_type = other DNA
atggccttaccagtgaccgccttgctcctgccgctggccttgctgctccacgccgccaggccggacatcgtgatgacacagagccctgatagcctggccgtgtctctgggagagagagccaccattaactgcaaggccagccagagcgtggactacgacggcgacagcttcctgaactggtatcagcagaagcccggccagcctcctaagctgctgatctacgccgccagcaatctggaaagcggcgtgccaagcagattttccggctctggcagcggcaccgatttcaccctgacaatatccagcctccagcctgaggacgtggccgtgtactactgccagcagagcaacgacgaccctctgacctttggacagggcaccaaggtggaaatcaaactcgaggacctgaagaacgtgttcccacctgaggtggccgtgttcgagcctagcgaggccgagatcagccacacccagaaagccaccctcgtgtgcctggctaccggcttctaccccgaccatgtggaactgtcttggtgggtcaacggcaaagaggtgcacagcggcgtgtctaccgacccccagccactgaaagaacagcccgccctgaacgacagccggtactgcctgagcagcagactgagagtgtccgccaccttctggcagaacccccggaaccacttcagatgccaggtgcagttctacggcctgagcgagaacgacgagtggacccaggacagagccaagcccgtgacccagatcgtgtctgccgaagcctggggcagagccgattgcggctttaccagcgagagctaccagcagggcgtgctgagcgccaccaacctgagcgtgatcggcttcagaatcctgctgctgaaagtggccggctttaacctgctgatgaccctgcggctgtggtccagcagggccaagcgatctggatctggagcaacaaacttctcactactcaaacaagcaggtgacgtggaggagaatcccgggcctactagtatggactggatttggcgcatccttttccttgtcggcgctgctaccggcgcgcattccttcgaagtccaacttgtggagtctggagggggcctggtgcagcccggcggctctctcagactgtcttgtgcggcaagcggctacaccttcacctcttactggatagaatgggtgaggcaggcacctggaaagggactggagtggattggagagattctgccaggagggggagatacaaattacaatgaaatcttcaaggggcgggccaccttttcagcggataccagcaagaatacagcttacctgcagatgaatagcctccgggcagaagataccgctgtttattattgcacgagacgggtgccaataagactggactattgggggcaagggactcttgtcaccgtcagttcaacgcgtatccagaaccctgatcctgccgtgtaccagctgcgggatagcaagagcagcgacaagagcgtgtgtctgttcaccgacttcgacagccagaccaacgtgtcccagagcaaggactccgacgtgtacatcaccgataagaccgtgctggacatgcggagcatggacttcaagagcaactccgccgtggcctggtccaacaagtccgatttcgcctgcgccaacgccttcaacaacagcattatccccgaggacacattcttcccaagccccgagagcagctgcgacgtgaagctggtggaaaagagcttcgagacagacaccaacctgaacttccagatcctgtacgagatcctgctgggcaaggccaccctgtacgccgtgctggtgtctgccctggtgctgatggctatggtcaagcggaaggacagccgggga

SEQ ID NO: 6125 - DNA, 2172 bp, synthetic construct
  source 1..2172: mol_type = other DNA
atggccttaccagtgaccgccttgctcctgccgctggccttgctgctccacgccgccaggccggacatcgtgatgacacagagccctgatagcctggccgtgtctctgggagagagagccaccattaactgcaaggccagccagagcgtggactacgacggcgacagcttcctgaactggtatcagcagaagcccggccagcctcctaagctgctgatctacgccgccagcaatctggaaagcggcgtgccaagcagattttccggctctggcagcggcaccgatttcaccctgacaatatccagcctccagcctgaggacgtggccgtgtactactgccagcagagcaacgacgaccctctgacctttggacagggcaccaaggtggaaatcaaactcgaggacctgaagaacgtgttcccacctgaggtggccgtgttcgagcctagcgaggccgagatcagccacacccagaaagccaccctcgtgtgcctggctaccggcttctaccccgaccatgtggaactgtcttggtgggtcaacggcaaagaggtgcacagcggcgtgtctaccgacccccagccactgaaagaacagcccgccctgaacgacagccggtactgcctgagcagcagactgagagtgtccgccaccttctggcagaacccccggaaccacttcagatgccaggtgcagttctacggcctgagcgagaacgacgagtggacccaggacagagccaagcccgtgacccagatcgtgtctgccgaagcctggggcagagccgatgatgtgattaagatccactggcaggaaaagaagtccaacaccatcctgggcagccaggaaggcaacaccatgaagaccaacgacacctacatgaagttcagctggctgaccgtgcccgagaagtccctggacaaagaacacagatgcatcgtgcggcacgaaaacaacaagaacggcgtggaccaggaaatcatcttcccacccatcaagaccgatgtgattacaatggaccccaaggacaactgctccaaggacgccaacgataccctgctgctccagctgaccaacaccagcgcctactacatgtacttgttgctgctgctgaagtccgtggtgtacttcgccatcatcacatgctgcctgctgatggctatggtcaagcggaaggacagccggggaagggccaagcgatctggatctggagcaacaaacttctcactactcaaacaagcaggtgacgtggaggagaatcccgggcctactagtatggactggatttggcgcatccttttccttgtcggcgctgctaccggcgcgcattccttcgaagtccaacttgtggagtctggagggggcctggtgcagcccggcggctctctcagactgtcttgtgcggcaagcggctacaccttcacctcttactggatagaatgggtgaggcaggcacctggaaagggactggagtggattggagagattctgccaggagggggagatacaaattacaatgaaatcttcaaggggcgggccaccttttcagcggataccagcaagaatacagcttacctgcagatgaatagcctccgggcagaagataccgctgtttattattgcacgagacgggtgccaataagactggactattgggggcaagggactcttgtcaccgtcagttcaacgcgtatccagaaccctgatcctgccgtgtaccagctgcgggatagcaagagcagcgacaagagcgtgtgtctgttcaccgacttcgacagccagaccaacgtgtcccagagcaaggactccgacgtgtacatcaccgataagaccgtgctggacatgcggagcatggacttcaagagcaactccgccgtggcctggtccaacaagtccgatttcgcctgcgccaacgccttcaacaacagcattatccccgaggacacattcttcccaagccccgagagcagcgactccaccgaccacgtgaagcccaaagagacagagaacaccaagcagcccagcaagagctgccacaagcccaaggccatcgtgcacaccgagaaagtgaacatgatgagcctgaccgtgctgggcctgcggatgctgttcgccaaaaccgtggccgtgaacttcctgctgaccgccaagctgttcttcctcctcaccgcc

SEQ ID NO: 6126 - DNA, 2166 bp, synthetic construct
  source 1..2166: mol_type = other DNA
atggccttaccagtgaccgccttgctcctgccgctggccttgctgctccacgccgccaggccggacatcgtgatgacacagagccctgatagcctggccgtgtctctgggagagagagccaccattaactgcaaggccagccagagcgtggactacgacggcgacagcttcctgaactggtatcagcagaagcccggccagcctcctaagctgctgatctacgccgccagcaatctggaaagcggcgtgccaagcagattttccggctctggcagcggcaccgatttcaccctgacaatatccagcctccagcctgaggacgtggccgtgtactactgccagcagagcaacgacgaccctctgacctttggacagggcaccaaggtggaaatcaaactcgaggacctgaagaacgtgttcccacctgaggtggccgtgttcgagcctagcgaggccgagatcagccacacccagaaagccaccctcgtgtgcctggctaccggcttctaccccgaccatgtggaactgtcttggtgggtcaacggcaaagaggtgcacagcggcgtgtctaccgacccccagccactgaaagaacagcccgccctgaacgacagccggtactgcctgagcagcagactgagagtgtccgccaccttctggcagaacccccggaaccacttcagatgccaggtgcagttctacggcctgagcgagaacgacgagtggacccaggacagagccaagcccgtgacccagatcgtgtctgccgaagcctggggcagagccgatgatgtgattaagatccactggcaggaaaagaagtccaacaccatcctgggcagccaggaaggcaacaccatgaagaccaacgacacctacatgaagttcagctggctgaccgtgcccgagaagtccctggacaaagaacacagatgcatcgtgcggcacgaaaacaacaagaacggcgtggaccaggaaatcatcttcccacccatcaagaccgatgtgattacaatggaccccaaggacaactgctccaaggacgccaacgataccctgctgctccagctgaccaacaccagcgcctactacatgtacttgttgctgctgctgaagtccgtggtgtacttcgccatcatcacatgctgcctgctgcggagaaccgccttctgctgcaacggcgagaagtctagggccaagcgatctggatctggagcaacaaacttctcactactcaaacaagcaggtgacgtggaggagaatcccgggcctactagtatggactggatttggcgcatccttttccttgtcggcgctgctaccggcgcgcattccttcgaagtccaacttgtggagtctggagggggcctggtgcagcccggcggctctctcagactgtcttgtgcggcaagcggctacaccttcacctcttactggatagaatgggtgaggcaggcacctggaaagggactggagtggattggagagattctgccaggagggggagatacaaattacaatgaaatcttcaaggggcgggccaccttttcagcggataccagcaagaatacagcttacctgcagatgaatagcctccgggcagaagataccgctgtttattattgcacgagacgggtgccaataagactggactattgggggcaagggactcttgtcaccgtcagttcaacgcgtatccagaaccctgatcctgccgtgtaccagctgcgggatagcaagagcagcgacaagagcgtgtgtctgttcaccgacttcgacagccagaccaacgtgtcccagagcaaggactccgacgtgtacatcaccgataagaccgtgctggacatgcggagcatggacttcaagagcaactccgccgtggcctggtccaacaagtccgatttcgcctgcgccaacgccttcaacaacagcattatccccgaggacacattcttcccaagccccgagagcagcgactccaccgaccacgtgaagcccaaagagacagagaacaccaagcagcccagcaagagctgccacaagcccaaggccatcgtgcacaccgagaaagtgaacatgatgagcctgaccgtgctgggcctgcggatgctgttcgccaaaaccgtggccgtgaacttcctgctgaccgccaagctgttcttcctc

SEQ ID NO: 6127 - DNA, 2601 bp, synthetic construct
  source 1..2601: mol_type = other DNA
atggccttaccagtgaccgccttgctcctgccgctggccttgctgctccacgccgccaggccgctcgaggaggacctgaagaacgtgttcccacctgaggtggccgtgttcgagcctagcgaggccgagatcagccacacccagaaagccaccctcgtgtgcctggctaccggcttctaccccgaccatgtggaactgtcttggtgggtcaacggcaaagaggtgcacagcggcgtgtgtaccgacccccagccactgaaagaacagcccgccctgaacgacagccggtactgcctgagcagcagactgagagtgtccgccaccttctggcagaacccccggaaccacttcagatgccaggtgcagttctacggcctgagcgagaacgacgagtggacccaggacagagccaagcccgtgacccagatcgtgtctgccgaagcctggggcagagccgattgcggctttaccagcgagagctaccagcagggcgtgctgagcgccaccaacctgagcgtgatcggcttcagaatcctgctgctgaaagtggccggctttaacctgctgatgaccctgcggctgtggtccagcagggccaagcgatctggatctggagcaacaaacttctcactactcaaacaagcaggtgacgtggaggagaatcccgggcctactagcatggccttaccagtgaccgccttgctcctgccgctggccttgctgctccacgccgccaggccggacatcgtgatgacacagagccctgatagcctggccgtgtctctgggagagagagccaccattaactgcaaggccagccagagcgtggactacgacggcgacagcttcctgaactggtatcagcagaagcccggccagcctcctaagctgctgatctacgccgccagcaatctggaaagcggcgtgccaagcagattttccggctctggcagcggcaccgatttcaccctgacaatatccagcctccagcctgaggacgtggccgtgtactactgccagcagagcaacgacgaccctctgacctttggacagggcaccaaggtggaaatcaaaggcggaggcggaagtggaggcggaggatctggcggcggaggctctgaagtccaacttgtggagtctggagggggcctggtgcagcccggcggctctctcagactgtcttgtgcggcaagcggctacaccttcacctcttactggatagaatgggtgaggcaggcacctggaaagggactggagtggattggagagattctgccaggagggggagatacaaattacaatgaaatcttcaaggggcgggccaccttttcagcggataccagcaagaatacagcttacctgcagatgaatagcctccgggcagaagataccgctgtttattattgcacgagacgggtgccaataagactggactattgggggcaagggactcttgtcaccgtcagttcaacgcgtatccagaaccctgatcctgccgtgtaccagctgcgggatagcaagagcagcgacaagagcgtgtgtctgttcaccgacttcgacagccagaccaacgtgtcccagagcaaggactccgacgtgtacatcaccgataagtgcgtgctggacatgcggagcatggacttcaagagcaactccgccgtggcctggtccaacaagtccgatttcgcctgcgccaacgccttcaacaacagcattatccccgaggacacattcttcccaagccccgagagcagctgcgacgtgaagctggtggaaaagagcttcgagacagacaccaacctgaacttccagatcctgtacgaggtgatcggcttcagaatcctgctgctgaaagtggccggctttaacctgctgatgaccctgcggctgtggtccagccgcgccaagagaagcggatctggcgtgaagcagaccctgaatttcgacctgctgaagctggctggcgacgtggaatccaacccaggcccttctagaggccatatgaccgagtacaagcccacggtgcgcctcgccacccgcgacgacgtccccagggccgtacgcaccctcgccgccgcgttcgccgactaccccgccacgcgccacaccgtcgatccggaccgccacatcgagcgggtcaccgagctgcaagaactcttcctcacgcgcgtcgggctcgacatcggcaaggtgtgggtcgcggacgacggcgccgcggtggcggtctggaccacgccggagagcgtcgaagcgggggcggtgttcgccgagatcggcccgcgcatggccgagttgagcggttcccggctggccgcgcagcaacagatggaaggcctcctggcgccgcaccggcccaaggagcccgcgtggttcctggccaccgtcggcgtctcgcccgaccaccagggcaagggtctgggcagcgccgtcgtgctccccggagtggaggcggccgagcgcgccggggtgcccgccttcctggagacctccgcgccccgcaacctccccttctacgagcggctcggcttcaccgtcaccgccgacgtcgaggtgcccgaaggaccgcgcacctggtgcatgacccgcaagcccggtgcctga

SEQ ID NO: 6128 - DNA, 2601 bp, synthetic construct
  source 1..2601: mol_type = other DNA
atggccttaccagtgaccgccttgctcctgccgctggccttgctgctccacgccgccaggccgctcgagatccagaaccctgatcctgccgtgtaccagctgcgggatagcaagagcagcgacaagagcgtgtgtctgttcaccgacttcgacagccagaccaacgtgtcccagagcaaggactccgacgtgtacatcaccgataagtgcgtgctggacatgcggagcatggacttcaagagcaactccgccgtggcctggtccaacaagtccgatttcgcctgcgccaacgccttcaacaacagcattatccccgaggacacattcttcccaagccccgagagcagctgcgacgtgaagctggtggaaaagagcttcgagacagacaccaacctgaacttccagatcctgtacgaggtgatcggcttcagaatcctgctgctgaaagtggccggctttaacctgctgatgaccctgcggctgtggtccagcagggccaagcgatctggatctggagcaacaaacttctcactactcaaacaagcaggtgacgtggaggagaatcccgggcctactagcatggccttaccagtgaccgccttgctcctgccgctggccttgctgctccacgccgccaggccggacatcgtgatgacacagagccctgatagcctggccgtgtctctgggagagagagccaccattaactgcaaggccagccagagcgtggactacgacggcgacagcttcctgaactggtatcagcagaagcccggccagcctcctaagctgctgatctacgccgccagcaatctggaaagcggcgtgccaagcagattttccggctctggcagcggcaccgatttcaccctgacaatatccagcctccagcctgaggacgtggccgtgtactactgccagcagagcaacgacgaccctctgacctttggacagggcaccaaggtggaaatcaaaggcggaggcggaagtggaggcggaggatctggcggcggaggctctgaagtccaacttgtggagtctggagggggcctggtgcagcccggcggctctctcagactgtcttgtgcggcaagcggctacaccttcacctcttactggatagaatgggtgaggcaggcacctggaaagggactggagtggattggagagattctgccaggagggggagatacaaattacaatgaaatcttcaaggggcgggccaccttttcagcggataccagcaagaatacagcttacctgcagatgaatagcctccgggcagaagataccgctgtttattattgcacgagacgggtgccaataagactggactattgggggcaagggactcttgtcaccgtcagttcaacgcgtgaggacctgaagaacgtgttcccacctgaggtggccgtgttcgagcctagcgaggccgagatcagccacacccagaaagccaccctcgtgtgcctggctaccggcttctaccccgaccatgtggaactgtcttggtgggtcaacggcaaagaggtgcacagcggcgtgtgtaccgacccccagccactgaaagaacagcccgccctgaacgacagccggtactgcctgagcagcagactgagagtgtccgccaccttctggcagaacccccggaaccacttcagatgccaggtgcagttctacggcctgagcgagaacgacgagtggacccaggacagagccaagcccgtgacccagatcgtgtctgccgaagcctggggcagagccgattgcggctttaccagcgagagctaccagcagggcgtgctgagcgccaccaacctgagcgtgatcggcttcagaatcctgctgctgaaagtggccggctttaacctgctgatgaccctgcggctgtggtccagccgcgccaagagaagcggatctggcgtgaagcagaccctgaatttcgacctgctgaagctggctggcgacgtggaatccaacccaggcccttctagaggccatatgaccgagtacaagcccacggtgcgcctcgccacccgcgacgacgtccccagggccgtacgcaccctcgccgccgcgttcgccgactaccccgccacgcgccacaccgtcgatccggaccgccacatcgagcgggtcaccgagctgcaagaactcttcctcacgcgcgtcgggctcgacatcggcaaggtgtgggtcgcggacgacggcgccgcggtggcggtctggaccacgccggagagcgtcgaagcgggggcggtgttcgccgagatcggcccgcgcatggccgagttgagcggttcccggctggccgcgcagcaacagatggaaggcctcctggcgccgcaccggcccaaggagcccgcgtggttcctggccaccgtcggcgtctcgcccgaccaccagggcaagggtctgggcagcgccgtcgtgctccccggagtggaggcggccgagcgcgccggggtgcccgccttcctggagacctccgcgccccgcaacctccccttctacgagcggctcggcttcaccgtcaccgccgacgtcgaggtgcccgaaggaccgcgcacctggtgcatgacccgcaagcccggtgcctga

SEQ ID NO: 6129 - DNA, 2601 bp, synthetic construct; identical to SEQ ID NO: 6127
  source 1..2601: mol_type = other DNA

SEQ ID NO: 6130 - DNA, 2925 bp, synthetic construct
  source 1..2925: mol_type = other DNA
atggccttaccagtgaccgccttgctcctgccgctggccttgctgctccacgccgccaggccgctcgaggaggacctgaagaacgtgttcccacctgaggtggccgtgttcgagcctagcgaggccgagatcagccacacccagaaagccaccctcgtgtgcctggctaccggcttctaccccgaccatgtggaactgtcttggtgggtcaacggcaaagaggtgcacagcggcgtgtctaccgacccccagccactgaaagaacagcccgccctgaacgacagccggtactgcctgagcagcagactgagagtgtccgccaccttctggcagaacccccggaaccacttcagatgccaggtgcagttctacggcctgagcgagaacgacgagtggacccaggacagagccaagcccgtgacccagatcgtgtctgccgaagcctggggcagagccgatgatgtgattaagatccactggcaggaaaagaagtccaacaccatcctgggcagccaggaaggcaacaccatgaagaccaacgacacctacatgaagttcagctggctgaccgtgcccgagaagtccctggacaaagaacacagatgcatcgtgcggcacgaaaacaacaagaacggcgtggaccaggaaatcatcttcccacccatcaagaccgatgtgattacaatggaccccaaggacaactgctccaaggacgccaacgataccctgctgctccagctgaccaacaccagcgcctactacatgtacttgttgctgctgctgaagtccgtggtgtacttcgccatcatcacatgctgcctgctgatggctatggtcaagcggaaggacagccggggaagggccaagcgatctggatctggagcaacaaacttctcactactcaaacaagcaggtgacgtggaggagaatcccgggcctactagcatggccttaccagtgaccgccttgctcctgccgctggccttgctgctccacgccgccaggccggacatcgtgatgacacagagccctgatagcctggccgtgtctctgggagagagagccaccattaactgcaaggccagccagagcgtggactacgacggcgacagcttcctgaactggtatcagcagaagcccggccagcctcctaagctgctgatctacgccgccagcaatctggaaagcggcgtgccaagcagattttccggctctggcagcggcaccgatttcaccctgacaatatccagcctccagcctgaggacgtggccgtgtactactgccagcagagcaacgacgaccctctgacctttggacagggcaccaaggtggaaatcaaaggcggaggcggaagtggaggcggaggatctggcggcggaggctctgaagtccaacttgtggagtctggagggggcctggtgcagcccggcggctctctcagactgtcttgtgcggcaagcggctacaccttcacctcttactggatagaatgggtgaggcaggcacctggaaagggactggagtggattggagagattctgccaggagggggagatacaaattacaatgaaatcttcaaggggcgggccaccttttcagcggataccagcaagaatacagcttacctgcagatgaatagcctccgggcagaagataccgctgtttattattgcacgagacgggtgccaataagactggactattgggggcaagggactcttgtcaccgtcagttcaacgcgtatccagaaccctgatcctgccgtgtaccagctgcgggatagcaagagcagcgacaagagcgtgtgtctgttcaccgacttcgacagccagaccaacgtgtcccagagcaaggactccgacgtgtacatcaccgataagaccgtgctggacatgcggagcatggacttcaagagcaactccgccgtggcctggtccaacaagtccgatttcgcctgcgccaacgccttcaacaacagcattatccccgaggacacattcttcccaagccccgagagcagcgactccaccgaccacgtgaagcccaaagagacagagaacaccaagcagcccagcaagagctgccacaagcccaaggccatcgtgcacaccgagaaagtgaacatgatgagcctgaccgtgctgggcctgcggatgctgttcgccaaaaccgtggccgtgaacttcctgctgaccgccaagctgttcttcctcctcaccgcccgcgccaagagaagcggatctggcgtgaagcagaccctgaatttcgacctgctgaagctggctggcgacgtggaatccaacccaggcccttctagaggccatatgaccgagtacaagcccacggtgcgcctcgccacccgcgacgacgtccccagggccgtacgcaccctcgccgccgcgttcgccgactaccccgccacgcgccacaccgtcgatccggaccgccacatcgagcgggtcaccgagctgcaagaactcttcctcacgcgcgtcgggctcgacatcggcaaggtgtgggtcgcggacgacggcgccgcggtggcggtctggaccacgccggagagcgtcgaagcgggggcggtgttcgccgagatcggcccgcgcatggccgagttgagcggttcccggctggccgcgcagcaacagatggaaggcctcctggcgccgcaccggcccaaggagcccgcgtggttcctggccaccgtcggcgtctcgcccgaccaccagggcaagggtctgggcagcgccgtcgtgctccccggagtggaggcggccgagcgcgccggggtgcccgccttcctggagacctccgcgccccgcaacctccccttctacgagcggctcggcttcaccgtcaccgccgacgtcgaggtgcccgaaggaccgcgcacctggtgcatgacccgcaagcccggtgcctga

SEQ ID NO: 6131 - DNA, 2925 bp, synthetic construct
  source 1..2925: mol_type = other DNA
atggccttaccagtgaccgccttgctcctgccgctggccttgctgctccacgccgccaggccgctcgagatccagaaccctgatcctgccgtgtaccagctgcgggatagcaagagcagcgacaagagcgtgtgtctgttcaccgacttcgacagccagaccaacgtgtcccagagcaaggactccgacgtgtacatcaccgataagaccgtgctggacatgcggagcatggacttcaagagcaactccgccgtggcctggtccaacaagtccgatttcgcctgcgccaacgccttcaacaacagcattatccccgaggacacattcttcccaagccccgagagcagcgactccaccgaccacgtgaagcccaaagagacagagaacaccaagcagcccagcaagagctgccacaagcccaaggccatcgtgcacaccgagaaagtgaacatgatgagcctgaccgtgctgggcctgcggatgctgttcgccaaaaccgtggccgtgaacttcctgctgaccgccaagctgttcttcctcctcaccgccagggccaagcgatctggatctggagcaacaaacttctcactactcaaacaagcaggtgacgtggaggagaatcccgggcctactagcatggccttaccagtgaccgccttgctcctgccgctggccttgctgctccacgccgccaggccggacatcgtgatgacacagagccctgatagcctggccgtgtctctgggagagagagccaccattaactgcaaggccagccagagcgtggactacgacggcgacagcttcctgaactggtatcagcagaagcccggccagcctcctaagctgctgatctacgccgccagcaatctggaaagcggcgtgccaagcagattttccggctctggcagcggcaccgatttcaccctgacaatatccagcctccagcctgaggacgtggccgtgtactactgccagcagagcaacgacgaccctctgacctttggacagggcaccaaggtggaaatcaaaggcggaggcggaagtggaggcggaggatctggcggcggaggctctgaagtccaacttgtggagtctggagggggcctggtgcagcccggcggctctctcagactgtcttgtgcggcaagcggctacaccttcacctcttactggatagaatgggtgaggcaggcacctggaaagggactggagtggattggagagattctgccaggagggggagatacaaattacaatgaaatcttcaaggggcgggccaccttttcagcggataccagcaagaatacagcttacctgcagatgaatagcctccgggcagaagataccgctgtttattattgcacgagacgggtgccaataagactggactattgggggcaagggactcttgtcaccgtcagttcaacgcgtgaggacctgaagaacgtgttcccacctgaggtggccgtgttcgagcctagcgaggccgagatcagccacacccagaaagccaccctcgtgtgcctggctaccggcttctaccccgaccatgtggaactgtcttggtgggtcaacggcaaagaggtgcacagcggcgtgtctaccgacccccagccactgaaagaacagcccgccctgaacgacagccggtactgcctgagcagcagactgagagtgtccgccaccttctggcagaacccccggaaccacttcagatgccaggtgcagttctacggcctgagcgagaacgacgagtggacccaggacagagccaagcccgtgacccagatcgtgtctgccgaagcctggggcagagccgatgatgtgattaagatccactggcaggaaaagaagtccaacaccatcctgggcagccaggaaggcaacaccatgaagaccaacgacacctacatgaagttcagctggctgaccgtgcccgagaagtccctggacaaagaacacagatgcatcgtgcggcacgaaaacaacaagaacggcgtggaccaggaaatcatcttcccacccatcaagaccgatgtgattacaatggaccccaaggacaactgctccaaggacgccaacgataccctgctgctccagctgaccaacaccagcgcctactacatgtacttgttgctgctgctgaagtccgtggtgtacttcgccatcatcacatgctgcctgctgatggctatggtcaagcggaaggacagccggggacgcgccaagagaagcggatctggcgtgaagcagaccctgaatttcgacctgctgaagctggctggcgacgtggaatccaacccaggcccttctagaggccatatgaccgagtacaagcccacggtgcgcctcgccacccgcgacgacgtccccagggccgtacgcaccctcgccgccgcgttcgccgactaccccgccacgcgccacaccgtcgatccggaccgccacatcgagcgggtcaccgagctgcaagaactcttcctcacgcgcgtcgggctcgacatcggcaaggtgtgggtcgcggacgacggcgccgcggtggcggtctggaccacgccggagagcgtcgaagcgggggcggtgttcgccgagatcggcccgcgcatggccgagttgagcggttcccggctggccgcgcagcaacagatggaaggcctcctggcgccgcaccggcccaaggagcccgcgtggttcctggccaccgtcggcgtctcgcccgaccaccagggcaagggtctgggcagcgccgtcgtgctccccggagtggaggcggccgagcgcgccggggtgcccgccttcctggagacctccgcgccccgcaacctccccttctacgagcggctcggcttcaccgtcaccgccgacgtcgaggtgcccgaaggaccgcgcacctggtgcatgacccgcaagcccggtgcctga

SEQ ID NO: 6132 - DNA, 2919 bp, synthetic construct
  source 1..2919: mol_type = other DNA
atggccttaccagtgaccgccttgctcctgccgctggccttgctgctccacgccgccaggccgctcgaggaggacctgaagaacgtgttcccacctgaggtggccgtgttcgagcctagcgaggccgagatcagccacacccagaaagccaccctcgtgtgcctggctaccggcttctaccccgaccatgtggaactgtcttggtgggtcaacggcaaagaggtgcacagcggcgtgtgtaccgacccccagccactgaaagaacagcccgccctgaacgacagccggtactgcctgagcagcagactgagagtgtccgccaccttctggcagaacccccggaaccacttcagatgccaggtgcagttctacggcctgagcgagaacgacgagtggacccaggacagagccaagcccgtgacccagatcgtgtctgccgaagcctggggcagagccgatgatgtgattaagatccactggcaggaaaagaagtccaacaccatcctgggcagccaggaaggcaacaccatgaagaccaacgacacctacatgaagttcagctggctgaccgtgcccgagaagtccctggacaaagaacacagatgcatcgtgcggcacgaaaacaacaagaacggcgtggaccaggaaatcatcttcccacccatcaagaccgatgtgattacaatggaccccaaggacaactgctccaaggacgccaacgataccctgctgctccagctgaccaacaccagcgcctactacatgtacttgttgctgctgctgaagtccgtggtgtacttcgccatcatcacatgctgcctgctgcggagaaccgccttctgctgcaacggcgagaagtctagggccaagcgatctggatctggagcaacaaacttctcactactcaaacaagcaggtgacgtggaggagaatcccgggcctactagcatggccttaccagtgaccgccttgctcctgccgctggccttgctgctccacgccgccaggccggacatcgtgatgacacagagccctgatagcctggccgtgtctctgggagagagagccaccattaactgcaaggccagccagagcgtggactacgacggcgacagcttcctgaactggtatcagcagaagcccggccagcctcctaagctgctgatctacgccgccagcaatctggaaagcggcgtgccaagcagattttccggctctggcagcggcaccgatttcaccctgacaatatccagcctccagcctgaggacgtggccgtgtactactgccagcagagcaacgacgaccctctgacctttggacagggcaccaaggtggaaatcaaaggcggaggcggaagtggaggcggaggatctggcggcggaggctctgaagtccaacttgtggagtctggagggggcctggtgcagcccggcggctctctcagactgtcttgtgcggcaagcggctacaccttcacctcttactggatagaatgggtgaggcaggcacctggaaagggactggagtggattggagagattctgccaggagggggagatacaaattacaatgaaatcttcaaggggcgggccaccttttcagcggataccagcaagaatacagcttacctgcagatgaatagcctccgggcagaagataccgctgtttattattgcacgagacgggtgccaataagactggactattgggggcaagggactcttgtcaccgtcagttcaacgcgtatccagaaccctgatcctgccgtgtaccagctgcgggatagcaagagcagcgacaagagcgtgtgtctgttcaccgacttcgacagccagaccaacgtgtcccagagcaaggactccgacgtgtacatcaccgataagtgcgtgctggacatgcggagcatggacttcaagagcaactccgccgtggcctggtccaacaagtccgatttcgcctgcgccaacgccttcaacaacagcattatccccgaggacacattcttcccaagccccgagagcagcgactccaccgaccacgtgaagcccaaagagacagagaacaccaagcagcccagcaagagctgccacaagcccaaggccatcgtgcacaccgagaaagtgaacatgatgagcctgaccgtgctgggcctgcggatgctgttcgccaaaaccgtggccgtgaacttcctgctgaccgccaagctgttcttcctccgcgccaagagaagcggatctggcgtgaagcagaccctgaatttcgacctgctgaagctggctggcgacgtggaatccaacccaggcccttctagaggccatatgaccgagtacaagcccacggtgcgcctcgccacccgcgacgacgtccccagggccgtacgcaccctcgccgccgcgttcgccgactaccccgccacgcgccacaccgtcgatccggaccgccacatcgagcgggtcaccgagctgcaagaactcttcctcacgcgcgtcgggctcgacatcggcaaggtgtgggtcgcggacgacggcgccgcggtggcggtctggaccacgccggagagcgtcgaagcgggggcggtgttcgccgagatcggcccgcgcatggccgagttgagcggttcccggctggccgcgcagcaacagatggaaggcctcctggcgccgcaccggcccaaggagcccgcgtggttcctggccaccgtcggcgtctcgcccgaccaccagggcaagggtctgggcagcgccgtcgtgctccccggagtggaggcggccgagcgcgccggggtgcccgccttcctggagacctccgcgccccgcaacctccccttctacgagcggctcggcttcaccgtcaccgccgacgtcgaggtgcccgaaggaccgcgcacctggtgcatgacccgcaagcccggtgcctga

SEQ ID NO: 6133 - DNA, 2919 bp, synthetic construct
  source 1..2919: mol_type = other DNA
atggccttaccagtgaccgccttgctcctgccgctggccttgctgctccacgccgccaggccgctcgagatccagaaccctgatcctgccgtgtaccagctgcgggatagcaagagcagcgacaagagcgtgtgtctgttcaccgacttcgacagccagaccaacgtgtcccagagcaaggactccgacgtgtacatcaccgataagtgcgtgctggacatgcggagcatggacttcaagagcaactccgccgtggcctggtccaacaagtccgatttcgcctgcgccaacgccttcaacaacagcattatccccgaggacacattcttcccaagccccgagagcagcgactccaccgaccacgtgaagcccaaagagacagagaacaccaagcagcccagcaagagctgccacaagcccaaggccatcgtgcacaccgagaaagtgaacatgatgagcctgaccgtgctgggcctgcggatgctgttcgccaaaaccgtggccgtgaacttcctgctgaccgccaagctgttcttcctcagggccaagcgatctggatctggagcaacaaacttctcactactcaaacaagcaggtgacgtggaggagaatcccgggcctactagcatggccttaccagtgaccgccttgctcctgccgctggccttgctgctccacgccgccaggccggacatcgtgatgacacagagccctgatagcctggccgtgtctctgggagagagagccaccattaactgcaaggccagccagagcgtggactacgacggcgacagcttcctgaactggtatcagcagaagcccggccagcctcctaagctgctgatctacgccgccagcaatctggaaagcggcgtgccaagcagattttccggctctggcagcggcaccgatttcaccctgacaatatccagcctccagcctgaggacgtggccgtgtactactgccagcagagcaacgacgaccctctgacctttggacagggcaccaaggtggaaatcaaaggcggaggcggaagtggaggcggaggatctggcggcggaggctctgaagtccaacttgtggagtctggagggggcctggtgcagcccggcggctctctcagactgtcttgtgcggcaagcggctacaccttcacctcttactggatagaatgggtgaggcaggcacctggaaagggactggagtggattggagagattctgccaggagggggagatacaaattacaatgaaatcttcaaggggcgggccaccttttcagcggataccagcaagaatacagcttacctgcagatgaatagcctccgggcagaagataccgctgtttattattgcacgagacgggtgccaataagactggactattgggggcaagggactcttgtcaccgtcagttcaacgcgtgaggacctgaagaacgtgttcccacctgaggtggccgtgttcgagcctagcgaggccgagatcagccacacccagaaagccaccctcgtgtgcctggctaccggcttctaccccgaccatgtggaactgtcttggtgggtcaacggcaaagaggtgcacagcggcgtgtgtaccgacccccagccactgaaagaacagcccgccctgaacgacagccggtactgcctgagcagcagactgagagtgtccgccaccttctggcagaacccccggaaccacttcagatgccaggtgcagttctacggcctgagcgagaacgacgagtggacccaggacagagccaagcccgtgacccagatcgtgtctgccgaagcctggggcagagccgatgatgtgattaagatccactggcaggaaaagaagtccaacaccatcctgggcagccaggaaggcaacaccatgaagaccaacgacacctacatgaagttcagctggctgaccgtgcccgagaagtccctggacaaagaacacagatgcatcgtgcggcacgaaaacaacaagaacggcgtggaccaggaaatcatcttcccacccatcaagaccgatgtgattacaatggaccccaaggacaactgctccaaggacgccaacgataccctgctgctccagctgaccaacaccagcgcctactacatgtacttgttgctgctgctgaagtccgtggtgtacttcgccatcatcacatgctgcctgctgcggagaaccgccttctgctgcaacggcgagaagtctcgcgccaagagaagcggatctggcgtgaagcagaccctgaatttcgacctgctgaagctggctggcgacgtggaatccaacccaggcccttctagaggccatatgaccgagtacaagcccacggtgcgcctcgccacccgcgacgacgtccccagggccgtacgcaccctcgccgccgcgttcgccgactaccccgccacgcgccacaccgtcgatccggaccgccacatcgagcgggtcaccgagctgcaagaactcttcctcacgcgcgtcgggctcgacatcggcaaggtgtgggtcgcggacgacggcgccgcggtggcggtctggaccacgccggagagcgtcgaagcgggggcggtgttcgccgagatcggcccgcgcatggccgagttgagcggttcccggctggccgcgcagcaacagatggaaggcctcctggcgccgcaccggcccaaggagcccgcgtggttcctggccaccgtcggcgtctcgcccgaccaccagggcaagggtctgggcagcgccgtcgtgctccccggagtggaggcggccgagcgcgccggggtgcccgccttcctggagacctccgcgccccgcaacctccccttctacgagcggctcggcttcaccgtcaccgccgacgtcgaggtgcccgaaggaccgcgcacctggtgcatgacccgcaagcccggtgcctga

SEQ ID NO: 6134 - DNA, 2919 bp, synthetic construct
  source 1..2919: mol_type = other DNA
atggccttaccagtgaccgccttgctcctgccgctggccttgctgctccacgccgccaggccgctcgaggaggacctgaagaacgtgttcccacctgaggtggccgtgttcgagcctagcgaggccgagatcagccacacccagaaagccaccctcgtgtgcctggctaccggcttctaccccgaccatgtggaactgtcttggtgggtcaacggcaaagaggtgcacagcggcgtgtctaccgacccccagccactgaaagaacagcccgccctgaacgacagccggtactgcctgagcagcagactgagagtgtccgccaccttctggcagaacccccggaaccacttcagatgccaggtgcagttctacggcctgagcgagaacgacgagtggacccaggacagagccaagcccgtgacccagatcgtgtctgccgaagcctggggcagagccgatgatgtgattaagatccactggcaggaaaagaagtccaacaccatcctgggcagccaggaaggcaacaccatgaagaccaacgacacctacatgaagttcagctggctgaccgtgcccgagaagtccctggacaaagaacacagatgcatcgtgcggcacgaaaacaacaagaacggcgtggaccaggaaatcatcttcccacccatcaagaccgatgtgattacaatggaccccaaggacaactgctccaaggacgccaacgataccctgctgctccagctgaccaacaccagcgcctactacatgtacttgttgctgctgctgaagtccgtggtgtacttcgccatcatcacatgctgcctgctgcggagaaccgccttctgctgcaacggcgagaagtctagggccaagcgatctggatctggagcaacaaacttctcactactcaaacaagcaggtgacgtggaggagaatcccgggcctactagcatggccttaccagtgaccgccttgctcctgccgctggccttgctgctccacgccgccaggccggacatcgtgatgacacagagccctgatagcctggccgtgtctctgggagagagagccaccattaactgcaaggccagccagagcgtggactacgacggcgacagcttcctgaactggtatcagcagaagcccggccagcctcctaagctgctgatctacgccgccagcaatctggaaagcggcgtgccaagcagattttccggctctggcagcggcaccgatttcaccctgacaatatccagcctccagcctgaggacgtggccgtgtactactgccagcagagcaacgacgaccctctgacctttggacagggcaccaaggtggaaatcaaaggcggaggcggaagtggaggcggaggatctggcggcggaggctctgaagtccaacttgtggagtctggagggggcctggtgcagcccggcggctctctcagactgtcttgtgcggcaagcggctacaccttcacctcttactggatagaatgggtgaggcaggcacctggaaagggactggagtggattggagagattctgccaggagggggagatacaaattacaatgaaatcttcaaggggcgggccaccttttcagcggataccagcaagaatacagcttacctgcagatgaatagcctccgggcagaagataccgctgtttattattgcacgagacgggtgccaataagactggactattgggggcaagggactcttgtcaccgtcagttcaacgcgtatccagaaccctgatcctgccgtgtaccagctgcgggatagcaagagcagcgacaagagcgtgtgtctgttcaccgacttcgacagccagaccaacgtgtcccagagcaaggactccgacgtgtacatcaccgataagaccgtgctggacatgcggagcatggacttcaagagcaactccgccgtggcctggtccaacaagtccgatttcgcctgcgccaacgccttcaacaacagcattatccccgaggacacattcttcccaagccccgagagcagcgactccaccgaccacgtgaagcccaaagagacagagaacaccaagcagcccagcaagagctgccacaagcccaaggccatcgtgcacaccgagaaagtgaacatgatgagcctgaccgtgctgggcctgcggatgctgttcgccaaaaccgtggccgtgaacttcctgctgaccgccaagctgttcttcctccgcgccaagagaagcggatctggcgtgaagcagaccctgaatttcgacctgctgaagctggctggcgacgtggaatccaacccaggcccttctagaggccatatgaccgagtacaagcccacggtgcgcctcgccacccgcgacgacgtccccagggccgtacgcaccctcgccgccgcgttcgccgactaccccgccacgcgccacaccgtcgatccggaccgccacatcgagcgggtcaccgagctgcaagaactcttcctcacgcgcgtcgggctcgacatcggcaaggtgtgggtcgcggacgacggcgccgcggtggcggtctggaccacgccggagagcgtcgaagcgggggcggtgttcgccgagatcggcccgcgcatggccgagttgagcggttcccggctggccgcgcagcaacagatggaaggcctcctggcgccgcaccggcccaaggagcccgcgtggttcctggccaccgtcggcgtctcgcccgaccaccagggcaagggtctgggcagcgccgtcgtgctccccggagtggaggcggccgagcgcgccggggtgcccgccttcctggagacctccgcgccccgcaacctccccttctacgagcggctcggcttcaccgtcaccgccgacgtcgaggtgcccgaaggaccgcgcacctggtgcatgacccgcaagcccggtgcctga

SEQ ID NO: 6135 - DNA, 2919 bp, synthetic construct
  source 1..2919: mol_type = other DNA
atggccttaccagtgaccgccttgctcctgccgctggccttgctgctccacgccgccaggccgctcgagatccagaaccctgatcctgccgtgtaccagctgcgggatagcaagagcagcgacaagagcgtgtgtctgttcaccgacttcgacagccagaccaacgtgtcccagagcaaggactccgacgtgtacatcaccgataagaccgtgctggacatgcggagcatggacttcaagagcaactccgccgtggcctggtccaacaagtccgatttcgcctgcgccaacgccttcaacaacagcattatccccgaggacacattcttcccaagccccgagagcagcgactccaccgaccacgtgaagcccaaagagacagagaacaccaagcagcccagcaagagctgccacaagcccaaggccatcgtgcacaccgagaaagtgaacatgatgagcctgaccgtgctgggcctgcggatgctgttcgccaaaaccgtggccgtgaacttcctgctgaccgccaagctgttcttcctcagggccaagcgatctggatctggagcaacaaacttctcactactcaaacaagcaggtgacgtggaggagaatcccgggcctactagcatggccttaccagtgaccgccttgctcctgccgctggccttgctgctccacgccgccaggccggacatcgtgatgacacagagccctgatagcctggccgtgtctctgggagagagagccaccattaactgcaaggccagccagagcgtggactacgacggcgacagcttcctgaactggtatcagcagaagcccggccagcctcctaagctgctgatctacgccgccagcaatctggaaagcggcgtgccaagcagattttccggctctggcagcggcaccgatttcaccctgacaatatccagcctccagcctgaggacgtggccgtgtactactgccagcagagcaacgacgaccctctgacctttggacagggcaccaaggtggaaatcaaaggcggaggcggaagtggaggcggaggatctggcggcggaggctctgaagtccaacttgtggagtctggagggggcctggtgcagcccggcggctctctcagactgtcttgtgcggcaagcggctacaccttcacctcttactggatagaatgggtgaggcaggcacctggaaagggactggagtggattggagagattctgccaggagggggagatacaaattacaatgaaatcttcaaggggcgggccaccttttcagcggataccagcaagaatacagcttacctgcagatgaatagcctccgggcagaagataccgctgtttattattgcacgagacgggtgccaataagactggactattgggggcaagggactcttgtcaccgtcagttcaacgcgtgaggacctgaagaacgtgttcccacctgaggtggccgtgttcgagcctagcgaggccgagatcagccacacccagaaagccaccctcgtgtgcctggctaccggcttctaccccgaccatgtggaactgtcttggtgggtcaacggcaaagaggtgcacagcggcgtgtctaccgacccccagccactgaaagaacagcccgccctgaacgacagccggtactgcctgagcagcagactgagagtgtccgccaccttctggcagaacccccggaaccacttcagatgccaggtgcagttctacggcctgagcgagaacgacgagtggacccaggacagagccaagcccgtgacccagatcgtgtctgccgaagcctggggcagagccgatgatgtgattaagatccactggcaggaaaagaagtccaacaccatcctgggcagccaggaaggcaacaccatgaagaccaacgacacctacatgaagttcagctggctgaccgtgcccgagaagtccctggacaaagaacacagatgcatcgtgcggcacgaaaacaacaagaacggcgtggaccaggaaatcatcttcccacccatcaagaccgatgtgattacaatggaccccaaggacaactgctccaaggacgccaacgataccctgctgctccagctgaccaacaccagcgcctactacatgtacttgttgctgctgctgaagtccgtggtgtacttcgccatcatcacatgctgcctgctgcggagaaccgccttctgctgcaacggcgagaagtctcgcgccaagagaagcggatctggcgtgaagcagaccctgaatttcgacctgctgaagctggctggcgacgtggaatccaacccaggcccttctagaggccatatgaccgagtacaagcccacggtgcgcctcgccacccgcgacgacgtccccagggccgtacgcaccctcgccgccgcgttcgccgactaccccgccacgcgccacaccgtcgatccggaccgccacatcgagcgggtcaccgagctgcaagaactcttcctcacgcgcgtcgggctcgacatcggcaaggtgtgggtcgcggacgacggcgccgcggtggcggtctggaccacgccggagagcgtcgaagcgggggcggtgttcgccgagatcggcccgcgcatggccgagttgagcggttcccggctggccgcgcagcaacagatggaaggcctcctggcgccgcaccggcccaaggagcccgcgtggttcctggccaccgtcggcgtctcgcccgaccaccagggcaagggtctgggcagcgccgtcgtgctccccggagtggaggcggccgagcgcgccggggtgcccgccttcctggagacctccgcgccccgcaacctccccttctacgagcggctcggcttcaccgtcaccgccgacgtcgaggtgcccgaaggaccgcgcacctggtgcatgacccgcaagcccggtgcctga

SEQ ID NO: 6136 - DNA, 2613 bp, synthetic construct
  source 1..2613: mol_type = other DNA
atggccttaccagtgaccgccttgctcctgccgctggccttgctgctccacgccgccaggccgctcgaggaggacctgaagaacgtgttcccacctgaggtggccgtgttcgagcctagcaaggccgagatcgcccacacccagaaagccaccctcgtgtgcctggctaccggcttctaccccgaccatgtggaactgtcttggtgggtcaacggcaaagaggtgcacagcggcgtgtgtaccgacccccagccactgaaagaacagcccgccctgaacgacagccggtactgcctgagcagcagactgagagtgtccgccaccttctggcagaacccccggaaccacttcagatgccaggtgcagttctacggcctgagcgagaacgacgagtggacccaggacagagccaagcccgtgacccagatcgtgtctgccgaagcctggggcagagccgattgcggcatcaccagcgccagctaccaccagggcgtgctgagcgccaccatcctgtacgagatcctgctgggcaaggccaccctgtacgccgtgctggtgtctgccctggtgctgatggctatggtcaagcggaaggacagccggggaagggccaagcgatctggatctggagcaacaaacttctcactactcaaacaagcaggtgacgtggaggagaatcccgggcctactagcatggccttaccagtgaccgccttgctcctgccgctggccttgctgctccacgccgccaggccggacatcgtgatgacacagagccctgatagcctggccgtgtctctgggagagagagccaccattaactgcaaggccagccagagcgtggactacgacggcgacagcttcctgaactggtatcagcagaagcccggccagcctcctaagctgctgatctacgccgccagcaatctggaaagcggcgtgccaagcagattttccggctctggcagcggcaccgatttcaccctgacaatatccagcctccagcctgaggacgtggccgtgtactactgccagcagagcaacgacgaccctctgacctttggacagggcaccaaggtggaaatcaaaggcggaggcggaagtggaggcggaggatctggcggcggaggctctgaagtccaacttgtggagtctggagggggcctggtgcagcccggcggctctctcagactgtcttgtgcggcaagcggctacaccttcacctcttactggatagaatgggtgaggcaggcacctggaaagggactggagtggattggagagattctgccaggagggggagatacaaattacaatgaaatcttcaaggggcgggccaccttttcagcggataccagcaagaatacagcttacctgcagatgaatagcctccgggcagaagataccgctgtttattattgcacgagacgggtgccaataagactggactattgggggcaagggactcttgtcaccgtcagttcaacgcgtatccagaaccctgatcctgccgtgtaccagctgcgggatagcaagagcagcgacaagagcgtgtgtctgttcaccgacttcgacagccagaccaacgtgtcccagagcaaggactccgacgtgtacatcaccgataagtgcgtgctggacatgcggagcatggacttcaagagcaactccgccgtggcctggtccaacaagtccgatttcgcctgcgccaacgccttcaacaacagcattatccccgaggacacattcttcccaagcagcgacgtgccctgcgacgtgaagctggtggaaaagagcttcgagacagacaccaacctgaacttccagaacctgagcgtgatcggcttcagaatcctgctgctgaaagtggccggctttaacctgctgatgaccctgcggctgtggtccagccgcgccaagagaagcggatctggcgtgaagcagaccctgaatttcgacctgctgaagctggctggcgacgtggaatccaacccaggcccttctagaggccatatgaccgagtacaagcccacggtgcgcctcgccacccgcgacgacgtccccagggccgtacgcaccctcgccgccgcgttcgccgactaccccgccacgcgccacaccgtcgatccggaccgccacatcgagcgggtcaccgagctgcaagaactcttcctcacgcgcgtcgggctcgacatcggcaaggtgtgggtcgcggacgacggcgccgcggtggcggtctggaccacgccggagagcgtcgaagcgggggcggtgttcgccgagatcggcccgcgcatggccgagttgagcggttcccggctggccgcgcagcaacagatggaaggcctcctggcgccgcaccggcccaaggagcccgcgtggttcctggccaccgtcggcgtctcgcccgaccaccagggcaagggtctgggcagcgccgtcgtgctccccggagtggaggcggccgagcgcgccggggtgcccgccttcctggagacctccgcgccccgcaacctccccttctacgagcggctcggcttcaccgtcaccgccgacgtcgaggtgcccgaaggaccgcgcacctggtgcatgacccgcaagcccggtgcctga

SEQ ID NO: 6137 - DNA, 2613 bp, synthetic construct
  source 1..2613: mol_type = other DNA
atggccttaccagtgaccgccttgctcctgccgctggccttgctgctccacgccgccaggccgctcgagatccagaaccctgatcctgccgtgtaccagctgcgggatagcaagagcagcgacaagagcgtgtgtctgttcaccgacttcgacagccagaccaacgtgtcccagagcaaggactccgacgtgtacatcaccgataagtgcgtgctggacatgcggagcatggacttcaagagcaactccgccgtggcctggtccaacaagtccgatttcgcctgcgccaacgccttcaacaacagcattatccccgaggacacattcttcccaagcagcgacgtgccctgcgacgtgaagctggtggaaaagagcttcgagacagacaccaacctgaacttccagaacctgagcgtgatcggcttcagaatcctgctgctgaaagtggccggctttaacctgctgatgaccctgcggctgtggtccagcagggccaagcgatctggatctggagcaacaaacttctcactactcaaacaagcaggtgacgtggaggagaatcccgggcctactagcatggccttaccagtgaccgccttgctcctgccgctggccttgctgctccacgccgccaggccggacatcgtgatgacacagagccctgatagcctggccgtgtctctgggagagagagccaccattaactgcaaggccagccagagcgtggactacgacggcgacagcttcctgaactggtatcagcagaagcccggccagcctcctaagctgctgatctacgccgccagcaatctggaaagcggcgtgccaagcagattttccggctctggcagcggcaccgatttcaccctgacaatatccagcctccagcctgaggacgtggccgtgtactactgccagcagagcaacgacgaccctctgacctttggacagggcaccaaggtggaaatcaaaggcggaggcggaagtggaggcggaggatctggcggcggaggctctgaagtccaacttgtggagtctggagggggcctggtgcagcccggcggctctctcagactgtcttgtgcggcaagcggctacaccttcacctcttactggatagaatgggtgaggcaggcacctggaaagggactggagtggattggagagattctgccaggagggggagatacaaattacaatgaaatcttcaaggggcgggccaccttttcagcggataccagcaagaatacagcttacctgcagatgaatagcctccgggcagaagataccgctgtttattattgcacgagacgggtgccaataagactggactattgggggcaagggactcttgtcaccgtcagttcaacgcgtgaggacctgaagaacgtgttcccacctgaggtggccgtgttcgagcctagcaaggccgagatcgcccacacccagaaagccaccctcgtgtgcctggctaccggcttctaccccgaccatgtggaactgtcttggtgggtcaacggcaaagaggtgcacagcggcgtgtgtaccgacccccagccactgaaagaacagcccgccctgaacgacagccggtactgcctgagcagcagactgagagtgtccgccaccttctggcagaacccccggaaccacttcagatgccaggtgcagttctacggcctgagcgagaacgacgagtggacccaggacagagccaagcccgtgacccagatcgtgtctgccgaagcctggggcagagccgattgcggcatcaccagcgccagctaccaccagggcgtgctgagcgccaccatcctgtacgagatcctgctgggcaaggccaccctgtacgccgtgctggtgtctgccctggtgctgatggctatggtcaagcggaaggacagccggggacgcgccaagagaagcggatctggcgtgaagcagaccctgaatttcgacctgctgaagctggctggcgacgtggaatccaacccaggcccttctagaggccatatgaccgagtacaagcccacggtgcgcctcgccacccgcgacgacgtccccagggccgtacgcaccctcgccgccgcgttcgccgactaccccgccacgcgccacaccgtcgatccggaccgccacatcgagcgggtcaccgagctgcaagaactcttcctcacgcgcgtcgggctcgacatcggcaaggtgtgggtcgcggacgacggcgccgcggtggcggtctggaccacgccggagagcgtcgaagcgggggcggtgttcgccgagatcggcccgcgcatggccgagttgagcggttcccggctggccgcgcagcaacagatggaaggcctcctggcgccgcaccggcccaaggagcccgcgtggttcctggccaccgtcggcgtctcgcccgaccaccagggcaagggtctgggcagcgccgtcgtgctccccggagtggaggcggccgagcgcgccggggtgcccgccttcctggagacctccgcgccccgcaacctccccttctacgagcggctcggcttcaccgtcaccgccgacgtcgaggtgcccgaaggaccgcgcacctggtgcatgacccgcaagcccggtgcctga

SEQ ID NO: 6138 - DNA, 2292 bp, synthetic construct
  source 1..2292: mol_type = other DNA
atggccttaccagtgaccgccttgctcctgccgctggccttgctgctccacgccgccaggccgctcgagcagagttttgggttgttggaccctaaattgtgctatctgttggacggaatcctgttcatttacggagtgatcctgaccgcattgttcctgcgggttaagttttccagatccgcagacgcacccgcttaccaacaagggcagaaccaactctacaatgaacttaatttggggcggagggaagagtacgacgttctggacaaaaggaggggacgagatcccgagatgggcggaaagcctcagcgaaggaagaatccgcaagaggggctttataacgaactccagaaagataaaatggcagaagcctatagtgagattgggatgaagggagaaaggaggaggggtaaaggtcacgatgggttgtaccaaggattgagcacagccactaaagatacctatgatgcgctccacatgcaggccctgccgccaagaagggccaagcgatctggatctggagcaacaaacttctcactactcaaacaagcaggtgacgtggaggagaatcccgggcctactagcatggccttaccagtgaccgccttgctcctgccgctggccttgctgctccacgccgccaggccggacatcgtgatgacacagagccctgatagcctggccgtgtctctgggagagagagccaccattaactgcaaggccagccagagcgtggactacgacggcgacagcttcctgaactggtatcagcagaagcccggccagcctcctaagctgctgatctacgccgccagcaatctggaaagcggcgtgccaagcagattttccggctctggcagcggcaccgatttcaccctgacaatatccagcctccagcctgaggacgtggccgtgtactactgccagcagagcaacgacgaccctctgacctttggacagggcaccaaggtggaaatcaaaggcggaggcggaagtggaggcggaggatctggcggcggaggctctgaagtccaacttgtggagtctggagggggcctggtgcagcccggcggctctctcagactgtcttgtgcggcaagcggctacaccttcacctcttactggatagaatgggtgaggcaggcacctggaaagggactggagtggattggagagattctgccaggagggggagatacaaattacaatgaaatcttcaaggggcgggccaccttttcagcggataccagcaagaatacagcttacctgcagatgaatagcctccgggcagaagataccgctgtttattattgcacgagacgggtgccaataagactggactattgggggcaagggactcttgtcaccgtcagttcaacgcgtgagctgggagagcctcagctgtgctatatcctggacgccatcctgtttctgtacggcatcgtgctgaccctgctgtactgccggctgaagatccaagtgcggaaggccgccatcaccagctacgagaaatccgacggcgtgtacaccggcctgagcaccagaaatcaagagacatacgagacactgaagcacgaaaagcctccacaacgcgccaagagaagcggatctggcgtgaagcagaccctgaatttcgacctgctgaagctggctggcgacgtggaatccaacccaggcccttctagaggccatatgaccgagtacaagcccacggtgcgcctcgccacccgcgacgacgtccccagggccgtacgcaccctcgccgccgcgttcgccgactaccccgccacgcgccacaccgtcgatccggaccgccacatcgagcgggtcaccgagctgcaagaactcttcctcacgcgcgtcgggctcgacatcggcaaggtgtgggtcgcggacgacggcgccgcggtggcggtctggaccacgccggagagcgtcgaagcgggggcggtgttcgccgagatcggcccgcgcatggccgagttgagcggttcccggctggccgcgcagcaacagatggaaggcctcctggcgccgcaccggcccaaggagcccgcgtggttcctggccaccgtcggcgtctcgcccgaccaccagggcaagggtctgggcagcgccgtcgtgctccccggagtggaggcggccgagcgcgccggggtgcccgccttcctggagacctccgcgccccgcaacctccccttctacgagcggctcggcttcaccgtcaccgccgacgtcgaggtgcccgaaggaccgcgcacctggtgcatgacccgcaagcccggtgcctga

SEQ ID NO: 6139 - DNA, 2925 bp, synthetic construct; identical to SEQ ID NO: 6130
  source 1..2925: mol_type = other DNA

SEQ ID NO: 6140 - DNA, 2925 bp, synthetic construct; identical to SEQ ID NO: 6131
  source 1..2925: mol_type = other DNA

SEQ ID NO: 6141 - DNA, 2922 bp, synthetic construct
  source 1..2922: mol_type = other DNA
atggccttaccagtgaccgccttgctcctgccgctggccttgctgctccacgccgccaggccgctcgaggaggaggacctgaagaacgtgttcccacctgaggtggccgtgttcgagcctagcgaggccgagatcagccacacccagaaagccaccctcgtgtgcctggctaccggcttctaccccgaccatgtggaactgtcttggtgggtcaacggcaaagaggtgcacagcggcgtgtgtaccgacccccagccactgaaagaacagcccgccctgaacgacagccggtactgcctgagcagcagactgagagtgtccgccaccttctggcagaacccccggaaccacttcagatgccaggtgcagttctacggcctgagcgagaacgacgagtggacccaggacagagccaagcccgtgacccagatcgtgtctgccgaagcctggggcagagccgatgatgtgattaagatccactggcaggaaaagaagtccaacaccatcctgggcagccaggaaggcaacaccatgaagaccaacgacacctacatgaagttcagctggctgaccgtgcccgagaagtccctggacaaagaacacagatgcatcgtgcggcacgaaaacaacaagaacggcgtggaccaggaaatcatcttcccacccatcaagaccgatgtgattacaatggaccccaaggacaactgctccaaggacgccaacgataccctgctgctccagctgaccaacaccagcgcctactacatgtacttgttgctgctgctgaagtccgtggtgtacttcgccatcatcacatgctgcctgctgcggagaaccgccttctgctgcaacggcgagaagtctagggccaagcgatctggatctggagcaacaaacttctcactactcaaacaagcaggtgacgtggaggagaatcccgggcctactagcatggccttaccagtgaccgccttgctcctgccgctggccttgctgctccacgccgccaggccggacatcgtgatgacacagagccctgatagcctggccgtgtctctgggagagagagccaccattaactgcaaggccagccagagcgtggactacgacggcgacagcttcctgaactggtatcagcagaagcccggccagcctcctaagctgctgatctacgccgccagcaatctggaaagcggcgtgccaagcagattttccggctctggcagcggcaccgatttcaccctgacaatatccagcctccagcctgaggacgtggccgtgtactactgccagcagagcaacgacgaccctctgacctttggacagggcaccaaggtggaaatcaaaggcggaggcggaagtggaggcggaggatctggcggcggaggctctgaagtccaacttgtggagtctggagggggcctggtgcagcccggcggctctctcagactgtcttgtgcggcaagcggctacaccttcacctcttactggatagaatgggtgaggcaggcacctggaaagggactggagtggattggagagattctgccaggagggggagatacaaattacaatgaaatcttcaaggggcgggccaccttttcagcggataccagcaagaatacagcttacctgcagatgaatagcctccgggcagaagataccgctgtttattattgcacgagacgggtgccaataagactggactattgggggcaagggactcttgtcaccgtcagttcaacgcgtatccagaaccctgatcctgccgtgtaccagctgcgggatagcaagagcagcgacaagagcgtgtgtctgttcaccgacttcgacagccagaccaacgtgtcccagagcaaggactccgacgtgtacatcaccgataagtgcgtgctggacatgcggagcatggacttcaagagcaactccgccgtggcctggtccaacaagtccgatttcgcctgcgccaacgccttcaacaacagcattatccccgaggacacattcttcccaagccccgagagcagcgactccaccgaccacgtgaagcccaaagagacagagaacaccaagcagcccagcaagagctgccacaagcccaaggccatcgtgcacaccgagaaagtgaacatgatgagcctgaccgtgctgggcctgcggatgctgttcgccaaaaccgtggccgtgaacttcctgctgaccgccaagctgttcttcctccgcgccaagagaagcggatctggcgtgaagcagaccctgaatttcgacctgctgaagctggctggcgacgtggaatccaacccaggcccttctagaggccatatgaccgagtacaagcccacggtgcgcctcgccacccgcgacgacgtccccagggccgtacgcaccctcgccgccgcgttcgccgactaccccgccacgcgccacaccgtcgatccggaccgccacatcgagcgggtcaccgagctgcaagaactcttcctcacgcgcgtcgggctcgacatcggcaaggtgtgggtcgcggacgacggcgccgcggtggcggtctggaccacgccggagagcgtcgaagcgggggcggtgttcgccgagatcggcccgcgcatggccgagttgagcggttcccggctggccgcgcagcaacagatggaaggcctcctggcgccgcaccggcccaaggagcccgcgtggttcctggccaccgtcggcgtctcgcccgaccaccagggcaagggtctgggcagcgccgtcgtgctccccggagtggaggcggccgagcgcgccggggtgcccgccttcctggagacctccgcgccccgcaacctccccttctacgagcggctcggcttcaccgtcaccgccgacgtcgaggtgcccgaaggaccgcgcacctggtgcatgacccgcaagcccggtgcctga

SEQ ID NO: 6142 - DNA, 2922 bp, synthetic construct
  source 1..2922: mol_type = other DNA
atggccttaccagtgaccgccttgctcctgccgctggccttgctgctccacgccgccaggccgctcgagatccagaaccctgatcctgccgtgtaccagctgcgggatagcaagagcagcgacaagagcgtgtgtctgttcaccgacttcgacagccagaccaacgtgtcccagagcaaggactccgacgtgtacatcaccgataagtgcgtgctggacatgcggagcatggacttcaagagcaactccgccgtggcctggtccaacaagtccgatttcgcctgcgccaacgccttcaacaacagcattatccccgaggacacattcttcccaagccccgagagcagcgactccaccgaccacgtgaagcccaaagagacagagaacaccaagcagcccagcaagagctgccacaagcccaaggccatcgtgcacaccgagaaagtgaacatgatgagcctgaccgtgctgggcctgcggatgctgttcgccaaaaccgtggccgtgaacttcctgctgaccgccaagctgttcttcctcagggccaagcgatctggatctggagcaacaaacttctcactactcaaacaagcaggtgacgtggaggagaatcccgggcctactagcatggccttaccagtgaccgccttgctcctgccgctggccttgctgctccacgccgccaggccggacatcgtgatgacacagagccctgatagcctggccgtgtctctgggagagagagccaccattaactgcaaggccagccagagcgtggactacgacggcgacagcttcctgaactggtatcagcagaagcccggccagcctcctaagctgctgatctacgccgccagcaatctggaaagcggcgtgccaagcagattttccggctctggcagcggcaccgatttcaccctgacaatatccagcctccagcctgaggacgtggccgtgtactactgccagcagagcaacgacgaccctctgacctttggacagggcaccaaggtggaaatcaaaggcggaggcggaagtggaggcggaggatctggcggcggaggctctgaagtccaacttgtggagtctggagggggcctggtgcagcccggcggctctctcagactgtcttgtgcggcaagcggctacaccttcacctcttactggatagaatgggtgaggcaggcacctggaaagggactggagtggattggagagattctgccaggagggggagatacaaattacaatgaaatcttcaaggggcgggccaccttttcagcggataccagcaagaatacagcttacctgcagatgaatagcctccgggcagaagataccgctgtttattattgcacgagacgggtgccaataagactggactattgggggcaagggactcttgtcaccgtcagttcaacgcgtgaggaggacctgaagaacgtgttcccacctgaggtggccgtgttcgagcctagcgaggccgagatcagccacacccagaaagccaccctcgtgtgcctggctaccggcttctaccccgaccatgtggaactgtcttggtgggtcaacggcaaagaggtgcacagcggcgtgtgtaccgacccccagccactgaaagaacagcccgccctgaacgacagccggtactgcctgagcagcagactgagagtgtccgccaccttctggcagaacccccggaaccacttcagatgccaggtgcagttctacggcctgagcgagaacgacgagtggacccaggacagagccaagcccgtgacccagatcgtgtctgccgaagcctggggcagagccgatgatgtgattaagatccactggcaggaaaagaagtccaacaccatcctgggcagccaggaaggcaacaccatgaagaccaacgacacctacatgaagttcagctggctgaccgtgcccgagaagtccctggacaaagaacacagatgcatcgtgcggcacgaaaacaacaagaacggcgtggaccaggaaatcatcttcccacccatcaagaccgatgtgattacaatggaccccaaggacaactgctccaaggacgccaacgataccctgctgctccagctgaccaacaccagcgcctactacatgtacttgttgctgctgctgaagtccgtggtgtacttcgccatcatcacatgctgcctgctgcggagaaccgccttctgctgcaacggcgagaagtctcgcgccaagagaagcggatctggcgtgaagcagaccctgaatttcgacctgctgaagctggctggcgacgtggaatccaacccaggcccttctagaggccatatgaccgagtacaagcccacggtgcgcctcgccacccgcgacgacgtccccagggccgtacgcaccctcgccgccgcgttcgccgactaccccgccacgcgccacaccgtcgatccggaccgccacatcgagcgggtcaccgagctgcaagaactcttcctcacgcgcgtcgggctcgacatcggcaaggtgtgggtcgcggacgacggcgccgcggtggcggtctggaccacgccggagagcgtcgaagcgggggcggtgttcgccgagatcggcccgcgcatggccgagttgagcggttcccggctggccgcgcagcaacagatggaaggcctcctggcgccgcaccggcccaaggagcccgcgtggttcctggccaccgtcggcgtctcgcccgaccaccagggcaagggtctgggcagcgccgtcgtgctccccggagtggaggcggccgagcgcgccggggtgcccgccttcctggagacctccgcgccccgcaacctccccttctacgagcggctcggcttcaccgtcaccgccgacgtcgaggtgcccgaaggaccgcgcacctggtgcatgacccgcaagcccggtgcctga

SEQ ID NO: 6143 - DNA, 2613 bp, synthetic construct
  source 1..2613: mol_type = other DNA
atggccttaccagtgaccgccttgctcctgccgctggccttgctgctccacgccgccaggccgctcgaggaggacctgaagaacgtgttcccacctgaggtggccgtgttcgagcctagcgaggccgagatcagccacacccagaaagccaccctcgtgtgcctggctaccggcttctaccccgaccatgtggaactgtcttggtgggtcaacggcaaagaggtgcacagcggcgtgtctaccgacccccagccactgaaagaacagcccgccctgaacgacagccggtactgcctgagcagcagactgagagtgtccgccaccttctggcagaacccccggaaccacttcagatgccaggtgcagttctacggcctgagcgagaacgacgagtggacccaggacagagccaagcccgtgacccagatcgtgtctgccgaagcctggggcagagccgattgcggctttaccagcgagagctaccagcagggcgtgctgagcgccaccaacctgagcgtgatcggcttcagaatcctgctgctgaaagtggccggctttaacctgctgatgaccctgcggctgtggtccagcagggccaagcgatctggatctggagcaacaaacttctcactactcaaacaagcaggtgacgtggaggagaatcccgggcctactagcatggccttaccagtgaccgccttgctcctgccgctggccttgctgctccacgccgccaggccggacatcgtgatgacacagagccctgatagcctggccgtgtctctgggagagagagccaccattaactgcaaggccagccagagcgtggactacgacggcgacagcttcctgaactggtatcagcagaagcccggccagcctcctaagctgctgatctacgccgccagcaatctggaaagcggcgtgccaagcagattttccggctctggcagcggcaccgatttcaccctgacaatatccagcctccagcctgaggacgtggccgtgtactactgccagcagagcaacgacgaccctctgacctttggacagggcaccaaggtggaaatcaaaggcggaggcggaagtggaggcggaggatctggcggcggaggctctgaagtccaacttgtggagtctggagggggcctggtgcagcccggcggctctctcagactgtcttgtgcggcaagcggctacaccttcacctcttactggatagaatgggtgaggcaggcacctggaaagggactggagtggattggagagattctgccaggagggggagatacaaattacaatgaaatcttcaaggggcgggccaccttttcagcggataccagcaagaatacagcttacctgcagatgaatagcctccgggcagaagataccgctgtttattattgcacgagacgggtgccaataagactggactattgggggcaagggactcttgtcaccgtcagttcaacgcgtatccagaaccctgatcctgccgtgtaccagctgcgggatagcaagagcagcgacaagagcgtgtgtctgttcaccgacttcgacagccagaccaacgtgtcccagagcaaggactccgacgtgtacatcaccgataagaccgtgctggacatgcggagcatggacttcaagagcaactccgccgtggcctggtccaacaagtccgatttcgcctgcgccaacgccttcaacaacagcattatccccgaggacacattcttcccaagccccgagagcagctgcgacgtgaagctggtggaaaagagcttcgagacagacaccaacctgaacttccagatcctgtacgagatcctgctgggcaaggccaccctgtacgccgtgctggtgtctgccctggtgctgatggctatggtcaagcggaaggacagccggggacgcgccaagagaagcggatctggcgtgaagcagaccctgaatttcgacctgctgaagctggctggcgacgtggaatccaacccaggcccttctagaggccatatgaccgagtacaagcccacggtgcgcctcgccacccgcgacgacgtccccagggccgtacgcaccctcgccgccgcgttcgccgactaccccgccacgcgccacaccgtcgatccggaccgccacatcgagcgggtcaccgagctgcaagaactcttcctcacgcgcgtcgggctcgacatcggcaaggtgtgggtcgcggacgacggcgccgcggtggcggtctggaccacgccggagagcgtcgaagcgggggcggtgttcgccgagatcggcccgcgcatggccgagttgagcggttcccggctggccgcgcagcaacagatggaaggcctcctggcgccgcaccggcccaaggagcccgcgtggttcctggccaccgtcggcgtctcgcccgaccaccagggcaagggtctgggcagcgccgtcgtgctccccggagtggaggcggccgagcgcgccggggtgcccgccttcctggagacctccgcgccccgcaacctccccttctacgagcggctcggcttcaccgtcaccgccgacgtcgaggtgcccgaaggaccgcgcacctggtgcatgacccgcaagcccggtgcctga

SEQ ID NO: 6144 - DNA, 2613 bp, synthetic construct
  source 1..2613: mol_type = other DNA
atggccttaccagtgaccgccttgctcctgccgctggccttgctgctccacgccgccaggccgctcgagatccagaaccctgatcctgccgtgtaccagctgcgggatagcaagagcagcgacaagagcgtgtgtctgttcaccgacttcgacagccagaccaacgtgtcccagagcaaggactccgacgtgtacatcaccgataagaccgtgctggacatgcggagcatggacttcaagagcaactccgccgtggcctggtccaacaagtccgatttcgcctgcgccaacgccttcaacaacagcattatccccgaggacacattcttcccaagccccgagagcagctgcgacgtgaagctggtggaaaagagcttcgagacagacaccaacctgaacttccagatcctgtacgagatcctgctgggcaaggccaccctgtacgccgtgctggtgtctgccctggtgctgatggctatggtcaagcggaaggacagccggggaagggccaagcgatctggatctggagcaacaaacttctcactactcaaacaagcaggtgacgtggaggagaatcccgggcctactagcatggccttaccagtgaccgccttgctcctgccgctggccttgctgctccacgccgccaggccggacatcgtgatgacacagagccctgatagcctggccgtgtctctgggagagagagccaccattaactgcaaggccagccagagcgtggactacgacggcgacagcttcctgaactggtatcagcagaagcccggccagcctcctaagctgctgatctacgccgccagcaatctggaaagcggcgtgccaagcagattttccggctctggcagcggcaccgatttcaccctgacaatatccagcctccagcctgaggacgtggccgtgtactactgccagcagagcaacgacgaccctctgacctttggacagggcaccaaggtggaaatcaaaggcggaggcggaagtggaggcggaggatctggcggcggaggctctgaagtccaacttgtggagtctggagggggcctggtgcagcccggcggctctctcagactgtcttgtgcggcaagcggctacaccttcacctcttactggatagaatgggtgaggcaggcacctggaaagggactggagtggattggagagattctgccaggagggggagatacaaattacaatgaaatcttcaaggggcgggccaccttttcagcggataccagcaagaatacagcttacctgcagatgaatagcctccgggcagaagataccgctgtttattattgcacgagacgggtgccaataagactggactattgggggcaagggactcttgtcaccgtcagttcaacgcgtgaggacctgaagaacgtgttcccacctgaggtggccgtgttcgagcctagcgaggccgagatcagccacacccagaaagccaccctcgtgtgcctggctaccggcttctaccccgaccatgtggaactgtcttggtgggtcaacggcaaagaggtgcacagcggcgtgtctaccgacccccagccactgaaagaacagcccgccctgaacgacagccggtactgcctgagcagcagactgagagtgtccgccaccttctggcagaacccccggaaccacttcagatgccaggtgcagttctacggcctgagcgagaacgacgagtggacccaggacagagccaagcccgtgacccagatcgtgtctgccgaagcctggggcagagccgattgcggctttaccagcgagagctaccagcagggcgtgctgagcgccaccaacctgagcgtgatcggcttcagaatcctgctgctgaaagtggccggctttaacctgctgatgaccctgcggctgtggtccagccgcgccaagagaagcggatctggcgtgaagcagaccctgaatttcgacctgctgaagctggctggcgacgtggaatccaacccaggcccttctagaggccatatgaccgagtacaagcccacggtgcgcctcgccacccgcgacgacgtccccagggccgtacgcaccctcgccgccgcgttcgccgactaccccgccacgcgccacaccgtcgatccggaccgccacatcgagcgggtcaccgagctgcaagaactcttcctcacgcgcgtcgggctcgacatcggcaaggtgtgggtcgcggacgacggcgccgcggtggcggtctggaccacgccggagagcgtcgaagcgggggcggtgttcgccgagatcggcccgcgcatggccgagttgagcggttcccggctggccgcgcagcaacagatggaaggcctcctggcgccgcaccggcccaaggagcccgcgtggttcctggccaccgtcggcgtctcgcccgaccaccagggcaagggtctgggcagcgccgtcgtgctccccggagtggaggcggccgagcgcgccggggtgcccgccttcctggagacctccgcgccccgcaacctccccttctacgagcggctcggcttcaccgtcaccgccgacgtcgaggtgcccgaaggaccgcgcacctggtgcatgacccgcaagcccggtgcctga

SEQ ID NO: 6145 - DNA, 2613 bp, synthetic construct
  source 1..2613: mol_type = other DNA
atggccttaccagtgaccgccttgctcctgccgctggccttgctgctccacgccgccaggccgctcgaggaggacctgaagaacgtgttcccacctgaggtggccgtgttcgagcctagcgaggccgagatcagccacacccagaaagccaccctcgtgtgcctggctaccggcttctaccccgaccatgtggaactgtcttggtgggtcaacggcaaagaggtgcacagcggcgtgtgtaccgacccccagccactgaaagaacagcccgccctgaacgacagccggtactgcctgagcagcagactgagagtgtccgccaccttctggcagaacccccggaaccacttcagatgccaggtgcagttctacggcctgagcgagaacgacgagtggacccaggacagagccaagcccgtgacccagatcgtgtctgccgaagcctggggcagagccgattgcgacgtgaagctggtggaaaagagcttcgagacagacaccaacctgaacttccagaacctgagcgtgatcggcttcagaatcctgctgctgaaagtggccggctttaacctgctgatgaccctgcggctgtggtccagcagggccaagcgatctggatctggagcaacaaacttctcactactcaaacaagcaggtgacgtggaggagaatcccgggcctactagcatggccttaccagtgaccgccttgctcctgccgctggccttgctgctccacgccgccaggccggacatcgtgatgacacagagccctgatagcctggccgtgtctctgggagagagagccaccattaactgcaaggccagccagagcgtggactacgacggcgacagcttcctgaactggtatcagcagaagcccggccagcctcctaagctgctgatctacgccgccagcaatctggaaagcggcgtgccaagcagattttccggctctggcagcggcaccgatttcaccctgacaatatccagcctccagcctgaggacgtggccgtgtactactgccagcagagcaacgacgaccctctgacctttggacagggcaccaaggtggaaatcaaaggcggaggcggaagtggaggcggaggatctggcggcggaggctctgaagtccaacttgtggagtctggagggggcctggtgcagcccggcggctctctcagactgtcttgtgcggcaagcggctacaccttcacctcttactggatagaatgggtgaggcaggcacctggaaagggactggagtggattggagagattctgccaggagggggagatacaaattacaatgaaatcttcaaggggcgggccaccttttcagcggataccagcaagaatacagcttacctgcagatgaatagcctccgggcagaagataccgctgtttattattgcacgagacgggtgccaataagactggactattgggggcaagggactcttgtcaccgtcagttcaacgcgtatccagaaccctgatcctgccgtgtaccagctgcgggatagcaagagcagcgacaagagcgtgtgtctgttcaccgacttcgacagccagaccaacgtgtcccagagcaaggactccgacgtgtacatcaccgataagtgcgtgctggacatgcggagcatggacttcaagagcaactccgccgtggcctggtccaacaagtccgatttcgcctgcgccaacgccttcaacaacagcattatccccgaggacacattcttcccaagccccgagagcagctgcggctttaccagcgagagctaccagcagggcgtgctgagcgccaccatcctgtacgagatcctgctgggcaaggccaccctgtacgccgtgctggtgtctgccctggtgctgatggctatggtcaagcggaaggacagccggggacgcgccaagagaagcggatctggcgtgaagcagaccctgaatttcgacctgctgaagctggctggcgacgtggaatccaacccaggcccttctagaggccatatgaccgagtacaagcccacggtgcgcctcgccacccgcgacgacgtccccagggccgtacgcaccctcgccgccgcgttcgccgactaccccgccacgcgccacaccgtcgatccggaccgccacatcgagcgggtcaccgagctgcaagaactcttcctcacgcgcgtcgggctcgacatcggcaaggtgtgggtcgcggacgacggcgccgcggtggcggtctggaccacgccggagagcgtcgaagcgggggcggtgttcgccgagatcggcccgcgcatggccgagttgagcggttcccggctggccgcgcagcaacagatggaaggcctcctggcgccgcaccggcccaaggagcccgcgtggttcctggccaccgtcggcgtctcgcccgaccaccagggcaagggtctgggcagcgccgtcgtgctccccggagtggaggcggccgagcgcgccggggtgcccgccttcctggagacctccgcgccccgcaacctccccttctacgagcggctcggcttcaccgtcaccgccgacgtcgaggtgcccgaaggaccgcgcacctggtgcatgacccgcaagcccggtgcctga

SEQ ID NO: 6146 - DNA, 2613 bp, synthetic construct
  source 1..2613: mol_type = other DNA
atggccttaccagtgaccgccttgctcctgccgctggccttgctgctccacgccgccaggccgctcgaggaggacctgaagaacgtgttcccacctgaggtggccgtgttcgagcctagcgaggccgagatcagccacacccagaaagccaccctcgtgtgcctggctaccggcttctaccccgaccatgtggaactgtcttggtgggtcaacggcaaagaggtgcacagcggcgtgtctaccgacccccagccactgaaagaacagcccgccctgaacgacagccggtactgcctgagcagcagactgagagtgtccgccaccttctggcagaacccccggaaccacttcagatgccaggtgcagttctacggcctgagcgagaacgacgagtggacccaggacagagccaagcccgtgacccagatcgtgtctgccgaagcctggggcagagccgattgcgacgtgaagctggtggaaaagagcttcgagacagacaccaacctgaacttccagaacctgagcgtgatcggcttcagaatcctgctgctgaaagtggccggctttaacctgctgatgaccctgcggctgtggtccagcagggccaagcgatctggatctggagcaacaaacttctcactactcaaacaagcaggtgacgtggaggagaatcccgggcctactagcatggccttaccagtgaccgccttgctcctgccgctggccttgctgctccacgccgccaggccggacatcgtgatgacacagagccctgatagcctggccgtgtctctgggagagagagccaccattaactgcaaggccagccagagcgtggactacgacggcgacagcttcctgaactggtatcagcagaagcccggccagcctcctaagctgctgatctacgccgccagcaatctggaaagcggcgtgccaagcagattttccggctctggcagcggcaccgatttcaccctgacaatatccagcctccagcctgaggacgtggccgtgtactactgccagcagagcaacgacgaccctctgacctttggacagggcaccaaggtggaaatcaaaggcggaggcggaagtggaggcggaggatctggcggcggaggctctgaagtccaacttgtggagtctggagggggcctggtgcagcccggcggctctctcagactgtcttgtgcggcaagcggctacaccttcacctcttactggatagaatgggtgaggcaggcacctggaaagggactggagtggattggagagattctgccaggagggggagatacaaattacaatgaaatcttcaaggggcgggccaccttttcagcggataccagcaagaatacagcttacctgcagatgaatagcctccgggcagaagataccgctgtttattattgcacgagacgggtgccaataagactggactattgggggcaagggactcttgtcaccgtcagttcaacgcgtatccagaaccctgatcctgccgtgtaccagctgcgggatagcaagagcagcgacaagagcgtgtgtctgttcaccgacttcgacagccagaccaacgtgtcccagagcaaggactccgacgtgtacatcaccgataagaccgtgctggacatgcggagcatggacttcaagagcaactccgccgtggcctggtccaacaagtccgatttcgcctgcgccaacgccttcaacaacagcattatccccgaggacacattcttcccaagccccgagagcagctgcggctttaccagcgagagctaccagcagggcgtgctgagcgccaccatcctgtacgagatcctgctgggcaaggccaccctgtacgccgtgctggtgtctgccctggtgctgatggctatggtcaagcggaaggacagccggggacgcgccaagagaagcggatctggcgtgaagcagaccctgaatttcgacctgctgaagctggctggcgacgtggaatccaacccaggcccttctagaggccatatgaccgagtacaagcccacggtgcgcctcgccacccgcgacgacgtccccagggccgtacgcaccctcgccgccgcgttcgccgactaccccgccacgcgccacaccgtcgatccggaccgccacatcgagcgggtcaccgagctgcaagaactcttcctcacgcgcgtcgggctcgacatcggcaaggtgtgggtcgcggacgacggcgccgcggtggcggtctggaccacgccggagagcgtcgaagcgggggcggtgttcgccgagatcggcccgcgcatggccgagttgagcggttcccggctggccgcgcagcaacagatggaaggcctcctggcgccgcaccggcccaaggagcccgcgtggttcctggccaccgtcggcgtctcgcccgaccaccagggcaagggtctgggcagcgccgtcgtgctccccggagtggaggcggccgagcgcgccggggtgcccgccttcctggagacctccgcgccccgcaacctccccttctacgagcggctcggcttcaccgtcaccgccgacgtcgaggtgcccgaaggaccgcgcacctggtgcatgacccgcaagcccggtgcctga

SEQ ID NO: 6147 - DNA, 2922 bp, synthetic construct
  source 1..2922: mol_type = other DNA
atggccttaccagtgaccgccttgctcctgccgctggccttgctgctccacgccgccaggccgctcgaggaggaggacctgaagaacgtgttcccacctgaggtggccgtgttcgagcctagcgaggccgagatcagccacacccagaaagccaccctcgtgtgcctggctaccggcttctaccccgaccatgtggaactgtcttggtgggtcaacggcaaagaggtgcacagcggcgtgtctaccgacccccagccactgaaagaacagcccgccctgaacgacagccggtactgcctgagcagcagactgagagtgtccgccaccttctggcagaacccccggaaccacttcagatgccaggtgcagttctacggcctgagcgagaacgacgagtggacccaggacagagccaagcccgtgacccagatcgtgtctgccgaagcctggggcagagccgatgatgtgattaagatccactggcaggaaaagaagtccaacaccatcctgggcagccaggaaggcaacaccatgaagaccaacgacacctacatgaagttcagctggctgaccgtgcccgagaagtccctggacaaagaacacagatgcatcgtgcggcacgaaaacaacaagaacggcgtggaccaggaaatcatcttcccacccatcaagaccgatgtgattacaatggaccccaaggacaactgctccaaggacgccaacgataccctgctgctccagctgaccaacaccagcgcctactacatgtacttgttgctgctgctgaagtccgtggtgtacttcgccatcatcacatgctgcctgctgcggagaaccgccttctgctgcaacggcgagaagtctagggccaagcgatctggatctggagcaacaaacttctcactactcaaacaagcaggtgacgtggaggagaatcccgggcctactagcatggccttaccagtgaccgccttgctcctgccgctggccttgctgctccacgccgccaggccggacatcgtgatgacacagagccctgatagcctggccgtgtctctgggagagagagccaccattaactgcaaggccagccagagcgtggactacgacggcgacagcttcctgaactggtatcagcagaagcccggccagcctcctaagctgctgatctacgccgccagcaatctggaaagcggcgtgccaagcagattttccggctctggcagcggcaccgatttcaccctgacaatatccagcctccagcctgaggacgtggccgtgtactactgccagcagagcaacgacgaccctctgacctttggacagggcaccaaggtggaaatcaaaggcggaggcggaagtggaggcggaggatctggcggcggaggctctgaagtccaacttgtggagtctggagggggcctggtgcagcccggcggctctctcagactgtcttgtgcggcaagcggctacaccttcacctcttactggatagaatgggtgaggcaggcacctggaaagggactggagtggattggagagattctgccaggagggggagatacaaattacaatgaaatcttcaaggggcgggccaccttttcagcggataccagcaagaatacagcttacctgcagatgaatagcctccgggcagaagataccgctgtttattattgcacgagacgggtgccaataagactggactattgggggcaagggactcttgtcaccgtcagttcaacgcgtatccagaaccctgatcctgccgtgtaccagctgcgggatagcaagagcagcgacaagagcgtgtgtctgttcaccgacttcgacagccagaccaacgtgtcccagagcaaggactccgacgtgtacatcaccgataagaccgtgctggacatgcggagcatggacttcaagagcaactccgccgtggcctggtccaacaagtccgatttcgcctgcgccaacgccttcaacaacagcattatccccgaggacacattcttcccaagccccgagagcagcgactccaccgaccacgtgaagcccaaagagacagagaacaccaagcagcccagcaagagctgccacaagcccaaggccatcgtgcacaccgagaaagtgaacatgatgagcctgaccgtgctgggcctgcggatgctgttcgccaaaaccgtggccgtgaacttcctgctgaccgccaagctgttcttcctccgcgccaagagaagcggatctggcgtgaagcagaccctgaatttcgacctgctgaagctggctggcgacgtggaatccaacccaggcccttctagaggccatatgaccgagtacaagcccacggtgcgcctcgccacccgcgacgacgtccccagggccgtacgcaccctcgccgccgcgttcgccgactaccccgccacgcgccacaccgtcgatccggaccgccacatcgagcgggtcaccgagctgcaagaactcttcctcacgcgcgtcgggctcgacatcggcaaggtgtgggtcgcggacgacggcgccgcggtggcggtctggaccacgccggagagcgtcgaagcgggggcggtgttcgccgagatcggcccgcgcatggccgagttgagcggttcccggctggccgcgcagcaacagatggaaggcctcctggcgccgcaccggcccaaggagcccgcgtggttcctggccaccgtcggcgtctcgcccgaccaccagggcaagggtctgggcagcgccgtcgtgctccccggagtggaggcggccgagcgcgccggggtgcccgccttcctggagacctccgcgccccgcaacctccccttctacgagcggctcggcttcaccgtcaccgccgacgtcgaggtgcccgaaggaccgcgcacctggtgcatgacccgcaagcccggtgcctga

SEQ ID NO: 6148 - DNA, 2613 bp, synthetic construct
  source 1..2613: mol_type = other DNA
atggccttaccagtgaccgccttgctcctgccgctggccttgctgctccacgccgccaggccgctcgaggaggacctgaagaacgtgttcccacctgaggtggccgtgttcgagcctagcgaggccgagatcagccacacccagaaagccaccctcgtgtgcctggctaccggcttctaccccgaccatgtggaactgtcttggtgggtcaacggcaaagaggtgcacagcggcgtgtgtaccgacccccagccactgaaagaacagcccgccctgaacgacagccggtactgcctgagcagcagactgagagtgtccgccaccttctggcagaacccccggaaccacttcagatgccaggtgcagttctacggcctgagcgagaacgacgagtggacccaggacagagccaagcccgtgacccagatcgtgtctgccgaagcctggggcagagccgattgcggctttaccagcgagagctaccagcagggcgtgctgagcgccaccaacctgagcgtgatcggcttcagaatcctgctgctgaaagtggccggctttaacctgctgatgaccctgcggctgtggtccagcagggccaagcgatctggatctggagcaacaaacttctcactactcaaacaagcaggtgacgtggaggagaatcccgggcctactagcatggccttaccagtgaccgccttgctcctgccgctggccttgctgctccacgccgccaggccggacatcgtgatgacacagagccctgatagcctggccgtgtctctgggagagagagccaccattaactgcaaggccagccagagcgtggactacgacggcgacagcttcctgaactggtatcagcagaagcccggccagcctcctaagctgctgatctacgccgccagcaatctggaaagcggcgtgccaagcagattttccggctctggcagcggcaccgatttcaccctgacaatatccagcctccagcctgaggacgtggccgtgtactactgccagcagagcaacgacgaccctctgacctttggacagggcaccaaggtggaaatcaaaggcggaggcggaagtggaggcggaggatctggcggcggaggctctgaagtccaacttgtggagtctggagggggcctggtgcagcccggcggctctctcagactgtcttgtgcggcaagcggctacaccttcacctcttactggatagaatgggtgaggcaggcacctggaaagggactggagtggattggagagattctgccaggagggggagatacaaattacaatgaaatcttcaaggggcgggccaccttttcagcggataccagcaagaatacagcttacctgcagatgaatagcctccgggcagaagataccgctgtttattattgcacgagacgggtgccaataagactggactattgggggcaagggactcttgtcaccgtcagttcaacgcgtatccagaaccctgatcctgccgtgtaccagctgcgggatagcaagagcagcgacaagagcgtgtgtctgttcaccgacttcgacagccagaccaacgtgtcccagagcaaggactccgacgtgtacatcaccgataagtgcgtgctggacatgcggagcatggacttcaagagcaactccgccgtggcctggtccaacaagtccgatttcgcctgcgccaacgccttcaacaacagcattatccccgaggacacattcttcccaagccccgagagcagctgcgacgtgaagctggtggaaaagagcttcgagacagacaccaacctgaacttccagatcctgtacgagatcctgctgggcaaggccaccctgtacgccgtgctggtgtctgccctggtgctgatggctatggtcaagcggaaggacagccggggacgcgccaagagaagcggatctggcgtgaagcagaccctgaatttcgacctgctgaagctggctggcgacgtggaatccaacccaggcccttctagaggccatatgaccgagtacaagcccacggtgcgcctcgccacccgcgacgacgtccccagggccgtacgcaccctcgccgccgcgttcgccgactaccccgccacgcgccacaccgtcgatccggaccgccacatcgagcgggtcaccgagctgcaagaactcttcctcacgcgcgtcgggctcgacatcggcaaggtgtgggtcgcggacgacggcgccgcggtggcggtctggaccacgccggagagcgtcgaagcgggggcggtgttcgccgagatcggcccgcgcatggccgagttgagcggttcccggctggccgcgcagcaacagatggaaggcctcctggcgccgcaccggcccaaggagcccgcgtggttcctggccaccgtcggcgtctcgcccgaccaccagggcaagggtctgggcagcgccgtcgtgctccccggagtggaggcggccgagcgcgccggggtgcccgccttcctggagacctccgcgccccgcaacctccccttctacgagcggctcggcttcaccgtcaccgccgacgtcgaggtgcccgaaggaccgcgcacctggtgcatgacccgcaagcccggtgcctga

SEQ ID NO: 6149 - DNA, 2700 bp, synthetic construct
  source 1..2700: mol_type = other DNA
atggccttaccagtgaccgccttgctcctgccgctggccttgctgctccacgccgccaggccgctcgaggaggaggacctgaagaacgtgttcccacctgaggtggccgtgttcgagcctagcgaggccgagatcagccacacccagaaagccaccctcgtgtgcctggctaccggcttctaccccgaccatgtggaactgtcttggtgggtcaacggcaaagaggtgcacagcggcgtgtgtaccgacccccagccactgaaagaacagcccgccctgaacgacagccggtactgcctgagcagcagactgagagtgtccgccaccttctggcagaacccccggaaccacttcagatgccaggtgcagttctacggcctgagcgagaacgacgagtggacccaggacagagccaagcccgtgacccagatcgtgtctgccgaagcctggggcagagccgattgcggctttaccagcgagagctaccagcagggcgtgctgagcgccaccaacctgagcgtgatcggcttcagaatcctgctgctgaaagtggccggctttaacctgctgatgaccctgcggctgtggtccagcagggccaagcgatctggatctggagcaacaaacttctcactactcaaacaagcaggtgacgtggaggagaatcccgggcctactagcatggccttaccagtgaccgccttgctcctgccgctggccttgctgctccacgccgccaggccggacatcgtgatgacacagagccctgatagcctggccgtgtctctgggagagagagccaccattaactgcaaggccagccagagcgtggactacgacggcgacagcttcctgaactggtatcagcagaagcccggccagcctcctaagctgctgatctacgccgccagcaatctggaaagcggcgtgccaagcagattttccggctctggcagcggcaccgatttcaccctgacaatatccagcctccagcctgaggacgtggccgtgtactactgccagcagagcaacgacgaccctctgacctttggacagggcaccaaggtggaaatcaaaggcggaggcggaagtggaggcggaggatctggcggcggaggctctgaagtccaacttgtggagtctggagggggcctggtgcagcccggcggctctctcagactgtcttgtgcggcaagcggctacaccttcacctcttactggatagaatgggtgaggcaggcacctggaaagggactggagtggattggagagattctgccaggagggggagatacaaattacaatgaaatcttcaaggggcgggccaccttttcagcggataccagcaagaatacagcttacctgcagatgaatagcctccgggcagaagataccgctgtttattattgcacgagacgggtgccaataagactggactattgggggcaagggactcttgtcaccgtcagttcaacgcgtggacagcctaaggccaatcctaccgtgacactgttccctccaagcagcgaagaactccaggccaacaaggccacacttgtgtgcctgatctccgacttctaccctggggctgtgacagtggcttggaaggccgatggatctcctgtgaaagccggcgtggaaaccaccaagccatccaagcagagcaacaacaaatacgccgccagctcctacctgagcctgacacctgagcagtggaagtcccacagatcctacagctgccaagtgacccacgaaggcagcaccgtggaaaagacagtggcccctacagagtgcagccccatcaagaccgatgtgattacaatggaccccaaggacaactgctccaaggacgccaacgataccctgctgctccagctgaccaacaccagcgcctactacatgtacttgttgctgctgctgaagtccgtggtgtacttcgccatcatcacatgctgcctgctgcggagaaccgccttctgctgcaacggcgagaagtctcgcgccaagagaagcggatctggcgtgaagcagaccctgaatttcgacctgctgaagctggctggcgacgtggaatccaacccaggcccttctagaggccatatgaccgagtacaagcccacggtgcgcctcgccacccgcgacgacgtccccagggccgtacgcaccctcgccgccgcgttcgccgactaccccgccacgcgccacaccgtcgatccggaccgccacatcgagcgggtcaccgagctgcaagaactcttcctcacgcgcgtcgggctcgacatcggcaaggtgtgggtcgcggacgacggcgccgcggtggcggtctggaccacgccggagagcgtcgaagcgggggcggtgttcgccgagatcggcccgcgcatggccgagttgagcggttcccggctggccgcgcagcaacagatggaaggcctcctggcgccgcaccggcccaaggagcccgcgtggttcctggccaccgtcggcgtctcgcccgaccaccagggcaagggtctgggcagcgccgtcgtgctccccggagtggaggcggccgagcgcgccggggtgcccgccttcctggagacctccgcgccccgcaacctccccttctacgagcggctcggcttcaccgtcaccgccgacgtcgaggtgcccgaaggaccgcgcacctggtgcatgacccgcaagcccggtgcctga

SEQ ID NO: 6150 - DNA, 2700 bp, synthetic construct
  source 1..2700: mol_type = other DNA
atggccttaccagtgaccgccttgctcctgccgctggccttgctgctccacgccgccaggccgctcgagggacagcctaaggccaatcctaccgtgacactgttccctccaagcagcgaagaactccaggccaacaaggccacacttgtgtgcctgatctccgacttctaccctggggctgtgacagtggcttggaaggccgatggatctcctgtgaaagccggcgtggaaaccaccaagccatccaagcagagcaacaacaaatacgccgccagctcctacctgagcctgacacctgagcagtggaagtcccacagatcctacagctgccaagtgacccacgaaggcagcaccgtggaaaagacagtggcccctacagagtgcagccccatcaagaccgatgtgattacaatggaccccaaggacaactgctccaaggacgccaacgataccctgctgctccagctgaccaacaccagcgcctactacatgtacttgttgctgctgctgaagtccgtggtgtacttcgccatcatcacatgctgcctgctgcggagaaccgccttctgctgcaacggcgagaagtctagggccaagcgatctggatctggagcaacaaacttctcactactcaaacaagcaggtgacgtggaggagaatcccgggcctactagcatggccttaccagtgaccgccttgctcctgccgctggccttgctgctccacgccgccaggccggacatcgtgatgacacagagccctgatagcctggccgtgtctctgggagagagagccaccattaactgcaaggccagccagagcgtggactacgacggcgacagcttcctgaactggtatcagcagaagcccggccagcctcctaagctgctgatctacgccgccagcaatctggaaagcggcgtgccaagcagattttccggctctggcagcggcaccgatttcaccctgacaatatccagcctccagcctgaggacgtggccgtgtactactgccagcagagcaacgacgaccctctgacctttggacagggcaccaaggtggaaatcaaaggcggaggcggaagtggaggcggaggatctggcggcggaggctctgaagtccaacttgtggagtctggagggggcctggtgcagcccggcggctctctcagactgtcttgtgcggcaagcggctacaccttcacctcttactggatagaatgggtgaggcaggcacctggaaagggactggagtggattggagagattctgccaggagggggagatacaaattacaatgaaatcttcaaggggcgggccaccttttcagcggataccagcaagaatacagcttacctgcagatgaatagcctccgggcagaagataccgctgtttattattgcacgagacgggtgccaataagactggactattgggggcaagggactcttgtcaccgtcagttcaacgcgtgaggaggacctgaagaacgtgttcccacctgaggtggccgtgttcgagcctagcgaggccgagatcagccacacccagaaagccaccctcgtgtgcctggctaccggcttctaccccgaccatgtggaactgtcttggtgggtcaacggcaaagaggtgcacagcggcgtgtgtaccgacccccagccactgaaagaacagcccgccctgaacgacagccggtactgcctgagcagcagactgagagtgtccgccaccttctggcagaacccccggaaccacttcagatgccaggtgcagttctacggcctgagcgagaacgacgagtggacccaggacagagccaagcccgtgacccagatcgtgtctgccgaagcctggggcagagccgattgcggctttaccagcgagagctaccagcagggcgtgctgagcgccaccaacctgagcgtgatcggcttcagaatcctgctgctgaaagtggccggctttaacctgctgatgaccctgcggctgtggtccagccgcgccaagagaagcggatctggcgtgaagcagaccctgaatttcgacctgctgaagctggctggcgacgtggaatccaacccaggcccttctagaggccatatgaccgagtacaagcccacggtgcgcctcgccacccgcgacgacgtccccagggccgtacgcaccctcgccgccgcgttcgccgactaccccgccacgcgccacaccgtcgatccggaccgccacatcgagcgggtcaccgagctgcaagaactcttcctcacgcgcgtcgggctcgacatcggcaaggtgtgggtcgcggacgacggcgccgcggtggcggtctggaccacgccggagagcgtcgaagcgggggcggtgttcgccgagatcggcccgcgcatggccgagttgagcggttcccggctggccgcgcagcaacagatggaaggcctcctggcgccgcaccggcccaaggagcccgcgtggttcctggccaccgtcggcgtctcgcccgaccaccagggcaagggtctgggcagcgccgtcgtgctccccggagtggaggcggccgagcgcgccggggtgcccgccttcctggagacctccgcgccccgcaacctccccttctacgagcggctcggcttcaccgtcaccgccgacgtcgaggtgcccgaaggaccgcgcacctggtgcatgacccgcaagcccggtgcctga

SEQ ID NO: 6151 - DNA, 2691 bp, synthetic construct
  source 1..2691: mol_type = other DNA
atggccttaccagtgaccgccttgctcctgccgctggccttgctgctccacgccgccaggccgctcgaggaggcctctacaaagggaccctccgtgtttcctctggctcccagcagcaagtctacaagcggaggaacagccgctctgggctgcctggtcaaggattactttcccgagcctgtgaccgtgtcctggaatagcggagcactgacaagcggcgtgcacacctttccagccgtgctgcaaagcagcggcctgtactctctgagcagcgtggtcacagtgcctagctctagcctgggcacccagacctacatctgcaatgtgaaccacaagcctagcaacaccaaggtggacaagagagtggaacccaagagctgtcccatcaagaccgatgtgattacaatggaccccaaggacaactgctccaaggacgccaacgataccctgctgctccagctgaccaacaccagcgcctactacatgtacttgttgctgctgctgaagtccgtggtgtacttcgccatcatcacatgctgcctgctgcggagaaccgccttctgctgcaacggcgagaagtctagggccaagcgatctggatctggagcaacaaacttctcactactcaaacaagcaggtgacgtggaggagaatcccgggcctactagcatggccttaccagtgaccgccttgctcctgccgctggccttgctgctccacgccgccaggccggacatcgtgatgacacagagccctgatagcctggccgtgtctctgggagagagagccaccattaactgcaaggccagccagagcgtggactacgacggcgacagcttcctgaactggtatcagcagaagcccggccagcctcctaagctgctgatctacgccgccagcaatctggaaagcggcgtgccaagcagattttccggctctggcagcggcaccgatttcaccctgacaatatccagcctccagcctgaggacgtggccgtgtactactgccagcagagcaacgacgaccctctgacctttggacagggcaccaaggtggaaatcaaaggcggaggcggaagtggaggcggaggatctggcggcggaggctctgaagtccaacttgtggagtctggagggggcctggtgcagcccggcggctctctcagactgtcttgtgcggcaagcggctacaccttcacctcttactggatagaatgggtgaggcaggcacctggaaagggactggagtggattggagagattctgccaggagggggagatacaaattacaatgaaatcttcaaggggcgggccaccttttcagcggataccagcaagaatacagcttacctgcagatgaatagcctccgggcagaagataccgctgtttattattgcacgagacgggtgccaataagactggactattgggggcaagggactcttgtcaccgtcagttcaacgcgtggacagcctaaggccaatcctaccgtgacactgttccctccaagcagcgaagaactccaggccaacaaggccacacttgtgtgcctgatctccgacttctaccctggggctgtgacagtggcttggaaggccgatggatctcctgtgaaagccggcgtggaaaccaccaagccatccaagcagagcaacaacaaatacgccgccagctcctacctgagcctgacacctgagcagtggaagtcccacagatcctacagctgccaagtgacccacgaaggcagcaccgtggaaaagacagtggcccctacagagtgcagcgaagtgaaaaccgactccaccgaccacgtgaagcccaaagagacagagaacaccaagcagcccagcaagagctgccacaagcccaaggccatcgtgcacaccgagaaagtgaacatgatgagcctgaccgtgctgggcctgcggatgctgttcgccaaaaccgtggccgtgaacttcctgctgaccgccaagctgttcttcctccgcgccaagagaagcggatctggcgtgaagcagaccctgaatttcgacctgctgaagctggctggcgacgtggaatccaacccaggcccttctagaggccatatgaccgagtacaagcccacggtgcgcctcgccacccgcgacgacgtccccagggccgtacgcaccctcgccgccgcgttcgccgactaccccgccacgcgccacaccgtcgatccggaccgccacatcgagcgggtcaccgagctgcaagaactcttcctcacgcgcgtcgggctcgacatcggcaaggtgtgggtcgcggacgacggcgccgcggtggcggtctggaccacgccggagagcgtcgaagcgggggcggtgttcgccgagatcggcccgcgcatggccgagttgagcggttcccggctggccgcgcagcaacagatggaaggcctcctggcgccgcaccggcccaaggagcccgcgtggttcctggccaccgtcggcgtctcgcccgaccaccagggcaagggtctgggcagcgccgtcgtgctccccggagtggaggcggccgagcgcgccggggtgcccgccttcctggagacctccgcgccccgcaacctccccttctacgagcggctcggcttcaccgtcaccgccgacgtcgaggtgcccgaaggaccgcgcacctggtgcatgacccgcaagcccggtgcctga

SEQ ID NO: 6152 - DNA, 2625 bp, synthetic construct
  source 1..2625: mol_type = other DNA
atggccttaccagtgaccgccttgctcctgccgctggccttgctgctccacgccgccaggccgctcgaggaggcctctacaaagggaccctccgtgtttcctctggctcccagcagcaagtctacaagcggaggaacagccgctctgggctgcctggtcaaggattactttcccgagcctgtgaccgtgtcctggaatagcggagcactgacaagcggcgtgcacacctttccagccgtgctgcaaagcagcggcctgtactctctgagcagcgtggtcacagtgcctagctctagcctgggcacccagacctacatctgcaatgtgaaccacaagcctagcaacaccaaggtggacaagagagtggaacccaagagctgtggcagagccgattgcggctttaccagcgagagctaccagcagggcgtgctgagcgccaccatcctgtacgagatcctgctgggcaaggccaccctgtacgccgtgctggtgtctgccctggtgctgatggctatggtcaagcggaaggacagccggggaagggccaagcgatctggatctggagcaacaaacttctcactactcaaacaagcaggtgacgtggaggagaatcccgggcctactagcatggccttaccagtgaccgccttgctcctgccgctggccttgctgctccacgccgccaggccggacatcgtgatgacacagagccctgatagcctggccgtgtctctgggagagagagccaccattaactgcaaggccagccagagcgtggactacgacggcgacagcttcctgaactggtatcagcagaagcccggccagcctcctaagctgctgatctacgccgccagcaatctggaaagcggcgtgccaagcagattttccggctctggcagcggcaccgatttcaccctgacaatatccagcctccagcctgaggacgtggccgtgtactactgccagcagagcaacgacgaccctctgacctttggacagggcaccaaggtggaaatcaaaggcggaggcggaagtggaggcggaggatctggcggcggaggctctgaagtccaacttgtggagtctggagggggcctggtgcagcccggcggctctctcagactgtcttgtgcggcaagcggctacaccttcacctcttactggatagaatgggtgaggcaggcacctggaaagggactggagtggattggagagattctgccaggagggggagatacaaattacaatgaaatcttcaaggggcgggccaccttttcagcggataccagcaagaatacagcttacctgcagatgaatagcctccgggcagaagataccgctgtttattattgcacgagacgggtgccaataagactggactattgggggcaagggactcttgtcaccgtcagttcaacgcgtggacagcctaaggccaatcctaccgtgacactgttccctccaagcagcgaagaactccaggccaacaaggccacacttgtgtgcctgatctccgacttctaccctggggctgtgacagtggcttggaaggccgatggatctcctgtgaaagccggcgtggaaaccaccaagccatccaagcagagcaacaacaaatacgccgccagctcctacctgagcctgacacctgagcagtggaagtcccacagatcctacagctgccaagtgacccacgaaggcagcaccgtggaaaagacagtggcccctacagagtgcagcatccccgaggacacattcttcccaagccccgagagcagctgcgacgtgaagctggtggaaaagagcttcgagacagacaccaacctgaacttccagaacctgagcgtgatcggcttcagaatcctgctgctgaaagtggccggctttaacctgctgatgaccctgcggctgtggtccagccgcgccaagagaagcggatctggcgtgaagcagaccctgaatttcgacctgctgaagctggctggcgacgtggaatccaacccaggcccttctagaggccatatgaccgagtacaagcccacggtgcgcctcgccacccgcgacgacgtccccagggccgtacgcaccctcgccgccgcgttcgccgactaccccgccacgcgccacaccgtcgatccggaccgccacatcgagcgggtcaccgagctgcaagaactcttcctcacgcgcgtcgggctcgacatcggcaaggtgtgggtcgcggacgacggcgccgcggtggcggtctggaccacgccggagagcgtcgaagcgggggcggtgttcgccgagatcggcccgcgcatggccgagttgagcggttcccggctggccgcgcagcaacagatggaaggcctcctggcgccgcaccggcccaaggagcccgcgtggttcctggccaccgtcggcgtctcgcccgaccaccagggcaagggtctgggcagcgccgtcgtgctccccggagtggaggcggccgagcgcgccggggtgcccgccttcctggagacctccgcgccccgcaacctccccttctacgagcggctcggcttcaccgtcaccgccgacgtcgaggtgcccgaaggaccgcgcacctggtgcatgacccgcaagcccggtgcctga

SEQ ID NO: 6153 - DNA, 2625 bp, synthetic construct
  source 1..2625: mol_type = other DNA
atggccttaccagtgaccgccttgctcctgccgctggccttgctgctccacgccgccaggccgctcgaggaggcctctacaaagggaccctccgtgtttcctctggctcccagcagcaagtctacaagcggaggaacagccgctctgggctgcctggtcaaggattactttcccgagcctgtgaccgtgtcctggaatagcggagcactgacaagcggcgtgcacacctttccagccgtgctgcaaagcagcggcctgtactctctgagcagcgtggtcacagtgcctagctctagcctgggcacccagacctacatctgcaatgtgaaccacaagcctagcaacaccaaggtggacaagagagtggaacccaagagctgtatccccgaggacacattcttcccaagccccgagagcagctgcgacgtgaagctggtggaaaagagcttcgagacagacaccaacctgaacttccagaacctgagcgtgatcggcttcagaatcctgctgctgaaagtggccggctttaacctgctgatgaccctgcggctgtggtccagcagggccaagcgatctggatctggagcaacaaacttctcactactcaaacaagcaggtgacgtggaggagaatcccgggcctactagcatggccttaccagtgaccgccttgctcctgccgctggccttgctgctccacgccgccaggccggacatcgtgatgacacagagccctgatagcctggccgtgtctctgggagagagagccaccattaactgcaaggccagccagagcgtggactacgacggcgacagcttcctgaactggtatcagcagaagcccggccagcctcctaagctgctgatctacgccgccagcaatctggaaagcggcgtgccaagcagattttccggctctggcagcggcaccgatttcaccctgacaatatccagcctccagcctgaggacgtggccgtgtactactgccagcagagcaacgacgaccctctgacctttggacagggcaccaaggtggaaatcaaaggcggaggcggaagtggaggcggaggatctggcggcggaggctctgaagtccaacttgtggagtctggagggggcctggtgcagcccggcggctctctcagactgtcttgtgcggcaagcggctacaccttcacctcttactggatagaatgggtgaggcaggcacctggaaagggactggagtggattggagagattctgccaggagggggagatacaaattacaatgaaatcttcaaggggcgggccaccttttcagcggataccagcaagaatacagcttacctgcagatgaatagcctccgggcagaagataccgctgtttattattgcacgagacgggtgccaataagactggactattgggggcaagggactcttgtcaccgtcagttcaacgcgtggacagcctaaggccaatcctaccgtgacactgttccctccaagcagcgaagaactccaggccaacaaggccacacttgtgtgcctgatctccgacttctaccctggggctgtgacagtggcttggaaggccgatggatctcctgtgaaagccggcgtggaaaccaccaagccatccaagcagagcaacaacaaatacgccgccagctcctacctgagcctgacacctgagcagtggaagtcccacagatcctacagctgccaagtgacccacgaaggcagcaccgtggaaaagacagtggcccctacagagtgcagcggcagagccgattgcggctttaccagcgagagctaccagcagggcgtgctgagcgccaccatcctgtacgagatcctgctgggcaaggccaccctgtacgccgtgctggtgtctgccctggtgctgatggctatggtcaagcggaaggacagccggggacgcgccaagagaagcggatctggcgtgaagcagaccctgaatttcgacctgctgaagctggctggcgacgtggaatccaacccaggcccttctagaggccatatgaccgagtacaagcccacggtgcgcctcgccacccgcgacgacgtccccagggccgtacgcaccctcgccgccgcgttcgccgactaccccgccacgcgccacaccgtcgatccggaccgccacatcgagcgggtcaccgagctgcaagaactcttcctcacgcgcgtcgggctcgacatcggcaaggtgtgggtcgcggacgacggcgccgcggtggcggtctggaccacgccggagagcgtcgaagcgggggcggtgttcgccgagatcggcccgcgcatggccgagttgagcggttcccggctggccgcgcagcaacagatggaaggcctcctggcgccgcaccggcccaaggagcccgcgtggttcctggccaccgtcggcgtctcgcccgaccaccagggcaagggtctgggcagcgccgtcgtgctccccggagtggaggcggccgagcgcgccggggtgcccgccttcctggagacctccgcgccccgcaacctccccttctacgagcggctcggcttcaccgtcaccgccgacgtcgaggtgcccgaaggaccgcgcacctggtgcatgacccgcaagcccggtgcctga

SEQ ID NO: 6154 - DNA, 1860 bp, synthetic construct
  source 1..1860: mol_type = other DNA
atggccttaccagtgaccgccttgctcctgccgctggccttgctgctccacgccgccaggccggacatcgtgatgacacagagccctgatagcctggccgtgtctctgggagagagagccaccattaactgcaaggccagccagagcgtggactacgacggcgacagcttcctgaactggtatcagcagaagcccggccagcctcctaagctgctgatctacgccgccagcaatctggaaagcggcgtgccaagcagattttccggctctggcagcggcaccgatttcaccctgacaatatccagcctccagcctgaggacgtggccgtgtactactgccagcagagcaacgacgaccctctgacctttggacagggcaccaaggtggaaatcaaactcgaggacctgaagaacgtgttcccacctgaggtggccgtgttcgagcctagcgaggccgagatcagccacacccagaaagccaccctcgtgtgcctggctaccggcttctaccccgaccatgtggaactgtcttggtgggtcaacggcaaagaggtgcacagcggcgtgtgtaccgacccccagccactgaaagaacagcccgccctgaacgacagccggtactgcctgagcagcagactgagagtgtccgccaccttctggcagaacccccggaaccacttcagatgccaggtgcagttctacggcctgagcgagaacgacgagtggacccaggacagagccaagcccgtgacccagatcgtgtctgccgaagcctggggcagagccgatagcggctttaccagcgagagctaccagcagggcgtgctgagcgccaccatcctgtacgagatcctgctgggcaaggccaccctgtacgccgtgctggtgtctgccctggtgctgatggctatggtcaagcggaaggacagccggggaagggccaagcgatctggatctggagcaacaaacttctcactactcaaacaagcaggtgacgtggaggagaatcccgggcctactagtatggactggatttggcgcatccttttccttgtcggcgctgctaccggcgcgcattccttcgaagtccaacttgtggagtctggagggggcctggtgcagcccggcggctctctcagactgtcttgtgcggcaagcggctacaccttcacctcttactggatagaatgggtgaggcaggcacctggaaagggactggagtggattggagagattctgccaggagggggagatacaaattacaatgaaatcttcaaggggcgggccaccttttcagcggataccagcaagaatacagcttacctgcagatgaatagcctccgggcagaagataccgctgtttattattgcacgagacgggtgccaataagactggactattgggggcaagggactcttgtcaccgtcagttcaacgcgtatccagaaccctgatcctgccgtgtaccagctgcgggatagcaagagcagcgacaagagcgtgtgtctgttcaccgacttcgacagccagaccaacgtgtcccagagcaaggactccgacgtgtacatcaccgataagtgcgtgctggacatgcggagcatggacttcaagagcaactccgccgtggcctggtccaacaagtccgatttcgcctgcgccaacgccttcaacaacagcattatccccgaggacacattcttcccaagccccgagagcagcagcgacgtgaagctggtggaaaagagcttcgagacagacaccaacctgaacttccagaacctgagcgtgatcggcttcagaatcctgctgctgaaagtggccggctttaacctgctgatgaccctgcggctgtggtccagc

SEQ ID NO: 6155 - DNA, 2700 bp, synthetic construct
  source 1..2700: mol_type = other DNA
atggccttaccagtgaccgccttgctcctgccgctggccttgctgctccacgccgccaggccggaggttcagctgcttgagtctggcggaggactggttcaacctggcggaagcctgagactgtcttgtgccgcctctggcagaaccttcagcatgggctggtatagacaggcccctggcaagggcctcgaatttgtgtctgccatcacatacagcggcggcagcccttactacgccgattctgtgaagggcagattcaccatcagccgggacaacagcaagaacaccgtgtacctccagatgaacagcctgagagccgaggacaccgccgtgtactactgtgccgccaatccaacctacggcagcgactggaatgccgagaattggggccagggcacactggtcacagtgtctagtggtaccggcggaggcggatctggcggcggaggtagcggtggcggaggatctgaattcgacatcgtgatgacacagagccctgatagcctggccgtgtctctgggagagagagccaccattaactgcaaggccagccagagcgtggactacgacggcgacagcttcctgaactggtatcagcagaagcccggccagcctcctaagctgctgatctacgccgccagcaatctggaaagcggcgtgccaagcagattttccggctctggcagcggcaccgatttcaccctgacaatatccagcctccagcctgaggacgtggccgtgtactactgccagcagagcaacgacgaccctctgacctttggacagggcaccaaggtggaaatcaaactcgagatccagaaccctgatcctgccgtgtaccagctgcgggatagcaagagcagcgacaagagcgtgtgtctgttcaccgacttcgacagccagaccaacgtgtcccagagcaaggactccgacgtgtacatcaccgataagtgcgtgctggacatgcggagcatggacttcaagagcaactccgccgtggcctggtccaacaagtccgatttcgcctgcgccaacgccttcaacaacagcattatccccgaggacacattcttcccaagcagcgacgtgccctgcgacgtgaagctggtggaaaagagcttcgagacagacaccaacctgaacttccagaacctgagcgtgatcggcttcagaatcctgctgctgaaagtggccggctttaacctgctgatgaccctgcggctgtggtccagccgcgccaagagaagcggatctggcgtgaagcagaccctgaatttcgacctgctgaagctggctggcgacgtggaatccaacccaggccctactagtaccatggactggatttggcgcatccttttccttgtcggcgctgctaccggcacccattccgggcccgaagtgcaactggttgaatccggtggcggcctggtgcaacccggcggatctctcagacttagctgtgccgcctccggcagaaccttcacaatgggatggtacaggcaggctccagggaaagagagagagttcgtcgccgccatctctctgtctcccacactggcctactacgccgactctgtgaaaggccggttcaccatctccagagataatagcaagaacaccgtggtgctgcaaatgaactctctgagagccgaggatacagccctgtactattgtgccgctgaccggaagtccgtgatgagcatcagacccgattactggggacagggcacactggtcacagtgtctagtggatccggcggcggaggatctggcggaggcggatctgggggcggaggctctttcgaagtccaacttgtggagtctggagggggcctggtgcagcccggcggctctctcagactgtcttgtgcggcaagcggctacaccttcacctcttactggatagaatgggtgaggcaggcacctggaaagggactggagtggattggagagattctgccaggagggggagatacaaattacaatgaaatcttcaaggggcgggccaccttttcagcggataccagcaagaatacagcttacctgcagatgaatagcctccgggcagaagataccgctgtttattattgcacgagacgggtgccaataagactggactattgggggcaagggactcttgtcaccgtcagttcaacgcgtgaggacctgaagaacgtgttcccacctgaggtggccgtgttcgagcctagcaaggccgagatcgcccacacccagaaagccaccctcgtgtgcctggctaccggcttctaccccgaccatgtggaactgtcttggtgggtcaacggcaaagaggtgcacagcggcgtgtgtaccgacccccagccactgaaagaacagcccgccctgaacgacagccggtactgcctgagcagcagactgagagtgtccgccaccttctggcagaacccccggaaccacttcagatgccaggtgcagttctacggcctgagcgagaacgacgagtggacccaggacagagccaagcccgtgacccagatcgtgtctgccgaagcctggggcagagccgattgcggcatcaccagcgccagctaccaccagggcgtgctgagcgccaccatcctgtacgagatcctgctgggcaaggccaccctgtacgccgtgctggtgtctgccctggtgctgatggctatggtcaagcggaaggacagccggggataa

SEQ ID NO: 6156 - DNA, 2700 bp, synthetic construct
  source 1..2700: mol_type = other DNA
atggccttaccagtgaccgccttgctcctgccgctggccttgctgctccacgccgccaggccggaagtgcagctggttgaatctggcggaggactggttcaggctggcggatctctgagactgtcttgtgccgccagcggcagaacctttagcatgggctggtttagacaggcccctggcaaagagagagagttcgtcgccgccatcacatactctggcggcagcccttactacgccgactctgtgaagggcagattcaccatcagccgggacaacgccaagaacaccgtgtacctccagatgaacagcctgaagcctgaggacaccgccgtgtactactgcgccgccaatccaacatacggcagcgactggaacgccgagaattggggccagggaacccaagtgacagtgtctagcggtaccggcggaggcggatctggcggcggaggtagcggtggcggaggatctgaattcgacatcgtgatgacacagagccctgatagcctggccgtgtctctgggagagagagccaccattaactgcaaggccagccagagcgtggactacgacggcgacagcttcctgaactggtatcagcagaagcccggccagcctcctaagctgctgatctacgccgccagcaatctggaaagcggcgtgccaagcagattttccggctctggcagcggcaccgatttcaccctgacaatatccagcctccagcctgaggacgtggccgtgtactactgccagcagagcaacgacgaccctctgacctttggacagggcaccaaggtggaaatcaaactcgagatccagaaccctgatcctgccgtgtaccagctgcgggatagcaagagcagcgacaagagcgtgtgtctgttcaccgacttcgacagccagaccaacgtgtcccagagcaaggactccgacgtgtacatcaccgataagtgcgtgctggacatgcggagcatggacttcaagagcaactccgccgtggcctggtccaacaagtccgatttcgcctgcgccaacgccttcaacaacagcattatccccgaggacacattcttcccaagcagcgacgtgccctgcgacgtgaagctggtggaaaagagcttcgagacagacaccaacctgaacttccagaacctgagcgtgatcggcttcagaatcctgctgctgaaagtggccggctttaacctgctgatgaccctgcggctgtggtccagccgcgccaagagaagcggatctggcgtgaagcagaccctgaatttcgacctgctgaagctggctggcgacgtggaatccaacccaggccctactagtaccatggactggatttggcgcatccttttccttgtcggcgctgctaccggcgcccattccgggcccgaagtgcaactggttgaatccggtggcggcctggtgcaacccggcggatctctcagacttagctgtgccgcctccggcagaaccttcacaatgggatggtacaggcaggctccagggaaagagagagagttcgtcgccgccatctctctgtctcccacactggcctactacgccgactctgtgaaaggccggttcaccatctccagagataatagcaagaacaccgtggtgctgcaaatgaactctctgagagccgaggatacagccctgtactattgtgccgctgaccggaagtccgtgatgagcatcagacccgattactggggacagggcacactggtcacagtgtctagtggatccggcggcggaggatctggcggaggcggatctgggggcggaggctctttcgaagtccaacttgtggagtctggagggggcctggtgcagcccggcggctctctcagactgtcttgtgcggcaagcggctacaccttcacctcttactggatagaatgggtgaggcaggcacctggaaagggactggagtggattggagagattctgccaggagggggagatacaaattacaatgaaatcttcaaggggcgggccaccttttcagcggataccagcaagaatacagcttacctgcagatgaatagcctccgggcagaagataccgctgtttattattgcacgagacgggtgccaataagactggactattgggggcaagggactcttgtcaccgtcagttcaacgcgtgaggacctgaagaacgtgttcccacctgaggtggccgtgttcgagcctagcaaggccgagatcgcccacacccagaaagccaccctcgtgtgcctggctaccggcttctaccccgaccatgtggaactgtcttggtgggtcaacggcaaagaggtgcacagcggcgtgtgtaccgacccccagccactgaaagaacagcccgccctgaacgacagccggtactgcctgagcagcagactgagagtgtccgccaccttctggcagaacccccggaaccacttcagatgccaggtgcagttctacggcctgagcgagaacgacgagtggacccaggacagagccaagcccgtgacccagatcgtgtctgccgaagcctggggcagagccgattgcggcatcaccagcgccagctaccaccagggcgtgctgagcgccaccatcctgtacgagatcctgctgggcaaggccaccctgtacgccgtgctggtgtctgccctggtgctgatggctatggtcaagcggaaggacagccggggataa

SEQ ID NO: 6157 - DNA, 2691 bp, synthetic construct
  source 1..2691: mol_type = other DNA
atggccttaccagtgaccgccttgctcctgccgctggccttgctgctccacgccgccaggccggaagtgcagctggttgaatctggcggaggactggttcaggctggcggatctctgagactgtcttgtgccgccagcggcagaacctttagcatgggctggtttagacaggcccctggcaaagagagagagttcgtcgccgccatcacatactctggcggcagcccttactacgccgactctgtgaagggcagattcaccatcagccgggacaacgccaagaacaccgtgtacctccagatgaacagcctgaagcctgaggacaccgccgtgtactactgcgccgccaatccaacatacggcagcgactggaacgccgagaattggggccagggaacccaagtgacagtgtctagcggtaccggcggaggcggatctggcggcggaggtagcggtggcggaggatctgaattcgacatcgtgatgacacagagccctgatagcctggccgtgtctctgggagagagagccaccattaactgcaaggccagccagagcgtggactacgacggcgacagcttcctgaactggtatcagcagaagcccggccagcctcctaagctgctgatctacgccgccagcaatctggaaagcggcgtgccaagcagattttccggctctggcagcggcaccgatttcaccctgacaatatccagcctccagcctgaggacgtggccgtgtactactgccagcagagcaacgacgaccctctgacctttggacagggcaccaaggtggaaatcaaactcgaggacctgaagaacgtgttcccacctgaggtggccgtgttcgagcctagcgaggccgagatcagccacacccagaaagccaccctcgtgtgcctggctaccggcttctaccccgaccatgtggaactgtcttggtgggtcaacggcaaagaggtgcacagcggcgtgtgtaccgacccccagccactgaaagaacagcccgccctgaacgacagccggtactgcctgagcagcagactgagagtgtccgccaccttctggcagaacccccggaaccacttcagatgccaggtgcagttctacggcctgagcgagaacgacgagtggacccaggacagagccaagcccgtgacccagatcgtgtctgccgaagcctggggcagagccgattgcggctttaccagcgagagctaccagcagggcgtgctgagcgccaccatcctgtacgagatcctgctgggcaaggccaccctgtacgccgtgctggtgtctgccctggtgctgatggctatggtcaagcggaaggacagccggggaagggccaagcgatctggatctggagcaacaaacttctcactactcaaacaagcaggtgacgtggaggagaatcccgggcctactagtgccaccatggactggatttggcgcatccttttccttgtcggcgctgctaccggcgcccattccgggcccgaagtgcaactggttgaatccggtggcggcctggtgcaagcaggcggatctctcagacttagctgtgccgcctccggcagaaccttcacaatgggatggtttaggcaggctccagggaaagagagagagttcgtcgccgccatctctctgtctcccacactggcctactacgccgactctgtgaaaggccggttcaccatctccagagataatgccaagaacaccgtggtgctgcaaatgaactctctgaaacccgaggatacagccctgtactattgtgccgctgaccggaagtccgtgatgagcatcagacccgattactggggacagggcacacaagtcacagtgtcctctggatccggcggcggaggatctggcggaggcggatctgggggcggaggctctttcgaagtccaacttgtggagtctggagggggcctggtgcagcccggcggctctctcagactgtcttgtgcggcaagcggctacaccttcacctcttactggatagaatgggtgaggcaggcacctggaaagggactggagtggattggagagattctgccaggagggggagatacaaattacaatgaaatcttcaaggggcgggccaccttttcagcggataccagcaagaatacagcttacctgcagatgaatagcctccgggcagaagataccgctgtttattattgcacgagacgggtgccaataagactggactattgggggcaagggactcttgtcaccgtcagttcaacgcgtatccagaaccctgatcctgccgtgtaccagctgcgggatagcaagagcagcgacaagagcgtgtgtctgttcaccgacttcgacagccagaccaacgtgtcccagagcaaggactccgacgtgtacatcaccgataagtgcgtgctggacatgcggagcatggacttcaagagcaactccgccgtggcctggtccaacaagtccgatttcgcctgcgccaacgccttcaacaacagcattatccccgaggacacattcttcccaagccccgagagcagctgcgacgtgaagctggtggaaaagagcttcgagacagacaccaacctgaacttccagaacctgagcgtgatcggcttcagaatcctgctgctgaaagtggccggctttaacctgctgatgaccctgcggctgtggtccagctaa

SEQ ID NO: 6158 - DNA, 2304 bp, synthetic construct
  source 1..2304: mol_type = other DNA
atggccttaccagtgaccgccttgctcctgccgctggccttgctgctccacgccgccaggccggaagtgcagctggttgaatctggcggaggactggttcagcctggcggatctctgagactgagctgtgaagccagcggcttcgccagcgacgattacatcatcggctggttcagacaggcccctggcaaagagagagagggcgtcagctgcatcagctctaagtacgccaacaccgtgtacaccgacagcgtgaagggcagattcagactgagcagaggcaccgccaagaataccgtgtacctccagatgagcgccctgaagcctgaggataccgccgtgtactactgcgctatggacagccgcagagtgacatgccctgagatcagcaccatgcaccggaacttcgattcttggggccagggcacactggtcacagtgtcatctggtaccggcggaggcggatctggcggcggaggtagcggtggcggaggatctgaattcgacatcgtgatgacacagagccctgatagcctggccgtgtctctgggagagagagccaccattaactgcaaggccagccagagcgtggactacgacggcgacagcttcctgaactggtatcagcagaagcccggccagcctcctaagctgctgatctacgccgccagcaatctggaaagcggcgtgccaagcagattttccggctctggcagcggcaccgatttcaccctgacaatatccagcctccagcctgaggacgtggccgtgtactactgccagcagagcaacgacgaccctctgacctttggacagggcaccaaggtggaaatcaaactcgaggacctgaagaacgtgttcccacctgaggtggccgtgttcgagcctagcaaggccgagatcgcccacacccagaaagccaccctcgtgtgcctggctaccggcttctaccccgaccatgtggaactgtcttggtgggtcaacggcaaagaggtgcacagcggcgtgtgtaccgacccccagccactgaaagaacagcccgccctgaacgacagccggtactgcctgagcagcagactgagagtgtccgccaccttctggcagaacccccggaaccacttcagatgccaggtgcagttctacggcctgagcgagaacgacgagtggacccaggacagagccaagcccgtgacccagatcgtgtctgccgaagcctggggcagagccgattgcggcatcaccagcgccagctaccaccagggcgtgctgagcgccaccatcctgtacgagatcctgctgggcaaggccaccctgtacgccgtgctggtgtctgccctggtgctgatggctatggtcaagcggaaggacagccggggaagggccaagcgatctggatctggagcaacaaacttctcactactcaaacaagcaggtgacgtggaggagaatcccgggcctactagtatggactggatttggcgcatccttttccttgtcggcgctgctaccggcgcgcattccttcgaagtccaacttgtggagtctggagggggcctggtgcagcccggcggctctctcagactgtcttgtgcggcaagcggctacaccttcacctcttactggatagaatgggtgaggcaggcacctggaaagggactggagtggattggagagattctgccaggagggggagatacaaattacaatgaaatcttcaaggggcgggccaccttttcagcggataccagcaagaatacagcttacctgcagatgaatagcctccgggcagaagataccgctgtttattattgcacgagacgggtgccaataagactggactattgggggcaagggactcttgtcaccgtcagttcaacgcgtatccagaaccctgatcctgccgtgtaccagctgcgggatagcaagagcagcgacaagagcgtgtgtctgttcaccgacttcgacagccagaccaacgtgtcccagagcaaggactccgacgtgtacatcaccgataagtgcgtgctggacatgcggagcatggacttcaagagcaactccgccgtggcctggtccaacaagtccgatttcgcctgcgccaacgccttcaacaacagcattatccccgaggacacattcttcccaagcagcgacgtgccctgcgacgtgaagctggtggaaaagagcttcgagacagacaccaacctgaacttccagaacctgagcgtgatcggcttcagaatcctgctgctgaaagtggccggctttaacctgctgatgaccctgcggctgtggtccagctaa

SEQ ID NO: 6159 - DNA, 2277 bp, synthetic construct
  source 1..2277: mol_type = other DNA
atggccttaccagtgaccgccttgctcctgccgctggccttgctgctccacgccgccaggccggacatcgtgatgacacagagccctgatagcctggccgtgtctctgggagagagagccaccattaactgcaaggccagccagagcgtggactacgacggcgacagcttcctgaactggtatcagcagaagcccggccagcctcctaagctgctgatctacgccgccagcaatctggaaagcggcgtgccaagcagattttccggctctggcagcggcaccgatttcaccctgacaatatccagcctccagcctgaggacgtggccgtgtactactgccagcagagcaacgacgaccctctgacctttggacagggcaccaaggtggaaatcaaactcgaggacctgaagaacgtgttcccacctgaggtggccgtgttcgagcctagcgaggccgagatcagccacacccagaaagccaccctcgtgtgcctggctaccggcttctaccccgaccatgtggaactgtcttggtgggtcaacggcaaagaggtgcacagcggcgtgtgtaccgacccccagccactgaaagaacagcccgccctgaacgacagccggtactgcctgagcagcagactgagagtgtccgccaccttctggcagaacccccggaaccacttcagatgccaggtgcagttctacggcctgagcgagaacgacgagtggacccaggacagagccaagcccgtgacccagatcgtgtctgccgaagcctggggcagagccgattgcggctttaccagcgagagctaccagcagggcgtgctgagcgccaccatcctgtacgagatcctgctgggcaaggccaccctgtacgccgtgctggtgtctgccctggtgctgatggctatggtcaagcggaaggacagccggggaagggccaagcgatctggatctggagcaacaaacttctcactactcaaacaagcaggtgacgtggaggagaatcccgggcctactagtaccatggactggatttggcgcatccttttccttgtcggcgctgctaccggcgcccattccgggcccgaagtgcaactggttgaatccggtggcggcctggtgcaacccggcggatctctcagacttagctgtgccgcctccggcagaaccttcacaatgggatggtacaggcaggctccagggaaagagagagagttcgtcgccgccatctctctgtctcccacactggcctactacgccgactctgtgaaaggccggttcaccatctccagagataatagcaagaacaccgtggtgctgcaaatgaactctctgagagccgaggatacagccctgtactattgtgccgctgaccggaagtccgtgatgagcatcagacccgattactggggacagggcacactggtcacagtgtctagtggatccggcggcggaggatctggcggaggcggatctgggggcggaggctctttcgaagtccaacttgtggagtctggagggggcctggtgcagcccggcggctctctcagactgtcttgtgcggcaagcggctacaccttcacctcttactggatagaatgggtgaggcaggcacctggaaagggactggagtggattggagagattctgccaggagggggagatacaaattacaatgaaatcttcaaggggcgggccaccttttcagcggataccagcaagaatacagcttacctgcagatgaatagcctccgggcagaagataccgctgtttattattgcacgagacgggtgccaataagactggactattgggggcaagggactcttgtcaccgtcagttcaacgcgtatccagaaccctgatcctgccgtgtaccagctgcgggatagcaagagcagcgacaagagcgtgtgtctgttcaccgacttcgacagccagaccaacgtgtcccagagcaaggactccgacgtgtacatcaccgataagtgcgtgctggacatgcggagcatggacttcaagagcaactccgccgtggcctggtccaacaagtccgatttcgcctgcgccaacgccttcaacaacagcattatccccgaggacacattcttcccaagccccgagagcagctgcgacgtgaagctggtggaaaagagcttcgagacagacaccaacctgaacttccagaacctgagcgtgatcggcttcagaatcctgctgctgaaagtggccggctttaacctgctgatgaccctgcggctgtggtccagctaa

SEQ ID NO: 6160 - DNA, 2295 bp, synthetic construct
  source 1..2295: mol_type = other DNA
atggccttaccagtgaccgccttgctcctgccgctggccttgctgctccacgccgccaggccggacatcgtgatgacacagagccctgatagcctggccgtgtctctgggagagagagccaccattaactgcaaggccagccagagcgtggactacgacggcgacagcttcctgaactggtatcagcagaagcccggccagcctcctaagctgctgatctacgccgccagcaatctggaaagcggcgtgccaagcagattttccggctctggcagcggcaccgatttcaccctgacaatatccagcctccagcctgaggacgtggccgtgtactactgccagcagagcaacgacgaccctctgacctttggacagggcaccaaggtggaaatcaaactcgaggacctgaagaacgtgttcccacctgaggtggccgtgttcgagcctagcgaggccgagatcagccacacccagaaagccaccctcgtgtgcctggctaccggcttctaccccgaccatgtggaactgtcttggtgggtcaacggcaaagaggtgcacagcggcgtgtgtaccgacccccagccactgaaagaacagcccgccctgaacgacagccggtactgcctgagcagcagactgagagtgtccgccaccttctggcagaacccccggaaccacttcagatgccaggtgcagttctacggcctgagcgagaacgacgagtggacccaggacagagccaagcccgtgacccagatcgtgtctgccgaagcctggggcagagccgattgcggctttaccagcgagagctaccagcagggcgtgctgagcgccaccatcctgtacgagatcctgctgggcaaggccaccctgtacgccgtgctggtgtctgccctggtgctgatggctatggtcaagcggaaggacagccggggaagggccaagcgatctggatctggagcaacaaacttctcactactcaaacaagcaggtgacgtggaggagaatcccgggcctactagtaccatggactggatttggcgcatccttttccttgtcggcgctgctaccggcgcccattccgggccccaggtgcagctggttgaatctggcggaggactggttcagcctggcggatctctgagactgtcttgtgccgccagcggcaacatcaacagcagaaactgcatgggctggttcagacaggcccctggcaagggaagagaaggcgtggcagctatcggccaagtgaccggcagaacctactacgtggacagcgtgaagggcagattcaccatcagcctggacaacagcaagaacaccctgtacctccagatgaacagcctgagagccgaggacaccgccgtgtactattgtgctgctgcccctggctgtctgctgtctgcacttagaagcgccgactacagaaactggggccagggcacactggtcaccgtttcttctggatccggcggcggaggatctggcggaggcggatctgggggcggaggctctttcgaagtccaacttgtggagtctggagggggcctggtgcagcccggcggctctctcagactgtcttgtgcggcaagcggctacaccttcacctcttactggatagaatgggtgaggcaggcacctggaaagggactggagtggattggagagattctgccaggagggggagatacaaattacaatgaaatcttcaaggggcgggccaccttttcagcggataccagcaagaatacagcttacctgcagatgaatagcctccgggcagaagataccgctgtttattattgcacgagacgggtgccaataagactggactattgggggcaagggactcttgtcaccgtcagttcaacgcgtatccagaaccctgatcctgccgtgtaccagctgcgggatagcaagagcagcgacaagagcgtgtgtctgttcaccgacttcgacagccagaccaacgtgtcccagagcaaggactccgacgtgtacatcaccgataagtgcgtgctggacatgcggagcatggacttcaagagcaactccgccgtggcctggtccaacaagtccgatttcgcctgcgccaacgccttcaacaacagcattatccccgaggacacattcttcccaagccccgagagcagctgcgacgtgaagctggtggaaaagagcttcgagacagacaccaacctgaacttccagaacctgagcgtgatcggcttcagaatcctgctgctgaaagtggccggctttaacctgctgatgaccctgcggctgtggtccagc

SEQ ID NO: 6161 - DNA, 2298 bp, synthetic construct
  source 1..2298: mol_type = other DNA
atggccttaccagtgaccgccttgctcctgccgctggccttgctgctccacgccgccaggccggacatcgtgatgacacagagccctgatagcctggccgtgtctctgggagagagagccaccattaactgcaaggccagccagagcgtggactacgacggcgacagcttcctgaactggtatcagcagaagcccggccagcctcctaagctgctgatctacgccgccagcaatctggaaagcggcgtgccaagcagattttccggctctggcagcggcaccgatttcaccctgacaatatccagcctccagcctgaggacgtggccgtgtactactgccagcagagcaacgacgaccctctgacctttggacagggcaccaaggtggaaatcaaactcgaggacctgaagaacgtgttcccacctgaggtggccgtgttcgagcctagcgaggccgagatcagccacacccagaaagccaccctcgtgtgcctggctaccggcttctaccccgaccatgtggaactgtcttggtgggtcaacggcaaagaggtgcacagcggcgtgtgtaccgacccccagccactgaaagaacagcccgccctgaacgacagccggtactgcctgagcagcagactgagagtgtccgccaccttctggcagaacccccggaaccacttcagatgccaggtgcagttctacggcctgagcgagaacgacgagtggacccaggacagagccaagcccgtgacccagatcgtgtctgccgaagcctggggcagagccgattgcggctttaccagcgagagctaccagcagggcgtgctgagcgccaccatcctgtacgagatcctgctgggcaaggccaccctgtacgccgtgctggtgtctgccctggtgctgatggctatggtcaagcggaaggacagccggggaagggccaagcgatctggatctggagcaacaaacttctcactactcaaacaagcaggtgacgtggaggagaatcccgggcctactagtaccatggactggatttggcgcatccttttccttgtcggcgctgctaccggcgcccattccgggccccaggtgcagctggttgaatctggcggaggatctgttcaggctggcggctctctgagactgtcttgtggcgcttccggcaacatcagcagcagaaactgcatgggctggttcagacaggcccctggcaaagagagagaaggcgttgccgccatcggacaagtgaccggcagatcctactacgtggacagcgtgaagggcagattcaccatcagcctggacaacgccaagaacaccctgtacctccagatgaacacactgaagcccgaggacaccgccatgtactactgtgctgctgcccctggctgtctgctgtctgcacttagaagcgccgactacagaaactggggccagggaacccaagtgacagtgtctagtggatccggcggcggaggatctggcggaggcggatctgggggcggaggctctttcgaagtccaacttgtggagtctggagggggcctggtgcagcccggcggctctctcagactgtcttgtgcggcaagcggctacaccttcacctcttactggatagaatgggtgaggcaggcacctggaaagggactggagtggattggagagattctgccaggagggggagatacaaattacaatgaaatcttcaaggggcgggccaccttttcagcggataccagcaagaatacagcttacctgcagatgaatagcctccgggcagaagataccgctgtttattattgcacgagacgggtgccaataagactggactattgggggcaagggactcttgtcaccgtcagttcaacgcgtatccagaaccctgatcctgccgtgtaccagctgcgggatagcaagagcagcgacaagagcgtgtgtctgttcaccgacttcgacagccagaccaacgtgtcccagagcaaggactccgacgtgtacatcaccgataagtgcgtgctggacatgcggagcatggacttcaagagcaactccgccgtggcctggtccaacaagtccgatttcgcctgcgccaacgccttcaacaacagcattatccccgaggacacattcttcccaagccccgagagcagctgcgacgtgaagctggtggaaaagagcttcgagacagacaccaacctgaacttccagaacctgagcgtgatcggcttcagaatcctgctgctgaaagtggccggctttaacctgctgatgaccctgcggctgtggtccagctaa

SEQ ID NO: 6162 - DNA, 2721 bp, synthetic construct
  source 1..2721: mol_type = other DNA
atggccttaccagtgaccgccttgctcctgccgctggccttgctgctccacgccgccaggccggaagtgcagctggttgaatctggcggaggactggttcaggctggcggatctctgagactgtcttgtgccgccagcggcagaacctttagcatgggctggtttagacaggcccctggcaaagagagagagttcgtcgccgccatcacatactctggcggcagcccttactacgccgactctgtgaagggcagattcaccatcagccgggacaacgccaagaacaccgtgtacctccagatgaacagcctgaagcctgaggacaccgccgtgtactactgcgccgccaatccaacatacggcagcgactggaacgccgagaattggggccagggaacccaagtgacagtgtctagcggtaccggcggaggcggatctggcggcggaggtagcggtggcggaggatctgaattcgacatcgtgatgacacagagccctgatagcctggccgtgtctctgggagagagagccaccattaactgcaaggccagccagagcgtggactacgacggcgacagcttcctgaactggtatcagcagaagcccggccagcctcctaagctgctgatctacgccgccagcaatctggaaagcggcgtgccaagcagattttccggctctggcagcggcaccgatttcaccctgacaatatccagcctccagcctgaggacgtggccgtgtactactgccagcagagcaacgacgaccctctgacctttggacagggcaccaaggtggaaatcaaactcgagatccagaaccctgatcctgccgtgtaccagctgcgggatagcaagagcagcgacaagagcgtgtgtctgttcaccgacttcgacagccagaccaacgtgtcccagagcaaggactccgacgtgtacatcaccgataagtgcgtgctggacatgcggagcatggacttcaagagcaactccgccgtggcctggtccaacaagtccgatttcgcctgcgccaacgccttcaacaacagcattatccccgaggacacattcttcccaagcagcgacgtgccctgcgacgtgaagctggtggaaaagagcttcgagacagacaccaacctgaacttccagaacctgagcgtgatcggcttcagaatcctgctgctgaaagtggccggctttaacctgctgatgaccctgcggctgtggtccagccgcgccaagagaagcggatctggcgtgaagcagaccctgaatttcgacctgctgaagctggctggcgacgtggaatccaacccaggccctactagtaccatggactggatttggcgcatccttttccttgtcggcgctgctaccggcgcccattccgggccccaggtgcagctggttgaatctggcggaggatctgttcaggctggcggctctctgagactgtcttgtggcgcttccggcaacatcagcagcagaaactgcatgggctggttcagacaggcccctggcaaagagagagaaggcgttgccgccatcggacaagtgaccggcagatcctactacgtggacagcgtgaagggcagattcaccatcagcctggacaacgccaagaacaccctgtacctccagatgaacacactgaagcccgaggacaccgccatgtactactgtgctgctgcccctggctgtctgctgtctgcacttagaagcgccgactacagaaactggggccagggaacccaagtgacagtgtctagtggatccggcggcggaggatctggcggaggcggatctgggggcggaggctctttcgaagtccaacttgtggagtctggagggggcctggtgcagcccggcggctctctcagactgtcttgtgcggcaagcggctacaccttcacctcttactggatagaatgggtgaggcaggcacctggaaagggactggagtggattggagagattctgccaggagggggagatacaaattacaatgaaatcttcaaggggcgggccaccttttcagcggataccagcaagaatacagcttacctgcagatgaatagcctccgggcagaagataccgctgtttattattgcacgagacgggtgccaataagactggactattgggggcaagggactcttgtcaccgtcagttcaacgcgtgaggacctgaagaacgtgttcccacctgaggtggccgtgttcgagcctagcaaggccgagatcgcccacacccagaaagccaccctcgtgtgcctggctaccggcttctaccccgaccatgtggaactgtcttggtgggtcaacggcaaagaggtgcacagcggcgtgtgtaccgacccccagccactgaaagaacagcccgccctgaacgacagccggtactgcctgagcagcagactgagagtgtccgccaccttctggcagaacccccggaaccacttcagatgccaggtgcagttctacggcctgagcgagaacgacgagtggacccaggacagagccaagcccgtgacccagatcgtgtctgccgaagcctggggcagagccgattgcggcatcaccagcgccagctaccaccagggcgtgctgagcgccaccatcctgtacgagatcctgctgggcaaggccaccctgtacgccgtgctggtgtctgccctggtgctgatggctatggtcaagcggaaggacagccggggataa

SEQ ID NO: 6163 - DNA, 2712 bp, synthetic construct
  source 1..2712: mol_type = other DNA
atggccttaccagtgaccgccttgctcctgccgctggccttgctgctccacgccgccaggccgcaggtgcagctggttgaatctggcggaggatctgttcaggctggcggctctctgagactgtcttgtggcgcttccggcaacatcagcagcagaaactgcatgggctggttcagacaggcccctggcaaagagagagaaggcgttgccgccatcggacaagtgaccggcagatcctactacgtggacagcgtgaagggcagattcaccatcagcctggacaacgccaagaacaccctgtacctccagatgaacacactgaagcccgaggacaccgccatgtactactgtgctgctgcccctggctgtctgctgtctgcacttagaagcgccgactacagaaactggggccagggaacccaagtgacagtgtctagtggtaccggcggaggcggatctggcggcggaggtagcggtggcggaggatctgaattcgacatcgtgatgacacagagccctgatagcctggccgtgtctctgggagagagagccaccattaactgcaaggccagccagagcgtggactacgacggcgacagcttcctgaactggtatcagcagaagcccggccagcctcctaagctgctgatctacgccgccagcaatctggaaagcggcgtgccaagcagattttccggctctggcagcggcaccgatttcaccctgacaatatccagcctccagcctgaggacgtggccgtgtactactgccagcagagcaacgacgaccctctgacctttggacagggcaccaaggtggaaatcaaactcgaggacctgaagaacgtgttcccacctgaggtggccgtgttcgagcctagcgaggccgagatcagccacacccagaaagccaccctcgtgtgcctggctaccggcttctaccccgaccatgtggaactgtcttggtgggtcaacggcaaagaggtgcacagcggcgtgtgtaccgacccccagccactgaaagaacagcccgccctgaacgacagccggtactgcctgagcagcagactgagagtgtccgccaccttctggcagaacccccggaaccacttcagatgccaggtgcagttctacggcctgagcgagaacgacgagtggacccaggacagagccaagcccgtgacccagatcgtgtctgccgaagcctggggcagagccgattgcggctttaccagcgagagctaccagcagggcgtgctgagcgccaccatcctgtacgagatcctgctgggcaaggccaccctgtacgccgtgctggtgtctgccctggtgctgatggctatggtcaagcggaaggacagccggggaagggccaagcgatctggatctggagcaacaaacttctcactactcaaacaagcaggtgacgtggaggagaatcccgggcctactagtgccaccatggactggatttggcgcatccttttccttgtcggcgctgctaccggcgcccattccgggcccgaagtgcaactggttgaatccggtggcggcctggtgcaagcaggcggatctctcagacttagctgtgccgcctccggcagaaccttcacaatgggatggtttaggcaggctccagggaaagagagagagttcgtcgccgccatctctctgtctcccacactggcctactacgccgactctgtgaaaggccggttcaccatctccagagataatgccaagaacaccgtggtgctgcaaatgaactctctgaaacccgaggatacagccctgtactattgtgccgctgaccggaagtccgtgatgagcatcagacccgattactggggacagggcacacaagtcacagtgtcctctggatccggcggcggaggatctggcggaggcggatctgggggcggaggctctttcgaagtccaacttgtggagtctggagggggcctggtgcagcccggcggctctctcagactgtcttgtgcggcaagcggctacaccttcacctcttactggatagaatgggtgaggcaggcacctggaaagggactggagtggattggagagattctgccaggagggggagatacaaattacaatgaaatcttcaaggggcgggccaccttttcagcggataccagcaagaatacagcttacctgcagatgaatagcctccgggcagaagataccgctgtttattattgcacgagacgggtgccaataagactggactattgggggcaagggactcttgtcaccgtcagttcaacgcgtatccagaaccctgatcctgccgtgtaccagctgcgggatagcaagagcagcgacaagagcgtgtgtctgttcaccgacttcgacagccagaccaacgtgtcccagagcaaggactccgacgtgtacatcaccgataagtgcgtgctggacatgcggagcatggacttcaagagcaactccgccgtggcctggtccaacaagtccgatttcgcctgcgccaacgccttcaacaacagcattatccccgaggacacattcttcccaagccccgagagcagctgcgacgtgaagctggtggaaaagagcttcgagacagacaccaacctgaacttccagaacctgagcgtgatcggcttcagaatcctgctgctgaaagtggccggctttaacctgctgatgaccctgcggctgtggtccagctaa

SEQ ID NO: 6164 - DNA, 2301 bp, synthetic construct
  source 1..2301: mol_type = other DNA
atggccttaccagtgaccgccttgctcctgccgctggccttgctgctccacgccgccaggccgcaggtgcagctggttgaatctggcggaggatctgttcaggctggcggctctctgagactgtcttgtggcgcttccggcaacatcagcagcagaaactgcatgggctggttcagacaggcccctggcaaagagagagaaggcgttgccgccatcggacaagtgaccggcagatcctactacgtggacagcgtgaagggcagattcaccatcagcctggacaacgccaagaacaccctgtacctccagatgaacacactgaagcccgaggacaccgccatgtactactgtgctgctgcccctggctgtctgctgtctgcacttagaagcgccgactacagaaactggggccagggaacccaagtgacagtgtctagtggtaccggcggaggcggatctggcggcggaggtagcggtggcggaggatctgaattcgacatcgtgatgacacagagccctgatagcctggccgtgtctctgggagagagagccaccattaactgcaaggccagccagagcgtggactacgacggcgacagcttcctgaactggtatcagcagaagcccggccagcctcctaagctgctgatctacgccgccagcaatctggaaagcggcgtgccaagcagattttccggctctggcagcggcaccgatttcaccctgacaatatccagcctccagcctgaggacgtggccgtgtactactgccagcagagcaacgacgaccctctgacctttggacagggcaccaaggtggaaatcaaactcgaggacctgaagaacgtgttcccacctgaggtggccgtgttcgagcctagcgaggccgagatcagccacacccagaaagccaccctcgtgtgcctggctaccggcttctaccccgaccatgtggaactgtcttggtgggtcaacggcaaagaggtgcacagcggcgtgtgtaccgacccccagccactgaaagaacagcccgccctgaacgacagccggtactgcctgagcagcagactgagagtgtccgccaccttctggcagaacccccggaaccacttcagatgccaggtgcagttctacggcctgagcgagaacgacgagtggacccaggacagagccaagcccgtgacccagatcgtgtctgccgaagcctggggcagagccgattgcggctttaccagcgagagctaccagcagggcgtgctgagcgccaccatcctgtacgagatcctgctgggcaaggccaccctgtacgccgtgctggtgtctgccctggtgctgatggctatggtcaagcggaaggacagccggggaagggccaagcgatctggatctggagcaacaaacttctcactactcaaacaagcaggtgacgtggaggagaatcccgggcctactagtgccaccatggactggatttggcgcatccttttccttgtcggcgctgctaccggcgcccattccttcgaagtccaacttgtggagtctggagggggcctggtgcagcccggcggctctctcagactgtcttgtgcggcaagcggctacaccttcacctcttactggatagaatgggtgaggcaggcacctggaaagggactggagtggattggagagattctgccaggagggggagatacaaattacaatgaaatcttcaaggggcgggccaccttttcagcggataccagcaagaatacagcttacctgcagatgaatagcctccgggcagaagataccgctgtttattattgcacgagacgggtgccaataagactggactattgggggcaagggactcttgtcaccgtcagttcaacgcgtatccagaaccctgatcctgccgtgtaccagctgcgggatagcaagagcagcgacaagagcgtgtgtctgttcaccgacttcgacagccagaccaacgtgtcccagagcaaggactccgacgtgtacatcaccgataagtgcgtgctggacatgcggagcatggacttcaagagcaactccgccgtggcctggtccaacaagtccgatttcgcctgcgccaacgccttcaacaacagcattatccccgaggacacattcttcccaagccccgagagcagctgcgacgtgaagctggtggaaaagagcttcgagacagacaccaacctgaacttccagaacctgagcgtgatcggcttcagaatcctgctgctgaaagtggccggctttaacctgctgatgaccctgcggctgtggtccagctaa

SEQ ID NO: 6165 - DNA, 2301 bp, synthetic construct
  source 1..2301: mol_type = other DNA
atggccttaccagtgaccgccttgctcctgccgctggccttgctgctccacgccgccaggccgcaagttcagctggtggaaagcggtggtggcgttgtgcaacctggtggaagtctgaggctgagctgtgccgcttctggcctgagctttagcacctacactgtggcctggttcaggcaggctcccggaaagggtcttgaaggcgtggccgccattccttacaccagccagcacatggtgtacacagacagcgtcagaggccggttcaccatcagcagagacaactccaagaatacgctctatctccagatgaactctctgcgcgccgaagatacagccgtgtattactgcgccaccgacagacggcctggcacctctatgctggctatcaacggctacaacagatggggacagggaaccaccgtgaccgtgtcatctggtaccggcggaggcggatctggcggcggaggtagcggtggcggaggatctgaattcgacatcgtgatgacacagagccctgatagcctggccgtgtctctgggagagagagccaccattaactgcaaggccagccagagcgtggactacgacggcgacagcttcctgaactggtatcagcagaagcccggccagcctcctaagctgctgatctacgccgccagcaatctggaaagcggcgtgccaagcagattttccggctctggcagcggcaccgatttcaccctgacaatatccagcctccagcctgaggacgtggccgtgtactactgccagcagagcaacgacgaccctctgacctttggacagggcaccaaggtggaaatcaaactcgaggacctgaagaacgtgttcccacctgaggtggccgtgttcgagcctagcgaggccgagatcagccacacccagaaagccaccctcgtgtgcctggctaccggcttctaccccgaccatgtggaactgtcttggtgggtcaacggcaaagaggtgcacagcggcgtgtgtaccgacccccagccactgaaagaacagcccgccctgaacgacagccggtactgcctgagcagcagactgagagtgtccgccaccttctggcagaacccccggaaccacttcagatgccaggtgcagttctacggcctgagcgagaacgacgagtggacccaggacagagccaagcccgtgacccagatcgtgtctgccgaagcctggggcagagccgattgcggctttaccagcgagagctaccagcagggcgtgctgagcgccaccatcctgtacgagatcctgctgggcaaggccaccctgtacgccgtgctggtgtctgccctggtgctgatggctatggtcaagcggaaggacagccggggaagggccaagcgatctggatctggagcaacaaacttctcactactcaaacaagcaggtgacgtggaggagaatcccgggcctactagtgccaccatggactggatttggcgcatccttttccttgtcggcgctgctaccggcgcccattccttcgaagtccaacttgtggagtctggagggggcctggtgcagcccggcggctctctcagactgtcttgtgcggcaagcggctacaccttcacctcttactggatagaatgggtgaggcaggcacctggaaagggactggagtggattggagagattctgccaggagggggagatacaaattacaatgaaatcttcaaggggcgggccaccttttcagcggataccagcaagaatacagcttacctgcagatgaatagcctccgggcagaagataccgctgtttattattgcacgagacgggtgccaataagactggactattgggggcaagggactcttgtcaccgtcagttcaacgcgtatccagaaccctgatcctgccgtgtaccagctgcgggatagcaagagcagcgacaagagcgtgtgtctgttcaccgacttcgacagccagaccaacgtgtcccagagcaaggactccgacgtgtacatcaccgataagtgcgtgctggacatgcggagcatggacttcaagagcaactccgccgtggcctggtccaacaagtccgatttcgcctgcgccaacgccttcaacaacagcattatccccgaggacacattcttcccaagccccgagagcagctgcgacgtgaagctggtggaaaagagcttcgagacagacaccaacctgaacttccagaacctgagcgtgatcggcttcagaatcctgctgctgaaagtggccggctttaacctgctgatgaccctgcggctgtggtccagctaa

SEQ ID NO: 6166 - DNA, 2298 bp, synthetic construct
  source 1..2298: mol_type = other DNA
atggccttaccagtgaccgccttgctcctgccgctggccttgctgctccacgccgccaggccggacatcgtgatgacacagagccctgatagcctggccgtgtctctgggagagagagccaccattaactgcaaggccagccagagcgtggactacgacggcgacagcttcctgaactggtatcagcagaagcccggccagcctcctaagctgctgatctacgccgccagcaatctggaaagcggcgtgccaagcagattttccggctctggcagcggcaccgatttcaccctgacaatatccagcctccagcctgaggacgtggccgtgtactactgccagcagagcaacgacgaccctctgacctttggacagggcaccaaggtggaaatcaaactcgaggacctgaagaacgtgttcccacctgaggtggccgtgttcgagcctagcgaggccgagatcagccacacccagaaagccaccctcgtgtgcctggctaccggcttctaccccgaccatgtggaactgtcttggtgggtcaacggcaaagaggtgcacagcggcgtgtgtaccgacccccagccactgaaagaacagcccgccctgaacgacagccggtactgcctgagcagcagactgagagtgtccgccaccttctggcagaacccccggaaccacttcagatgccaggtgcagttctacggcctgagcgagaacgacgagtggacccaggacagagccaagcccgtgacccagatcgtgtctgccgaagcctggggcagagccgattgcggctttaccagcgagagctaccagcagggcgtgctgagcgccaccatcctgtacgagatcctgctgggcaaggccaccctgtacgccgtgctggtgtctgccctggtgctgatggctatggtcaagcggaaggacagccggggaagggccaagcgatctggatctggagcaacaaacttctcactactcaaacaagcaggtgacgtggaggagaatcccgggcctactagtaccatggactggatttggcgcatccttttccttgtcggcgctgctaccggcgcccattccgggccccaagttcagctggtggaaagcggtggtggcgttgtgcaacctggtggaagtctgaggctgagctgtgccgcttctggcctgagctttagcacctacactgtggcctggttcaggcaggctcccggaaagggtcttgaaggcgtggccgccattccttacaccagccagcacatggtgtacacagacagcgtcagaggccggttcaccatcagcagagacaactccaagaatacgctctatctccagatgaactctctgcgcgccgaagatacagccgtgtattactgcgccaccgacagacggcctggcacctctatgctggctatcaacggctacaacagatggggacagggaaccaccgtgaccgtgtcatctggatccggcggcggaggatctggcggaggcggatctgggggcggaggctctttcgaagtccaacttgtggagtctggagggggcctggtgcagcccggcggctctctcagactgtcttgtgcggcaagcggctacaccttcacctcttactggatagaatgggtgaggcaggcacctggaaagggactggagtggattggagagattctgccaggagggggagatacaaattacaatgaaatcttcaaggggcgggccaccttttcagcggataccagcaagaatacagcttacctgcagatgaatagcctccgggcagaagataccgctgtttattattgcacgagacgggtgccaataagactggactattgggggcaagggactcttgtcaccgtcagttcaacgcgtatccagaaccctgatcctgccgtgtaccagctgcgggatagcaagagcagcgacaagagcgtgtgtctgttcaccgacttcgacagccagaccaacgtgtcccagagcaaggactccgacgtgtacatcaccgataagtgcgtgctggacatgcggagcatggacttcaagagcaactccgccgtggcctggtccaacaagtccgatttcgcctgcgccaacgccttcaacaacagcattatccccgaggacacattcttcccaagccccgagagcagctgcgacgtgaagctggtggaaaagagcttcgagacagacaccaacctgaacttccagaacctgagcgtgatcggcttcagaatcctgctgctgaaagtggccggctttaacctgctgatgaccctgcggctgtggtccagctaa

SEQ ID NO: 6167 - DNA, 2304 bp, synthetic construct
  source 1..2304: mol_type = other DNA
atggccttaccagtgaccgccttgctcctgccgctggccttgctgctccacgccgccaggccggacatcgtgatgacacagagccctgatagcctggccgtgtctctgggagagagagccaccattaactgcaaggccagccagagcgtggactacgacggcgacagcttcctgaactggtatcagcagaagcccggccagcctcctaagctgctgatctacgccgccagcaatctggaaagcggcgtgccaagcagattttccggctctggcagcggcaccgatttcaccctgacaatatccagcctccagcctgaggacgtggccgtgtactactgccagcagagcaacgacgaccctctgacctttggacagggcaccaaggtggaaatcaaactcgaggacctgaagaacgtgttcccacctgaggtggccgtgttcgagcctagcgaggccgagatcagccacacccagaaagccaccctcgtgtgcctggctaccggcttctaccccgaccatgtggaactgtcttggtgggtcaacggcaaagaggtgcacagcggcgtgtgtaccgacccccagccactgaaagaacagcccgccctgaacgacagccggtactgcctgagcagcagactgagagtgtccgccaccttctggcagaacccccggaaccacttcagatgccaggtgcagttctacggcctgagcgagaacgacgagtggacccaggacagagccaagcccgtgacccagatcgtgtctgccgaagcctggggcagagccgattgcggctttaccagcgagagctaccagcagggcgtgctgagcgccaccatcctgtacgagatcctgctgggcaaggccaccctgtacgccgtgctggtgtctgccctggtgctgatggctatggtcaagcggaaggacagccggggaagggccaagcgatctggatctggagcaacaaacttctcactactcaaacaagcaggtgacgtggaggagaatcccgggcctactagtaccatggactggatttggcgcatccttttccttgtcggcgctgctaccggcgcccattccgggcccgaggtgcagctggttgaatctggcggaggatctgttcaggctggcggctctctgagactgtcttgtgccgccagcggctacacctacagcatcaactgcatgggctggttcagacaggcccctggcaaagagagagaaggcgttgccgccatctctaccggcggaggcagaaccgattaccgggattctgtgaagggcagattcaccatcagccaggacaacgccaagaacaccgtgtacctccagatgaacagcctgaagcctgaggacaccgccatgtactactgtgccggcaagaccacctatcctggctacggatgtggcctgggcagaagcgcctacaattattggggccagggcacccaagtgaccgtgtcatctggatccggcggcggaggatctggcggaggcggatctgggggcggaggctctttcgaagtccaacttgtggagtctggagggggcctggtgcagcccggcggctctctcagactgtcttgtgcggcaagcggctacaccttcacctcttactggatagaatgggtgaggcaggcacctggaaagggactggagtggattggagagattctgccaggagggggagatacaaattacaatgaaatcttcaaggggcgggccaccttttcagcggataccagcaagaatacagcttacctgcagatgaatagcctccgggcagaagataccgctgtttattattgcacgagacgggtgccaataagactggactattgggggcaagggactcttgtcaccgtcagttcaacgcgtatccagaaccctgatcctgccgtgtaccagctgcgggatagcaagagcagcgacaagagcgtgtgtctgttcaccgacttcgacagccagaccaacgtgtcccagagcaaggactccgacgtgtacatcaccgataagtgcgtgctggacatgcggagcatggacttcaagagcaactccgccgtggcctggtccaacaagtccgatttcgcctgcgccaacgccttcaacaacagcattatccccgaggacacattcttcccaagccccgagagcagctgcgacgtgaagctggtggaaaagagcttcgagacagacaccaacctgaacttccagaacctgagcgtgatcggcttcagaatcctgctgctgaaagtggccggctttaacctgctgatgaccctgcggctgtggtccagctaa

SEQ ID NO: 6168 - DNA, 1860 bp, synthetic construct
  source 1..1860: mol_type = other DNA
atggccttaccagtgaccgccttgctcctgccgctggccttgctgctccacgccgccaggccggacatcgtgatgacacagagccctgatagcctggccgtgtctctgggagagagagccaccattaactgcaaggccagccagagcgtggactacgacggcgacagcttcctgaactggtatcagcagaagcccggccagcctcctaagctgctgatctacgccgccagcaatctggaaagcggcgtgccaagcagattttccggctctggcagcggcaccgatttcaccctgacaatatccagcctccagcctgaggacgtggccgtgtactactgccagcagagcaacgacgaccctctgacctttggacagggcaccaaggtggaaatcaaactcgaggacctgaagcacgtgttcccacctgaggtggccgtgttcgagcctagcgacgccgagatctggcacacccagaaagccaccctcgtgtgcctggctaccggcttctaccccgaccatgtggaactgtcttggtgggtcaacggcaaagaggtgcacagcggcgtgtctaccgacccccagccactgaaagaacagcccgccctgaacgacagccggtactgcctgagcagcagactgagagtgtccgccaccttctggcagaacccccggaaccacttcagatgccaggtgcagttctacggcctgagcgagaacgacgagtggacccaggacagagccaagcccgtgacccagatcgtgtctgccgaagcctggggcagagccgattgcggctttaccagcgagagctaccagcagggcgtgctgagcgccaccatcctgtacgagatcctgctgggcaaggccaccctgtacgccgtgctggtgtctgccctggtgctgatggctatggtcaagcggaaggacagccggggaagggccaagcgatctggatctggagcaacaaacttctcactactcaaacaagcaggtgacgtggaggagaatcccgggcctactagtatggactggatttggcgcatccttttccttgtcggcgctgctaccggcgcgcattccttcgaagtccaacttgtggagtctggagggggcctggtgcagcccggcggctctctcagactgtcttgtgcggcaagcggctacaccttcacctcttactggatagaatgggtgaggcaggcacctggaaagggactggagtggattggagagattctgccaggagggggagatacaaattacaatgaaatcttcaaggggcgggccaccttttcagcggataccagcaagaatacagcttacctgcagatgaatagcctccgggcagaagataccgctgtttattattgcacgagacgggtgccaataagactggactattgggggcaagggactcttgtcaccgtcagttcaacgcgtatccagaaccctgatcctgccgtgtaccagctgcgggatagcaagagcagcgacaagagcgtgtgtctgttcaccgacttcgacagccagaccaacgtgtcccagagcaaggactccgacgtgtacatcaccgataagaccgtgctggacatgcggagcatggacttcaagagcaactccgccgtggcctggtccagcaagtccgatttcgcctgcgccaacgccttcaacaacagcattatccccgaggacacattcttcccaagccccgagatggcctgcgacgtgaagctggtggaaaagagcttcgagacagacaccaacctgaacttccagaacctgctcgtgatctggctgagaatcctgctgctgaaagtggccggctttaacctgctgatgaccctgcggctgtggtccagc

SEQ ID NO: 6169 - DNA, 1860 bp, synthetic construct
  source 1..1860: mol_type = other DNA
atggccttaccagtgaccgccttgctcctgccgctggccttgctgctccacgccgccaggccggacatcgtgatgacacagagccctgatagcctggccgtgtctctgggagagagagccaccattaactgcaaggccagccagagcgtggactacgacggcgacagcttcctgaactggtatcagcagaagcccggccagcctcctaagctgctgatctacgccgccagcaatctggaaagcggcgtgccaagcagattttccggctctggcagcggcaccgatttcaccctgacaatatccagcctccagcctgaggacgtggccgtgtactactgccagcagagcaacgacgaccctctgacctttggacagggcaccaaggtggaaatcaaactcgaggacctgaagcacgtgttcccacctgaggtggccgtgttcgagcctagcgacgccgagatctggcacacccagaaagccaccctcgtgtgcctggctaccggcttctaccccgaccatgtggaactgtcttggtgggtcaacggcaaagaggtgcacagcggcgtgtctaccgacccccagccactgaaagaacagcccgccctgaacgacagccggtactgcctgagcagcagactgagagtgtccgccaccttctggcagaacccccggaaccacttcagatgccaggtgcagttctacggcctgagcgagaacgacgagtggacccaggacagagccaagcccgtgacccagatcgtgtctgccgaagcctggggcagagccgattgcggctttaccagcgagagctaccagcagggcgtgctgagcgccaccatcctgtacgagatcctgctgggcaaggccaccctgtacgccgtgctggtgtctgccctggtgctgatggctatggtcaagcggaaggacagccggggaagggccaagcgatctggatctggagcaacaaacttctcactactcaaacaagcaggtgacgtggaggagaatcccgggcctactagtatggactggatttggcgcatccttttccttgtcggcgctgctaccggcgcgcattccttcgaagtccaacttgtggagtctggagggggcctggtgcagcccggcggctctctcagactgtcttgtgcggcaagcggctacaccttcacctcttactggatagaatgggtgaggcaggcacctggaaagggactggagtggattggagagattctgccaggagggggagatacaaattacaatgaaatcttcaaggggcgggccaccttttcagcggataccagcaagaatacagcttacctgcagatgaatagcctccgggcagaagataccgctgtttattattgcacgagacgggtgccaataagactggactattgggggcaagggactcttgtcaccgtcagttcaacgcgtatccagaaccctgatcctgccgtgtaccagctgcgggatagcaagagcagcgacaagagcgtgtgtctgttcaccgacttcgacagccagaccaacgtgtcccagagcaaggactccgacgtgtacatcaccgataagaccgtgctggacatgcggagcatggacttcaagagcaactccgccgtggcctggtccaccaagtccgatttcgcctgcgccaacgccttcaacaacagcattatccccgaggacacattcttcccaagccccgaggtggtgtgcgacgtgaagctggtggaaaagagcttcgagacagacaccaacctgaacttccagaacctggtggtgatcggcgccagaatcctgctgctgaaagtggccggctttaacctgctgatgaccctgcggctgtggtccagc

SEQ ID NO: 6170 - DNA, 1860 bp, synthetic construct
  source 1..1860: mol_type = other DNA
atggccttaccagtgaccgccttgctcctgccgctggccttgctgctccacgccgccaggccggacatcgtgatgacacagagccctgatagcctggccgtgtctctgggagagagagccaccattaactgcaaggccagccagagcgtggactacgacggcgacagcttcctgaactggtatcagcagaagcccggccagcctcctaagctgctgatctacgccgccagcaatctggaaagcggcgtgccaagcagattttccggctctggcagcggcaccgatttcaccctgacaatatccagcctccagcctgaggacgtggccgtgtactactgccagcagagcaacgacgaccctctgacctttggacagggcaccaaggtggaaatcaaactcgaggacctgaagaacgtgttcccacctgaggtggccgtgttcgagcctagcaaggccgagatcagcagaacccagaaagccaccctcgtgtgcctggctaccggcttctaccctcctcatgtggaactgtcttggtgggtcaacggcaaagaggtgcacgacggcgtgtgtaccgacccccagccactgaaagaacagcccgccctgaacgacagccggtactgcctgagcagcagactgagagtgtccgccaccttctggcagaacccccggaaccacttcagatgccaggtgcagttctacggcctgagcgagaacgacgagtggacccaggacagagccaagcccgtgacccagatcgtgtctgccgaagcctggggcagagccgattgcggctttaccagcgagagctaccagcagggcgtgctgagcgccaccatcctgtacgagatcctgctgggcaaggccaccctgtacgccgtgctggtgtctgccctggtgctgatggctatggtcaagcggaaggacagccggggaagggccaagcgatctggatctggagcaacaaacttctcactactcaaacaagcaggtgacgtggaggagaatcccgggcctactagtatggactggatttggcgcatccttttccttgtcggcgctgctaccggcgcgcattccttcgaagtccaacttgtggagtctggagggggcctggtgcagcccggcggctctctcagactgtcttgtgcggcaagcggctacaccttcacctcttactggatagaatgggtgaggcaggcacctggaaagggactggagtggattggagagattctgccaggagggggagatacaaattacaatgaaatcttcaaggggcgggccaccttttcagcggataccagcaagaatacagcttacctgcagatgaatagcctccgggcagaagataccgctgtttattattgcacgagacgggtgccaataagactggactattgggggcaagggactcttgtcaccgtcagttcaacgcgtatccagaaccctgatcctgccgtgtaccagctgcgggatagcaagagcagcgacaagttcgtgtgtctgttcaccgacttcgacagccagatcaacgtgtcccagagcaaggactccgacgtgtacatcaccgataagtgcgtgctggacatgcggagcatggacttcaagagcaactccgccgtggcctggtccaacaagtccgatttcacctgcgccaacgccttcaacaacagcattatccccgaggacacattcttcccaagccccgagagcagctgcgacgtgaagctggtggaaaagagcttcgagacagacaccaacctgaacttccagaacctgagcgtgatcggcttcagaatcctgctgctgaaagtggccggctttaacctgctgatgaccctgcggctgtggtccagc

SEQ ID NO: 6171 - DNA, 2286 bp, synthetic construct
  source 1..2286: mol_type = other DNA
atggccttaccagtgaccgccttgctcctgccgctggccttgctgctccacgccgccaggccggacatcgtgatgacacagagccctgatagcctggccgtgtctctgggagagagagccaccattaactgcaaggccagccagagcgtggactacgacggcgacagcttcctgaactggtatcagcagaagcccggccagcctcctaagctgctgatctacgccgccagcaatctggaaagcggcgtgccaagcagattttccggctctggcagcggcaccgatttcaccctgacaatatccagcctccagcctgaggacgtggccgtgtactactgccagcagagcaacgacgaccctctgacctttggacagggcaccaaggtggaaatcaaactcgaggacctgaagaacgtgttcccacctgaggtggccgtgttcgagcctagcgaggccgagatcagccacacccagaaagccaccctcgtgtgcctggctaccggcttctaccccgaccatgtggaactgtcttggtgggtcaacggcaaagaggtgcacagcggcgtgtgtaccgacccccagccactgaaagaacagcccgccctgaacgacagccggtactgcctgagcagcagactgagagtgtccgccaccttctggcagaacccccggaaccacttcagatgccaggtgcagttctacggcctgagcgagaacgacgagtggacccaggacagagccaagcccgtgacccagatcgtgtctgccgaagcctggggcagagccgattgcggctttaccagcgagagctaccagcagggcgtgctgagcgccaccatcctgtacgagatcctgctgggcaaggccaccctgtacgccgtgctggtgtctgccctggtgctgatggctatggtcaagcggaaggacagccggggaagggccaagcgatctggatctggagcaacaaacttctcactactcaaacaagcaggtgacgtggaggagaatcccgggcctactagtaccatggactggatttggcgcatccttttccttgtcggcgctgctaccggcgcccattccgggccccaggtgcagctccaagaaagcggacccggactggttaagccctctcagaccctgtctctgacctgcacagttagcggagccagcattaccacaggcgagtattattggaattggtttcggcagccaccaggcaaggggcttgagtggatgggtgctattgctgcctctggcagcaccacctactctcccagctttgagagcagaacctccatcagccgggacacctccaaaaaccagttctctctgaagctgtcctccgtgaccgctgctgacaccgccgtctattattgtggccggtctttcggcgtggcagctgtgaccacaggacagaacagaggccagggaacacttgtgaccgtgtcctctggatccggcggcggaggatctggcggaggcggatctgggggcggaggctctttcgaagtccaacttgtggagtctggagggggcctggtgcagcccggcggctctctcagactgtcttgtgcggcaagcggctacaccttcacctcttactggatagaatgggtgaggcaggcacctggaaagggactggagtggattggagagattctgccaggagggggagatacaaattacaatgaaatcttcaaggggcgggccaccttttcagcggataccagcaagaatacagcttacctgcagatgaatagcctccgggcagaagataccgctgtttattattgcacgagacgggtgccaataagactggactattgggggcaagggactcttgtcaccgtcagttcaacgcgtatccagaaccctgatcctgccgtgtaccagctgcgggatagcaagagcagcgacaagagcgtgtgtctgttcaccgacttcgacagccagaccaacgtgtcccagagcaaggactccgacgtgtacatcaccgataagtgcgtgctggacatgcggagcatggacttcaagagcaactccgccgtggcctggtccaacaagtccgatttcgcctgcgccaacgccttcaacaacagcattatccccgaggacacattcttcccaagccccgagagcagctgcgacgtgaagctggtggaaaagagcttcgagacagacaccaacctgaacttccagaacctgagcgtgatcggcttcagaatcctgctgctgaaagtggccggctttaacctgctgatgaccctgcggctgtggtccagc

SEQ ID NO: 6172 - DNA, 2709 bp, synthetic construct
  source 1..2709: mol_type = other DNA
atggccttaccagtgaccgccttgctcctgccgctggccttgctgctccacgccgccaggccgcaggttcagctgcaagagtctggccctggcctggtcaagcctagccaaacactgagcctgacctgtaccgtgtctggcggctctatcaccaccggcgagttctactggaactggttcagacagcctcctggcaaaggactggaatggatgggagccattgccgccagcggcagcacaacatacagccctagcttcgagagccggaccagcatcagcagagacaccagcaagaatcagttcagcctgaagctgagcagcgtgacagccgccgatacagccgtgtattactgcggcagatcctttggagtggccgccgtgacaaccggccagaatagaggacagggcaccctggtcacagtgtctagcggtaccggcggaggcggatctggcggcggaggtagcggtggcggaggatctgaattcgacatcgtgatgacacagagccctgatagcctggccgtgtctctgggagagagagccaccattaactgcaaggccagccagagcgtggactacgacggcgacagcttcctgaactggtatcagcagaagcccggccagcctcctaagctgctgatctacgccgccagcaatctggaaagcggcgtgccaagcagattttccggctctggcagcggcaccgatttcaccctgacaatatccagcctccagcctgaggacgtggccgtgtactactgccagcagagcaacgacgaccctctgacctttggacagggcaccaaggtggaaatcaaactcgagatccagaaccctgatcctgccgtgtaccagctgcgggatagcaagagcagcgacaagagcgtgtgtctgttcaccgacttcgacagccagaccaacgtgtcccagagcaaggactccgacgtgtacatcaccgataagtgcgtgctggacatgcggagcatggacttcaagagcaactccgccgtggcctggtccaacaagtccgatttcgcctgcgccaacgccttcaacaacagcattatccccgaggacacattcttcccaagcagcgacgtgccctgcgacgtgaagctggtggaaaagagcttcgagacagacaccaacctgaacttccagaacctgagcgtgatcggcttcagaatcctgctgctgaaagtggccggctttaacctgctgatgaccctgcggctgtggtccagccgcgccaagagaagcggatctggcgtgaagcagaccctgaatttcgacctgctgaagctggctggcgacgtggaatccaacccaggccctactagtaccatggactggatttggcgcatccttttccttgtcggcgctgctaccggcgcccattccgggcccgaagtgcaactggttgaatccggtggcggcctggtgcaacccggcggatctctcagacttagctgtgccgcctccggcagaaccttcacaatgggatggtacaggcaggctccagggaaagagagagagttcgtcgccgccatctctctgtctcccacactggcctactacgccgactctgtgaaaggccggttcaccatctccagagataatagcaagaacaccgtggtgctgcaaatgaactctctgagagccgaggatacagccctgtactattgtgccgctgaccggaagtccgtgatgagcatcagacccgattactggggacagggcacactggtcacagtgtctagtggatccggcggcggaggatctggcggaggcggatctgggggcggaggctctttcgaagtccaacttgtggagtctggagggggcctggtgcagcccggcggctctctcagactgtcttgtgcggcaagcggctacaccttcacctcttactggatagaatgggtgaggcaggcacctggaaagggactggagtggattggagagattctgccaggagggggagatacaaattacaatgaaatcttcaaggggcgggccaccttttcagcggataccagcaagaatacagcttacctgcagatgaatagcctccgggcagaagataccgctgtttattattgcacgagacgggtgccaataagactggactattgggggcaagggactcttgtcaccgtcagttcaacgcgtgaggacctgaagaacgtgttcccacctgaggtggccgtgttcgagcctagcaaggccgagatcgcccacacccagaaagccaccctcgtgtgcctggctaccggcttctaccccgaccatgtggaactgtcttggtgggtcaacggcaaagaggtgcacagcggcgtgtgtaccgacccccagccactgaaagaacagcccgccctgaacgacagccggtactgcctgagcagcagactgagagtgtccgccaccttctggcagaacccccggaaccacttcagatgccaggtgcagttctacggcctgagcgagaacgacgagtggacccaggacagagccaagcccgtgacccagatcgtgtctgccgaagcctggggcagagccgattgcggcatcaccagcgccagctaccaccagggcgtgctgagcgccaccatcctgtacgagatcctgctgggcaaggccaccctgtacgccgtgctggtgtctgccctggtgctgatggctatggtcaagcggaaggacagccgggga

SEQ ID NO: 6173 - DNA, 2298 bp, synthetic construct
  source 1..2298: mol_type = other DNA
atggccttaccagtgaccgccttgctcctgccgctggccttgctgctccacgccgccaggccgcaggttcagctgcaagagtctggccctggcctggtcaagcctagccaaacactgagcctgacctgtaccgtgtctggcggctctatcaccaccggcgagttctactggaactggttcagacagcctcctggcaaaggactggaatggatgggagccattgccgccagcggcagcacaacatacagccctagcttcgagagccggaccagcatcagcagagacaccagcaagaatcagttcagcctgaagctgagcagcgtgacagccgccgatacagccgtgtattactgcggcagatcctttggagtggccgccgtgacaaccggccagaatagaggacagggcaccctggtcacagtgtctagcggtaccggcggaggcggatctggcggcggaggtagcggtggcggaggatctgaattcgacatcgtgatgacacagagccctgatagcctggccgtgtctctgggagagagagccaccattaactgcaaggccagccagagcgtggactacgacggcgacagcttcctgaactggtatcagcagaagcccggccagcctcctaagctgctgatctacgccgccagcaatctggaaagcggcgtgccaagcagattttccggctctggcagcggcaccgatttcaccctgacaatatccagcctccagcctgaggacgtggccgtgtactactgccagcagagcaacgacgaccctctgacctttggacagggcaccaaggtggaaatcaaactcgagatccagaaccctgatcctgccgtgtaccagctgcgggatagcaagagcagcgacaagagcgtgtgtctgttcaccgacttcgacagccagaccaacgtgtcccagagcaaggactccgacgtgtacatcaccgataagtgcgtgctggacatgcggagcatggacttcaagagcaactccgccgtggcctggtccaacaagtccgatttcgcctgcgccaacgccttcaacaacagcattatccccgaggacacattcttcccaagcagcgacgtgccctgcgacgtgaagctggtggaaaagagcttcgagacagacaccaacctgaacttccagaacctgagcgtgatcggcttcagaatcctgctgctgaaagtggccggctttaacctgctgatgaccctgcggctgtggtccagccgcgccaagagaagcggatctggcgtgaagcagaccctgaatttcgacctgctgaagctggctggcgacgtggaatccaacccaggccctactagtaccatggactggatttggcgcatccttttccttgtcggcgctgctaccggcgcccattccttcgaagtccaacttgtggagtctggagggggcctggtgcagcccggcggctctctcagactgtcttgtgcggcaagcggctacaccttcacctcttactggatagaatgggtgaggcaggcacctggaaagggactggagtggattggagagattctgccaggagggggagatacaaattacaatgaaatcttcaaggggcgggccaccttttcagcggataccagcaagaatacagcttacctgcagatgaatagcctccgggcagaagataccgctgtttattattgcacgagacgggtgccaataagactggactattgggggcaagggactcttgtcaccgtcagttcaacgcgtgaggacctgaagaacgtgttcccacctgaggtggccgtgttcgagcctagcaaggccgagatcgcccacacccagaaagccaccctcgtgtgcctggctaccggcttctaccccgaccatgtggaactgtcttggtgggtcaacggcaaagaggtgcacagcggcgtgtgtaccgacccccagccactgaaagaacagcccgccctgaacgacagccggtactgcctgagcagcagactgagagtgtccgccaccttctggcagaacccccggaaccacttcagatgccaggtgcagttctacggcctgagcgagaacgacgagtggacccaggacagagccaagcccgtgacccagatcgtgtctgccgaagcctggggcagagccgattgcggcatcaccagcgccagctaccaccagggcgtgctgagcgccaccatcctgtacgagatcctgctgggcaaggccaccctgtacgccgtgctggtgtctgccctggtgctgatggctatggtcaagcggaaggacagccgggga

SEQ ID NO: 6174 - DNA, 2697 bp, synthetic construct
  source 1..2697: mol_type = other DNA
atggccttaccagtgaccgccttgctcctgccgctggccttgctgctccacgccgccaggccggaagtgcagctggttgaatctggcggaggactggttcaggctggcggatctctgagactgtcttgtgccgccagcggcagaacctttagcatgggctggtttagacaggcccctggcaaagagagagagttcgtcgccgccatcacatactctggcggcagcccttactacgccgactctgtgaagggcagattcaccatcagccgggacaacgccaagaacaccgtgtacctccagatgaacagcctgaagcctgaggacaccgccgtgtactactgcgccgccaatccaacatacggcagcgactggaacgccgagaattggggccagggaacccaagtgacagtgtctagcggtaccggcggaggcggatctggcggcggaggtagcggtggcggaggatctgaattcgacatcgtgatgacacagagccctgatagcctggccgtgtctctgggagagagagccaccattaactgcaaggccagccagagcgtggactacgacggcgacagcttcctgaactggtatcagcagaagcccggccagcctcctaagctgctgatctacgccgccagcaatctggaaagcggcgtgccaagcagattttccggctctggcagcggcaccgatttcaccctgacaatatccagcctccagcctgaggacgtggccgtgtactactgccagcagagcaacgacgaccctctgacctttggacagggcaccaaggtggaaatcaaactcgaggacctgaagaacgtgttcccacctgaggtggccgtgttcgagcctagcgaggccgagatcagccacacccagaaagccaccctcgtgtgcctggctaccggcttctaccccgaccatgtggaactgtcttggtgggtcaacggcaaagaggtgcacagcggcgtgtgtaccgacccccagccactgaaagaacagcccgccctgaacgacagccggtactgcctgagcagcagactgagagtgtccgccaccttctggcagaacccccggaaccacttcagatgccaggtgcagttctacggcctgagcgagaacgacgagtggacccaggacagagccaagcccgtgacccagatcgtgtctgccgaagcctggggcagagccgattgcggctttaccagcgagagctaccagcagggcgtgctgagcgccaccatcctgtacgagatcctgctgggcaaggccaccctgtacgccgtgctggtgtctgccctggtgctgatggctatggtcaagcggaaggacagccggggaagggccaagcgatctggatctggagcaacaaacttctcactactcaaacaagcaggtgacgtggaggagaatcccgggcctactagtaccatggactggatttggcgcatccttttccttgtcggcgctgctaccggcgcccattccgggccccaggtgcagctccaagaaagcggacccggactggttaagccctctcagaccctgtctctgacctgcacagttagcggagccagcattaccacaggcgagtattattggaattggtttcggcagccaccaggcaaggggcttgagtggatgggtgctattgctgcctctggcagcaccacctactctcccagctttgagagcagaacctccatcagccgggacacctccaaaaaccagttctctctgaagctgtcctccgtgaccgctgctgacaccgccgtctattattgtggccggtctttcggcgtggcagctgtgaccacaggacagaacagaggccagggaacacttgtgaccgtgtcctctggatccggcggcggaggatctggcggaggcggatctgggggcggaggctctttcgaagtccaacttgtggagtctggagggggcctggtgcagcccggcggctctctcagactgtcttgtgcggcaagcggctacaccttcacctcttactggatagaatgggtgaggcaggcacctggaaagggactggagtggattggagagattctgccaggagggggagatacaaattacaatgaaatcttcaaggggcgggccaccttttcagcggataccagcaagaatacagcttacctgcagatgaatagcctccgggcagaagataccgctgtttattattgcacgagacgggtgccaataagactggactattgggggcaagggactcttgtcaccgtcagttcaacgcgtatccagaaccctgatcctgccgtgtaccagctgcgggatagcaagagcagcgacaagagcgtgtgtctgttcaccgacttcgacagccagaccaacgtgtcccagagcaaggactccgacgtgtacatcaccgataagtgcgtgctggacatgcggagcatggacttcaagagcaactccgccgtggcctggtccaacaagtccgatttcgcctgcgccaacgccttcaacaacagcattatccccgaggacacattcttcccaagccccgagagcagctgcgacgtgaagctggtggaaaagagcttcgagacagacaccaacctgaacttccagaacctgagcgtgatcggcttcagaatcctgctgctgaaagtggccggctttaacctgctgatgaccctgcggctgtggtccagc

SEQ ID NO: 6175 - DNA, 2718 bp, synthetic construct
  source 1..2718: mol_type = other DNA
atggccttaccagtgaccgccttgctcctgccgctggccttgctgctccacgccgccaggccggaagtgcagctggttgaatctggcggaggactggttcaggctggcggatctctgagactgtcttgtgccgccagcggcagaacctttagcatgggctggtttagacaggcccctggcaaagagagagagttcgtcgccgccatcacatactctggcggcagcccttactacgccgactctgtgaagggcagattcaccatcagccgggacaacgccaagaacaccgtgtacctccagatgaacagcctgaagcctgaggacaccgccgtgtactactgcgccgccaatccaacatacggcagcgactggaacgccgagaattggggccagggaacccaagtgacagtgtctagcggtaccggcggaggcggatctggcggcggaggtagcggtggcggaggatctgaattcgacatcgtgatgacacagagccctgatagcctggccgtgtctctgggagagagagccaccattaactgcaaggccagccagagcgtggactacgacggcgacagcttcctgaactggtatcagcagaagcccggccagcctcctaagctgctgatctacgccgccagcaatctggaaagcggcgtgccaagcagattttccggctctggcagcggcaccgatttcaccctgacaatatccagcctccagcctgaggacgtggccgtgtactactgccagcagagcaacgacgaccctctgacctttggacagggcaccaaggtggaaatcaaactcgagatccagaaccctgatcctgccgtgtaccagctgcgggatagcaagagcagcgacaagagcgtgtgtctgttcaccgacttcgacagccagaccaacgtgtcccagagcaaggactccgacgtgtacatcaccgataagtgcgtgctggacatgcggagcatggacttcaagagcaactccgccgtggcctggtccaacaagtccgatttcgcctgcgccaacgccttcaacaacagcattatccccgaggacacattcttcccaagcagcgacgtgccctgcgacgtgaagctggtggaaaagagcttcgagacagacaccaacctgaacttccagaacctgagcgtgatcggcttcagaatcctgctgctgaaagtggccggctttaacctgctgatgaccctgcggctgtggtccagccgcgccaagagaagcggatctggcgtgaagcagaccctgaatttcgacctgctgaagctggctggcgacgtggaatccaacccaggccctactagtaccatggactggatttggcgcatccttttccttgtcggcgctgctaccggcgcccattccgggccccaggtgcagctggttgaatctggcggaggactggttcagcctggcggatctctgagactgtcttgtgccgccagcggcaacatcaacagcagaaactgcatgggctggttcagacaggcccctggcaagggaagagaaggcgtggcagctatcggccaagtgaccggcagaacctactacgtggacagcgtgaagggcagattcaccatcagcctggacaacagcaagaacaccctgtacctccagatgaacagcctgagagccgaggacaccgccgtgtactattgtgctgctgcccctggctgtctgctgtctgcacttagaagcgccgactacagaaactggggccagggcacactggtcaccgtttcttctggatccggcggcggaggatctggcggaggcggatctgggggcggaggctctttcgaagtccaacttgtggagtctggagggggcctggtgcagcccggcggctctctcagactgtcttgtgcggcaagcggctacaccttcacctcttactggatagaatgggtgaggcaggcacctggaaagggactggagtggattggagagattctgccaggagggggagatacaaattacaatgaaatcttcaaggggcgggccaccttttcagcggataccagcaagaatacagcttacctgcagatgaatagcctccgggcagaagataccgctgtttattattgcacgagacgggtgccaataagactggactattgggggcaagggactcttgtcaccgtcagttcaacgcgtgaggacctgaagaacgtgttcccacctgaggtggccgtgttcgagcctagcaaggccgagatcgcccacacccagaaagccaccctcgtgtgcctggctaccggcttctaccccgaccatgtggaactgtcttggtgggtcaacggcaaagaggtgcacagcggcgtgtgtaccgacccccagccactgaaagaacagcccgccctgaacgacagccggtactgcctgagcagcagactgagagtgtccgccaccttctggcagaacccccggaaccacttcagatgccaggtgcagttctacggcctgagcgagaacgacgagtggacccaggacagagccaagcccgtgacccagatcgtgtctgccgaagcctggggcagagccgattgcggcatcaccagcgccagctaccaccagggcgtgctgagcgccaccatcctgtacgagatcctgctgggcaaggccaccctgtacgccgtgctggtgtctgccctggtgctgatggctatggtcaagcggaaggacagccgggga

SEQ ID NO: 6176 - DNA, 2706 bp, synthetic construct
  source 1..2706: mol_type = other DNA
atggccttaccagtgaccgccttgctcctgccgctggccttgctgctccacgccgccaggccggaagtgcagctggttgaatctggcggaggactggttcaggctggcggatctctgagactgtcttgtgccgccagcggcagaacctttagcatgggctggtttagacaggcccctggcaaagagagagagttcgtcgccgccatcacatactctggcggcagcccttactacgccgactctgtgaagggcagattcaccatcagccgggacaacgccaagaacaccgtgtacctccagatgaacagcctgaagcctgaggacaccgccgtgtactactgcgccgccaatccaacatacggcagcgactggaacgccgagaattggggccagggaacccaagtgacagtgtctagcggtaccggcggaggcggatctggcggcggaggtagcggtggcggaggatctgaattcgacatcgtgatgacacagagccctgatagcctggccgtgtctctgggagagagagccaccattaactgcaaggccagccagagcgtggactacgacggcgacagcttcctgaactggtatcagcagaagcccggccagcctcctaagctgctgatctacgccgccagcaatctggaaagcggcgtgccaagcagattttccggctctggcagcggcaccgatttcaccctgacaatatccagcctccagcctgaggacgtggccgtgtactactgccagcagagcaacgacgaccctctgacctttggacagggcaccaaggtggaaatcaaactcgaggacctgaagaacgtgttcccacctgaggtggccgtgttcgagcctagcgaggccgagatcagccacacccagaaagccaccctcgtgtgcctggctaccggcttctaccccgaccatgtggaactgtcttggtgggtcaacggcaaagaggtgcacagcggcgtgtgtaccgacccccagccactgaaagaacagcccgccctgaacgacagccggtactgcctgagcagcagactgagagtgtccgccaccttctggcagaacccccggaaccacttcagatgccaggtgcagttctacggcctgagcgagaacgacgagtggacccaggacagagccaagcccgtgacccagatcgtgtctgccgaagcctggggcagagccgattgcggctttaccagcgagagctaccagcagggcgtgctgagcgccaccatcctgtacgagatcctgctgggcaaggccaccctgtacgccgtgctggtgtctgccctggtgctgatggctatggtcaagcggaaggacagccggggaagggccaagcgatctggatctggagcaacaaacttctcactactcaaacaagcaggtgacgtggaggagaatcccgggcctactagtaccatggactggatttggcgcatccttttccttgtcggcgctgctaccggcgcccattccgggccccaggtgcagctggttgaatctggcggaggactggttcagcctggcggatctctgagactgtcttgtgccgccagcggcaacatcaacagcagaaactgcatgggctggttcagacaggcccctggcaagggaagagaaggcgtggcagctatcggccaagtgaccggcagaacctactacgtggacagcgtgaagggcagattcaccatcagcctggacaacagcaagaacaccctgtacctccagatgaacagcctgagagccgaggacaccgccgtgtactattgtgctgctgcccctggctgtctgctgtctgcacttagaagcgccgactacagaaactggggccagggcacactggtcaccgtttcttctggatccggcggcggaggatctggcggaggcggatctgggggcggaggctctttcgaagtccaacttgtggagtctggagggggcctggtgcagcccggcggctctctcagactgtcttgtgcggcaagcggctacaccttcacctcttactggatagaatgggtgaggcaggcacctggaaagggactggagtggattggagagattctgccaggagggggagatacaaattacaatgaaatcttcaaggggcgggccaccttttcagcggataccagcaagaatacagcttacctgcagatgaatagcctccgggcagaagataccgctgtttattattgcacgagacgggtgccaataagactggactattgggggcaagggactcttgtcaccgtcagttcaacgcgtatccagaaccctgatcctgccgtgtaccagctgcgggatagcaagagcagcgacaagagcgtgtgtctgttcaccgacttcgacagccagaccaacgtgtcccagagcaaggactccgacgtgtacatcaccgataagtgcgtgctggacatgcggagcatggacttcaagagcaactccgccgtggcctggtccaacaagtccgatttcgcctgcgccaacgccttcaacaacagcattatccccgaggacacattcttcccaagccccgagagcagctgcgacgtgaagctggtggaaaagagcttcgagacagacaccaacctgaacttccagaacctgagcgtgatcggcttcagaatcctgctgctgaaagtggccggctttaacctgctgatgaccctgcggctgtggtccagc

SEQ ID NO: 6177 - DNA, 2706 bp, synthetic construct
  source 1..2706: mol_type = other DNA
atggccttaccagtgaccgccttgctcctgccgctggccttgctgctccacgccgccaggccggaagtgcaactggttgaatccggtggcggcctggtgcaagcaggcggatctctcagacttagctgtgccgcctccggcagaaccttcacaatgggatggtttaggcaggctccagggaaagagagagagttcgtcgccgccatctctctgtctcccacactggcctactacgccgactctgtgaaaggccggttcaccatctccagagataatgccaagaacaccgtggtgctgcaaatgaactctctgaaacccgaggatacagccctgtactattgtgccgctgaccggaagtccgtgatgagcatcagacccgattactggggacagggcacacaagtcacagtgtcctctggtaccggcggaggcggatctggcggcggaggtagcggtggcggaggatctgaattcgacatcgtgatgacacagagccctgatagcctggccgtgtctctgggagagagagccaccattaactgcaaggccagccagagcgtggactacgacggcgacagcttcctgaactggtatcagcagaagcccggccagcctcctaagctgctgatctacgccgccagcaatctggaaagcggcgtgccaagcagattttccggctctggcagcggcaccgatttcaccctgacaatatccagcctccagcctgaggacgtggccgtgtactactgccagcagagcaacgacgaccctctgacctttggacagggcaccaaggtggaaatcaaactcgaggacctgaagaacgtgttcccacctgaggtggccgtgttcgagcctagcgaggccgagatcagccacacccagaaagccaccctcgtgtgcctggctaccggcttctaccccgaccatgtggaactgtcttggtgggtcaacggcaaagaggtgcacagcggcgtgtgtaccgacccccagccactgaaagaacagcccgccctgaacgacagccggtactgcctgagcagcagactgagagtgtccgccaccttctggcagaacccccggaaccacttcagatgccaggtgcagttctacggcctgagcgagaacgacgagtggacccaggacagagccaagcccgtgacccagatcgtgtctgccgaagcctggggcagagccgattgcggctttaccagcgagagctaccagcagggcgtgctgagcgccaccatcctgtacgagatcctgctgggcaaggccaccctgtacgccgtgctggtgtctgccctggtgctgatggctatggtcaagcggaaggacagccggggaagggccaagcgatctggatctggagcaacaaacttctcactactcaaacaagcaggtgacgtggaggagaatcccgggcctactagtaccatggactggatttggcgcatccttttccttgtcggcgctgctaccggcgcccattccgggccccaggtgcagctggttgaatctggcggaggactggttcagcctggcggatctctgagactgtcttgtgccgccagcggcaacatcaacagcagaaactgcatgggctggttcagacaggcccctggcaagggaagagaaggcgtggcagctatcggccaagtgaccggcagaacctactacgtggacagcgtgaagggcagattcaccatcagcctggacaacagcaagaacaccctgtacctccagatgaacagcctgagagccgaggacaccgccgtgtactattgtgctgctgcccctggctgtctgctgtctgcacttagaagcgccgactacagaaactggggccagggcacactggtcaccgtttcttctggatccggcggcggaggatctggcggaggcggatctgggggcggaggctctttcgaagtccaacttgtggagtctggagggggcctggtgcagcccggcggctctctcagactgtcttgtgcggcaagcggctacaccttcacctcttactggatagaatgggtgaggcaggcacctggaaagggactggagtggattggagagattctgccaggagggggagatacaaattacaatgaaatcttcaaggggcgggccaccttttcagcggataccagcaagaatacagcttacctgcagatgaatagcctccgggcagaagataccgctgtttattattgcacgagacgggtgccaataagactggactattgggggcaagggactcttgtcaccgtcagttcaacgcgtatccagaaccctgatcctgccgtgtaccagctgcgggatagcaagagcagcgacaagagcgtgtgtctgttcaccgacttcgacagccagaccaacgtgtcccagagcaaggactccgacgtgtacatcaccgataagtgcgtgctggacatgcggagcatggacttcaagagcaactccgccgtggcctggtccaacaagtccgatttcgcctgcgccaacgccttcaacaacagcattatccccgaggacacattcttcccaagccccgagagcagctgcgacgtgaagctggtggaaaagagcttcgagacagacaccaacctgaacttccagaacctgagcgtgatcggcttcagaatcctgctgctgaaagtggccggctttaacctgctgatgaccctgcggctgtggtccagc

SEQ ID NO: 6178 - DNA, 2718 bp, synthetic construct
  source 1..2718: mol_type = other DNA
atggccttaccagtgaccgccttgctcctgccgctggccttgctgctccacgccgccaggccgcaggttcagctgcaagagtctggccctggcctggtcaagcctagccaaacactgagcctgacctgtaccgtgtctggcggctctatcaccaccggcgagttctactggaactggttcagacagcctcctggcaaaggactggaatggatgggagccattgccgccagcggcagcacaacatacagccctagcttcgagagccggaccagcatcagcagagacaccagcaagaatcagttcagcctgaagctgagcagcgtgacagccgccgatacagccgtgtattactgcggcagatcctttggagtggccgccgtgacaaccggccagaatagaggacagggcaccctggtcacagtgtctagcggtaccggcggaggcggatctggcggcggaggtagcggtggcggaggatctgaattcgacatcgtgatgacacagagccctgatagcctggccgtgtctctgggagagagagccaccattaactgcaaggccagccagagcgtggactacgacggcgacagcttcctgaactggtatcagcagaagcccggccagcctcctaagctgctgatctacgccgccagcaatctggaaagcggcgtgccaagcagattttccggctctggcagcggcaccgatttcaccctgacaatatccagcctccagcctgaggacgtggccgtgtactactgccagcagagcaacgacgaccctctgacctttggacagggcaccaaggtggaaatcaaactcgaggacctgaagaacgtgttcccacctgaggtggccgtgttcgagcctagcgaggccgagatcagccacacccagaaagccaccctcgtgtgcctggctaccggcttctaccccgaccatgtggaactgtcttggtgggtcaacggcaaagaggtgcacagcggcgtgtgtaccgacccccagccactgaaagaacagcccgccctgaacgacagccggtactgcctgagcagcagactgagagtgtccgccaccttctggcagaacccccggaaccacttcagatgccaggtgcagttctacggcctgagcgagaacgacgagtggacccaggacagagccaagcccgtgacccagatcgtgtctgccgaagcctggggcagagccgattgcggctttaccagcgagagctaccagcagggcgtgctgagcgccaccatcctgtacgagatcctgctgggcaaggccaccctgtacgccgtgctggtgtctgccctggtgctgatggctatggtcaagcggaaggacagccggggaagggccaagcgatctggatctggagcaacaaacttctcactactcaaacaagcaggtgacgtggaggagaatcccgggcctactagtaccatggactggatttggcgcatccttttccttgtcggcgctgctaccggcgcccattccgggccccaggtgcagctggttgaatctggcggaggactggttcagcctggcggatctctgagactgtcttgtgccgccagcggcaacatcaacagcagaaactgcatgggctggttcagacaggcccctggcaagggaagagaaggcgtggcagctatcggccaagtgaccggcagaacctactacgtggacagcgtgaagggcagattcaccatcagcctggacaacagcaagaacaccctgtacctccagatgaacagcctgagagccgaggacaccgccgtgtactattgtgctgctgcccctggctgtctgctgtctgcacttagaagcgccgactacagaaactggggccagggcacactggtcaccgtttcttctggatccggcggcggaggatctggcggaggcggatctgggggcggaggctctttcgaagtccaacttgtggagtctggagggggcctggtgcagcccggcggctctctcagactgtcttgtgcggcaagcggctacaccttcacctcttactggatagaatgggtgaggcaggcacctggaaagggactggagtggattggagagattctgccaggagggggagatacaaattacaatgaaatcttcaaggggcgggccaccttttcagcggataccagcaagaatacagcttacctgcagatgaatagcctccgggcagaagataccgctgtttattattgcacgagacgggtgccaataagactggactattgggggcaagggactcttgtcaccgtcagttcaacgcgtatccagaaccctgatcctgccgtgtaccagctgcgggatagcaagagcagcgacaagagcgtgtgtctgttcaccgacttcgacagccagaccaacgtgtcccagagcaaggactccgacgtgtacatcaccgataagtgcgtgctggacatgcggagcatggacttcaagagcaactccgccgtggcctggtccaacaagtccgatttcgcctgcgccaacgccttcaacaacagcattatccccgaggacacattcttcccaagccccgagagcagctgcgacgtgaagctggtggaaaagagcttcgagacagacaccaacctgaacttccagaacctgagcgtgatcggcttcagaatcctgctgctgaaagtggccggctttaacctgctgatgaccctgcggctgtggtccagc

SEQ ID NO: 6179 - DNA, 1458 bp, synthetic construct
  source 1..1458: mol_type = other DNA
atggccttaccagtgaccgccttgctcctgccgctggccttgctgctccacgccgccaggccggacatcgtgatgacacagagccctgatagcctggccgtgtctctgggagagagagccaccattaactgcaaggccagccagagcgtggactacgacggcgacagcttcctgaactggtatcagcagaagcccggccagcctcctaagctgctgatctacgccgccagcaatctggaaagcggcgtgccaagcagattttccggctctggcagcggcaccgatttcaccctgacaatatccagcctccagcctgaggacgtggccgtgtactactgccagcagagcaacgacgaccctctgacctttggacagggcaccaaggtggaaatcaaaggcggaggcggaagtggaggcggaggatctggcggcggaggctctgaagtccaacttgtggagtctggagggggcctggtgcagcccggcggctctctcagactgtcttgtgcggcaagcggctacaccttcagctcttactggatagaatgggtgaggcaggcacctggaaagggactggagtggattggagagattctgccaggagggggagatacaaattacaatgaaatcttcaaggggcgggccaccttttcagcggataccagcaagaatacagcttacctgcagatgaatagcctccgggcagaagataccgctgtttattattgcacgagacgggtgccaataagactggactattgggggcaagggactcttgtcaccgtcagttcaacgcgtaaaattgaagttatgtatcctcctccttacctagacaatgagaagagcaatggaaccattatccatgtgaaagggaaacacctttgtccaagtcccctatttcccggaccttctaagcccttttgggtgctggtggtggttgggggagtcctggcttgctatagcttgctagtaacagtggcctttattattttctgggtgaggagtaagaggagcaggctcctgcacagtgactacatgaacatgactccacgccgccccggacccacccgcaagcattaccagccctatgccccaccacgcgacttcgcagcctatcgctccagagtgaagttcagcaggagcgcagacgcccccgcgtaccagcagggccagaaccagctctataacgagctcaatctaggacgaagagaggagtacgatgttttggacaagagacgtggccgggaccctgagatggggggaaagccgagaaggaagaaccctcaggaaggcctgtacaatgaactgcagaaagataagatggcggaggcctacagtgagattgggatgaaaggcgagcgccggaggggcaaggggcacgatggcctttaccagggtctcagtacagccaccaaggacacctacgacgcccttcacatgcaggccctgccccctcgc

SEQ ID NO: 6180 - DNA, 1476 bp, synthetic construct
  source 1..1476: mol_type = other DNA
atggccttaccagtgaccgccttgctcctgccgctggccttgctgctccacgccgccaggccggacatcgtgatgacacagagccctgatagcctggccgtgtctctgggagagagagccaccattaactgcaaggccagccagagcgtggactacgacggcgacagcttcctgaactggtatcagcagaagcccggccagcctcctaagctgctgatctacgccgccagcaatctggaaagcggcgtgccaagcagattttccggctctggcagcggcaccgatttcaccctgacaatatccagcctccagcctgaggacgtggccgtgtactactgccagcagagcaacgacgaccctctgacctttggacagggcaccaaggtggaaatcaaaggcggaggcggaagtggaggcggaggatctggcggcggaggctctgaagtccaacttgtggagtctggagggggcctggtgcagcccggcggctctctcagactgtcttgtgcggcaagcggctacaccttcagctcttactggatagaatgggtgaggcaggcacctggaaagggactggagtggattggagagattctgccaggagggggagatacaaattacaatgaaatcttcaaggggcgggccaccttttcagcggataccagcaagaatacagcttacctgcagatgaatagcctccgggcagaagataccgctgtttattattgcacgagacgggtgccaataagactggactattgggggcaagggactcttgtcaccgtcagttcaacgcgtgcgaagcccaccacgacgccagcgccgcgaccaccaacaccggcgcccaccatcgcgtcgcagcccctgtccctgcgcccagaggcgtgccggccagcggcggggggcgcagtgcacacgagggggctggacttcgcctgtgacatctacatctgggcgcccttggccgggacttgtggggtccttctcctgtcactggttatcaccctttactgcaaacggggcagaaagaaactcctgtatatattcaaacaaccatttatgagaccagtacaaactactcaagaggaagatggctgtagctgccgatttccagaagaagaagaaggaggatgtgaactgagagtgaagttcagcaggagcgcagacgcccccgcgtaccagcagggccagaaccagctctataacgagctgaatctaggacgaagagaggagtacgatgttttggacaagagacgtggccgggaccctgagatggggggaaagccgagaaggaagaaccctcaggaaggcctgtacaatgaactgcagaaagataagatggcggaggcctacagtgagattgggatgaaaggcgagcgccggaggggcaaggggcacgatggcctttaccagggtctcagtacagccaccaaggacacctacgacgcccttcacatgcaggccctgccccctcgc

SEQ ID NO: 6181 - DNA, 1476 bp, synthetic construct
  source 1..1476: mol_type = other DNA
atggccttaccagtgaccgccttgctcctgccgctggccttgctgctccacgccgccaggccggaagtccaacttgtggagtctggagggggcctggtgcagcccggcggctctctcagactgtcttgtgcggcaagcggctacaccttcagctcttactggatagaatgggtgaggcaggcacctggaaagggactggagtggattggagagattctgccaggagggggagatacaaattacaatgaaatcttcaaggggcgggccaccttttcagcggataccagcaagaatacagcttacctgcagatgaatagcctccgggcagaagataccgctgtttattattgcacgagacgggtgccaataagactggactattgggggcaagggactcttgtcaccgtcagttcaggcggaggcggaagtggaggcggaggatctggcggcggaggctctgacatcgtgatgacacagagccctgatagcctggccgtgtctctgggagagagagccaccattaactgcaaggccagccagagcgtggactacgacggcgacagcttcctgaactggtatcagcagaagcccggccagcctcctaagctgctgatctacgccgccagcaatctggaaagcggcgtgccaagcagattttccggctctggcagcggcaccgatttcaccctgacaatatccagcctccagcctgaggacgtggccgtgtactactgccagcagagcaacgacgaccctctgacctttggacagggcaccaaggtggaaatcaaaacgcgtgcgaagcccaccacgacgccagcgccgcgaccaccaacaccggcgcccaccatcgcgtcgcagcccctgtccctgcgcccagaggcgtgccggccagcggcggggggcgcagtgcacacgagggggctggacttcgcctgtgacatctacatctgggcgcccttggccgggacttgtggggtccttctcctgtcactggttatcaccctttactgcaaacggggcagaaagaaactcctgtatatattcaaacaaccatttatgagaccagtacaaactactcaagaggaagatggctgtagctgccgatttccagaagaagaagaaggaggatgtgaactgagagtgaagttcagcaggagcgcagacgcccccgcgtaccagcagggccagaaccagctctataacgagctgaatctaggacgaagagaggagtacgatgttttggacaagagacgtggccgggaccctgagatggggggaaagccgagaaggaagaaccctcaggaaggcctgtacaatgaactgcagaaagataagatggcggaggcctacagtgagattgggatgaaaggcgagcgccggaggggcaaggggcacgatggcctttaccagggtctcagtacagccaccaaggacacctacgacgcccttcacatgcaggccctgccccctcgc

SEQ ID NO: 6182 - DNA, 1872 bp, synthetic construct
  source 1..1872: mol_type = other DNA
atggccttaccagtgaccgccttgctcctgccgctggccttgctgctccacgccgccaggccggacatcgtgatgacacagagccctgatagcctggccgtgtctctgggagagagagccaccattaactgcaaggccagccagagcgtggactacgacggcgacagcttcctgaactggtatcagcagaagcccggccagcctcctaagctgctgatctacgccgccagcaatctggaaagcggcgtgccaagcagattttccggctctggcagcggcaccgatttcaccctgacaatatccagcctccagcctgaggacgtggccgtgtactactgccagcagagcaacgacgaccctctgacctttggacagggcaccaaggtggaaatcaaactcgagatccagaaccctgatcctgccgtgtaccagctgcgggatagcaagagcagcgacaagagcgtgtgtctgttcaccgacttcgacagccagaccaacgtgtcccagagcaaggactccgacgtgtacatcaccgataagtgcgtgctggacatgcggagcatggacttcaagagcaactccgccgtggcctggtccaacaagtccgatttcgcctgcgccaacgccttcaacaacagcattatccccgaggacacattcttcccaagcagcgacgtgccctgcgacgtgaagctggtggaaaagagcttcgagacagacaccaacctgaacttccagaacctgagcgtgatcggcttcagaatcctgctgctgaaagtggccggctttaacctgctgatgaccctgcggctgtggtccagccgcgccaagagaagcggatctggcgtgaagcagaccctgaatttcgacctgctgaagctggctggcgacgtggaatccaacccaggccctactagtatggactggatttggcgcatccttttccttgtcggcgctgctaccggcgcgcattccttcgaagtccaacttgtggagtctggagggggcctggtgcagcccggcggctctctcagactgtcttgtgcggcaagcggctacaccttcagctcttactggatagaatgggtgaggcaggcacctggaaagggactggagtggattggagagattctgccaggagggggagatacaaattacaatgaaatcttcaaggggcgggccaccttttcagcggataccagcaagaatacagcttacctgcagatgaatagcctccgggcagaagataccgctgtttattattgcacgagacgggtgccaataagactggactattgggggcaagggactcttgtcaccgtcagttcaacgcgtgaggacctgaagaacgtgttcccacctgaggtggccgtgttcgagcctagcaaggccgagatcgcccacacccagaaagccaccctcgtgtgcctggctaccggcttctaccccgaccatgtggaactgtcttggtgggtcaacggcaaagaggtgcacagcggcgtgtgtaccgacccccagccactgaaagaacagcccgccctgaacgacagccggtactgcctgagcagcagactgagagtgtccgccaccttctggcagaacccccggaaccacttcagatgccaggtgcagttctacggcctgagcgagaacgacgagtggacccaggacagagccaagcccgtgacccagatcgtgtctgccgaagcctggggcagagccgattgcggcatcaccagcgccagctaccaccagggcgtgctgagcgccaccatcctgtacgagatcctgctgggcaaggccaccctgtacgccgtgctggtgtctgccctggtgctgatggctatggtcaagcggaaggacagccgggga

SEQ ID NO: 6183 - DNA, 1860 bp, synthetic construct
  source 1..1860: mol_type = other DNA
atggccttaccagtgaccgccttgctcctgccgctggccttgctgctccacgccgccaggccggacatcgtgatgacacagagccctgatagcctggccgtgtctctgggagagagagccaccattaactgcaaggccagccagagcgtggactacgacggcgacagcttcctgaactggtatcagcagaagcccggccagcctcctaagctgctgatctacgccgccagcaatctggaaagcggcgtgccaagcagattttccggctctggcagcggcaccgatttcaccctgacaatatccagcctccagcctgaggacgtggccgtgtactactgccagcagagcaacgacgaccctctgacctttggacagggcaccaaggtggaaatcaaactcgaggacctgaagaacgtgttcccacctgaggtggccgtgttcgagcctagcaaggccgagatcgcccacacccagaaagccaccctcgtgtgcctggctaccggcttctaccccgaccatgtggaactgtcttggtgggtcaacggcaaagaggtgcacagcggcgtgtgtaccgacccccagccactgaaagaacagcccgccctgaacgacagccggtactgcctgagcagcagactgagagtgtccgccaccttctggcagaacccccggaaccacttcagatgccaggtgcagttctacggcctgagcgagaacgacgagtggacccaggacagagccaagcccgtgacccagatcgtgtctgccgaagcctggggcagagccgattgcggcatcaccagcgccagctaccaccagggcgtgctgagcgccaccatcctgtacgagatcctgctgggcaaggccaccctgtacgccgtgctggtgtctgccctggtgctgatggctatggtcaagcggaaggacagccggggaagggccaagcgatctggatctggagcaacaaacttctcactactcaaacaagcaggtgacgtggaggagaatcccgggcctactagtatggactggatttggcgcatccttttccttgtcggcgctgctaccggcgcgcattccttcgaagtccaacttgtggagtctggagggggcctggtgcagcccggcggctctctcagactgtcttgtgcggcaagcggctacaccttcagctcttactggatagaatgggtgaggcaggcacctggaaagggactggagtggattggagagattctgccaggagggggagatacaaattacaatgaaatcttcaaggggcgggccaccttttcagcggataccagcaagaatacagcttacctgcagatgaatagcctccgggcagaagataccgctgtttattattgcacgagacgggtgccaataagactggactattgggggcaagggactcttgtcaccgtcagttcaacgcgtatccagaaccctgatcctgccgtgtaccagctgcgggatagcaagagcagcgacaagagcgtgtgtctgttcaccgacttcgacagccagaccaacgtgtcccagagcaaggactccgacgtgtacatcaccgataagtgcgtgctggacatgcggagcatggacttcaagagcaactccgccgtggcctggtccaacaagtccgatttcgcctgcgccaacgccttcaacaacagcattatccccgaggacacattcttcccaagcagcgacgtgccctgcgacgtgaagctggtggaaaagagcttcgagacagacaccaacctgaacttccagaacctgagcgtgatcggcttcagaatcctgctgctgaaagtggccggctttaacctgctgatgaccctgcggctgtggtccagc

SEQ ID NO: 6184 - DNA, 1860 bp, synthetic construct; identical to SEQ ID NO: 4743
  source 1..1860: mol_type = other DNA

SEQ ID NO: 6185 - DNA, 1872 bp, synthetic construct
  source 1..1872: mol_type = other DNA
atggccttaccagtgaccgccttgctcctgccgctggccttgctgctccacgccgccaggccggacatcgtgatgacacagagccctgatagcctggccgtgtctctgggagagagagccaccattaactgcaaggccagccagagcgtggactacgacggcgacagcttcctgaactggtatcagcagaagcccggccagcctcctaagctgctgatctacgccgccagcaatctggaaagcggcgtgccaagcagattttccggctctggcagcggcaccgatttcaccctgacaatatccagcctccagcctgaggacgtggccgtgtactactgccagcagagcaacgacgaccctctgacctttggacagggcaccaaggtggaaatcaaactcgagatccagaaccctgatcctgccgtgtaccagctgcgggatagcaagagcagcgacaagagcgtgtgtctgttcaccgacttcgacagccagaccaacgtgtcccagagcaaggactccgacgtgtacatcaccgataagtgcgtgctggacatgcggagcatggacttcaagagcaactccgccgtggcctggtccaacaagtccgatttcgcctgcgccaacgccttcaacaacagcattatccccgaggacacattcttcccaagccccgagagcagctgcgacgtgaagctggtggaaaagagcttcgagacagacaccaacctgaacttccagaacctgagcgtgatcggcttcagaatcctgctgctgaaagtggccggctttaacctgctgatgaccctgcggctgtggtccagccgcgccaagagaagcggatctggcgtgaagcagaccctgaatttcgacctgctgaagctggctggcgacgtggaatccaacccaggccctactagtatggactggatttggcgcatccttttccttgtcggcgctgctaccggcgcgcattccttcgaagtccaacttgtggagtctggagggggcctggtgcagcccggcggctctctcagactgtcttgtgcggcaagcggctacaccttcagctcttactggatagaatgggtgaggcaggcacctggaaagggactggagtggattggagagattctgccaggagggggagatacaaattacaatgaaatcttcaaggggcgggccaccttttcagcggataccagcaagaatacagcttacctgcagatgaatagcctccgggcagaagataccgctgtttattattgcacgagacgggtgccaataagactggactattgggggcaagggactcttgtcaccgtcagttcaacgcgtgaggacctgaagaacgtgttcccacctgaggtggccgtgttcgagcctagcgaggccgagatcagccacacccagaaagccaccctcgtgtgcctggctaccggcttctaccccgaccatgtggaactgtcttggtgggtcaacggcaaagaggtgcacagcggcgtgtgtaccgacccccagccactgaaagaacagcccgccctgaacgacagccggtactgcctgagcagcagactgagagtgtccgccaccttctggcagaacccccggaaccacttcagatgccaggtgcagttctacggcctgagcgagaacgacgagtggacccaggacagagccaagcccgtgacccagatcgtgtctgccgaagcctggggcagagccgattgcggctttaccagcgagagctaccagcagggcgtgctgagcgccaccatcctgtacgagatcctgctgggcaaggccaccctgtacgccgtgctggtgtctgccctggtgctgatggctatggtcaagcggaaggacagccgggga

SEQ ID NO: 6186 - DNA, 1911 bp, synthetic construct
  source 1..1911: mol_type = other DNA
atggccttaccagtgaccgccttgctcctgccgctggccttgctgctccacgccgccaggccgctcgaggaggacctgaagaacgtgttcccacctgaggtggccgtgttcgagcctagcaaggccgagatcgcccacacccagaaagccaccctcgtgtgcctggctaccggcttctaccccgaccatgtggaactgtcttggtgggtcaacggcaaagaggtgcacagcggcgtgtgtaccgacccccagccactgaaagaacagcccgccctgaacgacagccggtactgcctgagcagcagactgagagtgtccgccaccttctggcagaacccccggaaccacttcagatgccaggtgcagttctacggcctgagcgagaacgacgagtggacccaggacagagccaagcccgtgacccagatcgtgtctgccgaagcctggggcagagccgattgcggcatcaccagcgccagctaccaccagggcgtgctgagcgccaccatcctgtacgagatcctgctgggcaaggccaccctgtacgccgtgctggtgtctgccctggtgctgatggctatggtcaagcggaaggacagccggggaagggccaagcgatctggatctggagcaacaaacttctcactactcaaacaagcaggtgacgtggaggagaatcccgggcctactagcatggccttaccagtgaccgccttgctcctgccgctggccttgctgctccacgccgccaggccggacatcgtgatgacacagagccctgatagcctggccgtgtctctgggagagagagccaccattaactgcaaggccagccagagcgtggactacgacggcgacagcttcctgaactggtatcagcagaagcccggccagcctcctaagctgctgatctacgccgccagcaatctggaaagcggcgtgccaagcagattttccggctctggcagcggcaccgatttcaccctgacaatatccagcctccagcctgaggacgtggccgtgtactactgccagcagagcaacgacgaccctctgacctttggacagggcaccaaggtggaaatcaaaggcggaggcggaagtggaggcggaggatctggcggcggaggctctgaagtccaacttgtggagtctggagggggcctggtgcagcccggcggctctctcagactgtcttgtgcggcaagcggctacaccttcagctcttactggatagaatgggtgaggcaggcacctggaaagggactggagtggattggagagattctgccaggagggggagatacaaattacaatgaaatcttcaaggggcgggccaccttttcagcggataccagcaagaatacagcttacctgcagatgaatagcctccgggcagaagataccgctgtttattattgcacgagacgggtgccaataagactggactattgggggcaagggactcttgtcaccgtcagttcaacgcgtatccagaaccctgatcctgccgtgtaccagctgcgggatagcaagagcagcgacaagagcgtgtgtctgttcaccgacttcgacagccagaccaacgtgtcccagagcaaggactccgacgtgtacatcaccgataagtgcgtgctggacatgcggagcatggacttcaagagcaactccgccgtggcctggtccaacaagtccgatttcgcctgcgccaacgccttcaacaacagcattatccccgaggacacattcttcccaagcagcgacgtgccctgcgacgtgaagctggtggaaaagagcttcgagacagacaccaacctgaacttccagaacctgagcgtgatcggcttcagaatcctgctgctgaaagtggccggctttaacctgctgatgaccctgcggctgtggtccagc

SEQ ID NO: 6187 - DNA, 1932 bp, synthetic construct
  source 1..1932: mol_type = other DNA
atggccttaccagtgaccgccttgctcctgccgctggccttgctgctccacgccgccaggccgctcgagggctccggcgatcgccctgatcctgccgtgtaccagctgcgggatagcaagagcagcgacaagagcgtgtgtctgttcaccgacttcgacagccagaccaacgtgtcccagagcaaggactccgacgtgtacatcaccgataagtgcgtgctggacatgcggagcatggacttcaagagcaactccgccgtggcctggtccaacaagtccgatttcgcctgcgccaacgccttcaacaacagcattatccccgaggacacattcttcccaagccccgagagcagctgcgacgtgaagctggtggaaaagagcttcgagacagacaccaacctgaacttccagaacctgagcgtgatcggcttcagaatcctgctgctgaaagtggccggctttaacctgctgatgaccctgcggctgtggtccagctctagtcgcgccaagagaagcggatctggcgtgaagcagaccctgaatttcgacctgctgaagctggctggcgacgtggaatccaacccaggccccactagcatggccttaccagtgaccgccttgctcctgccgctggccttgctgctccacgccgccaggccggacatcgtgatgacacagagccctgatagcctggccgtgtctctgggagagagagccaccattaactgcaaggccagccagagcgtggactacgacggcgacagcttcctgaactggtatcagcagaagcccggccagcctcctaagctgctgatctacgccgccagcaatctggaaagcggcgtgccaagcagattttccggctctggcagcggcaccgatttcaccctgacaatatccagcctccagcctgaggacgtggccgtgtactactgccagcagagcaacgacgaccctctgacctttggacagggcaccaaggtggaaatcaaaggcggaggcggaagtggaggcggaggatctggcggcggaggctctgaagtccaacttgtggagtctggagggggcctggtgcagcccggcggctctctcagactgtcttgtgcggcaagcggctacaccttcagctcttactggatagaatgggtgaggcaggcacctggaaagggactggagtggattggagagattctgccaggagggggagatacaaattacaatgaaatcttcaaggggcgggccaccttttcagcggataccagcaagaatacagcttacctgcagatgaatagcctccgggcagaagataccgctgtttattattgcacgagacgggtgccaataagactggactattgggggcaagggactcttgtcaccgtcagttcaacgcgtgaggacctgaagaacgtgttcccacctgaggtggccgtgttcgagcctagcgaggccgagatcagccacacccagaaagccaccctcgtgtgcctggctaccggcttctaccccgaccatgtggaactgtcttggtgggtcaacggcaaagaggtgcacagcggcgtgtgtaccgacccccagccactgaaagaacagcccgccctgaacgacagccggtactgcctgagcagcagactgagagtgtccgccaccttctggcagaacccccggaaccacttcagatgccaggtgcagttctacggcctgagcgagaacgacgagtggacccaggacagagccaagcccgtgacccagatcgtgtctgccgaagcctggggcagagccgattgcggctttaccagcgagagctaccagcagggcgtgctgagcgccaccatcctgtacgagatcctgctgggcaaggccaccctgtacgccgtgctggtgtctgccctggtgctgatggctatggtcaagcggaaggacagccgggga

SEQ ID NO: 6188 - DNA, 1860 bp, synthetic construct
  source 1..1860: mol_type = other DNA
atggccttaccagtgaccgccttgctcctgccgctggccttgctgctccacgccgccaggccggacatcgtgatgacacagagccctgatagcctggccgtgtctctgggagagagagccaccattaactgcaaggccagccagagcgtggactacgacggcgacagcttcctgaactggtatcagcagaagcccggccagcctcctaagctgctgatctacgccgccagcaatctggaaagcggcgtgccaagcagattttccggctctggcagcggcaccgatttcaccctgacaatatccagcctccagcctgaggacgtggccgtgtactactgccagcagagcaacgacgaccctctgacctttggacagggcaccaaggtggaaatcaaactcgaggacctgaagaacgtgttcccacctgaggtggccgtgttcgagcctagcgaggccgagatcagccacacccagaaagccaccctcgtgtgcctggctaccggcttctaccccgaccatgtggaactgtcttggtgggtcaacggcaaagaggtgcacagcggcgtgtctaccgacccccagccactgaaagaacagcccgccctgaacgacagccggtactgcctgagcagcagactgagagtgtccgccaccttctggcagaacccccggaaccacttcagatgccaggtgcagttctacggcctgagcgagaacgacgagtggacccaggacagagccaagcccgtgacccagatcgtgtctgccgaagcctggggcagagccgattgcggctttaccagcgagagctaccagcagggcgtgctgagcgccaccatcctgtacgagatcctgctgggcaaggccaccctgtacgccgtgctggtgtctgccctggtgctgatggctatggtcaagcggaaggacagccggggaagggccaagcgatctggatctggagcaacaaacttctcactactcaaacaagcaggtgacgtggaggagaatcccgggcctactagtatggactggatttggcgcatccttttccttgtcggcgctgctaccggcgcgcattccttcgaagtccaacttgtggagtctggagggggcctggtgcagcccggcggctctctcagactgtcttgtgcggcaagcggctacaccttcagctcttactggatagaatgggtgaggcaggcacctggaaagggactggagtggattggagagattctgccaggagggggagatacaaattacaatgaaatcttcaaggggcgggccaccttttcagcggataccagcaagaatacagcttacctgcagatgaatagcctccgggcagaagataccgctgtttattattgcacgagacgggtgccaataagactggactattgggggcaagggactcttgtcaccgtcagttcaacgcgtatccagaaccctgatcctgccgtgtaccagctgcgggatagcaagagcagcgacaagagcgtgtgtctgttcaccgacttcgacagccagaccaacgtgtcccagagcaaggactccgacgtgtacatcaccgataagaccgtgctggacatgcggagcatggacttcaagagcaactccgccgtggcctggtccaacaagtccgatttcgcctgcgccaacgccttcaacaacagcattatccccgaggacacattcttcccaagccccgagagcagctgcgacgtgaagctggtggaaaagagcttcgagacagacaccaacctgaacttccagaacctgagcgtgatcggcttcagaatcctgctgctgaaagtggccggctttaacctgctgatgaccctgcggctgtggtccagc

SEQ ID NO: 6189 - DNA, 1884 bp, synthetic construct
  source 1..1884: mol_type = other DNA
atggccttaccagtgaccgccttgctcctgccgctggccttgctgctccacgccgccaggccggacatcgtgatgacacagagccctgatagcctggccgtgtctctgggagagagagccaccattaactgcaaggccagccagagcgtggactacgacggcgacagcttcctgaactggtatcagcagaagcccggccagcctcctaagctgctgatctacgccgccagcaatctggaaagcggcgtgccaagcagattttccggctctggcagcggcaccgatttcaccctgacaatatccagcctccagcctgaggacgtggccgtgtactactgccagcagagcaacgacgaccctctgacctttggacagggcaccaaggtggaaatcaaactcgaggacaagcagctggacgccgacgtgtcccccaagcctaccatcttcctgccctctatcgccgagacaaagctccagaaggccggcacctacctgtgcctgctggaaaagttcttcccagatgtgattaagatccactggcaggaaaagaagtccaacaccatcctgggcagccaggaaggcaacaccatgaagaccaacgacacctacatgaagttcagctggctgaccgtgcccgagaagtccctggacaaagaacacagatgcatcgtgcggcacgaaaacaacaagaacggcgtggaccaggaaatcatcttcccacccatcaagaccgatgtgattacaatggaccccaaggacaactgctccaaggacgccaacgataccctgctgctccagctgaccaacaccagcgcctactacatgtacttgttgctgctgctgaagtccgtggtgtacttcgccatcatcacatgctgcctgctgcggagaaccgccttctgctgcaacggcgagaagtctagggccaagcgatctggatctggagcaacaaacttctcactactcaaacaagcaggtgacgtggaggagaatcccgggcctactagtatggactggatttggcgcatccttttccttgtcggcgctgctaccggcgcgcattccttcgaagtccaacttgtggagtctggagggggcctggtgcagcccggcggctctctcagactgtcttgtgcggcaagcggctacaccttcagctcttactggatagaatgggtgaggcaggcacctggaaagggactggagtggattggagagattctgccaggagggggagatacaaattacaatgaaatcttcaaggggcgggccaccttttcagcggataccagcaagaatacagcttacctgcagatgaatagcctccgggcagaagataccgctgtttattattgcacgagacgggtgccaataagactggactattgggggcaagggactcttgtcaccgtcagttcaacgcgtagccagcctcacaccaagcccagcgtgttcgtgatgaagaacggcaccaacgtggcctgcctcgtgaaagagttctaccccaaggacatcaggatcaacctggtgtccagcaagaagatcaccgagttcgaccccgccatcgtgatctcccccagcggcaagtacaacgccgtgaagctggggaagtacgaggacagcaacagcgtgacctgctccgtgcagcacgacaacaagaccgtgcacagcaccgactttgaagtgaaaaccgactccaccgaccacgtgaagcccaaagagacagagaacaccaagcagcccagcaagagctgccacaagcccaaggccatcgtgcacaccgagaaagtgaacatgatgagcctgaccgtgctgggcctgcggatgctgttcgccaaaaccgtggccgtgaacttcctgctgaccgccaagctgttcttcctc

SEQ ID NO: 6190 - DNA, 1884 bp, synthetic construct
  source 1..1884: mol_type = other DNA
atggccttaccagtgaccgccttgctcctgccgctggccttgctgctccacgccgccaggccggacatcgtgatgacacagagccctgatagcctggccgtgtctctgggagagagagccaccattaactgcaaggccagccagagcgtggactacgacggcgacagcttcctgaactggtatcagcagaagcccggccagcctcctaagctgctgatctacgccgccagcaatctggaaagcggcgtgccaagcagattttccggctctggcagcggcaccgatttcaccctgacaatatccagcctccagcctgaggacgtggccgtgtactactgccagcagagcaacgacgaccctctgacctttggacagggcaccaaggtggaaatcaaactcgagagccagcctcacaccaagcccagcgtgttcgtgatgaagaacggcaccaacgtggcctgcctcgtgaaagagttctaccccaaggacatcaggatcaacctggtgtccagcaagaagatcaccgagttcgaccccgccatcgtgatctcccccagcggcaagtacaacgccgtgaagctggggaagtacgaggacagcaacagcgtgacctgctccgtgcagcacgacaacaagaccgtgcacagcaccgactttgaagtgaaaaccgactccaccgaccacgtgaagcccaaagagacagagaacaccaagcagcccagcaagagctgccacaagcccaaggccatcgtgcacaccgagaaagtgaacatgatgagcctgaccgtgctgggcctgcggatgctgttcgccaaaaccgtggccgtgaacttcctgctgaccgccaagctgttcttcctcagggccaagcgatctggatctggagcaacaaacttctcactactcaaacaagcaggtgacgtggaggagaatcccgggcctactagtatggactggatttggcgcatccttttccttgtcggcgctgctaccggcgcgcattccttcgaagtccaacttgtggagtctggagggggcctggtgcagcccggcggctctctcagactgtcttgtgcggcaagcggctacaccttcagctcttactggatagaatgggtgaggcaggcacctggaaagggactggagtggattggagagattctgccaggagggggagatacaaattacaatgaaatcttcaaggggcgggccaccttttcagcggataccagcaagaatacagcttacctgcagatgaatagcctccgggcagaagataccgctgtttattattgcacgagacgggtgccaataagactggactattgggggcaagggactcttgtcaccgtcagttcaacgcgtgacaagcagctggacgccgacgtgtcccccaagcctaccatcttcctgccctctatcgccgagacaaagctccagaaggccggcacctacctgtgcctgctggaaaagttcttcccagatgtgattaagatccactggcaggaaaagaagtccaacaccatcctgggcagccaggaaggcaacaccatgaagaccaacgacacctacatgaagttcagctggctgaccgtgcccgagaagtccctggacaaagaacacagatgcatcgtgcggcacgaaaacaacaagaacggcgtggaccaggaaatcatcttcccacccatcaagaccgatgtgattacaatggaccccaaggacaactgctccaaggacgccaacgataccctgctgctccagctgaccaacaccagcgcctactacatgtacttgttgctgctgctgaagtccgtggtgtacttcgccatcatcacatgctgcctgctgcggagaaccgccttctgctgcaacggcgagaagtct

SEQ ID NO: 6191 - DNA, 1932 bp, synthetic construct
  source 1..1932: mol_type = other DNA
atggccttaccagtgaccgccttgctcctgccgctggccttgctgctccacgccgccaggccgctcgaggacaagcagctggacgccgacgtgtcccccaagcctaccatcttcctgccctctatcgccgagacaaagctccagaaggccggcacctacctgtgcctgctggaaaagttcttcccagatgtgattaagatccactggcaggaaaagaagtccaacaccatcctgggcagccaggaaggcaacaccatgaagaccaacgacacctacatgaagttcagctggctgaccgtgcccgagaagtccctggacaaagaacacagatgcatcgtgcggcacgaaaacaacaagaacggcgtggaccaggaaatcatcttcccacccatcaagaccgatgtgattacaatggaccccaaggacaactgctccaaggacgccaacgataccctgctgctccagctgaccaacaccagcgcctactacatgtacttgttgctgctgctgaagtccgtggtgtacttcgccatcatcacatgctgcctgctgcggagaaccgccttctgctgcaacggcgagaagtctagggccaagcgatctggatctggagcaacaaacttctcactactcaaacaagcaggtgacgtggaggagaatcccgggcctactagcatggccttaccagtgaccgccttgctcctgccgctggccttgctgctccacgccgccaggccggacatcgtgatgacacagagccctgatagcctggccgtgtctctgggagagagagccaccattaactgcaaggccagccagagcgtggactacgacggcgacagcttcctgaactggtatcagcagaagcccggccagcctcctaagctgctgatctacgccgccagcaatctggaaagcggcgtgccaagcagattttccggctctggcagcggcaccgatttcaccctgacaatatccagcctccagcctgaggacgtggccgtgtactactgccagcagagcaacgacgaccctctgacctttggacagggcaccaaggtggaaatcaaaggcggaggcggaagtggaggcggaggatctggcggcggaggctctgaagtccaacttgtggagtctggagggggcctggtgcagcccggcggctctctcagactgtcttgtgcggcaagcggctacaccttcagctcttactggatagaatgggtgaggcaggcacctggaaagggactggagtggattggagagattctgccaggagggggagatacaaattacaatgaaatcttcaaggggcgggccaccttttcagcggataccagcaagaatacagcttacctgcagatgaatagcctccgggcagaagataccgctgtttattattgcacgagacgggtgccaataagactggactattgggggcaagggactcttgtcaccgtcagttcaacgcgtagccagcctcacaccaagcccagcgtgttcgtgatgaagaacggcaccaacgtggcctgcctcgtgaaagagttctaccccaaggacatcaggatcaacctggtgtccagcaagaagatcaccgagttcgaccccgccatcgtgatctcccccagcggcaagtacaacgccgtgaagctggggaagtacgaggacagcaacagcgtgacctgctccgtgcagcacgacaacaagaccgtgcacagcaccgactttgaagtgaaaaccgactccaccgaccacgtgaagcccaaagagacagagaacaccaagcagcccagcaagagctgccacaagcccaaggccatcgtgcacaccgagaaagtgaacatgatgagcctgaccgtgctgggcctgcggatgctgttcgccaaaaccgtggccgtgaacttcctgctgaccgccaagctgttcttcctc

SEQ ID NO: 6192 - DNA, 2391 bp, synthetic construct
  source 1..2391: mol_type = other DNA
atggccttaccagtgaccgccttgctcctgccgctggccttgctgctccacgccgccaggccggacatcgtgatgacacagagccctgatagcctggccgtgtctctgggagagagagccaccattaactgcaaggccagccagagcgtggactacgacggcgacagcttcctgaactggtatcagcagaagcccggccagcctcctaagctgctgatctacgccgccagcaatctggaaagcggcgtgccaagcagattttccggctctggcagcggcaccgatttcaccctgacaatatccagcctccagcctgaggacgtggccgtgtactactgccagcagagcaacgacgaccctctgacctttggacagggcaccaaggtggaaatcaaaggacagcctaaggccaatcctaccgtgacactgttccctccaagcagcgaagaactccaggccaacaaggccacacttgtgtgcctgatctccgacttctaccctggggctgtgacagtggcttggaaggccgatggatctcctgtgaaagccggcgtggaaaccaccaagccatccaagcagagcaacaacaaatacgccgccagctcctacctgagcctgacacctgagcagtggaagtcccacagatcctacagctgccaagtgacccacgaaggcagcaccgtggaaaagacagtggcccctacagagtgcagcggatcccagagcttcggcctgctggaccccaagctgtgctacctgctggatggcatcctgttcatctacggcgtgatcctgaccgccctgttcctgagagtgaagttcagcagaagcgccgacgcccctgcctaccagcagggacagaaccaactgtacaacgagctgaacctgggcagacgggaagagtacgacgtgctggacaagcggagaggcagggaccctgagatgggcggaaagccccagcggagaaagaacccccaggaaggactgtataacgaactccagaaagacaagatggccgaagcctacagcgagatcggcatgaagggcgagcggagaagaggcaagggccacgatggcctgtaccagggcctgagcaccgccaccaaggacacctatgacgccctgcacatgcaggccctgcctccaagaagggccaagcgatctggatctggagcaacaaacttctcactactcaaacaagcaggtgacgtggaggagaatcccgggcctactagtatggactggatttggcgcatccttttccttgtcggcgctgctaccggcgcgcattccttcgaagtccaacttgtggagtctggagggggcctggtgcagcccggcggctctctcagactgtcttgtgcggcaagcggctacaccttcagctcttactggatagaatgggtgaggcaggcacctggaaagggactggagtggattggagagattctgccaggagggggagatacaaattacaatgaaatcttcaaggggcgggccaccttttcagcggataccagcaagaatacagcttacctgcagatgaatagcctccgggcagaagataccgctgtttattattgcacgagacgggtgccaataagactggactattgggggcaagggactcttgtcaccgtcagttcagcctctacaaagggaccctccgtgtttcctctggctcccagcagcaagtctacaagcggaggaacagccgctctgggctgcctggtcaaggattactttcccgagcctgtgaccgtgtcctggaatagcggagcactgacaagcggcgtgcacacctttccagccgtgctgcaaagcagcggcctgtactctctgagcagcgtggtcacagtgcctagctctagcctgggcacccagacctacatctgcaatgtgaaccacaagcctagcaacaccaaggtggacaagagagtggaacccaagagctgtggtacccagagttttgggttgttggaccctaaattgtgctatctgttggacggaatcctgttcatttacggagtgatcctgaccgcattgttcctgcgggttaagttttccagatccgcagacgcacccgcttaccaacaagggcagaaccaactctacaatgaacttaatttggggcggagggaagagtacgacgttctggacaaaaggaggggacgagatcccgagatgggcggaaagcctcagcgaaggaagaatccgcaagaggggctttataacgaactccagaaagataaaatggcagaagcctatagtgagattgggatgaagggagaaaggaggaggggtaaaggtcacgatgggttgtaccaaggattgagcacagccactaaagatacctatgatgcgctccacatgcaggccctgccgccaaga

SEQ ID NO: 6193 - DNA, 2448 bp, synthetic construct
  source 1..2448: mol_type = other DNA
atggccttaccagtgaccgccttgctcctgccgctggccttgctgctccacgccgccaggccggacatcgtgatgacacagagccctgatagcctggccgtgtctctgggagagagagccaccattaactgcaaggccagccagagcgtggactacgacggcgacagcttcctgaactggtatcagcagaagcccggccagcctcctaagctgctgatctacgccgccagcaatctggaaagcggcgtgccaagcagattttccggctctggcagcggcaccgatttcaccctgacaatatccagcctccagcctgaggacgtggccgtgtactactgccagcagagcaacgacgaccctctgacctttggacagggcaccaaggtggaaatcaaactcgaggacctgaagaacgtgttcccacctgaggtggccgtgttcgagcctagcgaggccgagatcagccacacccagaaagccaccctcgtgtgcctggctaccggcttctaccccgaccatgtggaactgtcttggtgggtcaacggcaaagaggtgcacagcggcgtgtctaccgacccccagccactgaaagaacagcccgccctgaacgacagccggtactgcctgagcagcagactgagagtgtccgccaccttctggcagaacccccggaaccacttcagatgccaggtgcagttctacggcctgagcgagaacgacgagtggacccaggacagagccaagcccgtgacccagatcgtgtctgccgaagcctggggcagagccgattgcggatcccagagcttcggcctgctggaccccaagctgtgctacctgctggatggcatcctgttcatctacggcgtgatcctgaccgccctgttcctgagagtgaagttcagcagaagcgccgacgcccctgcctaccagcagggacagaaccaactgtacaacgagctgaacctgggcagacgggaagagtacgacgtgctggacaagcggagaggcagggaccctgagatgggcggaaagccccagcggagaaagaacccccaggaaggactgtataacgaactccagaaagacaagatggccgaagcctacagcgagatcggcatgaagggcgagcggagaagaggcaagggccacgatggcctgtaccagggcctgagcaccgccaccaaggacacctatgacgccctgcacatgcaggccctgcctccaagaagggccaagcgatctggatctggagcaacaaacttctcactactcaaacaagcaggtgacgtggaggagaatcccgggcctactagtatggactggatttggcgcatccttttccttgtcggcgctgctaccggcgcgcattccttcgaagtccaacttgtggagtctggagggggcctggtgcagcccggcggctctctcagactgtcttgtgcggcaagcggctacaccttcagctcttactggatagaatgggtgaggcaggcacctggaaagggactggagtggattggagagattctgccaggagggggagatacaaattacaatgaaatcttcaaggggcgggccaccttttcagcggataccagcaagaatacagcttacctgcagatgaatagcctccgggcagaagataccgctgtttattattgcacgagacgggtgccaataagactggactattgggggcaagggactcttgtcaccgtcagttcaacgcgtatccagaaccctgatcctgccgtgtaccagctgcgggatagcaagagcagcgacaagagcgtgtgtctgttcaccgacttcgacagccagaccaacgtgtcccagagcaaggactccgacgtgtacatcaccgataagaccgtgctggacatgcggagcatggacttcaagagcaactccgccgtggcctggtccaacaagtccgatttcgcctgcgccaacgccttcaacaacagcattatccccgaggacacattcttcccaagccccgagagcagctgcggtacccagagttttgggttgttggaccctaaattgtgctatctgttggacggaatcctgttcatttacggagtgatcctgaccgcattgttcctgcgggttaagttttccagatccgcagacgcacccgcttaccaacaagggcagaaccaactctacaatgaacttaatttggggcggagggaagagtacgacgttctggacaaaaggaggggacgagatcccgagatgggcggaaagcctcagcgaaggaagaatccgcaagaggggctttataacgaactccagaaagataaaatggcagaagcctatagtgagattgggatgaagggagaaaggaggaggggtaaaggtcacgatgggttgtaccaaggattgagcacagccactaaagatacctatgatgcgctccacatgcaggccctgccgccaaga

SEQ ID NO: 6194 - DNA, 2574 bp, synthetic construct
  source 1..2574: mol_type = other DNA
atggccttaccagtgaccgccttgctcctgccgctggccttgctgctccacgccgccaggccggacatcgtgatgacacagagccctgatagcctggccgtgtctctgggagagagagccaccattaactgcaaggccagccagagcgtggactacgacggcgacagcttcctgaactggtatcagcagaagcccggccagcctcctaagctgctgatctacgccgccagcaatctggaaagcggcgtgccaagcagattttccggctctggcagcggcaccgatttcaccctgacaatatccagcctccagcctgaggacgtggccgtgtactactgccagcagagcaacgacgaccctctgacctttggacagggcaccaaggtggaaatcaaactcgaggaggacctgaagaacgtgttcccacctgaggtggccgtgttcgagcctagcgaggccgagatcagccacacccagaaagccaccctcgtgtgcctggctaccggcttctaccccgaccatgtggaactgtcttggtgggtcaacggcaaagaggtgcacagcggcgtgtctaccgacccccagccactgaaagaacagcccgccctgaacgacagccggtactgcctgagcagcagactgagagtgtccgccaccttctggcagaacccccggaaccacttcagatgccaggtgcagttctacggcctgagcgagaacgacgagtggacccaggacagagccaagcccgtgacccagatcgtgtctgccgaagcctggggcagagccgattgcggatcccagagcttcggcctgctggaccccaagctgtgctacctgctggatggcatcctgttcatctacggcgtgatcctgaccgccctgttcctgagagtgaagttcagcagaagcgccgacgcccctgcctaccagcagggacagaaccaactgtacaacgagctgaacctgggcagacgggaagagtacgacgtgctggacaagcggagaggcagggaccctgagatgggcggaaagccccagcggagaaagaacccccaggaaggactgtataacgaactccagaaagacaagatggccgaagcctacagcgagatcggcatgaagggcgagcggagaagaggcaagggccacgatggcctgtaccagggcctgagcaccgccaccaaggacacctatgacgccctgcacatgcaggccctgcctccaagaagggccaagcgatctggatctggagcaacaaacttctcactactcaaacaagcaggtgacgtggaggagaatcccgggcctactagtatggactggatttggcgcatccttttccttgtcggcgctgctaccggcgcgcattccttcgaagtccaacttgtggagtctggagggggcctggtgcagcccggcggctctctcagactgtcttgtgcggcaagcggctacaccttcagctcttactggatagaatgggtgaggcaggcacctggaaagggactggagtggattggagagattctgccaggagggggagatacaaattacaatgaaatcttcaaggggcgggccaccttttcagcggataccagcaagaatacagcttacctgcagatgaatagcctccgggcagaagataccgctgtttattattgcacgagacgggtgccaataagactggactattgggggcaagggactcttgtcaccgtcagttcaacgcgtatccagaaccctgatcctgccgtgtaccagctgcgggatagcaagagcagcgacaagagcgtgtgtctgttcaccgacttcgacagccagaccaacgtgtcccagagcaaggactccgacgtgtacatcaccgataagaccgtgctggacatgcggagcatggacttcaagagcaactccgccgtggcctggtccaacaagtccgatttcgcctgcgccaacgccttcaacaacagcattatccccgaggacacattcttcccaagccccgagagcagctgcggtacccagagttttgggttgttggaccctaaattgtgctatctgttggacggaatcctgttcatttacggagtgatcctgaccgcattgttcctgaggagcaagcggtcacggctgctccacagcgattacatgaatatgacaccacgaagaccgggtcctactcgcaaacactaccaaccctacgcacctccccgcgactttgcagcgtaccgatctcgggttaagttttccagatccgcagacgcacccgcttaccaacaagggcagaaccaactctacaatgaacttaatttggggcggagggaagagtacgacgttctggacaaaaggaggggacgagatcccgagatgggcggaaagcctcagcgaaggaagaatccgcaagaggggctttataacgaactccagaaagataaaatggcagaagcctatagtgagattgggatgaagggagaaaggaggaggggtaaaggtcacgatgggttgtaccaaggattgagcacagccactaaagatacctatgatgcgctccacatgcaggccctgccgccaaga

SEQ ID NO: 6195 - DNA, 2703 bp, synthetic construct
  source 1..2703: mol_type = other DNA
atggccttaccagtgaccgccttgctcctgccgctggccttgctgctccacgccgccaggccggacatcgtgatgacacagagccctgatagcctggccgtgtctctgggagagagagccaccattaactgcaaggccagccagagcgtggactacgacggcgacagcttcctgaactggtatcagcagaagcccggccagcctcctaagctgctgatctacgccgccagcaatctggaaagcggcgtgccaagcagattttccggctctggcagcggcaccgatttcaccctgacaatatccagcctccagcctgaggacgtggccgtgtactactgccagcagagcaacgacgaccctctgacctttggacagggcaccaaggtggaaatcaaactcgaggaggacctgaagaacgtgttcccacctgaggtggccgtgttcgagcctagcgaggccgagatcagccacacccagaaagccaccctcgtgtgcctggctaccggcttctaccccgaccatgtggaactgtcttggtgggtcaacggcaaagaggtgcacagcggcgtgtctaccgacccccagccactgaaagaacagcccgccctgaacgacagccggtactgcctgagcagcagactgagagtgtccgccaccttctggcagaacccccggaaccacttcagatgccaggtgcagttctacggcctgagcgagaacgacgagtggacccaggacagagccaagcccgtgacccagatcgtgtctgccgaagcctggggcagagccgattgcggatcccagagcttcggcctgctggaccccaagctgtgctacctgctggatggcatcctgttcatctacggcgtgatcctgaccgccctgttcctgaaacggggcagaaagaaactcctgtatatattcaaacaaccatttatgagaccagtacaaactactcaagaggaagatggctgtagctgccgatttccagaagaagaagaaggaggatgtgaactgagagtgaagttcagcagaagcgccgacgcccctgcctaccagcagggacagaaccaactgtacaacgagctgaacctgggcagacgggaagagtacgacgtgctggacaagcggagaggcagggaccctgagatgggcggaaagccccagcggagaaagaacccccaggaaggactgtataacgaactccagaaagacaagatggccgaagcctacagcgagatcggcatgaagggcgagcggagaagaggcaagggccacgatggcctgtaccagggcctgagcaccgccaccaaggacacctatgacgccctgcacatgcaggccctgcctccaagaagggccaagcgatctggatctggagcaacaaacttctcactactcaaacaagcaggtgacgtggaggagaatcccgggcctactagtatggactggatttggcgcatccttttccttgtcggcgctgctaccggcgcgcattccttcgaagtccaacttgtggagtctggagggggcctggtgcagcccggcggctctctcagactgtcttgtgcggcaagcggctacaccttcagctcttactggatagaatgggtgaggcaggcacctggaaagggactggagtggattggagagattctgccaggagggggagatacaaattacaatgaaatcttcaaggggcgggccaccttttcagcggataccagcaagaatacagcttacctgcagatgaatagcctccgggcagaagataccgctgtttattattgcacgagacgggtgccaataagactggactattgggggcaagggactcttgtcaccgtcagttcaacgcgtatccagaaccctgatcctgccgtgtaccagctgcgggatagcaagagcagcgacaagagcgtgtgtctgttcaccgacttcgacagccagaccaacgtgtcccagagcaaggactccgacgtgtacatcaccgataagaccgtgctggacatgcggagcatggacttcaagagcaactccgccgtggcctggtccaacaagtccgatttcgcctgcgccaacgccttcaacaacagcattatccccgaggacacattcttcccaagccccgagagcagctgcggtacccagagttttgggttgttggaccctaaattgtgctatctgttggacggaatcctgttcatttacggagtgatcctgaccgcattgttcctgaagagaggccggaagaagctgctgtacatcttcaagcagcctttcatgcggcccgtgcagaccacccaggaagaggacggctgctcctgccggttccccgaggaagaagaaggcggctgcgagctgcgggttaagttttccagatccgcagacgcacccgcttaccaacaagggcagaaccaactctacaatgaacttaatttggggcggagggaagagtacgacgttctggacaaaaggaggggacgagatcccgagatgggcggaaagcctcagcgaaggaagaatccgcaagaggggctttataacgaactccagaaagataaaatggcagaagcctatagtgagattgggatgaagggagaaaggaggaggggtaaaggtcacgatgggttgtaccaaggattgagcacagccactaaagatacctatgatgcgctccacatgcaggccctgccgccaaga

SEQ ID NO: 6196 - DNA, 1764 bp, synthetic construct
  source 1..1764: mol_type = other DNA
atggccttaccagtgaccgccttgctcctgccgctggccttgctgctccacgccgccaggccggacatcgtgatgacacagagccctgatagcctggccgtgtctctgggagagagagccaccattaactgcaaggccagccagagcgtggactacgacggcgacagcttcctgaactggtatcagcagaagcccggccagcctcctaagctgctgatctacgccgccagcaatctggaaagcggcgtgccaagcagattttccggctctggcagcggcaccgatttcaccctgacaatatccagcctccagcctgaggacgtggccgtgtactactgccagcagagcaacgacgaccctctgacctttggacagggcaccaaggtggaaatcaaactcgagcagagcttcggcctgctggaccccaagctgtgctacctgctggatggcatcctgttcatctacggcgtgatcctgaccgccctgttcctgagagtgaagttcagcagaagcgccgacgcccctgcctaccagcagggacagaaccaactgtacaacgagctgaacctgggcagacgggaagagtacgacgtgctggacaagcggagaggcagggaccctgagatgggcggaaagccccagcggagaaagaacccccaggaaggactgtataacgaactccagaaagacaagatggccgaagcctacagcgagatcggcatgaagggcgagcggagaagaggcaagggccacgatggcctgtaccagggcctgagcaccgccaccaaggacacctatgacgccctgcacatgcaggccctgcctccaagaagggccaagcgatctggatctggagcaacaaacttctcactactcaaacaagcaggtgacgtggaggagaatcccgggcctactagtatggactggatttggcgcatccttttccttgtcggcgctgctaccggcgcgcattccttcgaagtccaacttgtggagtctggagggggcctggtgcagcccggcggctctctcagactgtcttgtgcggcaagcggctacaccttcagctcttactggatagaatgggtgaggcaggcacctggaaagggactggagtggattggagagattctgccaggagggggagatacaaattacaatgaaatcttcaaggggcgggccaccttttcagcggataccagcaagaatacagcttacctgcagatgaatagcctccgggcagaagataccgctgtttattattgcacgagacgggtgccaataagactggactattgggggcaagggactcttgtcaccgtcagttcaacgcgtcagagttttgggttgttggaccctaaattgtgctatctgttggacggaatcctgttcatttacggagtgatcctgaccgcattgttcctgcgggttaagttttccagatccgcagacgcacccgcttaccaacaagggcagaaccaactctacaatgaacttaatttggggcggagggaagagtacgacgttctggacaaaaggaggggacgagatcccgagatgggcggaaagcctcagcgaaggaagaatccgcaagaggggctttataacgaactccagaaagataaaatggcagaagcctatagtgagattgggatgaagggagaaaggaggaggggtaaaggtcacgatgggttgtaccaaggattgagcacagccactaaagatacctatgatgcgctccacatgcaggccctgccgccaaga

SEQ ID NO: 6197 - DNA, 1938 bp, synthetic construct
  source 1..1938: mol_type = other DNA
atggccttaccagtgaccgccttgctcctgccgctggccttgctgctccacgccgccaggccggacatcgtgatgacacagagccctgatagcctggccgtgtctctgggagagagagccaccattaactgcaaggccagccagagcgtggactacgacggcgacagcttcctgaactggtatcagcagaagcccggccagcctcctaagctgctgatctacgccgccagcaatctggaaagcggcgtgccaagcagattttccggctctggcagcggcaccgatttcaccctgacaatatccagcctccagcctgaggacgtggccgtgtactactgccagcagagcaacgacgaccctctgacctttggacagggcaccaaggtggaaatcaaactcgagggacagcctaaggccaatcctaccgtgacactgttccctccaagcagcgaagaactccaggccaacaaggccacacttgtgtgcctgatctccgacttctaccctggggctgtgacagtggcttggaaggccgatggatctcctgtgaaagccggcgtggaaaccaccaagccatccaagcagagcaacaacaaatacgccgccagctcctacctgagcctgacacctgagcagtggaagtcccacagatcctacagctgccaagtgacccacgaaggcagcaccgtggaaaagacagtggcccctacagagtgcagccccatcaagaccgatgtgattacaatggaccccaaggacaactgctccaaggacgccaacgataccctgctgctccagctgaccaacaccagcgcctactacatgtacttgttgctgctgctgaagtccgtggtgtacttcgccatcatcacatgctgcctgctgcggagaaccgccttctgctgcaacggcgagaagtctagggccaagcgatctggatctggagcaacaaacttctcactactcaaacaagcaggtgacgtggaggagaatcccgggcctactagtatggactggatttggcgcatccttttccttgtcggcgctgctaccggcgcgcattccttcgaagtccaacttgtggagtctggagggggcctggtgcagcccggcggctctctcagactgtcttgtgcggcaagcggctacaccttcagctcttactggatagaatgggtgaggcaggcacctggaaagggactggagtggattggagagattctgccaggagggggagatacaaattacaatgaaatcttcaaggggcgggccaccttttcagcggataccagcaagaatacagcttacctgcagatgaatagcctccgggcagaagataccgctgtttattattgcacgagacgggtgccaataagactggactattgggggcaagggactcttgtcaccgtcagttcaacgcgtgcctctacaaagggaccctccgtgtttcctctggctcccagcagcaagtctacaagcggaggaacagccgctctgggctgcctggtcaaggattactttcccgagcctgtgaccgtgtcctggaatagcggagcactgacaagcggcgtgcacacctttccagccgtgctgcaaagcagcggcctgtactctctgagcagcgtggtcacagtgcctagctctagcctgggcacccagacctacatctgcaatgtgaaccacaagcctagcaacaccaaggtggacaagagagtggaacccaagagctgtgaagtgaaaaccgactccaccgaccacgtgaagcccaaagagacagagaacaccaagcagcccagcaagagctgccacaagcccaaggccatcgtgcacaccgagaaagtgaacatgatgagcctgaccgtgctgggcctgcggatgctgttcgccaaaaccgtggccgtgaacttcctgctgaccgccaagctgttcttcctc

SEQ ID NO: 6198 - DNA, 1872 bp, synthetic construct
  source 1..1872: mol_type = other DNA
atggccttaccagtgaccgccttgctcctgccgctggccttgctgctccacgccgccaggccggacatcgtgatgacacagagccctgatagcctggccgtgtctctgggagagagagccaccattaactgcaaggccagccagagcgtggactacgacggcgacagcttcctgaactggtatcagcagaagcccggccagcctcctaagctgctgatctacgccgccagcaatctggaaagcggcgtgccaagcagattttccggctctggcagcggcaccgatttcaccctgacaatatccagcctccagcctgaggacgtggccgtgtactactgccagcagagcaacgacgaccctctgacctttggacagggcaccaaggtggaaatcaaactcgagggacagcctaaggccaatcctaccgtgacactgttccctccaagcagcgaagaactccaggccaacaaggccacacttgtgtgcctgatctccgacttctaccctggggctgtgacagtggcttggaaggccgatggatctcctgtgaaagccggcgtggaaaccaccaagccatccaagcagagcaacaacaaatacgccgccagctcctacctgagcctgacacctgagcagtggaagtcccacagatcctacagctgccaagtgacccacgaaggcagcaccgtggaaaagacagtggcccctacagagtgcagcggcagagccgattgcggcatcaccagcgccagctaccaccagggcgtgctgagcgccaccatcctgtacgagatcctgctgggcaaggccaccctgtacgccgtgctggtgtctgccctggtgctgatggctatggtcaagcggaaggacagccggggaagggccaagcgatctggatctggagcaacaaacttctcactactcaaacaagcaggtgacgtggaggagaatcccgggcctactagtatggactggatttggcgcatccttttccttgtcggcgctgctaccggcgcgcattccttcgaagtccaacttgtggagtctggagggggcctggtgcagcccggcggctctctcagactgtcttgtgcggcaagcggctacaccttcagctcttactggatagaatgggtgaggcaggcacctggaaagggactggagtggattggagagattctgccaggagggggagatacaaattacaatgaaatcttcaaggggcgggccaccttttcagcggataccagcaagaatacagcttacctgcagatgaatagcctccgggcagaagataccgctgtttattattgcacgagacgggtgccaataagactggactattgggggcaagggactcttgtcaccgtcagttcaacgcgtgcctctacaaagggaccctccgtgtttcctctggctcccagcagcaagtctacaagcggaggaacagccgctctgggctgcctggtcaaggattactttcccgagcctgtgaccgtgtcctggaatagcggagcactgacaagcggcgtgcacacctttccagccgtgctgcaaagcagcggcctgtactctctgagcagcgtggtcacagtgcctagctctagcctgggcacccagacctacatctgcaatgtgaaccacaagcctagcaacaccaaggtggacaagagagtggaacccaagagctgtatccccgaggacacattcttcccaagcagcgacgtgccctgcgacgtgaagctggtggaaaagagcttcgagacagacaccaacctgaacttccagaacctgagcgtgatcggcttcagaatcctgctgctgaaagtggccggctttaacctgctgatgaccctgcggctgtggtccagc

SEQ ID NO: 6199 - DNA, 1872 bp, synthetic construct
  source 1..1872: mol_type = other DNA
atggccttaccagtgaccgccttgctcctgccgctggccttgctgctccacgccgccaggccggacatcgtgatgacacagagccctgatagcctggccgtgtctctgggagagagagccaccattaactgcaaggccagccagagcgtggactacgacggcgacagcttcctgaactggtatcagcagaagcccggccagcctcctaagctgctgatctacgccgccagcaatctggaaagcggcgtgccaagcagattttccggctctggcagcggcaccgatttcaccctgacaatatccagcctccagcctgaggacgtggccgtgtactactgccagcagagcaacgacgaccctctgacctttggacagggcaccaaggtggaaatcaaactcgagggacagcctaaggccaatcctaccgtgacactgttccctccaagcagcgaagaactccaggccaacaaggccacacttgtgtgcctgatctccgacttctaccctggggctgtgacagtggcttggaaggccgatggatctcctgtgaaagccggcgtggaaaccaccaagccatccaagcagagcaacaacaaatacgccgccagctcctacctgagcctgacacctgagcagtggaagtcccacagatcctacagctgccaagtgacccacgaaggcagcaccgtggaaaagacagtggcccctacagagtgcagcggcagagccgattgcggctttaccagcgagagctaccagcagggcgtgctgagcgccaccatcctgtacgagatcctgctgggcaaggccaccctgtacgccgtgctggtgtctgccctggtgctgatggctatggtcaagcggaaggacagccggggaagggccaagcgatctggatctggagcaacaaacttctcactactcaaacaagcaggtgacgtggaggagaatcccgggcctactagtatggactggatttggcgcatccttttccttgtcggcgctgctaccggcgcgcattccttcgaagtccaacttgtggagtctggagggggcctggtgcagcccggcggctctctcagactgtcttgtgcggcaagcggctacaccttcagctcttactggatagaatgggtgaggcaggcacctggaaagggactggagtggattggagagattctgccaggagggggagatacaaattacaatgaaatcttcaaggggcgggccaccttttcagcggataccagcaagaatacagcttacctgcagatgaatagcctccgggcagaagataccgctgtttattattgcacgagacgggtgccaataagactggactattgggggcaagggactcttgtcaccgtcagttcaacgcgtgcctctacaaagggaccctccgtgtttcctctggctcccagcagcaagtctacaagcggaggaacagccgctctgggctgcctggtcaaggattactttcccgagcctgtgaccgtgtcctggaatagcggagcactgacaagcggcgtgcacacctttccagccgtgctgcaaagcagcggcctgtactctctgagcagcgtggtcacagtgcctagctctagcctgggcacccagacctacatctgcaatgtgaaccacaagcctagcaacaccaaggtggacaagagagtggaacccaagagctgtatccccgaggacacattcttcccaagccccgagagcagctgcgacgtgaagctggtggaaaagagcttcgagacagacaccaacctgaacttccagaacctgagcgtgatcggcttcagaatcctgctgctgaaagtggccggctttaacctgctgatgaccctgcggctgtggtccagc

SEQ ID NO: 6200 - DNA, 1353 bp, synthetic construct
  source 1..1353: mol_type = other DNA
atggccttaccagtgaccgccttgctcctgccgctggccttgctgctccacgccgccaggccggacatcgtgatgacacagagccctgatagcctggccgtgtctctgggagagagagccaccattaactgcaaggccagccagagcgtggactacgacggcgacagcttcctgaactggtatcagcagaagcccggccagcctcctaagctgctgatctacgccgccagcaatctggaaagcggcgtgccaagcagattttccggctctggcagcggcaccgatttcaccctgacaatatccagcctccagcctgaggacgtggccgtgtactactgccagcagagcaacgacgaccctctgacctttggacagggcaccaaggtggaaatcaaaggcggaggcggaagtggaggcggaggatctggcggcggaggctctgaagtccaacttgtggagtctggagggggcctggtgcagcccggcggctctctcagactgtcttgtgcggcaagcggctacaccttcagctcttactggatagaatgggtgaggcaggcacctggaaagggactggagtggattggagagattctgccaggagggggagatacaaattacaatgaaatcttcaaggggcgggccaccttttcagcggataccagcaagaatacagcttacctgcagatgaatagcctccgggcagaagataccgctgtttattattgcacgagacgggtgccaataagactggactattgggggcaagggactcttgtcaccgtcagttcaacgcgtgacggtaacgaggagatgggaggaatcactcaaaccccttacaaagtctcaatttcaggaacaactgttatccttacatgtccccagtatcctggcagcgagatcctttggcagcataacgacaagaatatagggggagatgaagacgataagaatatcggatctgacgaggatcacttgagcctgaaagagttctccgagcttgaacaaagcggatattatgtgtgctatccgcgcgggtcaaagccggaagacgctaacttttacctttatctccgagccagagtgtgcgaaaattgcatggaaatggacgttatgtccgttgctacaatagttatcgtagatatatgcatcacgggtggactgcttctgctggtttattattggtccaagaatagaaaggccaaagctaaacccgtgaccagaggcgctggcgcaggcggaaggcaaaggggacaaaacaaagaacggccaccaccagtgccaaatccagattatgagcctattcggaaaggacagagggacctgtactctggcctgaatcagagaagaatc

SEQ ID NO: 6201 - DNA, 1248 bp, synthetic construct
  source 1..1248: mol_type = other DNA
atggccttaccagtgaccgccttgctcctgccgctggccttgctgctccacgccgccaggccggacatcgtgatgacacagagccctgatagcctggccgtgtctctgggagagagagccaccattaactgcaaggccagccagagcgtggactacgacggcgacagcttcctgaactggtatcagcagaagcccggccagcctcctaagctgctgatctacgccgccagcaatctggaaagcggcgtgccaagcagattttccggctctggcagcggcaccgatttcaccctgacaatatccagcctccagcctgaggacgtggccgtgtactactgccagcagagcaacgacgaccctctgacctttggacagggcaccaaggtggaaatcaaaggcggaggcggaagtggaggcggaggatctggcggcggaggctctgaagtccaacttgtggagtctggagggggcctggtgcagcccggcggctctctcagactgtcttgtgcggcaagcggctacaccttcagctcttactggatagaatgggtgaggcaggcacctggaaagggactggagtggattggagagattctgccaggagggggagatacaaattacaatgaaatcttcaaggggcgggccaccttttcagcggataccagcaagaatacagcttacctgcagatgaatagcctccgggcagaagataccgctgtttattattgcacgagacgggtgccaataagactggactattgggggcaagggactcttgtcaccgtcagttcaacgcgtttcaagatccccatcgaggaactggaagatcgggtgttcgtgaactgcaacacctctatcacctgggtggaaggcaccgtgggaacactgctgagcgacatcaccagactggacctcggcaagcggattctggaccctcggggcatctacagatgcaacggcaccgacatctacaaggacaaagaaagcaccgtgcaggtccactacagaatgtgccagtcctgcgtggaactggaccctgctacagtggccggcatcatcgtgaccgatgtgatcgctactctgctgctggctctgggagtgttctgcttcgccggacacgaaacaggcagactgtctggcgctgccgatacacaggccctgctgagaaacgaccaagtgtatcagcccctgcgcgacagagatgatgcccagtattctcacctcggcggcaactgggctagaaacaag

SEQ ID NO: 6202 - DNA, 1278 bp, synthetic construct
  source 1..1278: mol_type = other DNA
atggccttaccagtgaccgccttgctcctgccgctggccttgctgctccacgccgccaggccggacatcgtgatgacacagagccctgatagcctggccgtgtctctgggagagagagccaccattaactgcaaggccagccagagcgtggactacgacggcgacagcttcctgaactggtatcagcagaagcccggccagcctcctaagctgctgatctacgccgccagcaatctggaaagcggcgtgccaagcagattttccggctctggcagcggcaccgatttcaccctgacaatatccagcctccagcctgaggacgtggccgtgtactactgccagcagagcaacgacgaccctctgacctttggacagggcaccaaggtggaaatcaaaggcggaggcggaagtggaggcggaggatctggcggcggaggctctgaagtccaacttgtggagtctggagggggcctggtgcagcccggcggctctctcagactgtcttgtgcggcaagcggctacaccttcagctcttactggatagaatgggtgaggcaggcacctggaaagggactggagtggattggagagattctgccaggagggggagatacaaattacaatgaaatcttcaaggggcgggccaccttttcagcggataccagcaagaatacagcttacctgcagatgaatagcctccgggcagaagataccgctgtttattattgcacgagacgggtgccaataagactggactattgggggcaagggactcttgtcaccgtcagttcaacgcgtcagagcatcaagggcaaccacctggtcaaggtgtacgactaccaagaggacggcagcgtgctgctgacatgtgatgccgaggccaagaacatcacctggtttaaggacggcaagatgatcggcttcctgaccgaggacaagaagaagtggaacctgggcagcaacgctaaggaccccagaggcatgtatcagtgcaagggcagccagaacaagagcaagcccctccaggtgtactaccggatgtgccagaactgcatcgagctgaacgccgctaccatcagcggctttctgttcgccgagatcgtgtccatcttcgtgctggccgtgggcgtgtactttatcgctggacaggatggcgtgcggcagagcagagcttccgataagcaaaccctgctgcctaacgaccagctgtaccagcctctgaaggacagagaggacgaccagtacagccacctccagggcaatcagctgagaagaaac

SEQ ID NO: 6203 - DNA, 1227 bp, synthetic construct
  source 1..1227: mol_type = other DNA
atggccttaccagtgaccgccttgctcctgccgctggccttgctgctccacgccgccaggccggacatcgtgatgacacagagccctgatagcctggccgtgtctctgggagagagagccaccattaactgcaaggccagccagagcgtggactacgacggcgacagcttcctgaactggtatcagcagaagcccggccagcctcctaagctgctgatctacgccgccagcaatctggaaagcggcgtgccaagcagattttccggctctggcagcggcaccgatttcaccctgacaatatccagcctccagcctgaggacgtggccgtgtactactgccagcagagcaacgacgaccctctgacctttggacagggcaccaaggtggaaatcaaaggcggaggcggaagtggaggcggaggatctggcggcggaggctctgaagtccaacttgtggagtctggagggggcctggtgcagcccggcggctctctcagactgtcttgtgcggcaagcggctacaccttcagctcttactggatagaatgggtgaggcaggcacctggaaagggactggagtggattggagagattctgccaggagggggagatacaaattacaatgaaatcttcaaggggcgggccaccttttcagcggataccagcaagaatacagcttacctgcagatgaatagcctccgggcagaagataccgctgtttattattgcacgagacgggtgccaataagactggactattgggggcaagggactcttgtcaccgtcagttcaacgcgtcagagttttgggttgttggaccctaaattgtgctatctgttggacggaatcctgttcatttacggagtgatcctgaccgcattgttcctgcgggttaagttttccagatccgcagacgcacccgcttaccaacaagggcagaaccaactctacaatgaacttaatttggggcggagggaagagtacgacgttctggacaaaaggaggggacgagatcccgagatgggcggaaagcctcagcgaaggaagaatccgcaagaggggctttataacgaactccagaaagataaaatggcagaagcctatagtgagattgggatgaagggagaaaggaggaggggtaaaggtcacgatgggttgtaccaaggattgagcacagccactaaagatacctatgatgcgctccacatgcaggccctgccgccaaga

SEQ ID NO: 6204 - DNA, 1512 bp, synthetic construct
  source 1..1512: mol_type = other DNA
atggccttaccagtgaccgccttgctcctgccgctggccttgctgctccacgccgccaggccggacatcgtgatgacacagagccctgatagcctggccgtgtctctgggagagagagccaccattaactgcaaggccagccagagcgtggactacgacggcgacagcttcctgaactggtatcagcagaagcccggccagcctcctaagctgctgatctacgccgccagcaatctggaaagcggcgtgccaagcagattttccggctctggcagcggcaccgatttcaccctgacaatatccagcctccagcctgaggacgtggccgtgtactactgccagcagagcaacgacgaccctctgacctttggacagggcaccaaggtggaaatcaaaggcggaggcggaagtggaggcggaggatctggcggcggaggctctgaagtccaacttgtggagtctggagggggcctggtgcagcccggcggctctctcagactgtcttgtgcggcaagcggctacaccttcagctcttactggatagaatgggtgaggcaggcacctggaaagggactggagtggattggagagattctgccaggagggggagatacaaattacaatgaaatcttcaaggggcgggccaccttttcagcggataccagcaagaatacagcttacctgcagatgaatagcctccgggcagaagataccgctgtttattattgcacgagacgggtgccaataagactggactattgggggcaagggactcttgtcaccgtcagttcaacgcgtggaatgaggactgaggatcttcccaaagctgtcgtctttctcgaaccccaatggtatcgggtgctcgaaaaagactctgtgacactgaaatgccaaggggcctactctcccgaggacaactccacacagtggtttcataatgagtccctcatcagctctcaggccagctcttatttcattgatgccgctacagtggacgactccggcgagtatcggtgtcagaccaatctgtctacactgtctgaccccgtgcagcttgaggtccacattggatggttgctcttgcaagccccacgctgggttttcaaagaggaagatccaatccatctgcggtgccacagctggaaaaacaccgctctccacaaagtcacatacctgcaaaatggcaaaggacgcaaatacttccatcacaattccgatttttacattccgaaggctaccctgaaagacagcggcagctatttctgccggggactcgtcggctccaagaatgtgtcctccgaaaccgtgaatatcacgattacccaaggactggctgtgcctacaatctctagcttctttccgcctggataccaagtctccttctgtcttgtgatggtcctcctgtttgctgtggacacaggactgtacttttccgtgaaaacgaacatccgcagctccacacgcgattggaaagatcacaagtttaaatggcgcaaagatccccaggacaag

SEQ ID NO: 6205 - DNA, 1437 bp, synthetic construct
  source 1..1437: mol_type = other DNA
atggccttaccagtgaccgccttgctcctgccgctggccttgctgctccacgccgccaggccggacatcgtgatgacacagagccctgatagcctggccgtgtctctgggagagagagccaccattaactgcaaggccagccagagcgtggactacgacggcgacagcttcctgaactggtatcagcagaagcccggccagcctcctaagctgctgatctacgccgccagcaatctggaaagcggcgtgccaagcagattttccggctctggcagcggcaccgatttcaccctgacaatatccagcctccagcctgaggacgtggccgtgtactactgccagcagagcaacgacgaccctctgacctttggacagggcaccaaggtggaaatcaaaggcggaggcggaagtggaggcggaggatctggcggcggaggctctgaagtccaacttgtggagtctggagggggcctggtgcagcccggcggctctctcagactgtcttgtgcggcaagcggctacaccttcagctcttactggatagaatgggtgaggcaggcacctggaaagggactggagtggattggagagattctgccaggagggggagatacaaattacaatgaaatcttcaaggggcgggccaccttttcagcggataccagcaagaatacagcttacctgcagatgaatagcctccgggcagaagataccgctgtttattattgcacgagacgggtgccaataagactggactattgggggcaagggactcttgtcaccgtcagttcaacgcgtggaatgaggactgaggatcttcccaaagctgtcgtctttctcgaaccccaatggtatcgggtgctcgaaaaagactctgtgacactgaaatgccaaggggcctactctcccgaggacaactccacacagtggtttcataatgagtccctcatcagctctcaggccagctcttatttcattgatgccgctacagtggacgactccggcgagtatcggtgtcagaccaatctgtctacactgtctgaccccgtgcagcttgaggtccacattggatggttgctcttgcaagccccacgctgggttttcaaagaggaagatccaatccatctgcggtgccacagctggaaaaacaccgctctccacaaagtcacatacctgcaaaatggcaaaggacgcaaatacttccatcacaattccgatttttacattccgaaggctaccctgaaagacagcggcagctatttctgccggggactcgtcggctccaagaatgtgtcctccgaaaccgtgaatatcacgattacccaaggactggctgtgcctacaatctctagcttctttccgcctggataccaagtctccttctgtcttgtgatggtcctcctgtttgctgtggacacaggactgtacttttccgtg

SEQ ID NO: 6206 - DNA, 1440 bp, synthetic construct
  source 1..1440: mol_type = other DNA
atggccttaccagtgaccgccttgctcctgccgctggccttgctgctccacgccgccaggccggacatcgtgatgacacagagccctgatagcctggccgtgtctctgggagagagagccaccattaactgcaaggccagccagagcgtggactacgacggcgacagcttcctgaactggtatcagcagaagcccggccagcctcctaagctgctgatctacgccgccagcaatctggaaagcggcgtgccaagcagattttccggctctggcagcggcaccgatttcaccctgacaatatccagcctccagcctgaggacgtggccgtgtactactgccagcagagcaacgacgaccctctgacctttggacagggcaccaaggtggaaatcaaaggcggaggcggaagtggaggcggaggatctggcggcggaggctctgaagtccaacttgtggagtctggagggggcctggtgcagcccggcggctctctcagactgtcttgtgcggcaagcggctacaccttcagctcttactggatagaatgggtgaggcaggcacctggaaagggactggagtggattggagagattctgccaggagggggagatacaaattacaatgaaatcttcaaggggcgggccaccttttcagcggataccagcaagaatacagcttacctgcagatgaatagcctccgggcagaagataccgctgtttattattgcacgagacgggtgccaataagactggactattgggggcaagggactcttgtcaccgtcagttcaacgcgtggaatgaggactgaggatcttcccaaagctgtcgtctttctcgaaccccaatggtatcgggtgctcgaaaaagactctgtgacactgaaatgccaaggggcctactctcccgaggacaactccacacagtggtttcataatgagtccctcatcagctctcaggccagctcttatttcattgatgccgctacagtggacgactccggcgagtatcggtgtcagaccaatctgtctacactgtctgaccccgtgcagcttgaggtccacattggatggttgctcttgcaagccccacgctgggttttcaaagaggaagatccaatccatctgcggtgccacagctggaaaaacaccgctctccacaaagtcacatacctgcaaaatggcaaaggacgcaaatacttccatcacaattccgatttttacattccgaaggctaccctgaaagacagcggcagctatttctgccggggactcgtcggctccaagaatgtgtcctccgaaaccgtgaatatcacgattacccaaggactggctgtgcctacaatctctagcttctttccgcctggataccaagtctccttctgtcttgtgatggtcctcctgtttgctgtggacacaggactgtacttttccgtgaaa

SEQ ID NO: 6207 - DNA, 2169 bp, synthetic construct
  source 1..2169: mol_type = other DNA
atggccttaccagtgaccgccttgctcctgccgctggccttgctgctccacgccgccaggccggacatcgtgatgacacagagccctgatagcctggccgtgtctctgggagagagagccaccattaactgcaaggccagccagagcgtggactacgacggcgacagcttcctgaactggtatcagcagaagcccggccagcctcctaagctgctgatctacgccgccagcaatctggaaagcggcgtgccaagcagattttccggctctggcagcggcaccgatttcaccctgacaatatccagcctccagcctgaggacgtggccgtgtactactgccagcagagcaacgacgaccctctgacctttggacagggcaccaaggtggaaatcaaactcgagggacagcctaaggccaatcctaccgtgacactgttccctccaagcagcgaagaactccaggccaacaaggccacacttgtgtgcctgatctccgacttctaccctggggctgtgacagtggcttggaaggccgatggatctcctgtgaaagccggcgtggaaaccaccaagccatccaagcagagcaacaacaaatacgccgccagctcctacctgagcctgacacctgagcagtggaagtcccacagatcctacagctgccaagtgacccacgaaggcagcaccgtggaaaagacagtggcccctacagagtgcagcggatcccagagcttcggcctgctggaccccaagctgtgctacctgctggatggcatcctgttcatctacggcgtgatcctgaccgccctgttcctgagagtgaagttcagcagaagcgccgacgcccctgcctaccagcagggacagaaccaactgtacaacgagctgaacctgggcagacgggaagagtacgacgtgctggacaagcggagaggcagggaccctgagatgggcggaaagccccagcggagaaagaacccccaggaaggactgtataacgaactccagaaagacaagatggccgaagcctacagcgagatcggcatgaagggcgagcggagaagaggcaagggccacgatggcctgtaccagggcctgagcaccgccaccaaggacacctatgacgccctgcacatgcaggccctgcctccaagaagggccaagcgatctggatctggagcaacaaacttctcactactcaaacaagcaggtgacgtggaggagaatcccgggcctactagtatggactggatttggcgcatccttttccttgtcggcgctgctaccggcgcgcattccttcgaagtccaacttgtggagtctggagggggcctggtgcagcccggcggctctctcagactgtcttgtgcggcaagcggctacaccttcagctcttactggatagaatgggtgaggcaggcacctggaaagggactggagtggattggagagattctgccaggagggggagatacaaattacaatgaaatcttcaaggggcgggccaccttttcagcggataccagcaagaatacagcttacctgcagatgaatagcctccgggcagaagataccgctgtttattattgcacgagacgggtgccaataagactggactattgggggcaagggactcttgtcaccgtcagttcaacgcgtgcctctacaaagggaccctccgtgtttcctctggctcccagcagcaagtctacaagcggaggaacagccgctctgggctgcctggtcaaggattactttcccgagcctgtgaccgtgtcctggaatagcggagcactgacaagcggcgtgcacacctttccagccgtgctgcaaagcagcggcctgtactctctgagcagcgtggtcacagtgcctagctctagcctgggcacccagacctacatctgcaatgtgaaccacaagcctagcaacaccaaggtggacaagagagtggaacccaagagctgtggtaccatcactcaaggtttggcagtgtcaaccatctcatcattctttccacctggctaccaagtgtccttctgcctggtcatggtgctgctgttcgccgtggataccggcctgtacttcagcgtcaagaccaacatccggtccagcaccagagactggaaggaccacaagttcaagtggcggaaggaccctcaggacaag

SEQ ID NO: 6208 - DNA, 2214 bp, synthetic construct; identical to SEQ ID NO: 4671
  source 1..2214: mol_type = other DNA

SEQ ID NO: 6209 - DNA, 2139 bp, synthetic construct
  source 1..2139: mol_type = other DNA
atggccttaccagtgaccgccttgctcctgccgctggccttgctgctccacgccgccaggccggacatcgtgatgacacagagccctgatagcctggccgtgtctctgggagagagagccaccattaactgcaaggccagccagagcgtggactacgacggcgacagcttcctgaactggtatcagcagaagcccggccagcctcctaagctgctgatctacgccgccagcaatctggaaagcggcgtgccaagcagattttccggctctggcagcggcaccgatttcaccctgacaatatccagcctccagcctgaggacgtggccgtgtactactgccagcagagcaacgacgaccctctgacctttggacagggcaccaaggtggaaatcaaactcgaggacctgaagaacgtgttcccacctgaggtggccgtgttcgagcctagcgaggccgagatcagccacacccagaaagccaccctcgtgtgcctggctaccggcttctaccccgaccatgtggaactgtcttggtgggtcaacggcaaagaggtgcacagcggcgtgtctaccgacccccagccactgaaagaacagcccgccctgaacgacagccggtactgcctgagcagcagactgagagtgtccgccaccttctggcagaacccccggaaccacttcagatgccaggtgcagttctacggcctgagcgagaacgacgagtggacccaggacagagccaagcccgtgacccagatcgtgtctgccgaagcctggggcagagccgattgcggatcccagagcttcggcctgctggaccccaagctgtgctacctgctggatggcatcctgttcatctacggcgtgatcctgaccgccctgttcctgagagtgaagttcagcagaagcgccgacgcccctgcctaccagcagggacagaaccaactgtacaacgagctgaacctgggcagacgggaagagtacgacgtgctggacaagcggagaggcagggaccctgagatgggcggaaagccccagcggagaaagaacccccaggaaggactgtataacgaactccagaaagacaagatggccgaagcctacagcgagatcggcatgaagggcgagcggagaagaggcaagggccacgatggcctgtaccagggcctgagcaccgccaccaaggacacctatgacgccctgcacatgcaggccctgcctccaagaagggccaagcgatctggatctggagcaacaaacttctcactactcaaacaagcaggtgacgtggaggagaatcccgggcctactagtatggactggatttggcgcatccttttccttgtcggcgctgctaccggcgcgcattccttcgaagtccaacttgtggagtctggagggggcctggtgcagcccggcggctctctcagactgtcttgtgcggcaagcggctacaccttcagctcttactggatagaatgggtgaggcaggcacctggaaagggactggagtggattggagagattctgccaggagggggagatacaaattacaatgaaatcttcaaggggcgggccaccttttcagcggataccagcaagaatacagcttacctgcagatgaatagcctccgggcagaagataccgctgtttattattgcacgagacgggtgccaataagactggactattgggggcaagggactcttgtcaccgtcagttcaacgcgtatccagaaccctgatcctgccgtgtaccagctgcgggatagcaagagcagcgacaagagcgtgtgtctgttcaccgacttcgacagccagaccaacgtgtcccagagcaaggactccgacgtgtacatcaccgataagaccgtgctggacatgcggagcatggacttcaagagcaactccgccgtggcctggtccaacaagtccgatttcgcctgcgccaacgccttcaacaacagcattatccccgaggacacattcttcccaagccccgagagcagctgcggtaccatcactcaaggtttggcagtgtcaaccatctcatcattctttccacctggctaccaagtgtccttctgcctggtcatggtgctgctgttcgccgtggataccggcctgtacttcagcgtc

SEQ ID NO: 6210 - DNA, 2142 bp, synthetic construct
  source 1..2142: mol_type = other DNA
atggccttaccagtgaccgccttgctcctgccgctggccttgctgctccacgccgccaggccggacatcgtgatgacacagagccctgatagcctggccgtgtctctgggagagagagccaccattaactgcaaggccagccagagcgtggactacgacggcgacagcttcctgaactggtatcagcagaagcccggccagcctcctaagctgctgatctacgccgccagcaatctggaaagcggcgtgccaagcagattttccggctctggcagcggcaccgatttcaccctgacaatatccagcctccagcctgaggacgtggccgtgtactactgccagcagagcaacgacgaccctctgacctttggacagggcaccaaggtggaaatcaaactcgaggacctgaagaacgtgttcccacctgaggtggccgtgttcgagcctagcgaggccgagatcagccacacccagaaagccaccctcgtgtgcctggctaccggcttctaccccgaccatgtggaactgtcttggtgggtcaacggcaaagaggtgcacagcggcgtgtctaccgacccccagccactgaaagaacagcccgccctgaacgacagccggtactgcctgagcagcagactgagagtgtccgccaccttctggcagaacccccggaaccacttcagatgccaggtgcagttctacggcctgagcgagaacgacgagtggacccaggacagagccaagcccgtgacccagatcgtgtctgccgaagcctggggcagagccgattgcggatcccagagcttcggcctgctggaccccaagctgtgctacctgctggatggcatcctgttcatctacggcgtgatcctgaccgccctgttcctgagagtgaagttcagcagaagcgccgacgcccctgcctaccagcagggacagaaccaactgtacaacgagctgaacctgggcagacgggaagagtacgacgtgctggacaagcggagaggcagggaccctgagatgggcggaaagccccagcggagaaagaacccccaggaaggactgtataacgaactccagaaagacaagatggccgaagcctacagcgagatcggcatgaagggcgagcggagaagaggcaagggccacgatggcctgtaccagggcctgagcaccgccaccaaggacacctatgacgccctgcacatgcaggccctgcctccaagaagggccaagcgatctggatctggagcaacaaacttctcactactcaaacaagcaggtgacgtggaggagaatcccgggcctactagtatggactggatttggcgcatccttttccttgtcggcgctgctaccggcgcgcattccttcgaagtccaacttgtggagtctggagggggcctggtgcagcccggcggctctctcagactgtcttgtgcggcaagcggctacaccttcagctcttactggatagaatgggtgaggcaggcacctggaaagggactggagtggattggagagattctgccaggagggggagatacaaattacaatgaaatcttcaaggggcgggccaccttttcagcggataccagcaagaatacagcttacctgcagatgaatagcctccgggcagaagataccgctgtttattattgcacgagacgggtgccaataagactggactattgggggcaagggactcttgtcaccgtcagttcaacgcgtatccagaaccctgatcctgccgtgtaccagctgcgggatagcaagagcagcgacaagagcgtgtgtctgttcaccgacttcgacagccagaccaacgtgtcccagagcaaggactccgacgtgtacatcaccgataagaccgtgctggacatgcggagcatggacttcaagagcaactccgccgtggcctggtccaacaagtccgatttcgcctgcgccaacgccttcaacaacagcattatccccgaggacacattcttcccaagccccgagagcagctgcggtaccatcactcaaggtttggcagtgtcaaccatctcatcattctttccacctggctaccaagtgtccttctgcctggtcatggtgctgctgttcgccgtggataccggcctgtacttcagcgtcaag

SEQ ID NO: 6211 - DNA, 2145 bp, synthetic construct
  source 1..2145: mol_type = other DNA
atggccttaccagtgaccgccttgctcctgccgctggccttgctgctccacgccgccaggccggacatcgtgatgacacagagccctgatagcctggccgtgtctctgggagagagagccaccattaactgcaaggccagccagagcgtggactacgacggcgacagcttcctgaactggtatcagcagaagcccggccagcctcctaagctgctgatctacgccgccagcaatctggaaagcggcgtgccaagcagattttccggctctggcagcggcaccgatttcaccctgacaatatccagcctccagcctgaggacgtggccgtgtactactgccagcagagcaacgacgaccctctgacctttggacagggcaccaaggtggaaatcaaactcgaggacctgaagaacgtgttcccacctgaggtggccgtgttcgagcctagcgaggccgagatcagccacacccagaaagccaccctcgtgtgcctggctaccggcttctaccccgaccatgtggaactgtcttggtgggtcaacggcaaagaggtgcacagcggcgtgtctaccgacccccagccactgaaagaacagcccgccctgaacgacagccggtactgcctgagcagcagactgagagtgtccgccaccttctggcagaacccccggaaccacttcagatgccaggtgcagttctacggcctgagcgagaacgacgagtggacccaggacagagccaagcccgtgacccagatcgtgtctgccgaagcctggggcagagccgattgcggatcccagagcttcggcctgctggaccccaagctgtgctacctgctggatggcatcctgttcatctacggcgtgatcctgaccgccctgttcctgagagtgaagttcagcagaagcgccgacgcccctgcctaccagcagggacagaaccaactgtacaacgagctgaacctgggcagacgggaagagtacgacgtgctggacaagcggagaggcagggaccctgagatgggcggaaagccccagcggagaaagaacccccaggaaggactgtataacgaactccagaaagacaagatggccgaagcctacagcgagatcggcatgaagggcgagcggagaagaggcaagggccacgatggcctgtaccagggcctgagcaccgccaccaaggacacctatgacgccctgcacatgcaggccctgcctccaagaagggccaagcgatctggatctggagcaacaaacttctcactactcaaacaagcaggtgacgtggaggagaatcccgggcctactagtatggactggatttggcgcatccttttccttgtcggcgctgctaccggcgcgcattccttcgaagtccaacttgtggagtctggagggggcctggtgcagcccggcggctctctcagactgtcttgtgcggcaagcggctacaccttcagctcttactggatagaatgggtgaggcaggcacctggaaagggactggagtggattggagagattctgccaggagggggagatacaaattacaatgaaatcttcaaggggcgggccaccttttcagcggataccagcaagaatacagcttacctgcagatgaatagcctccgggcagaagataccgctgtttattattgcacgagacgggtgccaataagactggactattgggggcaagggactcttgtcaccgtcagttcaacgcgtatccagaaccctgatcctgccgtgtaccagctgcgggatagcaagagcagcgacaagagcgtgtgtctgttcaccgacttcgacagccagaccaacgtgtcccagagcaaggactccgacgtgtacatcaccgataagaccgtgctggacatgcggagcatggacttcaagagcaactccgccgtggcctggtccaacaagtccgatttcgcctgcgccaacgccttcaacaacagcattatccccgaggacacattcttcccaagccccgagagcagctgcggtaccatcactcaaggtttggcagtgtcaaccatctcatcattctttccacctggctaccaagtgtccttctgcctggtcatggtgctgctgttcgccgtggataccggcctgtacttcagcgtcaagacc

SEQ ID NO: 6212 - DNA, 1956 bp, synthetic construct
  source 1..1956: mol_type = other DNA
atggccttaccagtgaccgccttgctcctgccgctggccttgctgctccacgccgccaggccggacatcgtgatgacacagagccctgatagcctggccgtgtctctgggagagagagccaccattaactgcaaggccagccagagcgtggactacgacggcgacagcttcctgaactggtatcagcagaagcccggccagcctcctaagctgctgatctacgccgccagcaatctggaaagcggcgtgccaagcagattttccggctctggcagcggcaccgatttcaccctgacaatatccagcctccagcctgaggacgtggccgtgtactactgccagcagagcaacgacgaccctctgacctttggacagggcaccaaggtggaaatcaaactcgagggacagcctaaggccaatcctaccgtgacactgttccctccaagcagcgaagaactccaggccaacaaggccacacttgtgtgcctgatctccgacttctaccctggggctgtgacagtggcttggaaggccgatggatctcctgtgaaagccggcgtggaaaccaccaagccatccaagcagagcaacaacaaatacgccgccagctcctacctgagcctgacacctgagcagtggaagtcccacagatcctacagctgccaagtgacccacgaaggcagcaccgtggaaaagacagtggcccctacagagtgcagcggatccctgggagagcctcagctgtgctatatcctggacgccatcctgtttctgtacggcatcgtgctgaccctgctgtactgccggctgaagatccaagtgcggaaggccgccatcaccagctacgagaaatccgacggcgtgtacaccggcctgagcaccagaaatcaagagacatacgagacactgaagcacgaaaagcctccacaaagggccaagcgatctggatctggagcaacaaacttctcactactcaaacaagcaggtgacgtggaggagaatcccgggcctactagtatggactggatttggcgcatccttttccttgtcggcgctgctaccggcgcgcattccttcgaagtccaacttgtggagtctggagggggcctggtgcagcccggcggctctctcagactgtcttgtgcggcaagcggctacaccttcagctcttactggatagaatgggtgaggcaggcacctggaaagggactggagtggattggagagattctgccaggagggggagatacaaattacaatgaaatcttcaaggggcgggccaccttttcagcggataccagcaagaatacagcttacctgcagatgaatagcctccgggcagaagataccgctgtttattattgcacgagacgggtgccaataagactggactattgggggcaagggactcttgtcaccgtcagttcaacgcgtgcctctacaaagggaccctccgtgtttcctctggctcccagcagcaagtctacaagcggaggaacagccgctctgggctgcctggtcaaggattactttcccgagcctgtgaccgtgtcctggaatagcggagcactgacaagcggcgtgcacacctttccagccgtgctgcaaagcagcggcctgtactctctgagcagcgtggtcacagtgcctagctctagcctgggcacccagacctacatctgcaatgtgaaccacaagcctagcaacaccaaggtggacaagagagtggaacccaagagctgtggtaccctcggagaaccacagctctgttacattctggatgctatcctgttcctctatgggatcgtcctgacactcctgtattgcagactcaaaattcaagttcgcaaagccgccattacctcttacgagaagagtgatggggtgtacacaggactgtctacccggaatcaagaaacctacgaaaccctcaaacatgagaagccacctcagtaa

SEQ ID NO: 6213 - DNA, 1863 bp, synthetic construct
  source 1..1863: mol_type = other DNA
atggccttaccagtgaccgccttgctcctgccgctggccttgctgctccacgccgccaggccggacatcgtgatgacacagagccctgatagcctggccgtgtctctgggagagagagccaccattaactgcaaggccagccagagcgtggactacgacggcgacagcttcctgaactggtatcagcagaagcccggccagcctcctaagctgctgatctacgccgccagcaatctggaaagcggcgtgccaagcagattttccggctctggcagcggcaccgatttcaccctgacaatatccagcctccagcctgaggacgtggccgtgtactactgccagcagagcaacgacgaccctctgacctttggacagggcaccaaggtggaaatcaaactcgaggacctgaagaacgtgttcccacctgaggtggccgtgttcgagcctagcgaggccgagatcagccacacccagaaagccaccctcgtgtgcctggctaccggcttctaccccgaccatgtggaactgtcttggtgggtcaacggcaaagaggtgcacagcggcgtgtgtaccgacccccagccactgaaagaacagcccgccctgaacgacagccggtactgcctgagcagcagactgagagtgtccgccaccttctggcagaacccccggaaccacttcagatgccaggtgcagttctacggcctgagcgagaacgacgagtggacccaggacagagccaagcccgtgacccagatcgtgtctgccgaagcctggggcagagccgattgcggctttaccagcgagagctaccagcagggcgtgctgagcgcctactacatgtacttgttgctgctgctgaagtccgtggtgtacttcgccatcatcacatgctgcctgctgcggagaaccgccttctgctgcaacggcgagaagtctagggccaagcgatctggatctggagcaacaaacttctcactactcaaacaagcaggtgacgtggaggagaatcccgggcctactagtatggactggatttggcgcatccttttccttgtcggcgctgctaccggcgcgcattccttcgaagtccaacttgtggagtctggagggggcctggtgcagcccggcggctctctcagactgtcttgtgcggcaagcggctacaccttcagctcttactggatagaatgggtgaggcaggcacctggaaagggactggagtggattggagagattctgccaggagggggagatacaaattacaatgaaatcttcaaggggcgggccaccttttcagcggataccagcaagaatacagcttacctgcagatgaatagcctccgggcagaagataccgctgtttattattgcacgagacgggtgccaataagactggactattgggggcaagggactcttgtcaccgtcagttcaacgcgtatccagaaccctgatcctgccgtgtaccagctgcgggatagcaagagcagcgacaagagcgtgtgtctgttcaccgacttcgacagccagaccaacgtgtcccagagcaaggactccgacgtgtacatcaccgataagtgcgtgctggacatgcggagcatggacttcaagagcaactccgccgtggcctggtccaacaagtccgatttcgcctgcgccaacgccttcaacaacagcattatccccgaggacacattcttcccaagccccgagagcagctgcgacgtgaagctggtggaaaagagcttcgagacagacaccaacctgaacttccagaacctgagcgtgatcggcttcagaatcctgctgctgaaagtggccggctttaacctgctgatgaccctgcggctgtggtccagc

SEQ ID NO: 6214 - DNA, 1884 bp, synthetic construct
  source 1..1884: mol_type = other DNA
atggccttaccagtgaccgccttgctcctgccgctggccttgctgctccacgccgccaggccggacatcgtgatgacacagagccctgatagcctggccgtgtctctgggagagagagccaccattaactgcaaggccagccagagcgtggactacgacggcgacagcttcctgaactggtatcagcagaagcccggccagcctcctaagctgctgatctacgccgccagcaatctggaaagcggcgtgccaagcagattttccggctctggcagcggcaccgatttcaccctgacaatatccagcctccagcctgaggacgtggccgtgtactactgccagcagagcaacgacgaccctctgacctttggacagggcaccaaggtggaaatcaaactcgaggacaagcagctggacgccgacgtgtcccccaagcctaccatcttcctgccctctatcgccgagacaaagctccagaaggccggcacctacctgtgcctgctggaaaagttcttcccagatgtgattaagatccactggcaggaaaagaagtccaacaccatcctgggcagccaggaaggcaacaccatgaagaccaacgacacctacatgaagttcagctggctgaccgtgcccgagaagtccctggacaaagaacacagatgcatcgtgcggcacgaaaacaacaagaacggcgtggaccaggaaatcatcttcccacccatcaagaccgatgtgattacaatggaccccaaggacaactgctccaaggacgccaacgataccctgctgctccagctgaccaacaccagcgcctactacatgtacgagatcctgctgggcaaggccaccctgtacgccgtgctggtgtctgccctggtgctgatggctatggtcaagcggaaggacagccggggaagggccaagcgatctggatctggagcaacaaacttctcactactcaaacaagcaggtgacgtggaggagaatcccgggcctactagtatggactggatttggcgcatccttttccttgtcggcgctgctaccggcgcgcattccttcgaagtccaacttgtggagtctggagggggcctggtgcagcccggcggctctctcagactgtcttgtgcggcaagcggctacaccttcagctcttactggatagaatgggtgaggcaggcacctggaaagggactggagtggattggagagattctgccaggagggggagatacaaattacaatgaaatcttcaaggggcgggccaccttttcagcggataccagcaagaatacagcttacctgcagatgaatagcctccgggcagaagataccgctgtttattattgcacgagacgggtgccaataagactggactattgggggcaagggactcttgtcaccgtcagttcaacgcgtagccagcctcacaccaagcccagcgtgttcgtgatgaagaacggcaccaacgtggcctgcctcgtgaaagagttctaccccaaggacatcaggatcaacctggtgtccagcaagaagatcaccgagttcgaccccgccatcgtgatctcccccagcggcaagtacaacgccgtgaagctggggaagtatgaggacagcaacagcgtgacctgctccgtgcagcacgacaacaagaccgtgcacagcaccgactttgaagtgaaaaccgactccaccgaccacgtgaagcccaaagagacagagaacaccaagcagcccagcaagagctgccacaagcccaaggccatcgtgcacaccgagaaagtgaacatgatgagcctgaccgtgatcggcttcagaatcctgctgctgaaagtggccggctttaacctgctgatgaccctgcggctgtggtccagctaa

SEQ ID NO: 6215 - DNA, 1884 bp, synthetic construct
  source 1..1884: mol_type = other DNA
atggccttaccagtgaccgccttgctcctgccgctggccttgctgctccacgccgccaggccggacatcgtgatgacacagagccctgatagcctggccgtgtctctgggagagagagccaccattaactgcaaggccagccagagcgtggactacgacggcgacagcttcctgaactggtatcagcagaagcccggccagcctcctaagctgctgatctacgccgccagcaatctggaaagcggcgtgccaagcagattttccggctctggcagcggcaccgatttcaccctgacaatatccagcctccagcctgaggacgtggccgtgtactactgccagcagagcaacgacgaccctctgacctttggacagggcaccaaggtggaaatcaaactcgaggacaagcagctggacgccgacgtgtcccccaagcctaccatcttcctgccctctatcgccgagacaaagctccagaaggccggcacctacctgtgcctgctggaaaagttcttcccagatgtgattaagatccactggcaggaaaagaagtccaacaccatcctgggcagccaggaaggcaacaccatgaagaccaacgacacctacatgaagttcagctggctgaccgtgcccgagaagtccctggacaaagaacacagatgcatcgtgcggcacgaaaacaacaagaacggcgtggaccaggaaatcatcttcccacccatcaagaccgatgtgattacaatggaccccaaggacaactgctccaaggacgccaacgataccctgctgctccagctgaccaacaccagcgccaccatcctgtacgagatcctgctgggcaaggccaccctgtacgccgtgctggtgtctgccctggtgctgatggctatggtcaagcggaaggacagccggggaagggccaagcgatctggatctggagcaacaaacttctcactactcaaacaagcaggtgacgtggaggagaatcccgggcctactagtatggactggatttggcgcatccttttccttgtcggcgctgctaccggcgcgcattccttcgaagtccaacttgtggagtctggagggggcctggtgcagcccggcggctctctcagactgtcttgtgcggcaagcggctacaccttcagctcttactggatagaatgggtgaggcaggcacctggaaagggactggagtggattggagagattctgccaggagggggagatacaaattacaatgaaatcttcaaggggcgggccaccttttcagcggataccagcaagaatacagcttacctgcagatgaatagcctccgggcagaagataccgctgtttattattgcacgagacgggtgccaataagactggactattgggggcaagggactcttgtcaccgtcagttcaacgcgtagccagcctcacaccaagcccagcgtgttcgtgatgaagaacggcaccaacgtggcctgcctcgtgaaagagttctaccccaaggacatcaggatcaacctggtgtccagcaagaagatcaccgagttcgaccccgccatcgtgatctcccccagcggcaagtacaacgccgtgaagctggggaagtatgaggacagcaacagcgtgacctgctccgtgcagcacgacaacaagaccgtgcacagcaccgactttgaagtgaaaaccgactccaccgaccacgtgaagcccaaagagacagagaacaccaagcagcccagcaagagctgccacaagcccaaggccatcgtgcacaccgagaaagtgaacatgatgagcctgaccgtgatcggcttcagaatcctgctgctgaaagtggccggctttaacctgctgatgaccctgcggctgtggtccagctaa

SEQ ID NO: 6216 - DNA, 1884 bp, synthetic construct
  source 1..1884: mol_type = other DNA
atggccttaccagtgaccgccttgctcctgccgctggccttgctgctccacgccgccaggccggacatcgtgatgacacagagccctgatagcctggccgtgtctctgggagagagagccaccattaactgcaaggccagccagagcgtggactacgacggcgacagcttcctgaactggtatcagcagaagcccggccagcctcctaagctgctgatctacgccgccagcaatctggaaagcggcgtgccaagcagattttccggctctggcagcggcaccgatttcaccctgacaatatccagcctccagcctgaggacgtggccgtgtactactgccagcagagcaacgacgaccctctgacctttggacagggcaccaaggtggaaatcaaactcgaggacaagcagctggacgccgacgtgtcccccaagcctaccatcttcctgccctctatcgccgagacaaagctccagaaggccggcacctacctgtgcctgctggaaaagttcttcccagatgtgattaagatccactggcaggaaaagaagtccaacaccatcctgggcagccaggaaggcaacaccatgaagaccaacgacacctacatgaagttcagctggctgaccgtgcccgagaagtccctggacaaagaacacagatgcatcgtgcggcacgaaaacaacaagaacggcgtggaccaggaaatcatcttcccacccatcaagaccgatgtgattacaatggaccccaaggacaactgctccaaggacgccaacgataccctgctgctccagctgaccaacaccagcgcctactacatgtacgagatcctgctgggcaaggccaccctgtacgccgtgctggtgtctgccctggtgctgatggctatggtcaagcggaaggacagccggggaagggccaagcgatctggatctggagcaacaaacttctcactactcaaacaagcaggtgacgtggaggagaatcccgggcctactagtatggactggatttggcgcatccttttccttgtcggcgctgctaccggcgcgcattccttcgaagtccaacttgtggagtctggagggggcctggtgcagcccggcggctctctcagactgtcttgtgcggcaagcggctacaccttcagctcttactggatagaatgggtgaggcaggcacctggaaagggactggagtggattggagagattctgccaggagggggagatacaaattacaatgaaatcttcaaggggcgggccaccttttcagcggataccagcaagaatacagcttacctgcagatgaatagcctccgggcagaagataccgctgtttattattgcacgagacgggtgccaataagactggactattgggggcaagggactcttgtcaccgtcagttcaacgcgtagccagcctcacaccaagcccagcgtgttcgtgatgaagaacggcaccaacgtggcctgcctcgtgaaagagttctaccccaaggacatcaggatcaacctggtgtccagcaagaagatcaccgagttcgaccccgccatcgtgatctcccccagcggcaagtacaacgccgtgaagctggggaagtacgaggacagcaacagcgtgacctgctccgtgcagcacgacaacaagaccgtgcacagcaccgactttgaagtgaaaaccgactccaccgaccacgtgaagcccaaagagacagagaacaccaagcagcccagcaagagctgccacaagcccaaggccatcgtgcacaccgagaaagtgaacatgatgagcctgaccgtgctgggcttcagaatcctgctgctgaaagtggccggctttaacctgctgatgaccctgcggctgtggtccagctaa

SEQ ID NO: 6217 - DNA, 1884 bp, synthetic construct
  source 1..1884: mol_type = other DNA
atggccttaccagtgaccgccttgctcctgccgctggccttgctgctccacgccgccaggccggacatcgtgatgacacagagccctgatagcctggccgtgtctctgggagagagagccaccattaactgcaaggccagccagagcgtggactacgacggcgacagcttcctgaactggtatcagcagaagcccggccagcctcctaagctgctgatctacgccgccagcaatctggaaagcggcgtgccaagcagattttccggctctggcagcggcaccgatttcaccctgacaatatccagcctccagcctgaggacgtggccgtgtactactgccagcagagcaacgacgaccctctgacctttggacagggcaccaaggtggaaatcaaactcgaggacaagcagctggacgccgacgtgtcccccaagcctaccatcttcctgccctctatcgccgagacaaagctccagaaggccggcacctacctgtgcctgctggaaaagttcttcccagatgtgattaagatccactggcaggaaaagaagtccaacaccatcctgggcagccaggaaggcaacaccatgaagaccaacgacacctacatgaagttcagctggctgaccgtgcccgagaagtccctggacaaagaacacagatgcatcgtgcggcacgaaaacaacaagaacggcgtggaccaggaaatcatcttcccacccatcaagaccgatgtgattacaatggaccccaaggacaactgctccaaggacgccaacgataccctgctgctccagctgaccaacaccagcgccaccatcctgtacgagatcctgctgggcaaggccaccctgtacgccgtgctggtgtctgccctggtgctgatggctatggtcaagcggaaggacagccggggaagggccaagcgatctggatctggagcaacaaacttctcactactcaaacaagcaggtgacgtggaggagaatcccgggcctactagtatggactggatttggcgcatccttttccttgtcggcgctgctaccggcgcgcattccttcgaagtccaacttgtggagtctggagggggcctggtgcagcccggcggctctctcagactgtcttgtgcggcaagcggctacaccttcagctcttactggatagaatgggtgaggcaggcacctggaaagggactggagtggattggagagattctgccaggagggggagatacaaattacaatgaaatcttcaaggggcgggccaccttttcagcggataccagcaagaatacagcttacctgcagatgaatagcctccgggcagaagataccgctgtttattattgcacgagacgggtgccaataagactggactattgggggcaagggactcttgtcaccgtcagttcaacgcgtagccagcctcacaccaagcccagcgtgttcgtgatgaagaacggcaccaacgtggcctgcctcgtgaaagagttctaccccaaggacatcaggatcaacctggtgtccagcaagaagatcaccgagttcgaccccgccatcgtgatctcccccagcggcaagtacaacgccgtgaagctggggaagtacgaggacagcaacagcgtgacctgctccgtgcagcacgacaacaagaccgtgcacagcaccgactttgaagtgaaaaccgactccaccgaccacgtgaagcccaaagagacagagaacaccaagcagcccagcaagagctgccacaagcccaaggccatcgtgcacaccgagaaagtgaacatgatgagcctgaccgtgctgggcttcagaatcctgctgctgaaagtggccggctttaacctgctgatgaccctgcggctgtggtccagctaa

SEQ ID NO: 6218 - DNA, 1866 bp, synthetic construct
  source 1..1866: mol_type = other DNA
atggccttaccagtgaccgccttgctcctgccgctggccttgctgctccacgccgccaggccggacatcgtgatgacacagagccctgatagcctggccgtgtctctgggagagagagccaccattaactgcaaggccagccagagcgtggactacgacggcgacagcttcctgaactggtatcagcagaagcccggccagcctcctaagctgctgatctacgccgccagcaatctggaaagcggcgtgccaagcagattttccggctctggcagcggcaccgatttcaccctgacaatatccagcctccagcctgaggacgtggccgtgtactactgccagcagagcaacgacgaccctctgacctttggacagggcaccaaggtggaaatcaaactcgaggacctgaagaacgtgttcccacctgaggtggccgtgttcgagcctagcgaggccgagatcagccacacccagaaagccaccctcgtgtgcctggctaccggcttctaccccgaccatgtggaactgtcttggtgggtcaacggcaaagaggtgcacagcggcgtgtgtaccgacccccagccactgaaagaacagcccgccctgaacgacagccggtactgcctgagcagcagactgagagtgtccgccaccttctggcagaacccccggaaccacttcagatgccaggtgcagttctacggcctgagcgagaacgacgagtggacccaggacagagccaagcccgtgacccagatcgtgtctgccgaagcctggggcagagccgattgcggctttaccagcgagagctaccagcagggcgtgctgagcgccaccatcctgtacttgttgctgctgctgaagtccgtggtgtacttcgccatcatcacatgctgcctgctgcggagaaccgccttctgctgcaacggcgagaagtctagggccaagcgatctggatctggagcaacaaacttctcactactcaaacaagcaggtgacgtggaggagaatcccgggcctactagtatggactggatttggcgcatccttttccttgtcggcgctgctaccggcgcgcattccttcgaagtccaacttgtggagtctggagggggcctggtgcagcccggcggctctctcagactgtcttgtgcggcaagcggctacaccttcagctcttactggatagaatgggtgaggcaggcacctggaaagggactggagtggattggagagattctgccaggagggggagatacaaattacaatgaaatcttcaaggggcgggccaccttttcagcggataccagcaagaatacagcttacctgcagatgaatagcctccgggcagaagataccgctgtttattattgcacgagacgggtgccaataagactggactattgggggcaagggactcttgtcaccgtcagttcaacgcgtatccagaaccctgatcctgccgtgtaccagctgcgggatagcaagagcagcgacaagagcgtgtgtctgttcaccgacttcgacagccagaccaacgtgtcccagagcaaggactccgacgtgtacatcaccgataagtgcgtgctggacatgcggagcatggacttcaagagcaactccgccgtggcctggtccaacaagtccgatttcgcctgcgccaacgccttcaacaacagcattatccccgaggacacattcttcccaagccccgagagcagctgcgacgtgaagctggtggaaaagagcttcgagacagacaccaacctgaacttccagaacctgagcgtgatcggcctgcggatgctgttcgccaaaaccgtggccgtgaacttcctgctgaccgccaagctgttcttcctctaa

SEQ ID NO: 6219 - DNA, 1953 bp, synthetic construct
  source 1..1953: mol_type = other DNA
atggccttaccagtgaccgccttgctcctgccgctggccttgctgctccacgccgccaggccggacatcgtgatgacacagagccctgatagcctggccgtgtctctgggagagagagccaccattaactgcaaggccagccagagcgtggactacgacggcgacagcttcctgaactggtatcagcagaagcccggccagcctcctaagctgctgatctacgccgccagcaatctggaaagcggcgtgccaagcagattttccggctctggcagcggcaccgatttcaccctgacaatatccagcctccagcctgaggacgtggccgtgtactactgccagcagagcaacgacgaccctctgacctttggacagggcaccaaggtggaaatcaaactcgaggacctgaagaacgtgttcccacctgaggtggccgtgttcgagcctagcgaggccgagatcagccacacccagaaagccaccctcgtgtgcctggctaccggcttctaccccgaccatgtggaactgtcttggtgggtcaacggcaaagaggtgcacagcggcgtgtctaccgacccccagccactgaaagaacagcccgccctgaacgacagccggtactgcctgagcagcagactgagagtgtccgccaccttctggcagaacccccggaaccacttcagatgccaggtgcagttctacggcctgagcgagaacgacgagtggacccaggacagagccaagcccgtgacccagatcgtgtctgccgaagcctggggcagagccgattgcggatcctccaaggacgccaacgataccctgctgctccagctgaccaacaccagcgcctactacatgtacttgttgctgctgctgaagtccgtggtgtacttcgccatcatcacatgctgcctgctgcggagaaccgccttctgctgcaacggcgagaagtctagggccaagcgatctggatctggagcaacaaacttctcactactcaaacaagcaggtgacgtggaggagaatcccgggcctactagtatggactggatttggcgcatccttttccttgtcggcgctgctaccggcgcgcattccttcgaagtccaacttgtggagtctggagggggcctggtgcagcccggcggctctctcagactgtcttgtgcggcaagcggctacaccttcagctcttactggatagaatgggtgaggcaggcacctggaaagggactggagtggattggagagattctgccaggagggggagatacaaattacaatgaaatcttcaaggggcgggccaccttttcagcggataccagcaagaatacagcttacctgcagatgaatagcctccgggcagaagataccgctgtttattattgcacgagacgggtgccaataagactggactattgggggcaagggactcttgtcaccgtcagttcaacgcgtatccagaaccctgatcctgccgtgtaccagctgcgggatagcaagagcagcgacaagagcgtgtgtctgttcaccgacttcgacagccagaccaacgtgtcccagagcaaggactccgacgtgtacatcaccgataagaccgtgctggacatgcggagcatggacttcaagagcaactccgccgtggcctggtccaacaagtccgatttcgcctgcgccaacgccttcaacaacagcattatccccgaggacacattcttcccaagccccgagagcagctgcggtaccgaagtgaaaaccgactccaccgaccacgtgaagcccaaagagacagagaacaccaagcagcccagcaagagctgccacaagcccaaggccatcgtgcacaccgagaaagtgaacatgatgagcctgaccgtgctgggcctgcggatgctgttcgccaaaaccgtggccgtgaacttcctgctgaccgccaagctgttcttcctctaa

SEQ ID NO: 6220 - DNA, 1863 bp, synthetic construct
  source 1..1863: mol_type = other DNA
atggccttaccagtgaccgccttgctcctgccgctggccttgctgctccacgccgccaggccggacatcgtgatgacacagagccctgatagcctggccgtgtctctgggagagagagccaccattaactgcaaggccagccagagcgtggactacgacggcgacagcttcctgaactggtatcagcagaagcccggccagcctcctaagctgctgatctacgccgccagcaatctggaaagcggcgtgccaagcagattttccggctctggcagcggcaccgatttcaccctgacaatatccagcctccagcctgaggacgtggccgtgtactactgccagcagagcaacgacgaccctctgacctttggacagggcaccaaggtggaaatcaaactcgaggacctgaagaacgtgttcccacctgaggtggccgtgttcgagcctagcgaggccgagatcagccacacccagaaagccaccctcgtgtgcctggctaccggcttctaccccgaccatgtggaactgtcttggtgggtcaacggcaaagaggtgcacagcggcgtgtgtaccgacccccagccactgaaagaacagcccgccctgaacgacagccggtactgcctgagcagcagactgagagtgtccgccaccttctggcagaacccccggaaccacttcagatgccaggtgcagttctacggcctgagcgagaacgacgagtggacccaggacagagccaagcccgtgacccagatcgtgtctgccgaagcctggggcagagccgattgcgacgtgaagctggtggaaaagagcttcgagacagacaccaacctgaacttccagaacctgagcgtgatcggcttcagaatcctgctgctgaaagtggccggctttaacctgctgatgaccctgcggctgtggtccagcagggccaagcgatctggatctggagcaacaaacttctcactactcaaacaagcaggtgacgtggaggagaatcccgggcctactagtatggactggatttggcgcatccttttccttgtcggcgctgctaccggcgcgcattccttcgaagtccaacttgtggagtctggagggggcctggtgcagcccggcggctctctcagactgtcttgtgcggcaagcggctacaccttcagctcttactggatagaatgggtgaggcaggcacctggaaagggactggagtggattggagagattctgccaggagggggagatacaaattacaatgaaatcttcaaggggcgggccaccttttcagcggataccagcaagaatacagcttacctgcagatgaatagcctccgggcagaagataccgctgtttattattgcacgagacgggtgccaataagactggactattgggggcaagggactcttgtcaccgtcagttcaacgcgtatccagaaccctgatcctgccgtgtaccagctgcgggatagcaagagcagcgacaagagcgtgtgtctgttcaccgacttcgacagccagaccaacgtgtcccagagcaaggactccgacgtgtacatcaccgataagtgcgtgctggacatgcggagcatggacttcaagagcaactccgccgtggcctggtccaacaagtccgatttcgcctgcgccaacgccttcaacaacagcattatccccgaggacacattcttcccaagccccgagagcagctgcggctttaccagcgagagctaccagcagggcgtgctgagcgccaccatcctgtacgagatcctgctgggcaaggccaccctgtacgccgtgctggtgtctgccctggtgctgatggctatggtcaagcggaaggacagccggggataa

SEQ ID NO: 6221 - DNA, 1863 bp, synthetic construct
  source 1..1863: mol_type = other DNA
atggccttaccagtgaccgccttgctcctgccgctggccttgctgctccacgccgccaggccggacatcgtgatgacacagagccctgatagcctggccgtgtctctgggagagagagccaccattaactgcaaggccagccagagcgtggactacgacggcgacagcttcctgaactggtatcagcagaagcccggccagcctcctaagctgctgatctacgccgccagcaatctggaaagcggcgtgccaagcagattttccggctctggcagcggcaccgatttcaccctgacaatatccagcctccagcctgaggacgtggccgtgtactactgccagcagagcaacgacgaccctctgacctttggacagggcaccaaggtggaaatcaaactcgaggacctgaagaacgtgttcccacctgaggtggccgtgttcgagcctagcgaggccgagatcagccacacccagaaagccaccctcgtgtgcctggctaccggcttctaccccgaccatgtggaactgtcttggtgggtcaacggcaaagaggtgcacagcggcgtgtgtaccgacccccagccactgaaagaacagcccgccctgaacgacagccggtactgcctgagcagcagactgagagtgtccgccaccttctggcagaacccccggaaccacttcagatgccaggtgcagttctacggcctgagcgagaacgacgagtggacccaggacagagccaagcccgtgacccagatcgtgtctgccgaagcctggggcagagccgattgcggctttaccagcgagagctaccagcagggcgtgctgagcgccaccaacctgagcgtgatcggcttcagaatcctgctgctgaaagtggccggctttaacctgctgatgaccctgcggctgtggtccagcagggccaagcgatctggatctggagcaacaaacttctcactactcaaacaagcaggtgacgtggaggagaatcccgggcctactagtatggactggatttggcgcatccttttccttgtcggcgctgctaccggcgcgcattccttcgaagtccaacttgtggagtctggagggggcctggtgcagcccggcggctctctcagactgtcttgtgcggcaagcggctacaccttcagctcttactggatagaatgggtgaggcaggcacctggaaagggactggagtggattggagagattctgccaggagggggagatacaaattacaatgaaatcttcaaggggcgggccaccttttcagcggataccagcaagaatacagcttacctgcagatgaatagcctccgggcagaagataccgctgtttattattgcacgagacgggtgccaataagactggactattgggggcaagggactcttgtcaccgtcagttcaacgcgtatccagaaccctgatcctgccgtgtaccagctgcgggatagcaagagcagcgacaagagcgtgtgtctgttcaccgacttcgacagccagaccaacgtgtcccagagcaaggactccgacgtgtacatcaccgataagtgcgtgctggacatgcggagcatggacttcaagagcaactccgccgtggcctggtccaacaagtccgatttcgcctgcgccaacgccttcaacaacagcattatccccgaggacacattcttcccaagccccgagagcagctgcgacgtgaagctggtggaaaagagcttcgagacagacaccaacctgaacttccagatcctgtacgagatcctgctgggcaaggccaccctgtacgccgtgctggtgtctgccctggtgctgatggctatggtcaagcggaaggacagccggggataa

SEQ ID NO: 6222 - DNA, 1863 bp, synthetic construct; identical to SEQ ID NO: 6220
  source 1..1863: mol_type = other DNA

SEQ ID NO: 6223 - DNA, 1863 bp, synthetic construct; identical to SEQ ID NO: 6221
  source 1..1863: mol_type = other DNA

SEQ ID NO: 6224 - DNA, 1860 bp, synthetic construct
  source 1..1860: mol_type = other DNA
atggccttaccagtgaccgccttgctcctgccgctggccttgctgctccacgccgccaggccggacatcgtgatgacacagagccctgatagcctggccgtgtctctgggagagagagccaccattaactgcaaggccagccagagcgtggactacgacggcgacagcttcctgaactggtatcagcagaagcccggccagcctcctaagctgctgatctacgccgccagcaatctggaaagcggcgtgccaagcagattttccggctctggcagcggcaccgatttcaccctgacaatatccagcctccagcctgaggacgtggccgtgtactactgccagcagagcaacgacgaccctctgacctttggacagggcaccaaggtggaaatcaaactcgaggacctgaagaacgtgttcccacctgaggtggccgtgttcgagcctagcgaggccgagatcagccacacccagaaagccaccctcgtgtgcctggctaccggcttctaccccgaccatgtggaactgtcttggtgggtcaacggcaaagaggtgcacagcggcgtgtgtaccgacccccagccactgaaagaacagcccgccctgaacgacagccggtactgcctgagcagcagactgagagtgtccgccaccttctggcagaacccccggaaccacttcagatgccaggtgcagttctacggcctgagcgagaacgacgagtggacccaggacagagccaagcccgtgacccagatcgtgtctgccgaagcctggggcagagccgattgcgacgtgaagctggtggaaaagagcttcgagacagacaccaacctgaacttccagaacctgagcgtgatcggcttcagaatcctgctgctgaaagtggccggctttaacctgctgatgaccctgcggctgtggtccagcagggccaagcgatctggatctggagcaacaaacttctcactactcaaacaagcaggtgacgtggaggagaatcccgggcctactagtatggactggatttggcgcatccttttccttgtcggcgctgctaccggcgcgcattccttcgaagtccaacttgtggagtctggagggggcctggtgcagcccggcggctctctcagactgtcttgtgcggcaagcggctacaccttcagctcttactggatagaatgggtgaggcaggcacctggaaagggactggagtggattggagagattctgccaggagggggagatacaaattacaatgaaatcttcaaggggcgggccaccttttcagcggataccagcaagaatacagcttacctgcagatgaatagcctccgggcagaagataccgctgtttattattgcacgagacgggtgccaataagactggactattgggggcaagggactcttgtcaccgtcagttcaacgcgtatccagaaccctgatcctgccgtgtaccagctgcgggatagcaagagcagcgacaagagcgtgtgtctgttcaccgacttcgacagccagaccaacgtgtcccagagcaaggactccgacgtgtacatcaccgataagtgcgtgctggacatgcggagcatggacttcaagagcaactccgccgtggcctggtccaacaagtccgatttcgcctgcgccaacgccttcaacaacagcattatccccgaggacacattcttcccaagccccgagagcagctgcggctttaccagcgagagctaccagcagggcgtgctgagcgccaccatcctgtacgagatcctgctgggcaaggccaccctgtacgccgtgctggtgtctgccctggtgctgatggctatggtcaagcggaaggacagccgggga

SEQ ID NO: 6225 - DNA, 1872 bp, synthetic construct
  source 1..1872: mol_type = other DNA
atggccttaccagtgaccgccttgctcctgccgctggccttgctgctccacgccgccaggccggacatcgtgatgacacagagccctgatagcctggccgtgtctctgggagagagagccaccattaactgcaaggccagccagagcgtggactacgacggcgacagcttcctgaactggtatcagcagaagcccggccagcctcctaagctgctgatctacgccgccagcaatctggaaagcggcgtgccaagcagattttccggctctggcagcggcaccgatttcaccctgacaatatccagcctccagcctgaggacgtggccgtgtactactgccagcagagcaacgacgaccctctgacctttggacagggcaccaaggtggaaatcaaactcgaggccgacgtgtcccccaagcctaccatcttcctgccctctatcgccgagacaaagctccagaaggccggcacctacctgtgcctgctggaaaagttcttcccagatgtgattaagatccactggcaggaaaagaagtccaacaccatcctgggcagccaggaaggcaacaccatgaagaccaacgacacctacatgaagttcagctggctgaccgtgcccgagaagtccctggacaaagaacacagatgcatcgtgcggcacgaaaacaacaagaacggcgtggaccaggaaatcatcttcccacccatcaagaccgatgtgattacaatggaccccaaggacaactgctccaaggacgccaacgataccctgctgctccagctgaccaacaccagcgcctactacatgtacttgttgctgctgctgaagtccgtggtgtacttcgccatcatcacatgctgcctgctgcggagaaccgccttctgctgcaacggcgagaagtctagggccaagcgatctggatctggagcaacaaacttctcactactcaaacaagcaggtgacgtggaggagaatcccgggcctactagtatggactggatttggcgcatccttttccttgtcggcgctgctaccggcgcgcattccttcgaagtccaacttgtggagtctggagggggcctggtgcagcccggcggctctctcagactgtcttgtgcggcaagcggctacaccttcagctcttactggatagaatgggtgaggcaggcacctggaaagggactggagtggattggagagattctgccaggagggggagatacaaattacaatgaaatcttcaaggggcgggccaccttttcagcggataccagcaagaatacagcttacctgcagatgaatagcctccgggcagaagataccgctgtttattattgcacgagacgggtgccaataagactggactattgggggcaagggactcttgtcaccgtcagttcaacgcgtagccagcctcacaccaagcccagcgtgttcgtgatgaagaacggcaccaacgtggcctgcctcgtgaaagagttctaccccaaggacatcaggatcaacctggtgtccagcaagaagatcaccgagttcgaccccgccatcgtgatctcccccagcggcaagtacaacgccgtgaagctggggaagtatgaggacagcaacagcgtgacctgctccgtgcagcacgacaacaagaccgtgcacagcaccgactttgaagtgaaaaccgactccaccgaccacgtgaagcccaaagagacagagaacaccaagcagcccagcaagagctgccacaagcccaaggccatcgtgcacaccgagaaagtgaacatgatgagcctgaccgtgatcggcttcagaatcctgctgctgaaagtggccggctttaacctgctgatgaccctgcggctgtggtccagctaa

SEQ ID NO: 6226 - DNA, 1872 bp, synthetic construct
  source 1..1872: mol_type = other DNA
atggccttaccagtgaccgccttgctcctgccgctggccttgctgctccacgccgccaggccggacatcgtgatgacacagagccctgatagcctggccgtgtctctgggagagagagccaccattaactgcaaggccagccagagcgtggactacgacggcgacagcttcctgaactggtatcagcagaagcccggccagcctcctaagctgctgatctacgccgccagcaatctggaaagcggcgtgccaagcagattttccggctctggcagcggcaccgatttcaccctgacaatatccagcctccagcctgaggacgtggccgtgtactactgccagcagagcaacgacgaccctctgacctttggacagggcaccaaggtggaaatcaaactcgaggccgacgtgtcccccaagcctaccatcttcctgccctctatcgccgagacaaagctccagaaggccggcacctacctgtgcctgctggaaaagttcttcccagatgtgattaagatccactggcaggaaaagaagtccaacaccatcctgggcagccaggaaggcaacaccatgaagaccaacgacacctacatgaagttcagctggctgaccgtgcccgagaagtccctggacaaagaacacagatgcatcgtgcggcacgaaaacaacaagaacggcgtggaccaggaaatcatcttcccacccatcaagaccgatgtgattacaatggaccccaaggacaactgctccaaggacgccaacgataccctgctgctccagctgaccaacaccagcgcctactacatgtacttgttgctgctgctgaagtccgtggtgtacttcgccatcatcacatgctgcctgctgcggagaaccgccttctgctgcaacggcgagaagtctagggccaagcgatctggatctggagcaacaaacttctcactactcaaacaagcaggtgacgtggaggagaatcccgggcctactagtatggactggatttggcgcatccttttccttgtcggcgctgctaccggcgcgcattccttcgaagtccaacttgtggagtctggagggggcctggtgcagcccggcggctctctcagactgtcttgtgcggcaagcggctacaccttcagctcttactggatagaatgggtgaggcaggcacctggaaagggactggagtggattggagagattctgccaggagggggagatacaaattacaatgaaatcttcaaggggcgggccaccttttcagcggataccagcaagaatacagcttacctgcagatgaatagcctccgggcagaagataccgctgtttattattgcacgagacgggtgccaataagactggactattgggggcaagggactcttgtcaccgtcagttcaacgcgtagccagcctcacaccaagcccagcgtgttcgtgatgaagaacggcaccaacgtggcctgcctcgtgaaagagttctaccccaaggacatcaggatcaacctggtgtccagcaagaagatcaccgagttcgaccccgccatcgtgatctcccccagcggcaagtacaacgccgtgaagctggggaagtacgaggacagcaacagcgtgacctgctccgtgcagcacgacaacaagaccgtgcacagcaccgactttgaagtgaaaaccgactccaccgaccacgtgaagcccaaagagacagagaacaccaagcagcccagcaagagctgccacaagcccaaggccatcgtgcacaccgagaaagtgaacatgatgagcctgaccgtgctgggcttcagaatcctgctgctgaaagtggccggctttaacctgctgatgaccctgcggctgtggtccagctaa

SEQ ID NO: 6227 - DNA, 1860 bp, synthetic construct; identical to SEQ ID NO: 6224
  source 1..1860: mol_type = other DNA

SEQ ID NO: 6228 - DNA, 1872 bp, synthetic construct
  source 1..1872: mol_type = other DNA
atggccttaccagtgaccgccttgctcctgccgctggccttgctgctccacgccgccaggccggacatcgtgatgacacagagccctgatagcctggccgtgtctctgggagagagagccaccattaactgcaaggccagccagagcgtggactacgacggcgacagcttcctgaactggtatcagcagaagcccggccagcctcctaagctgctgatctacgccgccagcaatctggaaagcggcgtgccaagcagattttccggctctggcagcggcaccgatttcaccctgacaatatccagcctccagcctgaggacgtggccgtgtactactgccagcagagcaacgacgaccctctgacctttggacagggcaccaaggtggaaatcaaactcgagatccagaaccctgatcctgccgtgtaccagctgcgggatagcaagagcagcgacaagagcgtgtgtctgttcaccgacttcgacagccagaccaacgtgtcccagagcaaggactccgacgtgtacatcaccgataagtgcgtgctggacatgcggagcatggacttcaagagcaactccgccgtggcctggtccaacaagtccgatttcgcctgcgccaacgccttcaacaacagcattatccccgaggacacattcttcccaagccccgagagcagctgcggctttaccagcgagagctaccagcagggcgtgctgagcgccaccatcctgtacgagatcctgctgggcaaggccaccctgtacgccgtgctggtgtctgccctggtgctgatggctatggtcaagcggaaggacagccggggacgcgccaagagaagcggatctggcgtgaagcagaccctgaatttcgacctgctgaagctggctggcgacgtggaatccaacccaggccctactagtatggactggatttggcgcatccttttccttgtcggcgctgctaccggcgcgcattccttcgaagtccaacttgtggagtctggagggggcctggtgcagcccggcggctctctcagactgtcttgtgcggcaagcggctacaccttcagctcttactggatagaatgggtgaggcaggcacctggaaagggactggagtggattggagagattctgccaggagggggagatacaaattacaatgaaatcttcaaggggcgggccaccttttcagcggataccagcaagaatacagcttacctgcagatgaatagcctccgggcagaagataccgctgtttattattgcacgagacgggtgccaataagactggactattgggggcaagggactcttgtcaccgtcagttcaacgcgtgaggacctgaagaacgtgttcccacctgaggtggccgtgttcgagcctagcgaggccgagatcagccacacccagaaagccaccctcgtgtgcctggctaccggcttctaccccgaccatgtggaactgtcttggtgggtcaacggcaaagaggtgcacagcggcgtgtgtaccgacccccagccactgaaagaacagcccgccctgaacgacagccggtactgcctgagcagcagactgagagtgtccgccaccttctggcagaacccccggaaccacttcagatgccaggtgcagttctacggcctgagcgagaacgacgagtggacccaggacagagccaagcccgtgacccagatcgtgtctgccgaagcctggggcagagccgattgcgacgtgaagctggtggaaaagagcttcgagacagacaccaacctgaacttccagaacctgagcgtgatcggcttcagaatcctgctgctgaaagtggccggctttaacctgctgatgaccctgcggctgtggtccagc

SEQ ID NO: 6229 - DNA, 2265 bp, synthetic construct
  source 1..2265: mol_type = other DNA
atggccttaccagtgaccgccttgctcctgccgctggccttgctgctccacgccgccaggccggaagtgcagctggttgaatctggcggaggactggttcagcctggcggatctctgagactgtcttgtgccgccagcggcttcagcttcagcgacttttggatgagctgggtccgacaggcccctggcaaaggacttgaatgggtcgccacaatcagccaggccggcagcgagaaggactacgtggactctgtgaagggcagattcaccatcagccgggacaacgccaagaagtccctgtacctccagatgaacagcctgagagccgaggacaccgccgtgtactattgtgcctctggcgtgtacagcttcgactacagaggccagggcaccctggtcacagtctcttctggtaccggcggaggcggatctggcggcggaggtagcggtggcggaggatctgaattcgacatcgtgatgacacagagccctgatagcctggccgtgtctctgggagagagagccaccattaactgcaaggccagccagagcgtggactacgacggcgacagcttcctgaactggtatcagcagaagcccggccagcctcctaagctgctgatctacgccgccagcaatctggaaagcggcgtgccaagcagattttccggctctggcagcggcaccgatttcaccctgacaatatccagcctccagcctgaggacgtggccgtgtactactgccagcagagcaacgacgaccctctgacctttggacagggcaccaaggtggaaatcaaactcgaggacctgaagaacgtgttcccacctgaggtggccgtgttcgagcctagcgaggccgagatcagccacacccagaaagccaccctcgtgtgcctggctaccggcttctaccccgaccatgtggaactgtcttggtgggtcaacggcaaagaggtgcacagcggcgtgtgtaccgacccccagccactgaaagaacagcccgccctgaacgacagccggtactgcctgagcagcagactgagagtgtccgccaccttctggcagaacccccggaaccacttcagatgccaggtgcagttctacggcctgagcgagaacgacgagtggacccaggacagagccaagcccgtgacccagatcgtgtctgccgaagcctggggcagagccgattgcgacgtgaagctggtggaaaagagcttcgagacagacaccaacctgaacttccagaacctgagcgtgatcggcttcagaatcctgctgctgaaagtggccggctttaacctgctgatgaccctgcggctgtggtccagcagggccaagcgatctggatctggagcaacaaacttctcactactcaaacaagcaggtgacgtggaggagaatcccgggcctactagtatggactggatttggcgcatccttttccttgtcggcgctgctaccggcgcgcattccttcgaagtccaacttgtggagtctggagggggcctggtgcagcccggcggctctctcagactgtcttgtgcggcaagcggctacaccttcagctcttactggatagaatgggtgaggcaggcacctggaaagggactggagtggattggagagattctgccaggagggggagatacaaattacaatgaaatcttcaaggggcgggccaccttttcagcggataccagcaagaatacagcttacctgcagatgaatagcctccgggcagaagataccgctgtttattattgcacgagacgggtgccaataagactggactattgggggcaagggactcttgtcaccgtcagttcaacgcgtatccagaaccctgatcctgccgtgtaccagctgcgggatagcaagagcagcgacaagagcgtgtgtctgttcaccgacttcgacagccagaccaacgtgtcccagagcaaggactccgacgtgtacatcaccgataagtgcgtgctggacatgcggagcatggacttcaagagcaactccgccgtggcctggtccaacaagtccgatttcgcctgcgccaacgccttcaacaacagcattatccccgaggacacattcttcccaagccccgagagcagctgcggctttaccagcgagagctaccagcagggcgtgctgagcgccaccatcctgtacgagatcctgctgggcaaggccaccctgtacgccgtgctggtgtctgccctggtgctgatggctatggtcaagcggaaggacagccgggga

SEQ ID NO: 6230 - DNA, 2277 bp, synthetic construct
  source 1..2277: mol_type = other DNA
atggccttaccagtgaccgccttgctcctgccgctggccttgctgctccacgccgccaggccggaagtgcagctggttgaatctggcggaggactggttcagcctggcggatctctgagactgtcttgtgccgccagcggcttcagcttcagcgacttttggatgagctgggtccgacaggcccctggcaaaggacttgaatgggtcgccacaatcagccaggccggcagcgagaaggactacgtggactctgtgaagggcagattcaccatcagccgggacaacgccaagaagtccctgtacctccagatgaacagcctgagagccgaggacaccgccgtgtactattgtgcctctggcgtgtacagcttcgactacagaggccagggcaccctggtcacagtctcttctggtaccggcggaggcggatctggcggcggaggtagcggtggcggaggatctgaattcgacatcgtgatgacacagagccctgatagcctggccgtgtctctgggagagagagccaccattaactgcaaggccagccagagcgtggactacgacggcgacagcttcctgaactggtatcagcagaagcccggccagcctcctaagctgctgatctacgccgccagcaatctggaaagcggcgtgccaagcagattttccggctctggcagcggcaccgatttcaccctgacaatatccagcctccagcctgaggacgtggccgtgtactactgccagcagagcaacgacgaccctctgacctttggacagggcaccaaggtggaaatcaaactcgagatccagaaccctgatcctgccgtgtaccagctgcgggatagcaagagcagcgacaagagcgtgtgtctgttcaccgacttcgacagccagaccaacgtgtcccagagcaaggactccgacgtgtacatcaccgataagtgcgtgctggacatgcggagcatggacttcaagagcaactccgccgtggcctggtccaacaagtccgatttcgcctgcgccaacgccttcaacaacagcattatccccgaggacacattcttcccaagccccgagagcagctgcggctttaccagcgagagctaccagcagggcgtgctgagcgccaccatcctgtacgagatcctgctgggcaaggccaccctgtacgccgtgctggtgtctgccctggtgctgatggctatggtcaagcggaaggacagccggggacgcgccaagagaagcggatctggcgtgaagcagaccctgaatttcgacctgctgaagctggctggcgacgtggaatccaacccaggccctactagtatggactggatttggcgcatccttttccttgtcggcgctgctaccggcgcgcattccttcgaagtccaacttgtggagtctggagggggcctggtgcagcccggcggctctctcagactgtcttgtgcggcaagcggctacaccttcagctcttactggatagaatgggtgaggcaggcacctggaaagggactggagtggattggagagattctgccaggagggggagatacaaattacaatgaaatcttcaaggggcgggccaccttttcagcggataccagcaagaatacagcttacctgcagatgaatagcctccgggcagaagataccgctgtttattattgcacgagacgggtgccaataagactggactattgggggcaagggactcttgtcaccgtcagttcaacgcgtgaggacctgaagaacgtgttcccacctgaggtggccgtgttcgagcctagcgaggccgagatcagccacacccagaaagccaccctcgtgtgcctggctaccggcttctaccccgaccatgtggaactgtcttggtgggtcaacggcaaagaggtgcacagcggcgtgtgtaccgacccccagccactgaaagaacagcccgccctgaacgacagccggtactgcctgagcagcagactgagagtgtccgccaccttctggcagaacccccggaaccacttcagatgccaggtgcagttctacggcctgagcgagaacgacgagtggacccaggacagagccaagcccgtgacccagatcgtgtctgccgaagcctggggcagagccgattgcgacgtgaagctggtggaaaagagcttcgagacagacaccaacctgaacttccagaacctgagcgtgatcggcttcagaatcctgctgctgaaagtggccggctttaacctgctgatgaccctgcggctgtggtccagc

SEQ ID NO: 6231 - DNA, 2676 bp, synthetic construct
  source 1..2676: mol_type = other DNA
atggccttaccagtgaccgccttgctcctgccgctggccttgctgctccacgccgccaggccggaagtgcagctggttgaatctggcggaggactggttcagcctggcggatctctgagactgtcttgtgccgccagcggcttcagcttcagcgacttttggatgagctgggtccgacaggcccctggcaaaggacttgaatgggtcgccacaatcagccaggccggcagcgagaaggactacgtggactctgtgaagggcagattcaccatcagccgggacaacgccaagaagtccctgtacctccagatgaacagcctgagagccgaggacaccgccgtgtactattgtgcctctggcgtgtacagcttcgactacagaggccagggcaccctggtcacagtctcttctggtaccggcggaggcggatctggcggcggaggtagcggtggcggaggatctgaattcgacatcgtgatgacacagagccctgatagcctggccgtgtctctgggagagagagccaccattaactgcaaggccagccagagcgtggactacgacggcgacagcttcctgaactggtatcagcagaagcccggccagcctcctaagctgctgatctacgccgccagcaatctggaaagcggcgtgccaagcagattttccggctctggcagcggcaccgatttcaccctgacaatatccagcctccagcctgaggacgtggccgtgtactactgccagcagagcaacgacgaccctctgacctttggacagggcaccaaggtggaaatcaaactcgaggacctgaagaacgtgttcccacctgaggtggccgtgttcgagcctagcgaggccgagatcagccacacccagaaagccaccctcgtgtgcctggctaccggcttctaccccgaccatgtggaactgtcttggtgggtcaacggcaaagaggtgcacagcggcgtgtgtaccgacccccagccactgaaagaacagcccgccctgaacgacagccggtactgcctgagcagcagactgagagtgtccgccaccttctggcagaacccccggaaccacttcagatgccaggtgcagttctacggcctgagcgagaacgacgagtggacccaggacagagccaagcccgtgacccagatcgtgtctgccgaagcctggggcagagccgattgcgacgtgaagctggtggaaaagagcttcgagacagacaccaacctgaacttccagaacctgagcgtgatcggcttcagaatcctgctgctgaaagtggccggctttaacctgctgatgaccctgcggctgtggtccagcagggccaagcgatctggatctggagcaacaaacttctcactactcaaacaagcaggtgacgtggaggagaatcccgggcctactagtatggactggatttggcgcatccttttccttgtcggcgctgctaccggcgcgcattccgggccccagctccagctgcaagagtctggacctggcctggtcaagcctagcgagacactgagcctgacctgtaccgtgtccggcgatagcatcagcagcggcgattactactggggctggatcagacagcctcctggcaaaggactggaatggatcggccacatctactacagcggcgtgacctactacaaccccagcctgaagtccagagtgaccatcagcgtggacaccagccggaaccagttctccctgaagctgtctagcgtgacagccgccgataccgccgtgtactactgcaccagagaggacagcagcaactggcggagtagaggccagggaacactggtcacagttagctctggatccggcggaggcggaagtggaggcggaggatctggcggcggaggctctttcgaagtccaacttgtggagtctggagggggcctggtgcagcccggcggctctctcagactgtcttgtgcggcaagcggctacaccttcagctcttactggatagaatgggtgaggcaggcacctggaaagggactggagtggattggagagattctgccaggagggggagatacaaattacaatgaaatcttcaaggggcgggccaccttttcagcggataccagcaagaatacagcttacctgcagatgaatagcctccgggcagaagataccgctgtttattattgcacgagacgggtgccaataagactggactattgggggcaagggactcttgtcaccgtcagttcaacgcgtatccagaaccctgatcctgccgtgtaccagctgcgggatagcaagagcagcgacaagagcgtgtgtctgttcaccgacttcgacagccagaccaacgtgtcccagagcaaggactccgacgtgtacatcaccgataagtgcgtgctggacatgcggagcatggacttcaagagcaactccgccgtggcctggtccaacaagtccgatttcgcctgcgccaacgccttcaacaacagcattatccccgaggacacattcttcccaagccccgagagcagctgcggctttaccagcgagagctaccagcagggcgtgctgagcgccaccatcctgtacgagatcctgctgggcaaggccaccctgtacgccgtgctggtgtctgccctggtgctgatggctatggtcaagcggaaggacagccgggga

SEQ ID NO: 6232 - DNA, 2688 bp, synthetic construct
  source 1..2688: mol_type = other DNA
atggccttaccagtgaccgccttgctcctgccgctggccttgctgctccacgccgccaggccggaagtgcagctggttgaatctggcggaggactggttcagcctggcggatctctgagactgtcttgtgccgccagcggcttcagcttcagcgacttttggatgagctgggtccgacaggcccctggcaaaggacttgaatgggtcgccacaatcagccaggccggcagcgagaaggactacgtggactctgtgaagggcagattcaccatcagccgggacaacgccaagaagtccctgtacctccagatgaacagcctgagagccgaggacaccgccgtgtactattgtgcctctggcgtgtacagcttcgactacagaggccagggcaccctggtcacagtctcttctggtaccggcggaggcggatctggcggcggaggtagcggtggcggaggatctgaattcgacatcgtgatgacacagagccctgatagcctggccgtgtctctgggagagagagccaccattaactgcaaggccagccagagcgtggactacgacggcgacagcttcctgaactggtatcagcagaagcccggccagcctcctaagctgctgatctacgccgccagcaatctggaaagcggcgtgccaagcagattttccggctctggcagcggcaccgatttcaccctgacaatatccagcctccagcctgaggacgtggccgtgtactactgccagcagagcaacgacgaccctctgacctttggacagggcaccaaggtggaaatcaaactcgagatccagaaccctgatcctgccgtgtaccagctgcgggatagcaagagcagcgacaagagcgtgtgtctgttcaccgacttcgacagccagaccaacgtgtcccagagcaaggactccgacgtgtacatcaccgataagtgcgtgctggacatgcggagcatggacttcaagagcaactccgccgtggcctggtccaacaagtccgatttcgcctgcgccaacgccttcaacaacagcattatccccgaggacacattcttcccaagccccgagagcagctgcggctttaccagcgagagctaccagcagggcgtgctgagcgccaccatcctgtacgagatcctgctgggcaaggccaccctgtacgccgtgctggtgtctgccctggtgctgatggctatggtcaagcggaaggacagccggggacgcgccaagagaagcggatctggcgtgaagcagaccctgaatttcgacctgctgaagctggctggcgacgtggaatccaacccaggccctactagtatggactggatttggcgcatccttttccttgtcggcgctgctaccggcgcgcattccgggccccagctccagctgcaagagtctggacctggcctggtcaagcctagcgagacactgagcctgacctgtaccgtgtccggcgatagcatcagcagcggcgattactactggggctggatcagacagcctcctggcaaaggactggaatggatcggccacatctactacagcggcgtgacctactacaaccccagcctgaagtccagagtgaccatcagcgtggacaccagccggaaccagttctccctgaagctgtctagcgtgacagccgccgataccgccgtgtactactgcaccagagaggacagcagcaactggcggagtagaggccagggaacactggtcacagttagctctggatccggcggaggcggaagtggaggcggaggatctggcggcggaggctctttcgaagtccaacttgtggagtctggagggggcctggtgcagcccggcggctctctcagactgtcttgtgcggcaagcggctacaccttcagctcttactggatagaatgggtgaggcaggcacctggaaagggactggagtggattggagagattctgccaggagggggagatacaaattacaatgaaatcttcaaggggcgggccaccttttcagcggataccagcaagaatacagcttacctgcagatgaatagcctccgggcagaagataccgctgtttattattgcacgagacgggtgccaataagactggactattgggggcaagggactcttgtcaccgtcagttcaacgcgtgaggacctgaagaacgtgttcccacctgaggtggccgtgttcgagcctagcgaggccgagatcagccacacccagaaagccaccctcgtgtgcctggctaccggcttctaccccgaccatgtggaactgtcttggtgggtcaacggcaaagaggtgcacagcggcgtgtgtaccgacccccagccactgaaagaacagcccgccctgaacgacagccggtactgcctgagcagcagactgagagtgtccgccaccttctggcagaacccccggaaccacttcagatgccaggtgcagttctacggcctgagcgagaacgacgagtggacccaggacagagccaagcccgtgacccagatcgtgtctgccgaagcctggggcagagccgattgcgacgtgaagctggtggaaaagagcttcgagacagacaccaacctgaacttccagaacctgagcgtgatcggcttcagaatcctgctgctgaaagtggccggctttaacctgctgatgaccctgcggctgtggtccagc

SEQ ID NO: 6233 - DNA, 2070 bp, synthetic construct
  source 1..2070: mol_type = other DNA
atggccttaccagtgaccgccttgctcctgccgctggccttgctgctccacgccgccaggccggacatcgtgatgacacagagccctgatagcctggccgtgtctctgggagagagagccaccattaactgcaaggccagccagagcgtggactacgacggcgacagcttcctgaactggtatcagcagaagcccggccagcctcctaagctgctgatctacgccgccagcaatctggaaagcggcgtgccaagcagattttccggctctggcagcggcaccgatttcaccctgacaatatccagcctccagcctgaggacgtggccgtgtactactgccagcagagcaacgacgaccctctgacctttggacagggcaccaaggtggaaatcaaactcgaggacctgaagaacgtgttcccacctgaggtggccgtgttcgagcctagcgaggccgagatcagccacacccagaaagccaccctcgtgtgcctggctaccggcttctaccccgaccatgtggaactgtcttggtgggtcaacggcaaagaggtgcacagcggcgtgtgtaccgacccccagccactgaaagaacagcccgccctgaacgacagccggtactgcctgagcagcagactgagagtgtccgccaccttctggcagaacccccggaaccacttcagatgccaggtgcagttctacggcctgagcgagaacgacgagtggacccaggacagagccaagcccgtgacccagatcgtgtctgccgaagcctggggcagagccgattgcgacgtgaagctggtggaaaagagcttcgagacagacaccaacctgaacttccagaacctgagcgtgatcggcttcagaatcctgctgctgaaagtggccggctttaacctgctgatgaccctgcggctgtggtccagcagggccaagcgatctggatctggagcaacaaacttctcactactcaaacaagcaggtgacgtggaggagaatcccgggcctactagtatggactggatttggcgcatccttttccttgtcggcgctgctaccggcgcccattccgggcccatggaccccgacctggaaatcagagccgccttcctgcggcagagaaacacagccctgagaacagaggtggccgagctggaacaagaggtgcagcggctggaaaacgaggtgtcccagtacgagacaagatacggccctctcggaggcggaaaaggatccggcggcggaggatctggcggaggcggatctgggggcggaggctctttcgaagtccaacttgtggagtctggagggggcctggtgcagcccggcggctctctcagactgtcttgtgcggcaagcggctacaccttcagctcttactggatagaatgggtgaggcaggcacctggaaagggactggagtggattggagagattctgccaggagggggagatacaaattacaatgaaatcttcaaggggcgggccaccttttcagcggataccagcaagaatacagcttacctgcagatgaatagcctccgggcagaagataccgctgtttattattgcacgagacgggtgccaataagactggactattgggggcaagggactcttgtcaccgtcagttcaacgcgtatccagaaccctgatcctgccgtgtaccagctgcgggatagcaagagcagcgacaagagcgtgtgtctgttcaccgacttcgacagccagaccaacgtgtcccagagcaaggactccgacgtgtacatcaccgataagtgcgtgctggacatgcggagcatggacttcaagagcaactccgccgtggcctggtccaacaagtccgatttcgcctgcgccaacgccttcaacaacagcattatccccgaggacacattcttcccaagccccgagagcagctgcggctttaccagcgagagctaccagcagggcgtgctgagcgccaccatcctgtacgagatcctgctgggcaaggccaccctgtacgccgtgctggtgtctgccctggtgctgatggctatggtcaagcggaaggacagccgggga

SEQ ID NO: 6234 - DNA, 2082 bp, synthetic construct
  source 1..2082: mol_type = other DNA
atggccttaccagtgaccgccttgctcctgccgctggccttgctgctccacgccgccaggccggacatcgtgatgacacagagccctgatagcctggccgtgtctctgggagagagagccaccattaactgcaaggccagccagagcgtggactacgacggcgacagcttcctgaactggtatcagcagaagcccggccagcctcctaagctgctgatctacgccgccagcaatctggaaagcggcgtgccaagcagattttccggctctggcagcggcaccgatttcaccctgacaatatccagcctccagcctgaggacgtggccgtgtactactgccagcagagcaacgacgaccctctgacctttggacagggcaccaaggtggaaatcaaactcgagatccagaaccctgatcctgccgtgtaccagctgcgggatagcaagagcagcgacaagagcgtgtgtctgttcaccgacttcgacagccagaccaacgtgtcccagagcaaggactccgacgtgtacatcaccgataagtgcgtgctggacatgcggagcatggacttcaagagcaactccgccgtggcctggtccaacaagtccgatttcgcctgcgccaacgccttcaacaacagcattatccccgaggacacattcttcccaagccccgagagcagctgcggctttaccagcgagagctaccagcagggcgtgctgagcgccaccatcctgtacgagatcctgctgggcaaggccaccctgtacgccgtgctggtgtctgccctggtgctgatggctatggtcaagcggaaggacagccggggacgcgccaagagaagcggatctggcgtgaagcagaccctgaatttcgacctgctgaagctggctggcgacgtggaatccaacccaggccctactagtatggactggatttggcgcatccttttccttgtcggcgctgctaccggcgcccattccgggcccatggaccccgacctggaaatcagagccgccttcctgcggcagagaaacacagccctgagaacagaggtggccgagctggaacaagaggtgcagcggctggaaaacgaggtgtcccagtacgagacaagatacggccctctcggaggcggaaaaggatccggcggcggaggatctggcggaggcggatctgggggcggaggctctttcgaagtccaacttgtggagtctggagggggcctggtgcagcccggcggctctctcagactgtcttgtgcggcaagcggctacaccttcagctcttactggatagaatgggtgaggcaggcacctggaaagggactggagtggattggagagattctgccaggagggggagatacaaattacaatgaaatcttcaaggggcgggccaccttttcagcggataccagcaagaatacagcttacctgcagatgaatagcctccgggcagaagataccgctgtttattattgcacgagacgggtgccaataagactggactattgggggcaagggactcttgtcaccgtcagttcaacgcgtgaggacctgaagaacgtgttcccacctgaggtggccgtgttcgagcctagcgaggccgagatcagccacacccagaaagccaccctcgtgtgcctggctaccggcttctaccccgaccatgtggaactgtcttggtgggtcaacggcaaagaggtgcacagcggcgtgtgtaccgacccccagccactgaaagaacagcccgccctgaacgacagccggtactgcctgagcagcagactgagagtgtccgccaccttctggcagaacccccggaaccacttcagatgccaggtgcagttctacggcctgagcgagaacgacgagtggacccaggacagagccaagcccgtgacccagatcgtgtctgccgaagcctggggcagagccgattgcgacgtgaagctggtggaaaagagcttcgagacagacaccaacctgaacttccagaacctgagcgtgatcggcttcagaatcctgctgctgaaagtggccggctttaacctgctgatgaccctgcggctgtggtccagc

SEQ ID NO: 6235 - DNA, 2001 bp, synthetic construct
  source 1..2001: mol_type = other DNA
atggccttaccagtgaccgccttgctcctgccgctggccttgctgctccacgccgccaggccggacatcgtgatgacacagagccctgatagcctggccgtgtctctgggagagagagccaccattaactgcaaggccagccagagcgtggactacgacggcgacagcttcctgaactggtatcagcagaagcccggccagcctcctaagctgctgatctacgccgccagcaatctggaaagcggcgtgccaagcagattttccggctctggcagcggcaccgatttcaccctgacaatatccagcctccagcctgaggacgtggccgtgtactactgccagcagagcaacgacgaccctctgacctttggacagggcaccaaggtggaaatcaaactcgaggacctgaagaacgtgttcccacctgaggtggccgtgttcgagcctagcgaggccgagatcagccacacccagaaagccaccctcgtgtgcctggctaccggcttctaccccgaccatgtggaactgtcttggtgggtcaacggcaaagaggtgcacagcggcgtgtgtaccgacccccagccactgaaagaacagcccgccctgaacgacagccggtactgcctgagcagcagactgagagtgtccgccaccttctggcagaacccccggaaccacttcagatgccaggtgcagttctacggcctgagcgagaacgacgagtggacccaggacagagccaagcccgtgacccagatcgtgtctgccgaagcctggggcagagccgattgcgacgtgaagctggtggaaaagagcttcgagacagacaccaacctgaacttccagaacctgagcgtgatcggcttcagaatcctgctgctgaaagtggccggctttaacctgctgatgaccctgcggctgtggtccagcagggccaagcgatctggatctggagcaacaaacttctcactactcaaacaagcaggtgacgtggaggagaatcccgggcctactagtatggactggatttggcgcatccttttccttgtcggcgctgctaccggcgcccattccgggcccgaagttgctgccctcgagaaggaggtagcagctttggaaaaagaagtcgcagcccttgagaaagaagttgcggctctggagaagggatccggcggcggaggatctggcggaggcggatctgggggcggaggctctttcgaagtccaacttgtggagtctggagggggcctggtgcagcccggcggctctctcagactgtcttgtgcggcaagcggctacaccttcagctcttactggatagaatgggtgaggcaggcacctggaaagggactggagtggattggagagattctgccaggagggggagatacaaattacaatgaaatcttcaaggggcgggccaccttttcagcggataccagcaagaatacagcttacctgcagatgaatagcctccgggcagaagataccgctgtttattattgcacgagacgggtgccaataagactggactattgggggcaagggactcttgtcaccgtcagttcaacgcgtatccagaaccctgatcctgccgtgtaccagctgcgggatagcaagagcagcgacaagagcgtgtgtctgttcaccgacttcgacagccagaccaacgtgtcccagagcaaggactccgacgtgtacatcaccgataagtgcgtgctggacatgcggagcatggacttcaagagcaactccgccgtggcctggtccaacaagtccgatttcgcctgcgccaacgccttcaacaacagcattatccccgaggacacattcttcccaagccccgagagcagctgcggctttaccagcgagagctaccagcagggcgtgctgagcgccaccatcctgtacgagatcctgctgggcaaggccaccctgtacgccgtgctggtgtctgccctggtgctgatggctatggtcaagcggaaggacagccgggga

SEQ ID NO: 6236 - DNA, 2013 bp, synthetic construct
  source 1..2013: mol_type = other DNA
atggccttaccagtgaccgccttgctcctgccgctggccttgctgctccacgccgccaggccggacatcgtgatgacacagagccctgatagcctggccgtgtctctgggagagagagccaccattaactgcaaggccagccagagcgtggactacgacggcgacagcttcctgaactggtatcagcagaagcccggccagcctcctaagctgctgatctacgccgccagcaatctggaaagcggcgtgccaagcagattttccggctctggcagcggcaccgatttcaccctgacaatatccagcctccagcctgaggacgtggccgtgtactactgccagcagagcaacgacgaccctctgacctttggacagggcaccaaggtggaaatcaaactcgagatccagaaccctgatcctgccgtgtaccagctgcgggatagcaagagcagcgacaagagcgtgtgtctgttcaccgacttcgacagccagaccaacgtgtcccagagcaaggactccgacgtgtacatcaccgataagtgcgtgctggacatgcggagcatggacttcaagagcaactccgccgtggcctggtccaacaagtccgatttcgcctgcgccaacgccttcaacaacagcattatccccgaggacacattcttcccaagccccgagagcagctgcggctttaccagcgagagctaccagcagggcgtgctgagcgccaccatcctgtacgagatcctgctgggcaaggccaccctgtacgccgtgctggtgtctgccctggtgctgatggctatggtcaagcggaaggacagccggggacgcgccaagagaagcggatctggcgtgaagcagaccctgaatttcgacctgctgaagctggctggcgacgtggaatccaacccaggccctactagtatggactggatttggcgcatccttttccttgtcggcgctgctaccggcgcccattccgggcccgaagttgctgccctcgagaaggaggtagcagctttggaaaaagaagtcgcagcccttgagaaagaagttgcggctctggagaagggatccggcggcggaggatctggcggaggcggatctgggggcggaggctctttcgaagtccaacttgtggagtctggagggggcctggtgcagcccggcggctctctcagactgtcttgtgcggcaagcggctacaccttcagctcttactggatagaatgggtgaggcaggcacctggaaagggactggagtggattggagagattctgccaggagggggagatacaaattacaatgaaatcttcaaggggcgggccaccttttcagcggataccagcaagaatacagcttacctgcagatgaatagcctccgggcagaagataccgctgtttattattgcacgagacgggtgccaataagactggactattgggggcaagggactcttgtcaccgtcagttcaacgcgtgaggacctgaagaacgtgttcccacctgaggtggccgtgttcgagcctagcgaggccgagatcagccacacccagaaagccaccctcgtgtgcctggctaccggcttctaccccgaccatgtggaactgtcttggtgggtcaacggcaaagaggtgcacagcggcgtgtgtaccgacccccagccactgaaagaacagcccgccctgaacgacagccggtactgcctgagcagcagactgagagtgtccgccaccttctggcagaacccccggaaccacttcagatgccaggtgcagttctacggcctgagcgagaacgacgagtggacccaggacagagccaagcccgtgacccagatcgtgtctgccgaagcctggggcagagccgattgcgacgtgaagctggtggaaaagagcttcgagacagacaccaacctgaacttccagaacctgagcgtgatcggcttcagaatcctgctgctgaaagtggccggctttaacctgctgatgaccctgcggctgtggtccagc

SEQ ID NO: 6237 - DNA, 2271 bp, synthetic construct
  source 1..2271: mol_type = other DNA
atggccttaccagtgaccgccttgctcctgccgctggccttgctgctccacgccgccaggccggacatcgtgatgacacagagccctgatagcctggccgtgtctctgggagagagagccaccattaactgcaaggccagccagagcgtggactacgacggcgacagcttcctgaactggtatcagcagaagcccggccagcctcctaagctgctgatctacgccgccagcaatctggaaagcggcgtgccaagcagattttccggctctggcagcggcaccgatttcaccctgacaatatccagcctccagcctgaggacgtggccgtgtactactgccagcagagcaacgacgaccctctgacctttggacagggcaccaaggtggaaatcaaactcgaggacctgaagaacgtgttcccacctgaggtggccgtgttcgagcctagcgaggccgagatcagccacacccagaaagccaccctcgtgtgcctggctaccggcttctaccccgaccatgtggaactgtcttggtgggtcaacggcaaagaggtgcacagcggcgtgtgtaccgacccccagccactgaaagaacagcccgccctgaacgacagccggtactgcctgagcagcagactgagagtgtccgccaccttctggcagaacccccggaaccacttcagatgccaggtgcagttctacggcctgagcgagaacgacgagtggacccaggacagagccaagcccgtgacccagatcgtgtctgccgaagcctggggcagagccgattgcgacgtgaagctggtggaaaagagcttcgagacagacaccaacctgaacttccagaacctgagcgtgatcggcttcagaatcctgctgctgaaagtggccggctttaacctgctgatgaccctgcggctgtggtccagcagggccaagcgatctggatctggagcaacaaacttctcactactcaaacaagcaggtgacgtggaggagaatcccgggcctactagtatggactggatttggcgcatccttttccttgtcggcgctgctaccggcgcccattccgggccccaggttcagctgcaagagtctggcggaggacttgctcaagctggcggaagcctgagactgtcttgtgccgcctctggcagaaccttcagcatgggctggtttagacaggcccctggcaaagagagagagttcgtcgccgccatcacatacagcggcggcagcccttactacgcctcttctgtcagaggccggttcaccatcagccgggacaacgccaagaacaccgtgtacctccagatgaacagcctgaagccagaggacaccgccgtgtactactgtgccgccaatccaacctacggcagcgactggaatgccgagaattggggccagggcacccaagtgacagtgtctagtggatccggcggcggaggatctggcggaggcggatctgggggcggaggctctttcgaagtccaacttgtggagtctggagggggcctggtgcagcccggcggctctctcagactgtcttgtgcggcaagcggctacaccttcagctcttactggatagaatgggtgaggcaggcacctggaaagggactggagtggattggagagattctgccaggagggggagatacaaattacaatgaaatcttcaaggggcgggccaccttttcagcggataccagcaagaatacagcttacctgcagatgaatagcctccgggcagaagataccgctgtttattattgcacgagacgggtgccaataagactggactattgggggcaagggactcttgtcaccgtcagttcaacgcgtatccagaaccctgatcctgccgtgtaccagctgcgggatagcaagagcagcgacaagagcgtgtgtctgttcaccgacttcgacagccagaccaacgtgtcccagagcaaggactccgacgtgtacatcaccgataagtgcgtgctggacatgcggagcatggacttcaagagcaactccgccgtggcctggtccaacaagtccgatttcgcctgcgccaacgccttcaacaacagcattatccccgaggacacattcttcccaagccccgagagcagctgcggctttaccagcgagagctaccagcagggcgtgctgagcgccaccatcctgtacgagatcctgctgggcaaggccaccctgtacgccgtgctggtgtctgccctggtgctgatggctatggtcaagcggaaggacagccgggga

SEQ ID NO: 6238 - DNA, 2283 bp, synthetic construct
  source 1..2283: mol_type = other DNA
atggccttaccagtgaccgccttgctcctgccgctggccttgctgctccacgccgccaggccggacatcgtgatgacacagagccctgatagcctggccgtgtctctgggagagagagccaccattaactgcaaggccagccagagcgtggactacgacggcgacagcttcctgaactggtatcagcagaagcccggccagcctcctaagctgctgatctacgccgccagcaatctggaaagcggcgtgccaagcagattttccggctctggcagcggcaccgatttcaccctgacaatatccagcctccagcctgaggacgtggccgtgtactactgccagcagagcaacgacgaccctctgacctttggacagggcaccaaggtggaaatcaaactcgagatccagaaccctgatcctgccgtgtaccagctgcgggatagcaagagcagcgacaagagcgtgtgtctgttcaccgacttcgacagccagaccaacgtgtcccagagcaaggactccgacgtgtacatcaccgataagtgcgtgctggacatgcggagcatggacttcaagagcaactccgccgtggcctggtccaacaagtccgatttcgcctgcgccaacgccttcaacaacagcattatccccgaggacacattcttcccaagccccgagagcagctgcggctttaccagcgagagctaccagcagggcgtgctgagcgccaccatcctgtacgagatcctgctgggcaaggccaccctgtacgccgtgctggtgtctgccctggtgctgatggctatggtcaagcggaaggacagccggggacgcgccaagagaagcggatctggcgtgaagcagaccctgaatttcgacctgctgaagctggctggcgacgtggaatccaacccaggccctactagtatggactggatttggcgcatccttttccttgtcggcgctgctaccggcgcccattccgggccccaggttcagctgcaagagtctggcggaggacttgctcaagctggcggaagcctgagactgtcttgtgccgcctctggcagaaccttcagcatgggctggtttagacaggcccctggcaaagagagagagttcgtcgccgccatcacatacagcggcggcagcccttactacgcctcttctgtcagaggccggttcaccatcagccgggacaacgccaagaacaccgtgtacctccagatgaacagcctgaagccagaggacaccgccgtgtactactgtgccgccaatccaacctacggcagcgactggaatgccgagaattggggccagggcacccaagtgacagtgtctagtggatccggcggcggaggatctggcggaggcggatctgggggcggaggctctttcgaagtccaacttgtggagtctggagggggcctggtgcagcccggcggctctctcagactgtcttgtgcggcaagcggctacaccttcagctcttactggatagaatgggtgaggcaggcacctggaaagggactggagtggattggagagattctgccaggagggggagatacaaattacaatgaaatcttcaaggggcgggccaccttttcagcggataccagcaagaatacagcttacctgcagatgaatagcctccgggcagaagataccgctgtttattattgcacgagacgggtgccaataagactggactattgggggcaagggactcttgtcaccgtcagttcaacgcgtgaggacctgaagaacgtgttcccacctgaggtggccgtgttcgagcctagcgaggccgagatcagccacacccagaaagccaccctcgtgtgcctggctaccggcttctaccccgaccatgtggaactgtcttggtgggtcaacggcaaagaggtgcacagcggcgtgtgtaccgacccccagccactgaaagaacagcccgccctgaacgacagccggtactgcctgagcagcagactgagagtgtccgccaccttctggcagaacccccggaaccacttcagatgccaggtgcagttctacggcctgagcgagaacgacgagtggacccaggacagagccaagcccgtgacccagatcgtgtctgccgaagcctggggcagagccgattgcgacgtgaagctggtggaaaagagcttcgagacagacaccaacctgaacttccagaacctgagcgtgatcggcttcagaatcctgctgctgaaagtggccggctttaacctgctgatgaccctgcggctgtggtccagc

SEQ ID NO: 6239 - DNA, 2289 bp, synthetic construct
  source 1..2289: mol_type = other DNA
atggccttaccagtgaccgccttgctcctgccgctggccttgctgctccacgccgccaggccggaagtgcaactggtggaatctggaggctctctggtgcagccagggggaagcctgagactgtcttgtgccgcttccggcttcaccttcgacgactacgccatgagctgggtgcgccaggtgccaggcaaaggcctggaatgggtgtccagcatcaactggagcggcacccacaccgattacgccgactccgtgaaaggcagattcacaatcagcagaaacaacgccaacaataccctgtacctgcagatgaactccctgaagtctgaggatacagcagtgtattattgcgccaagaactggcgggacgccggcaccacttggtttgagaaaagcggctctgccggacagggaacccaagtgacagtgtcctccggtaccggcggaggcggatctggcggcggaggtagcggtggcggaggatctgaattcgacatcgtgatgacacagagccctgatagcctggccgtgtctctgggagagagagccaccattaactgcaaggccagccagagcgtggactacgacggcgacagcttcctgaactggtatcagcagaagcccggccagcctcctaagctgctgatctacgccgccagcaatctggaaagcggcgtgccaagcagattttccggctctggcagcggcaccgatttcaccctgacaatatccagcctccagcctgaggacgtggccgtgtactactgccagcagagcaacgacgaccctctgacctttggacagggcaccaaggtggaaatcaaactcgaggacctgaagaacgtgttcccacctgaggtggccgtgttcgagcctagcgaggccgagatcagccacacccagaaagccaccctcgtgtgcctggctaccggcttctaccccgaccatgtggaactgtcttggtgggtcaacggcaaagaggtgcacagcggcgtgtgtaccgacccccagccactgaaagaacagcccgccctgaacgacagccggtactgcctgagcagcagactgagagtgtccgccaccttctggcagaacccccggaaccacttcagatgccaggtgcagttctacggcctgagcgagaacgacgagtggacccaggacagagccaagcccgtgacccagatcgtgtctgccgaagcctggggcagagccgattgcgacgtgaagctggtggaaaagagcttcgagacagacaccaacctgaacttccagaacctgagcgtgatcggcttcagaatcctgctgctgaaagtggccggctttaacctgctgatgaccctgcggctgtggtccagcagggccaagcgatctggatctggagcaacaaacttctcactactcaaacaagcaggtgacgtggaggagaatcccgggcctactagtatggactggatttggcgcatccttttccttgtcggcgctgctaccggcgcgcattccttcgaagtccaacttgtggagtctggagggggcctggtgcagcccggcggctctctcagactgtcttgtgcggcaagcggctacaccttcagctcttactggatagaatgggtgaggcaggcacctggaaagggactggagtggattggagagattctgccaggagggggagatacaaattacaatgaaatcttcaaggggcgggccaccttttcagcggataccagcaagaatacagcttacctgcagatgaatagcctccgggcagaagataccgctgtttattattgcacgagacgggtgccaataagactggactattgggggcaagggactcttgtcaccgtcagttcaacgcgtatccagaaccctgatcctgccgtgtaccagctgcgggatagcaagagcagcgacaagagcgtgtgtctgttcaccgacttcgacagccagaccaacgtgtcccagagcaaggactccgacgtgtacatcaccgataagtgcgtgctggacatgcggagcatggacttcaagagcaactccgccgtggcctggtccaacaagtccgatttcgcctgcgccaacgccttcaacaacagcattatccccgaggacacattcttcccaagccccgagagcagctgcggctttaccagcgagagctaccagcagggcgtgctgagcgccaccatcctgtacgagatcctgctgggcaaggccaccctgtacgccgtgctggtgtctgccctggtgctgatggctatggtcaagcggaaggacagccgggga

SEQ ID NO: 6240 - DNA, 2301 bp, synthetic construct
  source 1..2301: mol_type = other DNA
atggccttaccagtgaccgccttgctcctgccgctggccttgctgctccacgccgccaggccggaagtgcaactggtggaatctggaggctctctggtgcagccagggggaagcctgagactgtcttgtgccgcttccggcttcaccttcgacgactacgccatgagctgggtgcgccaggtgccaggcaaaggcctggaatgggtgtccagcatcaactggagcggcacccacaccgattacgccgactccgtgaaaggcagattcacaatcagcagaaacaacgccaacaataccctgtacctgcagatgaactccctgaagtctgaggatacagcagtgtattattgcgccaagaactggcgggacgccggcaccacttggtttgagaaaagcggctctgccggacagggaacccaagtgacagtgtcctccggtaccggcggaggcggatctggcggcggaggtagcggtggcggaggatctgaattcgacatcgtgatgacacagagccctgatagcctggccgtgtctctgggagagagagccaccattaactgcaaggccagccagagcgtggactacgacggcgacagcttcctgaactggtatcagcagaagcccggccagcctcctaagctgctgatctacgccgccagcaatctggaaagcggcgtgccaagcagattttccggctctggcagcggcaccgatttcaccctgacaatatccagcctccagcctgaggacgtggccgtgtactactgccagcagagcaacgacgaccctctgacctttggacagggcaccaaggtggaaatcaaactcgagatccagaaccctgatcctgccgtgtaccagctgcgggatagcaagagcagcgacaagagcgtgtgtctgttcaccgacttcgacagccagaccaacgtgtcccagagcaaggactccgacgtgtacatcaccgataagtgcgtgctggacatgcggagcatggacttcaagagcaactccgccgtggcctggtccaacaagtccgatttcgcctgcgccaacgccttcaacaacagcattatccccgaggacacattcttcccaagccccgagagcagctgcggctttaccagcgagagctaccagcagggcgtgctgagcgccaccatcctgtacgagatcctgctgggcaaggccaccctgtacgccgtgctggtgtctgccctggtgctgatggctatggtcaagcggaaggacagccggggacgcgccaagagaagcggatctggcgtgaagcagaccctgaatttcgacctgctgaagctggctggcgacgtggaatccaacccaggccctactagtatggactggatttggcgcatccttttccttgtcggcgctgctaccggcgcgcattccttcgaagtccaacttgtggagtctggagggggcctggtgcagcccggcggctctctcagactgtcttgtgcggcaagcggctacaccttcagctcttactggatagaatgggtgaggcaggcacctggaaagggactggagtggattggagagattctgccaggagggggagatacaaattacaatgaaatcttcaaggggcgggccaccttttcagcggataccagcaagaatacagcttacctgcagatgaatagcctccgggcagaagataccgctgtttattattgcacgagacgggtgccaataagactggactattgggggcaagggactcttgtcaccgtcagttcaacgcgtgaggacctgaagaacgtgttcccacctgaggtggccgtgttcgagcctagcgaggccgagatcagccacacccagaaagccaccctcgtgtgcctggctaccggcttctaccccgaccatgtggaactgtcttggtgggtcaacggcaaagaggtgcacagcggcgtgtgtaccgacccccagccactgaaagaacagcccgccctgaacgacagccggtactgcctgagcagcagactgagagtgtccgccaccttctggcagaacccccggaaccacttcagatgccaggtgcagttctacggcctgagcgagaacgacgagtggacccaggacagagccaagcccgtgacccagatcgtgtctgccgaagcctggggcagagccgattgcgacgtgaagctggtggaaaagagcttcgagacagacaccaacctgaacttccagaacctgagcgtgatcggcttcagaatcctgctgctgaaagtggccggctttaacctgctgatgaccctgcggctgtggtccagc

SEQ ID NO: 6241 - DNA, 2283 bp, synthetic construct
  source 1..2283: mol_type = other DNA
atggccttaccagtgaccgccttgctcctgccgctggccttgctgctccacgccgccaggccggaagttcagctgcttgagtctggcggaggactggttcaacctggcggaagcctgagactgtcttgtgccgccagcggcttcatcttcagcagctacgccatgagctgggtccgacaggctcctggaaagggccaagaatgggtttccggcgttagcggcacaggcgtgaacacctactacgccgatagcgtgaagggcagattcaccatcagccgggacaacagcaagaacaccctgtacctccagatgaacagcctgagagccgaggacaccgccgtgtactattgtgcctctggcaaaggctgggacagcggctcttggtacgaggactatagaggccagggcaccctggtcacagtttcttcaggtaccggcggaggcggatctggcggcggaggtagcggtggcggaggatctgaattcgacatcgtgatgacacagagccctgatagcctggccgtgtctctgggagagagagccaccattaactgcaaggccagccagagcgtggactacgacggcgacagcttcctgaactggtatcagcagaagcccggccagcctcctaagctgctgatctacgccgccagcaatctggaaagcggcgtgccaagcagattttccggctctggcagcggcaccgatttcaccctgacaatatccagcctccagcctgaggacgtggccgtgtactactgccagcagagcaacgacgaccctctgacctttggacagggcaccaaggtggaaatcaaactcgaggacctgaagaacgtgttcccacctgaggtggccgtgttcgagcctagcgaggccgagatcagccacacccagaaagccaccctcgtgtgcctggctaccggcttctaccccgaccatgtggaactgtcttggtgggtcaacggcaaagaggtgcacagcggcgtgtgtaccgacccccagccactgaaagaacagcccgccctgaacgacagccggtactgcctgagcagcagactgagagtgtccgccaccttctggcagaacccccggaaccacttcagatgccaggtgcagttctacggcctgagcgagaacgacgagtggacccaggacagagccaagcccgtgacccagatcgtgtctgccgaagcctggggcagagccgattgcgacgtgaagctggtggaaaagagcttcgagacagacaccaacctgaacttccagaacctgagcgtgatcggcttcagaatcctgctgctgaaagtggccggctttaacctgctgatgaccctgcggctgtggtccagcagggccaagcgatctggatctggagcaacaaacttctcactactcaaacaagcaggtgacgtggaggagaatcccgggcctactagtatggactggatttggcgcatccttttccttgtcggcgctgctaccggcgcgcattccttcgaagtccaacttgtggagtctggagggggcctggtgcagcccggcggctctctcagactgtcttgtgcggcaagcggctacaccttcagctcttactggatagaatgggtgaggcaggcacctggaaagggactggagtggattggagagattctgccaggagggggagatacaaattacaatgaaatcttcaaggggcgggccaccttttcagcggataccagcaagaatacagcttacctgcagatgaatagcctccgggcagaagataccgctgtttattattgcacgagacgggtgccaataagactggactattgggggcaagggactcttgtcaccgtcagttcaacgcgtatccagaaccctgatcctgccgtgtaccagctgcgggatagcaagagcagcgacaagagcgtgtgtctgttcaccgacttcgacagccagaccaacgtgtcccagagcaaggactccgacgtgtacatcaccgataagtgcgtgctggacatgcggagcatggacttcaagagcaactccgccgtggcctggtccaacaagtccgatttcgcctgcgccaacgccttcaacaacagcattatccccgaggacacattcttcccaagccccgagagcagctgcggctttaccagcgagagctaccagcagggcgtgctgagcgccaccatcctgtacgagatcctgctgggcaaggccaccctgtacgccgtgctggtgtctgccctggtgctgatggctatggtcaagcggaaggacagccgggga

SEQ ID NO: 6242 - DNA, 2295 bp, synthetic construct
  source 1..2295: mol_type = other DNA
atggccttaccagtgaccgccttgctcctgccgctggccttgctgctccacgccgccaggccggaagttcagctgcttgagtctggcggaggactggttcaacctggcggaagcctgagactgtcttgtgccgccagcggcttcatcttcagcagctacgccatgagctgggtccgacaggctcctggaaagggccaagaatgggtttccggcgttagcggcacaggcgtgaacacctactacgccgatagcgtgaagggcagattcaccatcagccgggacaacagcaagaacaccctgtacctccagatgaacagcctgagagccgaggacaccgccgtgtactattgtgcctctggcaaaggctgggacagcggctcttggtacgaggactatagaggccagggcaccctggtcacagtttcttcaggtaccggcggaggcggatctggcggcggaggtagcggtggcggaggatctgaattcgacatcgtgatgacacagagccctgatagcctggccgtgtctctgggagagagagccaccattaactgcaaggccagccagagcgtggactacgacggcgacagcttcctgaactggtatcagcagaagcccggccagcctcctaagctgctgatctacgccgccagcaatctggaaagcggcgtgccaagcagattttccggctctggcagcggcaccgatttcaccctgacaatatccagcctccagcctgaggacgtggccgtgtactactgccagcagagcaacgacgaccctctgacctttggacagggcaccaaggtggaaatcaaactcgagatccagaaccctgatcctgccgtgtaccagctgcgggatagcaagagcagcgacaagagcgtgtgtctgttcaccgacttcgacagccagaccaacgtgtcccagagcaaggactccgacgtgtacatcaccgataagtgcgtgctggacatgcggagcatggacttcaagagcaactccgccgtggcctggtccaacaagtccgatttcgcctgcgccaacgccttcaacaacagcattatccccgaggacacattcttcccaagccccgagagcagctgcggctttaccagcgagagctaccagcagggcgtgctgagcgccaccatcctgtacgagatcctgctgggcaaggccaccctgtacgccgtgctggtgtctgccctggtgctgatggctatggtcaagcggaaggacagccggggacgcgccaagagaagcggatctggcgtgaagcagaccctgaatttcgacctgctgaagctggctggcgacgtggaatccaacccaggccctactagtatggactggatttggcgcatccttttccttgtcggcgctgctaccggcgcgcattccttcgaagtccaacttgtggagtctggagggggcctggtgcagcccggcggctctctcagactgtcttgtgcggcaagcggctacaccttcagctcttactggatagaatgggtgaggcaggcacctggaaagggactggagtggattggagagattctgccaggagggggagatacaaattacaatgaaatcttcaaggggcgggccaccttttcagcggataccagcaagaatacagcttacctgcagatgaatagcctccgggcagaagataccgctgtttattattgcacgagacgggtgccaataagactggactattgggggcaagggactcttgtcaccgtcagttcaacgcgtgaggacctgaagaacgtgttcccacctgaggtggccgtgttcgagcctagcgaggccgagatcagccacacccagaaagccaccctcgtgtgcctggctaccggcttctaccccgaccatgtggaactgtcttggtgggtcaacggcaaagaggtgcacagcggcgtgtgtaccgacccccagccactgaaagaacagcccgccctgaacgacagccggtactgcctgagcagcagactgagagtgtccgccaccttctggcagaacccccggaaccacttcagatgccaggtgcagttctacggcctgagcgagaacgacgagtggacccaggacagagccaagcccgtgacccagatcgtgtctgccgaagcctggggcagagccgattgcgacgtgaagctggtggaaaagagcttcgagacagacaccaacctgaacttccagaacctgagcgtgatcggcttcagaatcctgctgctgaaagtggccggctttaacctgctgatgaccctgcggctgtggtccagc

SEQ ID NO: 6243 - DNA, 2187 bp, synthetic construct
  source 1..2187: mol_type = other DNA
atggccttaccagtgaccgccttgctcctgccgctggccttgctgctccacgccgccaggccgatgctgcccgctcctaagaatctggtggtgtccagaatcaccgaggacagcgccagactgtcttggacagctcctgatgccgccttcgacagcttccccatccggtacatcgagacactgatctggggcgaagccatctggctggatgtgcctggaagcgagagaagctacgacctgaccggactgaagcctggcacagagtatgccgtggtcatcaccggcgtgaaaggcggcagattctctagccctctggtggcctctttcaccaccggtaccggcggaggcggatctggcggcggaggtagcggtggcggaggatctgaattcgacatcgtgatgacacagagccctgatagcctggccgtgtctctgggagagagagccaccattaactgcaaggccagccagagcgtggactacgacggcgacagcttcctgaactggtatcagcagaagcccggccagcctcctaagctgctgatctacgccgccagcaatctggaaagcggcgtgccaagcagattttccggctctggcagcggcaccgatttcaccctgacaatatccagcctccagcctgaggacgtggccgtgtactactgccagcagagcaacgacgaccctctgacctttggacagggcaccaaggtggaaatcaaactcgaggacctgaagaacgtgttcccacctgaggtggccgtgttcgagcctagcgaggccgagatcagccacacccagaaagccaccctcgtgtgcctggctaccggcttctaccccgaccatgtggaactgtcttggtgggtcaacggcaaagaggtgcacagcggcgtgtgtaccgacccccagccactgaaagaacagcccgccctgaacgacagccggtactgcctgagcagcagactgagagtgtccgccaccttctggcagaacccccggaaccacttcagatgccaggtgcagttctacggcctgagcgagaacgacgagtggacccaggacagagccaagcccgtgacccagatcgtgtctgccgaagcctggggcagagccgattgcgacgtgaagctggtggaaaagagcttcgagacagacaccaacctgaacttccagaacctgagcgtgatcggcttcagaatcctgctgctgaaagtggccggctttaacctgctgatgaccctgcggctgtggtccagcagggccaagcgatctggatctggagcaacaaacttctcactactcaaacaagcaggtgacgtggaggagaatcccgggcctactagtatggactggatttggcgcatccttttccttgtcggcgctgctaccggcgcgcattccttcgaagtccaacttgtggagtctggagggggcctggtgcagcccggcggctctctcagactgtcttgtgcggcaagcggctacaccttcagctcttactggatagaatgggtgaggcaggcacctggaaagggactggagtggattggagagattctgccaggagggggagatacaaattacaatgaaatcttcaaggggcgggccaccttttcagcggataccagcaagaatacagcttacctgcagatgaatagcctccgggcagaagataccgctgtttattattgcacgagacgggtgccaataagactggactattgggggcaagggactcttgtcaccgtcagttcaacgcgtatccagaaccctgatcctgccgtgtaccagctgcgggatagcaagagcagcgacaagagcgtgtgtctgttcaccgacttcgacagccagaccaacgtgtcccagagcaaggactccgacgtgtacatcaccgataagtgcgtgctggacatgcggagcatggacttcaagagcaactccgccgtggcctggtccaacaagtccgatttcgcctgcgccaacgccttcaacaacagcattatccccgaggacacattcttcccaagccccgagagcagctgcggctttaccagcgagagctaccagcagggcgtgctgagcgccaccatcctgtacgagatcctgctgggcaaggccaccctgtacgccgtgctggtgtctgccctggtgctgatggctatggtcaagcggaaggacagccgggga

SEQ ID NO: 6244 - DNA, 2199 bp, synthetic construct
  source 1..2199: mol_type = other DNA
atggccttaccagtgaccgccttgctcctgccgctggccttgctgctccacgccgccaggccgatgctgcccgctcctaagaatctggtggtgtccagaatcaccgaggacagcgccagactgtcttggacagctcctgatgccgccttcgacagcttccccatccggtacatcgagacactgatctggggcgaagccatctggctggatgtgcctggaagcgagagaagctacgacctgaccggactgaagcctggcacagagtatgccgtggtcatcaccggcgtgaaaggcggcagattctctagccctctggtggcctctttcaccaccggtaccggcggaggcggatctggcggcggaggtagcggtggcggaggatctgaattcgacatcgtgatgacacagagccctgatagcctggccgtgtctctgggagagagagccaccattaactgcaaggccagccagagcgtggactacgacggcgacagcttcctgaactggtatcagcagaagcccggccagcctcctaagctgctgatctacgccgccagcaatctggaaagcggcgtgccaagcagattttccggctctggcagcggcaccgatttcaccctgacaatatccagcctccagcctgaggacgtggccgtgtactactgccagcagagcaacgacgaccctctgacctttggacagggcaccaaggtggaaatcaaactcgagatccagaaccctgatcctgccgtgtaccagctgcgggatagcaagagcagcgacaagagcgtgtgtctgttcaccgacttcgacagccagaccaacgtgtcccagagcaaggactccgacgtgtacatcaccgataagtgcgtgctggacatgcggagcatggacttcaagagcaactccgccgtggcctggtccaacaagtccgatttcgcctgcgccaacgccttcaacaacagcattatccccgaggacacattcttcccaagccccgagagcagctgcggctttaccagcgagagctaccagcagggcgtgctgagcgccaccatcctgtacgagatcctgctgggcaaggccaccctgtacgccgtgctggtgtctgccctggtgctgatggctatggtcaagcggaaggacagccggggacgcgccaagagaagcggatctggcgtgaagcagaccctgaatttcgacctgctgaagctggctggcgacgtggaatccaacccaggccctactagtatggactggatttggcgcatccttttccttgtcggcgctgctaccggcgcgcattccttcgaagtccaacttgtggagtctggagggggcctggtgcagcccggcggctctctcagactgtcttgtgcggcaagcggctacaccttcagctcttactggatagaatgggtgaggcaggcacctggaaagggactggagtggattggagagattctgccaggagggggagatacaaattacaatgaaatcttcaaggggcgggccaccttttcagcggataccagcaagaatacagcttacctgcagatgaatagcctccgggcagaagataccgctgtttattattgcacgagacgggtgccaataagactggactattgggggcaagggactcttgtcaccgtcagttcaacgcgtgaggacctgaagaacgtgttcccacctgaggtggccgtgttcgagcctagcgaggccgagatcagccacacccagaaagccaccctcgtgtgcctggctaccggcttctaccccgaccatgtggaactgtcttggtgggtcaacggcaaagaggtgcacagcggcgtgtgtaccgacccccagccactgaaagaacagcccgccctgaacgacagccggtactgcctgagcagcagactgagagtgtccgccaccttctggcagaacccccggaaccacttcagatgccaggtgcagttctacggcctgagcgagaacgacgagtggacccaggacagagccaagcccgtgacccagatcgtgtctgccgaagcctggggcagagccgattgcgacgtgaagctggtggaaaagagcttcgagacagacaccaacctgaacttccagaacctgagcgtgatcggcttcagaatcctgctgctgaaagtggccggctttaacctgctgatgaccctgcggctgtggtccagc

SEQ ID NO: 6245 - DNA, 2274 bp, synthetic construct
  source 1..2274: mol_type = other DNA
atggccttaccagtgaccgccttgctcctgccgctggccttgctgctccacgccgccaggccggaggtgcagctggttgaatctggcggaggactggttcagcctggcggatctctgagactgtcttgtgccgccagcggcttcaacatcaaggatacctgtatcggctgggttcgcagagcccctggcaaagaggaagaactggtcgccaaaatctgcaagtacagcggccacaccagatacgccgacagcgtgaagggcagattcaccatcagcgccgacaccagcaagaacaccgcctacctccagatgaacagcctgagagccgaggacaccgccgtgtactattgtgccgctgtgtccgtcagagatgggcactacaattactggggccagggcaccaccgtgaccgtttcttcaggtaccggcggaggcggatctggcggcggaggtagcggtggcggaggatctgaattcgacatcgtgatgacacagagccctgatagcctggccgtgtctctgggagagagagccaccattaactgcaaggccagccagagcgtggactacgacggcgacagcttcctgaactggtatcagcagaagcccggccagcctcctaagctgctgatctacgccgccagcaatctggaaagcggcgtgccaagcagattttccggctctggcagcggcaccgatttcaccctgacaatatccagcctccagcctgaggacgtggccgtgtactactgccagcagagcaacgacgaccctctgacctttggacagggcaccaaggtggaaatcaaactcgaggacctgaagaacgtgttcccacctgaggtggccgtgttcgagcctagcgaggccgagatcagccacacccagaaagccaccctcgtgtgcctggctaccggcttctaccccgaccatgtggaactgtcttggtgggtcaacggcaaagaggtgcacagcggcgtgtgtaccgacccccagccactgaaagaacagcccgccctgaacgacagccggtactgcctgagcagcagactgagagtgtccgccaccttctggcagaacccccggaaccacttcagatgccaggtgcagttctacggcctgagcgagaacgacgagtggacccaggacagagccaagcccgtgacccagatcgtgtctgccgaagcctggggcagagccgattgcgacgtgaagctggtggaaaagagcttcgagacagacaccaacctgaacttccagaacctgagcgtgatcggcttcagaatcctgctgctgaaagtggccggctttaacctgctgatgaccctgcggctgtggtccagcagggccaagcgatctggatctggagcaacaaacttctcactactcaaacaagcaggtgacgtggaggagaatcccgggcctactagtatggactggatttggcgcatccttttccttgtcggcgctgctaccggcgcgcattccttcgaagtccaacttgtggagtctggagggggcctggtgcagcccggcggctctctcagactgtcttgtgcggcaagcggctacaccttcagctcttactggatagaatgggtgaggcaggcacctggaaagggactggagtggattggagagattctgccaggagggggagatacaaattacaatgaaatcttcaaggggcgggccaccttttcagcggataccagcaagaatacagcttacctgcagatgaatagcctccgggcagaagataccgctgtttattattgcacgagacgggtgccaataagactggactattgggggcaagggactcttgtcaccgtcagttcaacgcgtatccagaaccctgatcctgccgtgtaccagctgcgggatagcaagagcagcgacaagagcgtgtgtctgttcaccgacttcgacagccagaccaacgtgtcccagagcaaggactccgacgtgtacatcaccgataagtgcgtgctggacatgcggagcatggacttcaagagcaactccgccgtggcctggtccaacaagtccgatttcgcctgcgccaacgccttcaacaacagcattatccccgaggacacattcttcccaagccccgagagcagctgcggctttaccagcgagagctaccagcagggcgtgctgagcgccaccatcctgtacgagatcctgctgggcaaggccaccctgtacgccgtgctggtgtctgccctggtgctgatggctatggtcaagcggaaggacagccgggga

SEQ ID NO: 6246 - DNA, 2286 bp, synthetic construct
  source 1..2286: mol_type = other DNA
atggccttaccagtgaccgccttgctcctgccgctggccttgctgctccacgccgccaggccggaggtgcagctggttgaatctggcggaggactggttcagcctggcggatctctgagactgtcttgtgccgccagcggcttcaacatcaaggatacctgtatcggctgggttcgcagagcccctggcaaagaggaagaactggtcgccaaaatctgcaagtacagcggccacaccagatacgccgacagcgtgaagggcagattcaccatcagcgccgacaccagcaagaacaccgcctacctccagatgaacagcctgagagccgaggacaccgccgtgtactattgtgccgctgtgtccgtcagagatgggcactacaattactggggccagggcaccaccgtgaccgtttcttcaggtaccggcggaggcggatctggcggcggaggtagcggtggcggaggatctgaattcgacatcgtgatgacacagagccctgatagcctggccgtgtctctgggagagagagccaccattaactgcaaggccagccagagcgtggactacgacggcgacagcttcctgaactggtatcagcagaagcccggccagcctcctaagctgctgatctacgccgccagcaatctggaaagcggcgtgccaagcagattttccggctctggcagcggcaccgatttcaccctgacaatatccagcctccagcctgaggacgtggccgtgtactactgccagcagagcaacgacgaccctctgacctttggacagggcaccaaggtggaaatcaaactcgagatccagaaccctgatcctgccgtgtaccagctgcgggatagcaagagcagcgacaagagcgtgtgtctgttcaccgacttcgacagccagaccaacgtgtcccagagcaaggactccgacgtgtacatcaccgataagtgcgtgctggacatgcggagcatggacttcaagagcaactccgccgtggcctggtccaacaagtccgatttcgcctgcgccaacgccttcaacaacagcattatccccgaggacacattcttcccaagccccgagagcagctgcggctttaccagcgagagctaccagcagggcgtgctgagcgccaccatcctgtacgagatcctgctgggcaaggccaccctgtacgccgtgctggtgtctgccctggtgctgatggctatggtcaagcggaaggacagccggggacgcgccaagagaagcggatctggcgtgaagcagaccctgaatttcgacctgctgaagctggctggcgacgtggaatccaacccaggccctactagtatggactggatttggcgcatccttttccttgtcggcgctgctaccggcgcgcattccttcgaagtccaacttgtggagtctggagggggcctggtgcagcccggcggctctctcagactgtcttgtgcggcaagcggctacaccttcagctcttactggatagaatgggtgaggcaggcacctggaaagggactggagtggattggagagattctgccaggagggggagatacaaattacaatgaaatcttcaaggggcgggccaccttttcagcggataccagcaagaatacagcttacctgcagatgaatagcctccgggcagaagataccgctgtttattattgcacgagacgggtgccaataagactggactattgggggcaagggactcttgtcaccgtcagttcaacgcgtgaggacctgaagaacgtgttcccacctgaggtggccgtgttcgagcctagcgaggccgagatcagccacacccagaaagccaccctcgtgtgcctggctaccggcttctaccccgaccatgtggaactgtcttggtgggtcaacggcaaagaggtgcacagcggcgtgtgtaccgacccccagccactgaaagaacagcccgccctgaacgacagccggtactgcctgagcagcagactgagagtgtccgccaccttctggcagaacccccggaaccacttcagatgccaggtgcagttctacggcctgagcgagaacgacgagtggacccaggacagagccaagcccgtgacccagatcgtgtctgccgaagcctggggcagagccgattgcgacgtgaagctggtggaaaagagcttcgagacagacaccaacctgaacttccagaacctgagcgtgatcggcttcagaatcctgctgctgaaagtggccggctttaacctgctgatgaccctgcggctgtggtccagc

SEQ ID NO: 6247 - DNA, 3390 bp, synthetic construct
  source 1..3390: mol_type = other DNA
atggccttaccagtgaccgccttgctcctgccgctggccttgctgctccacgccgccaggccggaagtgcagctggttgaatctggcggaggactggttcaggctggcggatctctgagactgtcttgtgccgccagcggcagaacctttagcatgggctggtttagacaggcccctggcaaagagagagagttcgtcgccgccatcacatactctggcggcagcccttactacgccgactctgtgaagggcagattcaccatcagccgggacaacgccaagaacaccgtgtacctccagatgaacagcctgaagcctgaggacaccgccgtgtactactgcgccgccaatccaacatacggcagcgactggaacgccgagaattggggccagggaacccaagtgacagtgtctagcggtaccggcggaggcggatctggcggcggaggtagcggtggcggaggatctgaattcgacatcgtgatgacacagagccctgatagcctggccgtgtctctgggagagagagccaccattaactgcaaggccagccagagcgtggactacgacggcgacagcttcctgaactggtatcagcagaagcccggccagcctcctaagctgctgatctacgccgccagcaatctggaaagcggcgtgccaagcagattttccggctctggcagcggcaccgatttcaccctgacaatatccagcctccagcctgaggacgtggccgtgtactactgccagcagagcaacgacgaccctctgacctttggacagggcaccaaggtggaaatcaaactcgaggacctgaagaacgtgttcccacctgaggtggccgtgttcgagcctagcgaggccgagatcagccacacccagaaagccaccctcgtgtgcctggctaccggcttctaccccgaccatgtggaactgtcttggtgggtcaacggcaaagaggtgcacagcggcgtgtgtaccgacccccagccactgaaagaacagcccgccctgaacgacagccggtactgcctgagcagcagactgagagtgtccgccaccttctggcagaacccccggaaccacttcagatgccaggtgcagttctacggcctgagcgagaacgacgagtggacccaggacagagccaagcccgtgacccagatcgtgtctgccgaagcctggggcagagccgattgcgacgtgaagctggtggaaaagagcttcgagacagacaccaacctgaacttccagaacctgagcgtgatcggcttcagaatcctgctgctgaaagtggccggctttaacctgctgatgaccctgcggctgtggtccagcagggccaagcgatctggatctggagcaacaaacttctcactactcaaacaagcaggtgacgtggaggagaatcccgggcctactagtgccaccatggactggatttggcgcatccttttccttgtcggcgctgctaccggcgcccattccgggcccgaagtgcaactggttgaatccggtggcggcctggtgcaagcaggcggatctctcagacttagctgtgccgcctccggcagaaccttcacaatgggatggtttaggcaggctccagggaaagagagagagttcgtcgccgccatctctctgtctcccacactggcctactacgccgactctgtgaaaggccggttcaccatctccagagataatgccaagaacaccgtggtgctgcaaatgaactctctgaaacccgaggatacagccctgtactattgtgccgctgaccggaagtccgtgatgagcatcagacccgattactggggacagggcacacaagtcacagtgtcctctggatccggcggcggaggatctggcggaggcggatctgggggcggaggctctttcgaagtccaacttgtggagtctggagggggcctggtgcagcccggcggctctctcagactgtcttgtgcggcaagcggctacaccttcagctcttactggatagaatgggtgaggcaggcacctggaaagggactggagtggattggagagattctgccaggagggggagatacaaattacaatgaaatcttcaaggggcgggccaccttttcagcggataccagcaagaatacagcttacctgcagatgaatagcctccgggcagaagataccgctgtttattattgcacgagacgggtgccaataagactggactattgggggcaagggactcttgtcaccgtcagttcaacgcgtatccagaaccctgatcctgccgtgtaccagctgcgggatagcaagagcagcgacaagagcgtgtgtctgttcaccgacttcgacagccagaccaacgtgtcccagagcaaggactccgacgtgtacatcaccgataagtgcgtgctggacatgcggagcatggacttcaagagcaactccgccgtggcctggtccaacaagtccgatttcgcctgcgccaacgccttcaacaacagcattatccccgaggacacattcttcccaagccccgagagcagctgcggctttaccagcgagagctaccagcagggcgtgctgagcgccaccatcctgtacgagatcctgctgggcaaggccaccctgtacgccgtgctggtgtctgccctggtgctgatggctatggtcaagcggaaggacagccggggacgcgccaagagaagcggatctggcgtgaagcagaccctgaatttcgacctgctgaagctggctggcgacgtggaatccaacccaggcccttctagaggccatatgaccgagtacaagcccacggtgcgcctcgccacccgcgacgacgtccccagggccgtacgcaccctcgccgccgcgttcgccgactaccccgccacgcgccacaccgtcgatccggaccgccacatcgagcgggtcaccgagctgcaagaactcttcctcacgcgcgtcgggctcgacatcggcaaggtgtgggtcgcggacgacggcgccgcggtggcggtctggaccacgccggagagcgtcgaagcgggggcggtgttcgccgagatcggcccgcgcatggccgagttgagcggttcccggctggccgcgcagcaacagatggaaggcctcctggcgccgcaccggcccaaggagcccgcgtggttcctggccaccgtcggcgtctcgcccgaccaccagggcaagggtctgggcagcgccgtcgtgctccccggagtggaggcggccgagcgcgccggggtgcccgccttcctggagacctccgcgccccgcaacctccccttctacgagcggctcggcttcaccgtcaccgccgacgtcgaggtgcccgaaggaccgcgcacctggtgcatgacccgcaagcccggtgcctga

SEQ ID NO: 6248 - DNA, 2304 bp, synthetic construct
  source 1..2304: mol_type = other DNA
atggccttaccagtgaccgccttgctcctgccgctggccttgctgctccacgccgccaggccggaagtgcagctggttgaatctggcggaggactggttcagcctggcggatctctgagactgtcttgtgccgcctctggcttcgccagcgactactatatcatcggctggttcagacaggcccctggcaaagagagagagggcgtcagctgtatcagcagcagatacgccaacaccaactacgccgacagcgtgaagggcagattcaccatcagccgggacaacgccaagaacaccgtgtacctccagatgaacagcctgaagcctgaggacaccgccgtgtactactgtgccgccgacaccagaagatacacctgtcctgacattgccaccatgcaccggaacttcgattcttggggccagggcacactggtcaccgtttcttctggtaccggcggaggcggatctggcggcggaggtagcggtggcggaggatctgaattcgacatcgtgatgacacagagccctgatagcctggccgtgtctctgggagagagagccaccattaactgcaaggccagccagagcgtggactacgacggcgacagcttcctgaactggtatcagcagaagcccggccagcctcctaagctgctgatctacgccgccagcaatctggaaagcggcgtgccaagcagattttccggctctggcagcggcaccgatttcaccctgacaatatccagcctccagcctgaggacgtggccgtgtactactgccagcagagcaacgacgaccctctgacctttggacagggcaccaaggtggaaatcaaactcgaggacctgaagaacgtgttcccacctgaggtggccgtgttcgagcctagcgaggccgagatcagccacacccagaaagccaccctcgtgtgcctggctaccggcttctaccccgaccatgtggaactgtcttggtgggtcaacggcaaagaggtgcacagcggcgtgtgtaccgacccccagccactgaaagaacagcccgccctgaacgacagccggtactgcctgagcagcagactgagagtgtccgccaccttctggcagaacccccggaaccacttcagatgccaggtgcagttctacggcctgagcgagaacgacgagtggacccaggacagagccaagcccgtgacccagatcgtgtctgccgaagcctggggcagagccgattgcgacgtgaagctggtggaaaagagcttcgagacagacaccaacctgaacttccagaacctgagcgtgatcggcttcagaatcctgctgctgaaagtggccggctttaacctgctgatgaccctgcggctgtggtccagcagggccaagcgatctggatctggagcaacaaacttctcactactcaaacaagcaggtgacgtggaggagaatcccgggcctactagtatggactggatttggcgcatccttttccttgtcggcgctgctaccggcgcgcattccttcgaagtccaacttgtggagtctggagggggcctggtgcagcccggcggctctctcagactgtcttgtgcggcaagcggctacaccttcagctcttactggatagaatgggtgaggcaggcacctggaaagggactggagtggattggagagattctgccaggagggggagatacaaattacaatgaaatcttcaaggggcgggccaccttttcagcggataccagcaagaatacagcttacctgcagatgaatagcctccgggcagaagataccgctgtttattattgcacgagacgggtgccaataagactggactattgggggcaagggactcttgtcaccgtcagttcaacgcgtatccagaaccctgatcctgccgtgtaccagctgcgggatagcaagagcagcgacaagagcgtgtgtctgttcaccgacttcgacagccagaccaacgtgtcccagagcaaggactccgacgtgtacatcaccgataagtgcgtgctggacatgcggagcatggacttcaagagcaactccgccgtggcctggtccaacaagtccgatttcgcctgcgccaacgccttcaacaacagcattatccccgaggacacattcttcccaagccccgagagcagctgcggctttaccagcgagagctaccagcagggcgtgctgagcgccaccatcctgtacgagatcctgctgggcaaggccaccctgtacgccgtgctggtgtctgccctggtgctgatggctatggtcaagcggaaggacagccggggataa

SEQ ID NO: 6249 - DNA, 2304 bp, synthetic construct
  source 1..2304: mol_type = other DNA
atggccttaccagtgaccgccttgctcctgccgctggccttgctgctccacgccgccaggccggaagtgcagctggttgaatctggcggaggactggttcagcctggcggatctctgagactgagctgtgaagccagcggcttcgccagcgacgattacatcatcggctggttcagacaggcccctggcaaagagagagagggcgtcagctgcatcagctctaagtacgccaacaccgtgtacaccgacagcgtgaagggcagattcagactgagcagaggcaccgccaagaataccgtgtacctccagatgagcgccctgaagcctgaggataccgccgtgtactactgcgctatggacagccgcagagtgacatgccctgagatcagcaccatgcaccggaacttcgattcttggggccagggcacactggtcacagtgtcatctggtaccggcggaggcggatctggcggcggaggtagcggtggcggaggatctgaattcgacatcgtgatgacacagagccctgatagcctggccgtgtctctgggagagagagccaccattaactgcaaggccagccagagcgtggactacgacggcgacagcttcctgaactggtatcagcagaagcccggccagcctcctaagctgctgatctacgccgccagcaatctggaaagcggcgtgccaagcagattttccggctctggcagcggcaccgatttcaccctgacaatatccagcctccagcctgaggacgtggccgtgtactactgccagcagagcaacgacgaccctctgacctttggacagggcaccaaggtggaaatcaaactcgaggacctgaagaacgtgttcccacctgaggtggccgtgttcgagcctagcgaggccgagatcagccacacccagaaagccaccctcgtgtgcctggctaccggcttctaccccgaccatgtggaactgtcttggtgggtcaacggcaaagaggtgcacagcggcgtgtgtaccgacccccagccactgaaagaacagcccgccctgaacgacagccggtactgcctgagcagcagactgagagtgtccgccaccttctggcagaacccccggaaccacttcagatgccaggtgcagttctacggcctgagcgagaacgacgagtggacccaggacagagccaagcccgtgacccagatcgtgtctgccgaagcctggggcagagccgattgcgacgtgaagctggtggaaaagagcttcgagacagacaccaacctgaacttccagaacctgagcgtgatcggcttcagaatcctgctgctgaaagtggccggctttaacctgctgatgaccctgcggctgtggtccagcagggccaagcgatctggatctggagcaacaaacttctcactactcaaacaagcaggtgacgtggaggagaatcccgggcctactagtatggactggatttggcgcatccttttccttgtcggcgctgctaccggcgcgcattccttcgaagtccaacttgtggagtctggagggggcctggtgcagcccggcggctctctcagactgtcttgtgcggcaagcggctacaccttcagctcttactggatagaatgggtgaggcaggcacctggaaagggactggagtggattggagagattctgccaggagggggagatacaaattacaatgaaatcttcaaggggcgggccaccttttcagcggataccagcaagaatacagcttacctgcagatgaatagcctccgggcagaagataccgctgtttattattgcacgagacgggtgccaataagactggactattgggggcaagggactcttgtcaccgtcagttcaacgcgtatccagaaccctgatcctgccgtgtaccagctgcgggatagcaagagcagcgacaagagcgtgtgtctgttcaccgacttcgacagccagaccaacgtgtcccagagcaaggactccgacgtgtacatcaccgataagtgcgtgctggacatgcggagcatggacttcaagagcaactccgccgtggcctggtccaacaagtccgatttcgcctgcgccaacgccttcaacaacagcattatccccgaggacacattcttcccaagccccgagagcagctgcggctttaccagcgagagctaccagcagggcgtgctgagcgccaccatcctgtacgagatcctgctgggcaaggccaccctgtacgccgtgctggtgtctgccctggtgctgatggctatggtcaagcggaaggacagccggggataa

SEQ ID NO: 6250 - DNA, 2301 bp, synthetic construct
  source 1..2301: mol_type = other DNA
atggccttaccagtgaccgccttgctcctgccgctggccttgctgctccacgccgccaggccggaagtgcagctggttgaatctggcggaggactggttcagcctggcggatctctgagactgtcttgtgccgcctctggcttcgccagcgactactatatcatcggctggttcagacaggcccctggcaaagagagagagggcgtcagctgtatcagcagcagatacgccaacaccaactacgccgacagcgtgaagggcagattcaccatcagccgggacaacgccaagaacaccgtgtacctccagatgaacagcctgaagcctgaggacaccgccgtgtactactgtgccgccgacaccagaagatacacctgtcctgacattgccaccatgcaccggaacttcgattcttggggccagggcacactggtcaccgtttcttctggtaccggcggaggcggatctggcggcggaggtagcggtggcggaggatctgaattcgacatcgtgatgacacagagccctgatagcctggccgtgtctctgggagagagagccaccattaactgcaaggccagccagagcgtggactacgacggcgacagcttcctgaactggtatcagcagaagcccggccagcctcctaagctgctgatctacgccgccagcaatctggaaagcggcgtgccaagcagattttccggctctggcagcggcaccgatttcaccctgacaatatccagcctccagcctgaggacgtggccgtgtactactgccagcagagcaacgacgaccctctgacctttggacagggcaccaaggtggaaatcaaactcgagatccagaaccctgatcctgccgtgtaccagctgcgggatagcaagagcagcgacaagagcgtgtgtctgttcaccgacttcgacagccagaccaacgtgtcccagagcaaggactccgacgtgtacatcaccgataagtgcgtgctggacatgcggagcatggacttcaagagcaactccgccgtggcctggtccaacaagtccgatttcgcctgcgccaacgccttcaacaacagcattatccccgaggacacattcttcccaagccccgagagcagctgcggctttaccagcgagagctaccagcagggcgtgctgagcgccaccatcctgtacgagatcctgctgggcaaggccaccctgtacgccgtgctggtgtctgccctggtgctgatggctatggtcaagcggaaggacagccggggaagggccaagcgatctggatctggagcaacaaacttctcactactcaaacaagcaggtgacgtggaggagaatcccgggcctactagtatggactggatttggcgcatccttttccttgtcggcgctgctaccggcgcgcattccttcgaagtccaacttgtggagtctggagggggcctggtgcagcccggcggctctctcagactgtcttgtgcggcaagcggctacaccttcagctcttactggatagaatgggtgaggcaggcacctggaaagggactggagtggattggagagattctgccaggagggggagatacaaattacaatgaaatcttcaaggggcgggccaccttttcagcggataccagcaagaatacagcttacctgcagatgaatagcctccgggcagaagataccgctgtttattattgcacgagacgggtgccaataagactggactattgggggcaagggactcttgtcaccgtcagttcaacgcgtgacctgaagaacgtgttcccacctgaggtggccgtgttcgagcctagcgaggccgagatcagccacacccagaaagccaccctcgtgtgcctggctaccggcttctaccccgaccatgtggaactgtcttggtgggtcaacggcaaagaggtgcacagcggcgtgtgtaccgacccccagccactgaaagaacagcccgccctgaacgacagccggtactgcctgagcagcagactgagagtgtccgccaccttctggcagaacccccggaaccacttcagatgccaggtgcagttctacggcctgagcgagaacgacgagtggacccaggacagagccaagcccgtgacccagatcgtgtctgccgaagcctggggcagagccgattgcgacgtgaagctggtggaaaagagcttcgagacagacaccaacctgaacttccagaacctgagcgtgatcggcttcagaatcctgctgctgaaagtggccggctttaacctgctgatgaccctgcggctgtggtccagc

SEQ ID NO: 6251 - DNA, 2301 bp, synthetic construct
  source 1..2301: mol_type = other DNA
atggccttaccagtgaccgccttgctcctgccgctggccttgctgctccacgccgccaggccggaagtgcagctggttgaatctggcggaggactggttcagcctggcggatctctgagactgagctgtgaagccagcggcttcgccagcgacgattacatcatcggctggttcagacaggcccctggcaaagagagagagggcgtcagctgcatcagctctaagtacgccaacaccgtgtacaccgacagcgtgaagggcagattcagactgagcagaggcaccgccaagaataccgtgtacctccagatgagcgccctgaagcctgaggataccgccgtgtactactgcgctatggacagccgcagagtgacatgccctgagatcagcaccatgcaccggaacttcgattcttggggccagggcacactggtcacagtgtcatctggtaccggcggaggcggatctggcggcggaggtagcggtggcggaggatctgaattcgacatcgtgatgacacagagccctgatagcctggccgtgtctctgggagagagagccaccattaactgcaaggccagccagagcgtggactacgacggcgacagcttcctgaactggtatcagcagaagcccggccagcctcctaagctgctgatctacgccgccagcaatctggaaagcggcgtgccaagcagattttccggctctggcagcggcaccgatttcaccctgacaatatccagcctccagcctgaggacgtggccgtgtactactgccagcagagcaacgacgaccctctgacctttggacagggcaccaaggtggaaatcaaactcgagatccagaaccctgatcctgccgtgtaccagctgcgggatagcaagagcagcgacaagagcgtgtgtctgttcaccgacttcgacagccagaccaacgtgtcccagagcaaggactccgacgtgtacatcaccgataagtgcgtgctggacatgcggagcatggacttcaagagcaactccgccgtggcctggtccaacaagtccgatttcgcctgcgccaacgccttcaacaacagcattatccccgaggacacattcttcccaagccccgagagcagctgcggctttaccagcgagagctaccagcagggcgtgctgagcgccaccatcctgtacgagatcctgctgggcaaggccaccctgtacgccgtgctggtgtctgccctggtgctgatggctatggtcaagcggaaggacagccggggaagggccaagcgatctggatctggagcaacaaacttctcactactcaaacaagcaggtgacgtggaggagaatcccgggcctactagtatggactggatttggcgcatccttttccttgtcggcgctgctaccggcgcgcattccttcgaagtccaacttgtggagtctggagggggcctggtgcagcccggcggctctctcagactgtcttgtgcggcaagcggctacaccttcagctcttactggatagaatgggtgaggcaggcacctggaaagggactggagtggattggagagattctgccaggagggggagatacaaattacaatgaaatcttcaaggggcgggccaccttttcagcggataccagcaagaatacagcttacctgcagatgaatagcctccgggcagaagataccgctgtttattattgcacgagacgggtgccaataagactggactattgggggcaagggactcttgtcaccgtcagttcaacgcgtgacctgaagaacgtgttcccacctgaggtggccgtgttcgagcctagcgaggccgagatcagccacacccagaaagccaccctcgtgtgcctggctaccggcttctaccccgaccatgtggaactgtcttggtgggtcaacggcaaagaggtgcacagcggcgtgtgtaccgacccccagccactgaaagaacagcccgccctgaacgacagccggtactgcctgagcagcagactgagagtgtccgccaccttctggcagaacccccggaaccacttcagatgccaggtgcagttctacggcctgagcgagaacgacgagtggacccaggacagagccaagcccgtgacccagatcgtgtctgccgaagcctggggcagagccgattgcgacgtgaagctggtggaaaagagcttcgagacagacaccaacctgaacttccagaacctgagcgtgatcggcttcagaatcctgctgctgaaagtggccggctttaacctgctgatgaccctgcggctgtggtccagc

SEQ ID NO: 6252 - DNA, 2274 bp, synthetic construct
  source 1..2274: mol_type = other DNA
atggccttaccagtgaccgccttgctcctgccgctggccttgctgctccacgccgccaggccgcaagtcaaactggaagaaagcggtggcggcctggtgcaacctggcgaatctctgagactgagctgtagcgccagcggctccatcttcaaggtgttcagagtgttcgccatgagctggtacaggcaaggccctggcaagcagagagagctggtcgcctctatcagcagcggcgagacaaccacatacgccgaatctgtgaaaggccggttcaccatcagccgggataatgccaagaataccgcctatctccagatggactccctgaagcctgaagatacagctgtgtactactgcaacgccgaccataccttcaccggcgatttttggggccagggaacccaagtgaccgtgtctagtggtaccggcggaggcggatctggcggcggaggtagcggtggcggaggatctgaattcgacatcgtgatgacacagagccctgatagcctggccgtgtctctgggagagagagccaccattaactgcaaggccagccagagcgtggactacgacggcgacagcttcctgaactggtatcagcagaagcccggccagcctcctaagctgctgatctacgccgccagcaatctggaaagcggcgtgccaagcagattttccggctctggcagcggcaccgatttcaccctgacaatatccagcctccagcctgaggacgtggccgtgtactactgccagcagagcaacgacgaccctctgacctttggacagggcaccaaggtggaaatcaaactcgagatccagaaccctgatcctgccgtgtaccagctgcgggatagcaagagcagcgacaagagcgtgtgtctgttcaccgacttcgacagccagaccaacgtgtcccagagcaaggactccgacgtgtacatcaccgataagtgcgtgctggacatgcggagcatggacttcaagagcaactccgccgtggcctggtccaacaagtccgatttcgcctgcgccaacgccttcaacaacagcattatccccgaggacacattcttcccaagccccgagagcagctgcggctttaccagcgagagctaccagcagggcgtgctgagcgccaccatcctgtacgagatcctgctgggcaaggccaccctgtacgccgtgctggtgtctgccctggtgctgatggctatggtcaagcggaaggacagccggggaagggccaagcgatctggatctggagcaacaaacttctcactactcaaacaagcaggtgacgtggaggagaatcccgggcctactagtatggactggatttggcgcatccttttccttgtcggcgctgctaccggcgcgcattccttcgaagtccaacttgtggagtctggagggggcctggtgcagcccggcggctctctcagactgtcttgtgcggcaagcggctacaccttcagctcttactggatagaatgggtgaggcaggcacctggaaagggactggagtggattggagagattctgccaggagggggagatacaaattacaatgaaatcttcaaggggcgggccaccttttcagcggataccagcaagaatacagcttacctgcagatgaatagcctccgggcagaagataccgctgtttattattgcacgagacgggtgccaataagactggactattgggggcaagggactcttgtcaccgtcagttcaacgcgtgacctgaagaacgtgttcccacctgaggtggccgtgttcgagcctagcgaggccgagatcagccacacccagaaagccaccctcgtgtgcctggctaccggcttctaccccgaccatgtggaactgtcttggtgggtcaacggcaaagaggtgcacagcggcgtgtgtaccgacccccagccactgaaagaacagcccgccctgaacgacagccggtactgcctgagcagcagactgagagtgtccgccaccttctggcagaacccccggaaccacttcagatgccaggtgcagttctacggcctgagcgagaacgacgagtggacccaggacagagccaagcccgtgacccagatcgtgtctgccgaagcctggggcagagccgattgcgacgtgaagctggtggaaaagagcttcgagacagacaccaacctgaacttccagaacctgagcgtgatcggcttcagaatcctgctgctgaaagtggccggctttaacctgctgatgaccctgcggctgtggtccagc

SEQ ID NO: 6253 - DNA, 2280 bp, synthetic construct
  source 1..2280: mol_type = other DNA
atggccttaccagtgaccgccttgctcctgccgctggccttgctgctccacgccgccaggccggacatcgtgatgacacagagccctgatagcctggccgtgtctctgggagagagagccaccattaactgcaaggccagccagagcgtggactacgacggcgacagcttcctgaactggtatcagcagaagcccggccagcctcctaagctgctgatctacgccgccagcaatctggaaagcggcgtgccaagcagattttccggctctggcagcggcaccgatttcaccctgacaatatccagcctccagcctgaggacgtggccgtgtactactgccagcagagcaacgacgaccctctgacctttggacagggcaccaaggtggaaatcaaactcgaggacctgaagaacgtgttcccacctgaggtggccgtgttcgagcctagcgaggccgagatcagccacacccagaaagccaccctcgtgtgcctggctaccggcttctaccccgaccatgtggaactgtcttggtgggtcaacggcaaagaggtgcacagcggcgtgtgtaccgacccccagccactgaaagaacagcccgccctgaacgacagccggtactgcctgagcagcagactgagagtgtccgccaccttctggcagaacccccggaaccacttcagatgccaggtgcagttctacggcctgagcgagaacgacgagtggacccaggacagagccaagcccgtgacccagatcgtgtctgccgaagcctggggcagagccgattgcgacgtgaagctggtggaaaagagcttcgagacagacaccaacctgaacttccagaacctgagcgtgatcggcttcagaatcctgctgctgaaagtggccggctttaacctgctgatgaccctgcggctgtggtccagcagggccaagcgatctggatctggagcaacaaacttctcactactcaaacaagcaggtgacgtggaggagaatcccgggcctactagtgccaccatggactggatttggcgcatccttttccttgtcggcgctgctaccggcgcccattccgggcccgaagtgcagctggttgaatctggcggaggactggttcaggctggcggatctctgagactgtcttgtgccgccagcggcagaacctttagcatgggctggtttagacaggcccctggcaaagagagagagttcgtcgccgccatcacatactctggcggcagcccttactacgccgactctgtgaagggcagattcaccatcagccgggacaacgccaagaacaccgtgtacctccagatgaacagcctgaagcctgaggacaccgccgtgtactactgcgccgccaatccaacatacggcagcgactggaacgccgagaattggggccagggaacccaagtgacagtgtctagcggatccggcggcggaggatctggcggaggcggatctgggggcggaggctctttcgaagtccaacttgtggagtctggagggggcctggtgcagcccggcggctctctcagactgtcttgtgcggcaagcggctacaccttcagctcttactggatagaatgggtgaggcaggcacctggaaagggactggagtggattggagagattctgccaggagggggagatacaaattacaatgaaatcttcaaggggcgggccaccttttcagcggataccagcaagaatacagcttacctgcagatgaatagcctccgggcagaagataccgctgtttattattgcacgagacgggtgccaataagactggactattgggggcaagggactcttgtcaccgtcagttcaacgcgtatccagaaccctgatcctgccgtgtaccagctgcgggatagcaagagcagcgacaagagcgtgtgtctgttcaccgacttcgacagccagaccaacgtgtcccagagcaaggactccgacgtgtacatcaccgataagtgcgtgctggacatgcggagcatggacttcaagagcaactccgccgtggcctggtccaacaagtccgatttcgcctgcgccaacgccttcaacaacagcattatccccgaggacacattcttcccaagccccgagagcagctgcggctttaccagcgagagctaccagcagggcgtgctgagcgccaccatcctgtacgagatcctgctgggcaaggccaccctgtacgccgtgctggtgtctgccctggtgctgatggctatggtcaagcggaaggacagccggggataa

SEQ ID NO: 6254 - DNA, 2283 bp, synthetic construct
  source 1..2283: mol_type = other DNA
atggccttaccagtgaccgccttgctcctgccgctggccttgctgctccacgccgccaggccggacatcgtgatgacacagagccctgatagcctggccgtgtctctgggagagagagccaccattaactgcaaggccagccagagcgtggactacgacggcgacagcttcctgaactggtatcagcagaagcccggccagcctcctaagctgctgatctacgccgccagcaatctggaaagcggcgtgccaagcagattttccggctctggcagcggcaccgatttcaccctgacaatatccagcctccagcctgaggacgtggccgtgtactactgccagcagagcaacgacgaccctctgacctttggacagggcaccaaggtggaaatcaaactcgaggacctgaagaacgtgttcccacctgaggtggccgtgttcgagcctagcgaggccgagatcagccacacccagaaagccaccctcgtgtgcctggctaccggcttctaccccgaccatgtggaactgtcttggtgggtcaacggcaaagaggtgcacagcggcgtgtgtaccgacccccagccactgaaagaacagcccgccctgaacgacagccggtactgcctgagcagcagactgagagtgtccgccaccttctggcagaacccccggaaccacttcagatgccaggtgcagttctacggcctgagcgagaacgacgagtggacccaggacagagccaagcccgtgacccagatcgtgtctgccgaagcctggggcagagccgattgcgacgtgaagctggtggaaaagagcttcgagacagacaccaacctgaacttccagaacctgagcgtgatcggcttcagaatcctgctgctgaaagtggccggctttaacctgctgatgaccctgcggctgtggtccagcagggccaagcgatctggatctggagcaacaaacttctcactactcaaacaagcaggtgacgtggaggagaatcccgggcctactagtgccaccatggactggatttggcgcatccttttccttgtcggcgctgctaccggcgcccattccgggcccgaagtgcaactggtggaatctgggggcggactggtgcagccaggcggaagtctgaggctgtcttgtgccgcctccggcagcatcttcggcttcaacgacatggcctggtatcggcaggctcccggaaaacagcgcgagctggtggctctgattagcagagtgggcgtgaccagcagcgccgactctgtgaagggcagattcacaatctccagagtgaacgccaaggatacagtgtacctccagatgaactctctgaaacctgaggatacagcagtgtactattgctacatggaccagcggctggacggcagcacactggcctactggggacagggaactcaagtgacagtgtctagcggatccggcggcggaggatctggcggaggcggatctgggggcggaggctctttcgaagtccaacttgtggagtctggagggggcctggtgcagcccggcggctctctcagactgtcttgtgcggcaagcggctacaccttcagctcttactggatagaatgggtgaggcaggcacctggaaagggactggagtggattggagagattctgccaggagggggagatacaaattacaatgaaatcttcaaggggcgggccaccttttcagcggataccagcaagaatacagcttacctgcagatgaatagcctccgggcagaagataccgctgtttattattgcacgagacgggtgccaataagactggactattgggggcaagggactcttgtcaccgtcagttcaacgcgtatccagaaccctgatcctgccgtgtaccagctgcgggatagcaagagcagcgacaagagcgtgtgtctgttcaccgacttcgacagccagaccaacgtgtcccagagcaaggactccgacgtgtacatcaccgataagtgcgtgctggacatgcggagcatggacttcaagagcaactccgccgtggcctggtccaacaagtccgatttcgcctgcgccaacgccttcaacaacagcattatccccgaggacacattcttcccaagccccgagagcagctgcggctttaccagcgagagctaccagcagggcgtgctgagcgccaccatcctgtacgagatcctgctgggcaaggccaccctgtacgccgtgctggtgtctgccctggtgctgatggctatggtcaagcggaaggacagccggggataa

SEQ ID NO: 6255 - DNA, 2271 bp, synthetic construct
  source 1..2271: mol_type = other DNA
atggccttaccagtgaccgccttgctcctgccgctggccttgctgctccacgccgccaggccggacatcgtgatgacacagagccctgatagcctggccgtgtctctgggagagagagccaccattaactgcaaggccagccagagcgtggactacgacggcgacagcttcctgaactggtatcagcagaagcccggccagcctcctaagctgctgatctacgccgccagcaatctggaaagcggcgtgccaagcagattttccggctctggcagcggcaccgatttcaccctgacaatatccagcctccagcctgaggacgtggccgtgtactactgccagcagagcaacgacgaccctctgacctttggacagggcaccaaggtggaaatcaaactcgaggacctgaagaacgtgttcccacctgaggtggccgtgttcgagcctagcgaggccgagatcagccacacccagaaagccaccctcgtgtgcctggctaccggcttctaccccgaccatgtggaactgtcttggtgggtcaacggcaaagaggtgcacagcggcgtgtgtaccgacccccagccactgaaagaacagcccgccctgaacgacagccggtactgcctgagcagcagactgagagtgtccgccaccttctggcagaacccccggaaccacttcagatgccaggtgcagttctacggcctgagcgagaacgacgagtggacccaggacagagccaagcccgtgacccagatcgtgtctgccgaagcctggggcagagccgattgcgacgtgaagctggtggaaaagagcttcgagacagacaccaacctgaacttccagaacctgagcgtgatcggcttcagaatcctgctgctgaaagtggccggctttaacctgctgatgaccctgcggctgtggtccagcagggccaagcgatctggatctggagcaacaaacttctcactactcaaacaagcaggtgacgtggaggagaatcccgggcctactagtgccaccatggactggatttggcgcatccttttccttgtcggcgctgctaccggcgcccattccgggcccgaggtgcagctggttgaatctggcggaggactggttcaggctggcggatctctgagactgtcttgtgccgccagcggctctgtgttcagcggcaatgtgatgggctggtacagacaggcccctggcaaagaaagagagtgggttgccgccattgccagcggcggcagcatctactacagagactctgtgaagggcagattcaccatcagccgggacaacgccaagaacaccgtgtacctccagatgaacagcctgaagcctgaggacaccgccgtgtactactgcaactctcaccctcctacactgccctattggggcctgggaacccaagtgacagtgtcctctggatccggcggcggaggatctggcggaggcggatctgggggcggaggctctttcgaagtccaacttgtggagtctggagggggcctggtgcagcccggcggctctctcagactgtcttgtgcggcaagcggctacaccttcagctcttactggatagaatgggtgaggcaggcacctggaaagggactggagtggattggagagattctgccaggagggggagatacaaattacaatgaaatcttcaaggggcgggccaccttttcagcggataccagcaagaatacagcttacctgcagatgaatagcctccgggcagaagataccgctgtttattattgcacgagacgggtgccaataagactggactattgggggcaagggactcttgtcaccgtcagttcaacgcgtatccagaaccctgatcctgccgtgtaccagctgcgggatagcaagagcagcgacaagagcgtgtgtctgttcaccgacttcgacagccagaccaacgtgtcccagagcaaggactccgacgtgtacatcaccgataagtgcgtgctggacatgcggagcatggacttcaagagcaactccgccgtggcctggtccaacaagtccgatttcgcctgcgccaacgccttcaacaacagcattatccccgaggacacattcttcccaagccccgagagcagctgcggctttaccagcgagagctaccagcagggcgtgctgagcgccaccatcctgtacgagatcctgctgggcaaggccaccctgtacgccgtgctggtgtctgccctggtgctgatggctatggtcaagcggaaggacagccggggataa

SEQ ID NO: 6256 - DNA, 2265 bp, synthetic construct
  source 1..2265: mol_type = other DNA
atggccttaccagtgaccgccttgctcctgccgctggccttgctgctccacgccgccaggccggacatcgtgatgacacagagccctgatagcctggccgtgtctctgggagagagagccaccattaactgcaaggccagccagagcgtggactacgacggcgacagcttcctgaactggtatcagcagaagcccggccagcctcctaagctgctgatctacgccgccagcaatctggaaagcggcgtgccaagcagattttccggctctggcagcggcaccgatttcaccctgacaatatccagcctccagcctgaggacgtggccgtgtactactgccagcagagcaacgacgaccctctgacctttggacagggcaccaaggtggaaatcaaactcgaggacctgaagaacgtgttcccacctgaggtggccgtgttcgagcctagcgaggccgagatcagccacacccagaaagccaccctcgtgtgcctggctaccggcttctaccccgaccatgtggaactgtcttggtgggtcaacggcaaagaggtgcacagcggcgtgtgtaccgacccccagccactgaaagaacagcccgccctgaacgacagccggtactgcctgagcagcagactgagagtgtccgccaccttctggcagaacccccggaaccacttcagatgccaggtgcagttctacggcctgagcgagaacgacgagtggacccaggacagagccaagcccgtgacccagatcgtgtctgccgaagcctggggcagagccgattgcgacgtgaagctggtggaaaagagcttcgagacagacaccaacctgaacttccagaacctgagcgtgatcggcttcagaatcctgctgctgaaagtggccggctttaacctgctgatgaccctgcggctgtggtccagcagggccaagcgatctggatctggagcaacaaacttctcactactcaaacaagcaggtgacgtggaggagaatcccgggcctactagtgccaccatggactggatttggcgcatccttttccttgtcggcgctgctaccggcgcccattccgggcccgaagttcagctgctggaatctggcggaggactcgttcaacctggcggctctctgagactgagctgtgccgcttctggcttcagcttctctagctacgccctgagctgggttcgacaagctcccggaaagggccttgaatgggtgtccagcatcggcgagaatgacggcaccacagactatgccgatgccgtgaaaggccggtttaccatcagcagagacaattccaagaacacgctctatctgcaaatgaactccctgcgcgtggaagatacagccgtgtattattgcgtgaaggacggcatccactggggacagggaaccctggttacagtgtctagcggatccggcggcggaggatctggcggaggcggatctgggggcggaggctctttcgaagtccaacttgtggagtctggagggggcctggtgcagcccggcggctctctcagactgtcttgtgcggcaagcggctacaccttcagctcttactggatagaatgggtgaggcaggcacctggaaagggactggagtggattggagagattctgccaggagggggagatacaaattacaatgaaatcttcaaggggcgggccaccttttcagcggataccagcaagaatacagcttacctgcagatgaatagcctccgggcagaagataccgctgtttattattgcacgagacgggtgccaataagactggactattgggggcaagggactcttgtcaccgtcagttcaacgcgtatccagaaccctgatcctgccgtgtaccagctgcgggatagcaagagcagcgacaagagcgtgtgtctgttcaccgacttcgacagccagaccaacgtgtcccagagcaaggactccgacgtgtacatcaccgataagtgcgtgctggacatgcggagcatggacttcaagagcaactccgccgtggcctggtccaacaagtccgatttcgcctgcgccaacgccttcaacaacagcattatccccgaggacacattcttcccaagccccgagagcagctgcggctttaccagcgagagctaccagcagggcgtgctgagcgccaccatcctgtacgagatcctgctgggcaaggccaccctgtacgccgtgctggtgtctgccctggtgctgatggctatggtcaagcggaaggacagccggggataa

SEQ ID NO: 6257 - DNA, 3372 bp, synthetic construct
  source 1..3372: mol_type = other DNA
atgggacccagactgctgttttgggctctgctgtgtctgctcggcacaggacctgttgaagctggcgtgacacagagccccacacacctgattaagaccagaggccagcaggccacactgagatgcagccctatcagcggccacaccagcgtgtactggtatcagcaggctctcggactgggcctccagttcctgctttggtacgacgagggcgaagagagaaaccggggcaacttccctcctcggttttccggcagacagttccccaactacagcagcgagctgaacgtgaacgccctggaactggaagatagcgccctgtacctgtgtgcctcttctcttggtggacctcgcggactggctggactgagaggggatgagcagtttttcggccctggcaccagactgaccgtgctggaaggtaccggcggaggcggatctggcggcggagaattcgacatcgtgatgacacagagccctgatagcctggccgtgtctctgggagagagagccaccattaactgcaaggccagccagagcgtggactacgacggcgacagcttcctgaactggtatcagcagaagcccggccagcctcctaagctgctgatctacgccgccagcaatctggaaagcggcgtgccaagcagattttccggctctggcagcggcaccgatttcaccctgacaatatccagcctccagcctgaggacgtggccgtgtactactgccagcagagcaacgacgaccctctgacctttggacagggcaccaaggtggaaatcaaactcgaggacctgaagaacgtgttcccacctgaggtggccgtgttcgagcctagcgaggccgagatcagccacacccagaaagccaccctcgtgtgcctggctaccggcttctaccccgaccatgtggaactgtcttggtgggtcaacggcaaagaggtgcacagcggcgtgtgtaccgacccccagccactgaaagaacagcccgccctgaacgacagccggtactgcctgagcagcagactgagagtgtccgccaccttctggcagaacccccggaaccacttcagatgccaggtgcagttctacggcctgagcgagaacgacgagtggacccaggacagagccaagcccgtgacccagatcgtgtctgccgaagcctggggcagagccgattgcgacgtgaagctggtggaaaagagcttcgagacagacaccaacctgaacttccagaacctgagcgtgatcggcttcagaatcctgctgctgaaagtggccggctttaacctgctgatgaccctgcggctgtggtccagcagggccaagcgatctggatctggagcaacaaacttctcactactcaaacaagcaggtgacgtggaggagaatcccgggcctactagtgccaccatggactggatttggcgcatccttttccttgtcggcgctgctaccggcgcccattccgggcccgaagtgcagctggttgaatctggcggaggactggttcaggctggcggatctctgagactgtcttgtgccgccagcggcagaacctttagcatgggctggtttagacaggcccctggcaaagagagagagttcgtcgccgccatcacatactctggcggcagcccttactacgccgactctgtgaagggcagattcaccatcagccgggacaacgccaagaacaccgtgtacctccagatgaacagcctgaagcctgaggacaccgccgtgtactactgcgccgccaatccaacatacggcagcgactggaacgccgagaattggggccagggaacccaagtgacagtgtctagcggatccggcggcggaggatctggcggaggcggatctgggggcggaggctctttcgaagtccaacttgtggagtctggagggggcctggtgcagcccggcggctctctcagactgtcttgtgcggcaagcggctacaccttcagctcttactggatagaatgggtgaggcaggcacctggaaagggactggagtggattggagagattctgccaggagggggagatacaaattacaatgaaatcttcaaggggcgggccaccttttcagcggataccagcaagaatacagcttacctgcagatgaatagcctccgggcagaagataccgctgtttattattgcacgagacgggtgccaataagactggactattgggggcaagggactcttgtcaccgtcagttcaacgcgtatccagaaccctgatcctgccgtgtaccagctgcgggatagcaagagcagcgacaagagcgtgtgtctgttcaccgacttcgacagccagaccaacgtgtcccagagcaaggactccgacgtgtacatcaccgataagtgcgtgctggacatgcggagcatggacttcaagagcaactccgccgtggcctggtccaacaagtccgatttcgcctgcgccaacgccttcaacaacagcattatccccgaggacacattcttcccaagccccgagagcagctgcggctttaccagcgagagctaccagcagggcgtgctgagcgccaccatcctgtacgagatcctgctgggcaaggccaccctgtacgccgtgctggtgtctgccctggtgctgatggctatggtcaagcggaaggacagccggggacgcgccaagagaagcggatctggcgtgaagcagaccctgaatttcgacctgctgaagctggctggcgacgtggaatccaacccaggcccttctagaggccatatgaccgagtacaagcccacggtgcgcctcgccacccgcgacgacgtccccagggccgtacgcaccctcgccgccgcgttcgccgactaccccgccacgcgccacaccgtcgatccggaccgccacatcgagcgggtcaccgagctgcaagaactcttcctcacgcgcgtcgggctcgacatcggcaaggtgtgggtcgcggacgacggcgccgcggtggcggtctggaccacgccggagagcgtcgaagcgggggcggtgttcgccgagatcggcccgcgcatggccgagttgagcggttcccggctggccgcgcagcaacagatggaaggcctcctggcgccgcaccggcccaaggagcccgcgtggttcctggccaccgtcggcgtctcgcccgaccaccagggcaagggtctgggcagcgccgtcgtgctccccggagtggaggcggccgagcgcgccggggtgcccgccttcctggagacctccgcgccccgcaacctccccttctacgagcggctcggcttcaccgtcaccgccgacgtcgaggtgcccgaaggaccgcgcacctggtgcatgacccgcaagcccggtgcctga

SEQ ID NO: 6258 - DNA, 3369 bp, synthetic construct
  source 1..3369: mol_type = other DNA
atgggacccagactgctgttttgggctctgctgtgtctgctcggcacaggacctgttgaagctggcgtgacacagagccccacacacctgattaagaccagaggccagcaggccacactgagatgcagccctatcagcggccacaccagcgtgtactggtatcagcaggctctcggactgggcctccagttcctgctttggtacgacgagggcgaagagagaaaccggggcaacttccctcctcggttttccggcagacagttccccaactacagcagcgagctgaacgtgaacgccctggaactggaagatagcgccctgtacctgtgtgccagctctctcggcggagatgaactgggagccgatggcaacgagcagttctttggccctggcaccagactgaccgtgctggaaggtaccggcggaggcggatctggcggcggaagcgaattcgacatcgtgatgacacagagccctgatagcctggccgtgtctctgggagagagagccaccattaactgcaaggccagccagagcgtggactacgacggcgacagcttcctgaactggtatcagcagaagcccggccagcctcctaagctgctgatctacgccgccagcaatctggaaagcggcgtgccaagcagattttccggctctggcagcggcaccgatttcaccctgacaatatccagcctccagcctgaggacgtggccgtgtactactgccagcagagcaacgacgaccctctgacctttggacagggcaccaaggtggaaatcaaactcgaggacctgaagaacgtgttcccacctgaggtggccgtgttcgagcctagcgaggccgagatcagccacacccagaaagccaccctcgtgtgcctggctaccggcttctaccccgaccatgtggaactgtcttggtgggtcaacggcaaagaggtgcacagcggcgtgtgtaccgacccccagccactgaaagaacagcccgccctgaacgacagccggtactgcctgagcagcagactgagagtgtccgccaccttctggcagaacccccggaaccacttcagatgccaggtgcagttctacggcctgagcgagaacgacgagtggacccaggacagagccaagcccgtgacccagatcgtgtctgccgaagcctggggcagagccgattgcgacgtgaagctggtggaaaagagcttcgagacagacaccaacctgaacttccagaacctgagcgtgatcggcttcagaatcctgctgctgaaagtggccggctttaacctgctgatgaccctgcggctgtggtccagcagggccaagcgatctggatctggagcaacaaacttctcactactcaaacaagcaggtgacgtggaggagaatcccgggcctactagtgccaccatggactggatttggcgcatccttttccttgtcggcgctgctaccggcgcccattccgggcccgaagtgcagctggttgaatctggcggaggactggttcaggctggcggatctctgagactgtcttgtgccgccagcggcagaacctttagcatgggctggtttagacaggcccctggcaaagagagagagttcgtcgccgccatcacatactctggcggcagcccttactacgccgactctgtgaagggcagattcaccatcagccgggacaacgccaagaacaccgtgtacctccagatgaacagcctgaagcctgaggacaccgccgtgtactactgcgccgccaatccaacatacggcagcgactggaacgccgagaattggggccagggaacccaagtgacagtgtctagcggatccggcggcggaggatctggcggaggcggatctgggggcggaggctctttcgaagtccaacttgtggagtctggagggggcctggtgcagcccggcggctctctcagactgtcttgtgcggcaagcggctacaccttcagctcttactggatagaatgggtgaggcaggcacctggaaagggactggagtggattggagagattctgccaggagggggagatacaaattacaatgaaatcttcaaggggcgggccaccttttcagcggataccagcaagaatacagcttacctgcagatgaatagcctccgggcagaagataccgctgtttattattgcacgagacgggtgccaataagactggactattgggggcaagggactcttgtcaccgtcagttcaacgcgtatccagaaccctgatcctgccgtgtaccagctgcgggatagcaagagcagcgacaagagcgtgtgtctgttcaccgacttcgacagccagaccaacgtgtcccagagcaaggactccgacgtgtacatcaccgataagtgcgtgctggacatgcggagcatggacttcaagagcaactccgccgtggcctggtccaacaagtccgatttcgcctgcgccaacgccttcaacaacagcattatccccgaggacacattcttcccaagccccgagagcagctgcggctttaccagcgagagctaccagcagggcgtgctgagcgccaccatcctgtacgagatcctgctgggcaaggccaccctgtacgccgtgctggtgtctgccctggtgctgatggctatggtcaagcggaaggacagccggggacgcgccaagagaagcggatctggcgtgaagcagaccctgaatttcgacctgctgaagctggctggcgacgtggaatccaacccaggcccttctagaggccatatgaccgagtacaagcccacggtgcgcctcgccacccgcgacgacgtccccagggccgtacgcaccctcgccgccgcgttcgccgactaccccgccacgcgccacaccgtcgatccggaccgccacatcgagcgggtcaccgagctgcaagaactcttcctcacgcgcgtcgggctcgacatcggcaaggtgtgggtcgcggacgacggcgccgcggtggcggtctggaccacgccggagagcgtcgaagcgggggcggtgttcgccgagatcggcccgcgcatggccgagttgagcggttcccggctggccgcgcagcaacagatggaaggcctcctggcgccgcaccggcccaaggagcccgcgtggttcctggccaccgtcggcgtctcgcccgaccaccagggcaagggtctgggcagcgccgtcgtgctccccggagtggaggcggccgagcgcgccggggtgcccgccttcctggagacctccgcgccccgcaacctccccttctacgagcggctcggcttcaccgtcaccgccgacgtcgaggtgcccgaaggaccgcgcacctggtgcatgacccgcaagcccggtgcctga

SEQ ID NO: 6259 - DNA, 2844 bp, synthetic construct
  source 1..2844: mol_type = other DNA
atggccttaccagtgaccgccttgctcctgccgctggccttgctgctccacgccgccaggccggacatcgtgatgacacagagccctgatagcctggccgtgtctctgggagagagagccaccattaactgcaaggccagccagagcgtggactacgacggcgacagcttcctgaactggtatcagcagaagcccggccagcctcctaagctgctgatctacgccgccagcaatctggaaagcggcgtgccaagcagattttccggctctggcagcggcaccgatttcaccctgacaatatccagcctccagcctgaggacgtggccgtgtactactgccagcagagcaacgacgaccctctgacctttggacagggcaccaaggtggaaatcaaactcgaggacctgaagaacgtgttcccacctgaggtggccgtgttcgagcctagcgaggccgagatcagccacacccagaaagccaccctcgtgtgcctggctaccggcttctaccccgaccatgtggaactgtcttggtgggtcaacggcaaagaggtgcacagcggcgtgtgtaccgacccccagccactgaaagaacagcccgccctgaacgacagccggtactgcctgagcagcagactgagagtgtccgccaccttctggcagaacccccggaaccacttcagatgccaggtgcagttctacggcctgagcgagaacgacgagtggacccaggacagagccaagcccgtgacccagatcgtgtctgccgaagcctggggcagagccgattgcgacgtgaagctggtggaaaagagcttcgagacagacaccaacctgaacttccagaacctgagcgtgatcggcttcagaatcctgctgctgaaagtggccggctttaacctgctgatgaccctgcggctgtggtccagcagggccaagcgatctggatctggagcaacaaacttctcactactcaaacaagcaggtgacgtggaggagaatcccgggcctactagtgccaccatggactggatttggcgcatccttttccttgtcggcgctgctaccggcgcccattccgggcccatgggaagctggcttgagttctaccacagactcaacgccattgacagcaggctgtgggcacttggcggaagcgaagctgaactcgccgcttttgaaaaagaaattgccgctttcgagtccgagcttcaggcttacaaaggcaaagggaatcctgaggtcgagagcctgagagatcacgctgcccacattagagagtggttgcaggcataccggcacaatggatccggcggcggaggatctggcggaggcggatctgggggcggaggctctttcgaagtccaacttgtggagtctggagggggcctggtgcagcccggcggctctctcagactgtcttgtgcggcaagcggctacaccttcagctcttactggatagaatgggtgaggcaggcacctggaaagggactggagtggattggagagattctgccaggagggggagatacaaattacaatgaaatcttcaaggggcgggccaccttttcagcggataccagcaagaatacagcttacctgcagatgaatagcctccgggcagaagataccgctgtttattattgcacgagacgggtgccaataagactggactattgggggcaagggactcttgtcaccgtcagttcaacgcgtatccagaaccctgatcctgccgtgtaccagctgcgggatagcaagagcagcgacaagagcgtgtgtctgttcaccgacttcgacagccagaccaacgtgtcccagagcaaggactccgacgtgtacatcaccgataagtgcgtgctggacatgcggagcatggacttcaagagcaactccgccgtggcctggtccaacaagtccgatttcgcctgcgccaacgccttcaacaacagcattatccccgaggacacattcttcccaagccccgagagcagctgcggctttaccagcgagagctaccagcagggcgtgctgagcgccaccatcctgtacgagatcctgctgggcaaggccaccctgtacgccgtgctggtgtctgccctggtgctgatggctatggtcaagcggaaggacagccggggacgcgccaagagaagcggatctggcgtgaagcagaccctgaatttcgacctgctgaagctggctggcgacgtggaatccaacccaggcccttctagaggccatatgaccgagtacaagcccacggtgcgcctcgccacccgcgacgacgtccccagggccgtacgcaccctcgccgccgcgttcgccgactaccccgccacgcgccacaccgtcgatccggaccgccacatcgagcgggtcaccgagctgcaagaactcttcctcacgcgcgtcgggctcgacatcggcaaggtgtgggtcgcggacgacggcgccgcggtggcggtctggaccacgccggagagcgtcgaagcgggggcggtgttcgccgagatcggcccgcgcatggccgagttgagcggttcccggctggccgcgcagcaacagatggaaggcctcctggcgccgcaccggcccaaggagcccgcgtggttcctggccaccgtcggcgtctcgcccgaccaccagggcaagggtctgggcagcgccgtcgtgctccccggagtggaggcggccgagcgcgccggggtgcccgccttcctggagacctccgcgccccgcaacctccccttctacgagcggctcggcttcaccgtcaccgccgacgtcgaggtgcccgaaggaccgcgcacctggtgcatgacccgcaagcccggtgcctga

SEQ ID NO: 6260 - DNA, 2844 bp, synthetic construct
  source 1..2844: mol_type = other DNA
atggccttaccagtgaccgccttgctcctgccgctggccttgctgctccacgccgccaggccggcatgcatgggcagttggttcgagttctacgaccggctgaatgccatcgacgccagactgtgggctctcggaggatctgaagctgagctggccgccttcgagaaagagatcgccgcctttgagagcgagctgcaagcctacaaaggcaagggcaaccccgaggtggaaaacctgagagtgcacgccgctgccatcagagaatggctccaggcttacagacacaacggtaccggcggaggcggatctggcggcggaggtagcggtggcggaggatctgaattcgacatcgtgatgacacagagccctgatagcctggccgtgtctctgggagagagagccaccattaactgcaaggccagccagagcgtggactacgacggcgacagcttcctgaactggtatcagcagaagcccggccagcctcctaagctgctgatctacgccgccagcaatctggaaagcggcgtgccaagcagattttccggctctggcagcggcaccgatttcaccctgacaatatccagcctccagcctgaggacgtggccgtgtactactgccagcagagcaacgacgaccctctgacctttggacagggcaccaaggtggaaatcaaactcgaggacctgaagaacgtgttcccacctgaggtggccgtgttcgagcctagcgaggccgagatcagccacacccagaaagccaccctcgtgtgcctggctaccggcttctaccccgaccatgtggaactgtcttggtgggtcaacggcaaagaggtgcacagcggcgtgtgtaccgacccccagccactgaaagaacagcccgccctgaacgacagccggtactgcctgagcagcagactgagagtgtccgccaccttctggcagaacccccggaaccacttcagatgccaggtgcagttctacggcctgagcgagaacgacgagtggacccaggacagagccaagcccgtgacccagatcgtgtctgccgaagcctggggcagagccgattgcgacgtgaagctggtggaaaagagcttcgagacagacaccaacctgaacttccagaacctgagcgtgatcggcttcagaatcctgctgctgaaagtggccggctttaacctgctgatgaccctgcggctgtggtccagcagggccaagcgatctggatctggagcaacaaacttctcactactcaaacaagcaggtgacgtggaggagaatcccgggcctactagtatggactggatttggcgcatccttttccttgtcggcgctgctaccggcgcgcattccttcgaagtccaacttgtggagtctggagggggcctggtgcagcccggcggctctctcagactgtcttgtgcggcaagcggctacaccttcagctcttactggatagaatgggtgaggcaggcacctggaaagggactggagtggattggagagattctgccaggagggggagatacaaattacaatgaaatcttcaaggggcgggccaccttttcagcggataccagcaagaatacagcttacctgcagatgaatagcctccgggcagaagataccgctgtttattattgcacgagacgggtgccaataagactggactattgggggcaagggactcttgtcaccgtcagttcaacgcgtatccagaaccctgatcctgccgtgtaccagctgcgggatagcaagagcagcgacaagagcgtgtgtctgttcaccgacttcgacagccagaccaacgtgtcccagagcaaggactccgacgtgtacatcaccgataagtgcgtgctggacatgcggagcatggacttcaagagcaactccgccgtggcctggtccaacaagtccgatttcgcctgcgccaacgccttcaacaacagcattatccccgaggacacattcttcccaagccccgagagcagctgcggctttaccagcgagagctaccagcagggcgtgctgagcgccaccatcctgtacgagatcctgctgggcaaggccaccctgtacgccgtgctggtgtctgccctggtgctgatggctatggtcaagcggaaggacagccggggacgcgccaagagaagcggatctggcgtgaagcagaccctgaatttcgacctgctgaagctggctggcgacgtggaatccaacccaggcccttctagaggccatatgaccgagtacaagcccacggtgcgcctcgccacccgcgacgacgtccccagggccgtacgcaccctcgccgccgcgttcgccgactaccccgccacgcgccacaccgtcgatccggaccgccacatcgagcgggtcaccgagctgcaagaactcttcctcacgcgcgtcgggctcgacatcggcaaggtgtgggtcgcggacgacggcgccgcggtggcggtctggaccacgccggagagcgtcgaagcgggggcggtgttcgccgagatcggcccgcgcatggccgagttgagcggttcccggctggccgcgcagcaacagatggaaggcctcctggcgccgcaccggcccaaggagcccgcgtggttcctggccaccgtcggcgtctcgcccgaccaccagggcaagggtctgggcagcgccgtcgtgctccccggagtggaggcggccgagcgcgccggggtgcccgccttcctggagacctccgcgccccgcaacctccccttctacgagcggctcggcttcaccgtcaccgccgacgtcgaggtgcccgaaggaccgcgcacctggtgcatgacccgcaagcccggtgcctga

SEQ ID NO: 6261 - DNA, 3195 bp, synthetic construct
  source 1..3195: mol_type = other DNA
atggccttaccagtgaccgccttgctcctgccgctggccttgctgctccacgccgccaggccggcatgcatggaccccgacctggaaatcagagccgccttcctgcggcagagaaacacagccctgagaacagaggtggccgagctggaacaagaggtgcagcggctggaaaacgaggtgtcccagtacgagacaagatacggccctctcggaggcggaaaaggtaccggcggaggcggatctggcggcggaggtagcggtggcggaggatctgaattcgacatcgtgatgacacagagccctgatagcctggccgtgtctctgggagagagagccaccattaactgcaaggccagccagagcgtggactacgacggcgacagcttcctgaactggtatcagcagaagcccggccagcctcctaagctgctgatctacgccgccagcaatctggaaagcggcgtgccaagcagattttccggctctggcagcggcaccgatttcaccctgacaatatccagcctccagcctgaggacgtggccgtgtactactgccagcagagcaacgacgaccctctgacctttggacagggcaccaaggtggaaatcaaactcgaggacctgaagaacgtgttcccacctgaggtggccgtgttcgagcctagcgaggccgagatcagccacacccagaaagccaccctcgtgtgcctggctaccggcttctaccccgaccatgtggaactgtcttggtgggtcaacggcaaagaggtgcacagcggcgtgtgtaccgacccccagccactgaaagaacagcccgccctgaacgacagccggtactgcctgagcagcagactgagagtgtccgccaccttctggcagaacccccggaaccacttcagatgccaggtgcagttctacggcctgagcgagaacgacgagtggacccaggacagagccaagcccgtgacccagatcgtgtctgccgaagcctggggcagagccgattgcgacgtgaagctggtggaaaagagcttcgagacagacaccaacctgaacttccagaacctgagcgtgatcggcttcagaatcctgctgctgaaagtggccggctttaacctgctgatgaccctgcggctgtggtccagcagggccaagcgatctggatctggagcaacaaacttctcactactcaaacaagcaggtgacgtggaggagaatcccgggcctactagtgccaccatggactggatttggcgcatccttttccttgtcggcgctgctaccggcgcccattccgggcccgaagtgcagctggttgaatctggcggaggactggttcaggctggcggatctctgagactgtcttgtgccgccagcggcagaacctttagcatgggctggtttagacaggcccctggcaaagagagagagttcgtcgccgccatcacatactctggcggcagcccttactacgccgactctgtgaagggcagattcaccatcagccgggacaacgccaagaacaccgtgtacctccagatgaacagcctgaagcctgaggacaccgccgtgtactactgcgccgccaatccaacatacggcagcgactggaacgccgagaattggggccagggaacccaagtgacagtgtctagcggatccggcggcggaggatctggcggaggcggatctgggggcggaggctctttcgaagtccaacttgtggagtctggagggggcctggtgcagcccggcggctctctcagactgtcttgtgcggcaagcggctacaccttcagctcttactggatagaatgggtgaggcaggcacctggaaagggactggagtggattggagagattctgccaggagggggagatacaaattacaatgaaatcttcaaggggcgggccaccttttcagcggataccagcaagaatacagcttacctgcagatgaatagcctccgggcagaagataccgctgtttattattgcacgagacgggtgccaataagactggactattgggggcaagggactcttgtcaccgtcagttcaacgcgtatccagaaccctgatcctgccgtgtaccagctgcgggatagcaagagcagcgacaagagcgtgtgtctgttcaccgacttcgacagccagaccaacgtgtcccagagcaaggactccgacgtgtacatcaccgataagtgcgtgctggacatgcggagcatggacttcaagagcaactccgccgtggcctggtccaacaagtccgatttcgcctgcgccaacgccttcaacaacagcattatccccgaggacacattcttcccaagccccgagagcagctgcggctttaccagcgagagctaccagcagggcgtgctgagcgccaccatcctgtacgagatcctgctgggcaaggccaccctgtacgccgtgctggtgtctgccctggtgctgatggctatggtcaagcggaaggacagccggggacgcgccaagagaagcggatctggcgtgaagcagaccctgaatttcgacctgctgaagctggctggcgacgtggaatccaacccaggcccttctagaggccatatgaccgagtacaagcccacggtgcgcctcgccacccgcgacgacgtccccagggccgtacgcaccctcgccgccgcgttcgccgactaccccgccacgcgccacaccgtcgatccggaccgccacatcgagcgggtcaccgagctgcaagaactcttcctcacgcgcgtcgggctcgacatcggcaaggtgtgggtcgcggacgacggcgccgcggtggcggtctggaccacgccggagagcgtcgaagcgggggcggtgttcgccgagatcggcccgcgcatggccgagttgagcggttcccggctggccgcgcagcaacagatggaaggcctcctggcgccgcaccggcccaaggagcccgcgtggttcctggccaccgtcggcgtctcgcccgaccaccagggcaagggtctgggcagcgccgtcgtgctccccggagtggaggcggccgagcgcgccggggtgcccgccttcctggagacctccgcgccccgcaacctccccttctacgagcggctcggcttcaccgtcaccgccgacgtcgaggtgcccgaaggaccgcgcacctggtgcatgacccgcaagcccggtgcctga

SEQ ID NO: 6262 - DNA, 2844 bp, synthetic construct
  source 1..2844: mol_type = other DNA
atggccttaccagtgaccgccttgctcctgccgctggccttgctgctccacgccgccaggccggacatcgtgatgacacagagccctgatagcctggccgtgtctctgggagagagagccaccattaactgcaaggccagccagagcgtggactacgacggcgacagcttcctgaactggtatcagcagaagcccggccagcctcctaagctgctgatctacgccgccagcaatctggaaagcggcgtgccaagcagattttccggctctggcagcggcaccgatttcaccctgacaatatccagcctccagcctgaggacgtggccgtgtactactgccagcagagcaacgacgaccctctgacctttggacagggcaccaaggtggaaatcaaactcgaggacctgaagaacgtgttcccacctgaggtggccgtgttcgagcctagcgaggccgagatcagccacacccagaaagccaccctcgtgtgcctggctaccggcttctaccccgaccatgtggaactgtcttggtgggtcaacggcaaagaggtgcacagcggcgtgtgtaccgacccccagccactgaaagaacagcccgccctgaacgacagccggtactgcctgagcagcagactgagagtgtccgccaccttctggcagaacccccggaaccacttcagatgccaggtgcagttctacggcctgagcgagaacgacgagtggacccaggacagagccaagcccgtgacccagatcgtgtctgccgaagcctggggcagagccgattgcgacgtgaagctggtggaaaagagcttcgagacagacaccaacctgaacttccagaacctgagcgtgatcggcttcagaatcctgctgctgaaagtggccggctttaacctgctgatgaccctgcggctgtggtccagcagggccaagcgatctggatctggagcaacaaacttctcactactcaaacaagcaggtgacgtggaggagaatcccgggcctactagtgccaccatggactggatttggcgcatccttttccttgtcggcgctgctaccggcgcccattccgggcccatgggatcttggagcgagttttacgatcggctgcacgccattcaccaccggctgtatgctctcggaggaagcgaagctgagctggccgcttttgaaaaagaaattgccgctttcgagtccgagcttcaggcttacaaaggcaaagggaatcctgaggtcgaggccctgagagataccgccgccttcatcagaacccggttgcaggcataccggcacaacggatccggcggcggaggatctggcggaggcggatctgggggcggaggctctttcgaagtccaacttgtggagtctggagggggcctggtgcagcccggcggctctctcagactgtcttgtgcggcaagcggctacaccttcagctcttactggatagaatgggtgaggcaggcacctggaaagggactggagtggattggagagattctgccaggagggggagatacaaattacaatgaaatcttcaaggggcgggccaccttttcagcggataccagcaagaatacagcttacctgcagatgaatagcctccgggcagaagataccgctgtttattattgcacgagacgggtgccaataagactggactattgggggcaagggactcttgtcaccgtcagttcaacgcgtatccagaaccctgatcctgccgtgtaccagctgcgggatagcaagagcagcgacaagagcgtgtgtctgttcaccgacttcgacagccagaccaacgtgtcccagagcaaggactccgacgtgtacatcaccgataagtgcgtgctggacatgcggagcatggacttcaagagcaactccgccgtggcctggtccaacaagtccgatttcgcctgcgccaacgccttcaacaacagcattatccccgaggacacattcttcccaagccccgagagcagctgcggctttaccagcgagagctaccagcagggcgtgctgagcgccaccatcctgtacgagatcctgctgggcaaggccaccctgtacgccgtgctggtgtctgccctggtgctgatggctatggtcaagcggaaggacagccggggacgcgccaagagaagcggatctggcgtgaagcagaccctgaatttcgacctgctgaagctggctggcgacgtggaatccaacccaggcccttctagaggccatatgaccgagtacaagcccacggtgcgcctcgccacccgcgacgacgtccccagggccgtacgcaccctcgccgccgcgttcgccgactaccccgccacgcgccacaccgtcgatccggaccgccacatcgagcgggtcaccgagctgcaagaactcttcctcacgcgcgtcgggctcgacatcggcaaggtgtgggtcgcggacgacggcgccgcggtggcggtctggaccacgccggagagcgtcgaagcgggggcggtgttcgccgagatcggcccgcgcatggccgagttgagcggttcccggctggccgcgcagcaacagatggaaggcctcctggcgccgcaccggcccaaggagcccgcgtggttcctggccaccgtcggcgtctcgcccgaccaccagggcaagggtctgggcagcgccgtcgtgctccccggagtggaggcggccgagcgcgccggggtgcccgccttcctggagacctccgcgccccgcaacctccccttctacgagcggctcggcttcaccgtcaccgccgacgtcgaggtgcccgaaggaccgcgcacctggtgcatgacccgcaagcccggtgcctga

SEQ ID NO: 6263 - DNA, 3474 bp, synthetic construct
  source 1..3474: mol_type = other DNA
atggccttaccagtgaccgccttgctcctgccgctggccttgctgctccacgccgccaggccggacatcgtgatgacacagagccctgatagcctggccgtgtctctgggagagagagccaccattaactgcaaggccagccagagcgtggactacgacggcgacagcttcctgaactggtatcagcagaagcccggccagcctcctaagctgctgatctacgccgccagcaatctggaaagcggcgtgccaagcagattttccggctctggcagcggcaccgatttcaccctgacaatatccagcctccagcctgaggacgtggccgtgtactactgccagcagagcaacgacgaccctctgacctttggacagggcaccaaggtggaaatcaaactcgaggacctgaagaacgtgttcccacctgaggtggccgtgttcgagcctagcgaggccgagatcagccacacccagaaagccaccctcgtgtgcctggctaccggcttctaccccgaccatgtggaactgtcttggtgggtcaacggcaaagaggtgcacagcggcgtgtgtaccgacccccagccactgaaagaacagcccgccctgaacgacagccggtactgcctgagcagcagactgagagtgtccgccaccttctggcagaacccccggaaccacttcagatgccaggtgcagttctacggcctgagcgagaacgacgagtggacccaggacagagccaagcccgtgacccagatcgtgtctgccgaagcctggggcagagccgattgcgacgtgaagctggtggaaaagagcttcgagacagacaccaacctgaacttccagaacctgagcgtgatcggcttcagaatcctgctgctgaaagtggccggctttaacctgctgatgaccctgcggctgtggtccagcagggccaagcgatctggatctggagcaacaaacttctcactactcaaacaagcaggtgacgtggaggagaatcccgggcctactagtaccatggactggatttggcgcatccttttccttgtcggcgctgctaccggcgcccattccctgttcaatcaagaggtgcagatccctctgaccgagagctactgtggcccctgtcctaagaactggatctgctacaagaacaactgctaccagttcttcgacgagagcaagaattggtacgagagccaggccagctgcatgagccagaatgccagcctgctgaaggtgtacagcaaagaggaccaggacctgctgaaactggtcaagagcgcccactggatgggccttgtgcacatccccaccaatggctcttggcagtgggaggacggcagcattctgagccctaacctgctgaccatcatcgagatgcagaagggcgactgcgccctgtacgccagcagctttaagggctacatcgagaattgcagcaccccgaacacctacatctgtatgcagagaaccgtttctggcggaggcggctctggaggaggcggaagtggcggcggaggcgacctctttaatcaagaagtccagattccactcaccgaatcctactgcggaccttgtccaaaaaattggatttgttataagaacaactgttatcaattctttgatgagtctaaaaattggtatgagtcccaggcttcctgcatgtctcagaacgcttctctgctgaaagtctactctaaagaagatcaggatctcctgaagctcgtcaagtctgcccattggatggggctcgtccacattcctaccaacggaagctggcaatgggaagatggctccatcctgtctccaaatctgctcacgattattgaaatgcagaaaggggattgtgctctctacgccagctccttcaagggatatattgagaactgtagcacgcccaatacttatatctgtatgcaacggaccgtgggatccggcggcggaggatctggcggaggcggatctgggggcggaggctctttcgaagtccaacttgtggagtctggagggggcctggtgcagcccggcggctctctcagactgtcttgtgcggcaagcggctacaccttcagctcttactggatagaatgggtgaggcaggcacctggaaagggactggagtggattggagagattctgccaggagggggagatacaaattacaatgaaatcttcaaggggcgggccaccttttcagcggataccagcaagaatacagcttacctgcagatgaatagcctccgggcagaagataccgctgtttattattgcacgagacgggtgccaataagactggactattgggggcaagggactcttgtcaccgtcagttcaacgcgtatccagaaccctgatcctgccgtgtaccagctgcgggatagcaagagcagcgacaagagcgtgtgtctgttcaccgacttcgacagccagaccaacgtgtcccagagcaaggactccgacgtgtacatcaccgataagtgcgtgctggacatgcggagcatggacttcaagagcaactccgccgtggcctggtccaacaagtccgatttcgcctgcgccaacgccttcaacaacagcattatccccgaggacacattcttcccaagccccgagagcagctgcggctttaccagcgagagctaccagcagggcgtgctgagcgccaccatcctgtacgagatcctgctgggcaaggccaccctgtacgccgtgctggtgtctgccctggtgctgatggctatggtcaagcggaaggacagccggggacgcgccaagagaagcggatctggcgtgaagcagaccctgaatttcgacctgctgaagctggctggcgacgtggaatccaacccaggcccttctagaggccatatgaccgagtacaagcccacggtgcgcctcgccacccgcgacgacgtccccagggccgtacgcaccctcgccgccgcgttcgccgactaccccgccacgcgccacaccgtcgatccggaccgccacatcgagcgggtcaccgagctgcaagaactcttcctcacgcgcgtcgggctcgacatcggcaaggtgtgggtcgcggacgacggcgccgcggtggcggtctggaccacgccggagagcgtcgaagcgggggcggtgttcgccgagatcggcccgcgcatggccgagttgagcggttcccggctggccgcgcagcaacagatggaaggcctcctggcgccgcaccggcccaaggagcccgcgtggttcctggccaccgtcggcgtctcgcccgaccaccagggcaagggtctgggcagcgccgtcgtgctccccggagtggaggcggccgagcgcgccggggtgcccgccttcctggagacctccgcgccccgcaacctccccttctacgagcggctcggcttcaccgtcaccgccgacgtcgaggtgcccgaaggaccgcgcacctggtgcatgacccgcaagcccggtgcctga

SEQ ID NO: 6264 - DNA, 1860 bp, synthetic construct
  source 1..1860: mol_type = other DNA
atggccttaccagtgaccgccttgctcctgccgctggccttgctgctccacgccgccaggccggacatcgtgatgacacagagccctgatagcctggccgtgtctctgggagagagagccaccattaactgcaaggccagccagagcgtggactacgacggcgacagcttcctgaactggtatcagcagaagcccggccagcctcctaagctgctgatctacgccgccagcaatctggaaagcggcgtgccaagcagattttccggctctggcagcggcaccgatttcaccctgacaatatccagcctccagcctgaggacgtggccgtgtactactgccagcagagcaacgacgaccctctgacctttggacagggcaccaaggtggaaatcaaactcgaggacctgaagaacgtgttcccacctgaggtggccgtgttcgagcctagcgaggccgagatcagccacacccagaaagccaccctcgtgtgcctggctaccggcttctaccccgaccatgtggaactgtcttggtgggtcaacggcaaagaggtgcacagcggcgtgtgtaccgacccccagccactgaaagaacagcccgccctgaacgacagccggtactgcctgagcagcagactgagagtgtccgccaccttctggcagaacccccggaaccacttcagatgccaggtgcagttctacggcctgagcgagaacgacgagtggacccaggacagagccaagcccgtgacccagatcgtgtctgccgaagcctggggcagagccgattgcggctttaccagcgagagctaccagcagggcgtgctgagcgccaccaacctgagcgtgatcggcttcagaatcctgctgctgaaagtggccggctttaacctgctgatgaccctgcggctgtggtccagcagggccaagcgatctggatctggagcaacaaacttctcactactcaaacaagcaggtgacgtggaggagaatcccgggcctactagtatggactggatttggcgcatccttttccttgtcggcgctgctaccggcgcgcattccttcgaagtccaacttgtggagtctggagggggcctggtgcagcccggcggctctctcagactgtcttgtgcggcaagcggctacaccttcagctcttactggatagaatgggtgaggcaggcacctggaaagggactggagtggattggagagattctgccaggagggggagatacaaattacaatgaaatcttcaaggggcgggccaccttttcagcggataccagcaagaatacagcttacctgcagatgaatagcctccgggcagaagataccgctgtttattattgcacgagacgggtgccaataagactggactattgggggcaagggactcttgtcaccgtcagttcaacgcgtatccagaaccctgatcctgccgtgtaccagctgcgggatagcaagagcagcgacaagagcgtgtgtctgttcaccgacttcgacagccagaccaacgtgtcccagagcaaggactccgacgtgtacatcaccgataagtgcgtgctggacatgcggagcatggacttcaagagcaactccgccgtggcctggtccaacaagtccgatttcgcctgcgccaacgccttcaacaacagcattatccccgaggacacattcttcccaagccccgagagcagctgcgacgtgaagctggtggaaaagagcttcgagacagacaccaacctgaacttccagatcctgtacgagatcctgctgggcaaggccaccctgtacgccgtgctggtgtctgccctggtgctgatggctatggtcaagcggaaggacagccgggga

SEQ ID NO: 6265 - DNA, 1872 bp, synthetic construct
  source 1..1872: mol_type = other DNA
atggccttaccagtgaccgccttgctcctgccgctggccttgctgctccacgccgccaggccggacatcgtgatgacacagagccctgatagcctggccgtgtctctgggagagagagccaccattaactgcaaggccagccagagcgtggactacgacggcgacagcttcctgaactggtatcagcagaagcccggccagcctcctaagctgctgatctacgccgccagcaatctggaaagcggcgtgccaagcagattttccggctctggcagcggcaccgatttcaccctgacaatatccagcctccagcctgaggacgtggccgtgtactactgccagcagagcaacgacgaccctctgacctttggacagggcaccaaggtggaaatcaaactcgagatccagaaccctgatcctgccgtgtaccagctgcgggatagcaagagcagcgacaagagcgtgtgtctgttcaccgacttcgacagccagaccaacgtgtcccagagcaaggactccgacgtgtacatcaccgataagtgcgtgctggacatgcggagcatggacttcaagagcaactccgccgtggcctggtccaacaagtccgatttcgcctgcgccaacgccttcaacaacagcattatccccgaggacacattcttcccaagccccgagagcagctgcgacgtgaagctggtggaaaagagcttcgagacagacaccaacctgaacttccagatcctgtacgagatcctgctgggcaaggccaccctgtacgccgtgctggtgtctgccctggtgctgatggctatggtcaagcggaaggacagccggggacgcgccaagagaagcggatctggcgtgaagcagaccctgaatttcgacctgctgaagctggctggcgacgtggaatccaacccaggccctactagtatggactggatttggcgcatccttttccttgtcggcgctgctaccggcgcgcattccttcgaagtccaacttgtggagtctggagggggcctggtgcagcccggcggctctctcagactgtcttgtgcggcaagcggctacaccttcagctcttactggatagaatgggtgaggcaggcacctggaaagggactggagtggattggagagattctgccaggagggggagatacaaattacaatgaaatcttcaaggggcgggccaccttttcagcggataccagcaagaatacagcttacctgcagatgaatagcctccgggcagaagataccgctgtttattattgcacgagacgggtgccaataagactggactattgggggcaagggactcttgtcaccgtcagttcaacgcgtgaggacctgaagaacgtgttcccacctgaggtggccgtgttcgagcctagcgaggccgagatcagccacacccagaaagccaccctcgtgtgcctggctaccggcttctaccccgaccatgtggaactgtcttggtgggtcaacggcaaagaggtgcacagcggcgtgtgtaccgacccccagccactgaaagaacagcccgccctgaacgacagccggtactgcctgagcagcagactgagagtgtccgccaccttctggcagaacccccggaaccacttcagatgccaggtgcagttctacggcctgagcgagaacgacgagtggacccaggacagagccaagcccgtgacccagatcgtgtctgccgaagcctggggcagagccgattgcggctttaccagcgagagctaccagcagggcgtgctgagcgccaccaacctgagcgtgatcggcttcagaatcctgctgctgaaagtggccggctttaacctgctgatgaccctgcggctgtggtccagc

SEQ ID NO: 6266 - DNA, 2265 bp, synthetic construct
  source 1..2265: mol_type = other DNA
atggccttaccagtgaccgccttgctcctgccgctggccttgctgctccacgccgccaggccggaagtgcagctggttgaatctggcggaggactggttcagcctggcggatctctgagactgtcttgtgccgccagcggcttcagcttcagcgacttttggatgagctgggtccgacaggcccctggcaaaggacttgaatgggtcgccacaatcagccaggccggcagcgagaaggactacgtggactctgtgaagggcagattcaccatcagccgggacaacgccaagaagtccctgtacctccagatgaacagcctgagagccgaggacaccgccgtgtactattgtgcctctggcgtgtacagcttcgactacagaggccagggcaccctggtcacagtctcttctggtaccggcggaggcggatctggcggcggaggtagcggtggcggaggatctgaattcgacatcgtgatgacacagagccctgatagcctggccgtgtctctgggagagagagccaccattaactgcaaggccagccagagcgtggactacgacggcgacagcttcctgaactggtatcagcagaagcccggccagcctcctaagctgctgatctacgccgccagcaatctggaaagcggcgtgccaagcagattttccggctctggcagcggcaccgatttcaccctgacaatatccagcctccagcctgaggacgtggccgtgtactactgccagcagagcaacgacgaccctctgacctttggacagggcaccaaggtggaaatcaaactcgaggacctgaagaacgtgttcccacctgaggtggccgtgttcgagcctagcgaggccgagatcagccacacccagaaagccaccctcgtgtgcctggctaccggcttctaccccgaccatgtggaactgtcttggtgggtcaacggcaaagaggtgcacagcggcgtgtgtaccgacccccagccactgaaagaacagcccgccctgaacgacagccggtactgcctgagcagcagactgagagtgtccgccaccttctggcagaacccccggaaccacttcagatgccaggtgcagttctacggcctgagcgagaacgacgagtggacccaggacagagccaagcccgtgacccagatcgtgtctgccgaagcctggggcagagccgattgcggctttaccagcgagagctaccagcagggcgtgctgagcgccaccaacctgagcgtgatcggcttcagaatcctgctgctgaaagtggccggctttaacctgctgatgaccctgcggctgtggtccagcagggccaagcgatctggatctggagcaacaaacttctcactactcaaacaagcaggtgacgtggaggagaatcccgggcctactagtatggactggatttggcgcatccttttccttgtcggcgctgctaccggcgcgcattccttcgaagtccaacttgtggagtctggagggggcctggtgcagcccggcggctctctcagactgtcttgtgcggcaagcggctacaccttcagctcttactggatagaatgggtgaggcaggcacctggaaagggactggagtggattggagagattctgccaggagggggagatacaaattacaatgaaatcttcaaggggcgggccaccttttcagcggataccagcaagaatacagcttacctgcagatgaatagcctccgggcagaagataccgctgtttattattgcacgagacgggtgccaataagactggactattgggggcaagggactcttgtcaccgtcagttcaacgcgtatccagaaccctgatcctgccgtgtaccagctgcgggatagcaagagcagcgacaagagcgtgtgtctgttcaccgacttcgacagccagaccaacgtgtcccagagcaaggactccgacgtgtacatcaccgataagtgcgtgctggacatgcggagcatggacttcaagagcaactccgccgtggcctggtccaacaagtccgatttcgcctgcgccaacgccttcaacaacagcattatccccgaggacacattcttcccaagccccgagagcagctgcgacgtgaagctggtggaaaagagcttcgagacagacaccaacctgaacttccagatcctgtacgagatcctgctgggcaaggccaccctgtacgccgtgctggtgtctgccctggtgctgatggctatggtcaagcggaaggacagccgggga

SEQ ID NO: 6267 - DNA, 2277 bp, synthetic construct
  source 1..2277: mol_type = other DNA
atggccttaccagtgaccgccttgctcctgccgctggccttgctgctccacgccgccaggccggaagtgcagctggttgaatctggcggaggactggttcagcctggcggatctctgagactgtcttgtgccgccagcggcttcagcttcagcgacttttggatgagctgggtccgacaggcccctggcaaaggacttgaatgggtcgccacaatcagccaggccggcagcgagaaggactacgtggactctgtgaagggcagattcaccatcagccgggacaacgccaagaagtccctgtacctccagatgaacagcctgagagccgaggacaccgccgtgtactattgtgcctctggcgtgtacagcttcgactacagaggccagggcaccctggtcacagtctcttctggtaccggcggaggcggatctggcggcggaggtagcggtggcggaggatctgaattcgacatcgtgatgacacagagccctgatagcctggccgtgtctctgggagagagagccaccattaactgcaaggccagccagagcgtggactacgacggcgacagcttcctgaactggtatcagcagaagcccggccagcctcctaagctgctgatctacgccgccagcaatctggaaagcggcgtgccaagcagattttccggctctggcagcggcaccgatttcaccctgacaatatccagcctccagcctgaggacgtggccgtgtactactgccagcagagcaacgacgaccctctgacctttggacagggcaccaaggtggaaatcaaactcgagatccagaaccctgatcctgccgtgtaccagctgcgggatagcaagagcagcgacaagagcgtgtgtctgttcaccgacttcgacagccagaccaacgtgtcccagagcaaggactccgacgtgtacatcaccgataagtgcgtgctggacatgcggagcatggacttcaagagcaactccgccgtggcctggtccaacaagtccgatttcgcctgcgccaacgccttcaacaacagcattatccccgaggacacattcttcccaagccccgagagcagctgcgacgtgaagctggtggaaaagagcttcgagacagacaccaacctgaacttccagatcctgtacgagatcctgctgggcaaggccaccctgtacgccgtgctggtgtctgccctggtgctgatggctatggtcaagcggaaggacagccggggacgcgccaagagaagcggatctggcgtgaagcagaccctgaatttcgacctgctgaagctggctggcgacgtggaatccaacccaggccctactagtatggactggatttggcgcatccttttccttgtcggcgctgctaccggcgcgcattccttcgaagtccaacttgtggagtctggagggggcctggtgcagcccggcggctctctcagactgtcttgtgcggcaagcggctacaccttcagctcttactggatagaatgggtgaggcaggcacctggaaagggactggagtggattggagagattctgccaggagggggagatacaaattacaatgaaatcttcaaggggcgggccaccttttcagcggataccagcaagaatacagcttacctgcagatgaatagcctccgggcagaagataccgctgtttattattgcacgagacgggtgccaataagactggactattgggggcaagggactcttgtcaccgtcagttcaacgcgtgaggacctgaagaacgtgttcccacctgaggtggccgtgttcgagcctagcgaggccgagatcagccacacccagaaagccaccctcgtgtgcctggctaccggcttctaccccgaccatgtggaactgtcttggtgggtcaacggcaaagaggtgcacagcggcgtgtgtaccgacccccagccactgaaagaacagcccgccctgaacgacagccggtactgcctgagcagcagactgagagtgtccgccaccttctggcagaacccccggaaccacttcagatgccaggtgcagttctacggcctgagcgagaacgacgagtggacccaggacagagccaagcccgtgacccagatcgtgtctgccgaagcctggggcagagccgattgcggctttaccagcgagagctaccagcagggcgtgctgagcgccaccaacctgagcgtgatcggcttcagaatcctgctgctgaaagtggccggctttaacctgctgatgaccctgcggctgtggtccagc

SEQ ID NO: 6268 - DNA, 2676 bp, synthetic construct
  source 1..2676: mol_type = other DNA
atggccttaccagtgaccgccttgctcctgccgctggccttgctgctccacgccgccaggccggaagtgcagctggttgaatctggcggaggactggttcagcctggcggatctctgagactgtcttgtgccgccagcggcttcagcttcagcgacttttggatgagctgggtccgacaggcccctggcaaaggacttgaatgggtcgccacaatcagccaggccggcagcgagaaggactacgtggactctgtgaagggcagattcaccatcagccgggacaacgccaagaagtccctgtacctccagatgaacagcctgagagccgaggacaccgccgtgtactattgtgcctctggcgtgtacagcttcgactacagaggccagggcaccctggtcacagtctcttctggtaccggcggaggcggatctggcggcggaggtagcggtggcggaggatctgaattcgacatcgtgatgacacagagccctgatagcctggccgtgtctctgggagagagagccaccattaactgcaaggccagccagagcgtggactacgacggcgacagcttcctgaactggtatcagcagaagcccggccagcctcctaagctgctgatctacgccgccagcaatctggaaagcggcgtgccaagcagattttccggctctggcagcggcaccgatttcaccctgacaatatccagcctccagcctgaggacgtggccgtgtactactgccagcagagcaacgacgaccctctgacctttggacagggcaccaaggtggaaatcaaactcgaggacctgaagaacgtgttcccacctgaggtggccgtgttcgagcctagcgaggccgagatcagccacacccagaaagccaccctcgtgtgcctggctaccggcttctaccccgaccatgtggaactgtcttggtgggtcaacggcaaagaggtgcacagcggcgtgtgtaccgacccccagccactgaaagaacagcccgccctgaacgacagccggtactgcctgagcagcagactgagagtgtccgccaccttctggcagaacccccggaaccacttcagatgccaggtgcagttctacggcctgagcgagaacgacgagtggacccaggacagagccaagcccgtgacccagatcgtgtctgccgaagcctggggcagagccgattgcggctttaccagcgagagctaccagcagggcgtgctgagcgccaccaacctgagcgtgatcggcttcagaatcctgctgctgaaagtggccggctttaacctgctgatgaccctgcggctgtggtccagcagggccaagcgatctggatctggagcaacaaacttctcactactcaaacaagcaggtgacgtggaggagaatcccgggcctactagtatggactggatttggcgcatccttttccttgtcggcgctgctaccggcgcgcattccgggccccagctccagctgcaagagtctggacctggcctggtcaagcctagcgagacactgagcctgacctgtaccgtgtccggcgatagcatcagcagcggcgattactactggggctggatcagacagcctcctggcaaaggactggaatggatcggccacatctactacagcggcgtgacctactacaaccccagcctgaagtccagagtgaccatcagcgtggacaccagccggaaccagttctccctgaagctgtctagcgtgacagccgccgataccgccgtgtactactgcaccagagaggacagcagcaactggcggagtagaggccagggaacactggtcacagttagctctggatccggcggaggcggaagtggaggcggaggatctggcggcggaggctctttcgaagtccaacttgtggagtctggagggggcctggtgcagcccggcggctctctcagactgtcttgtgcggcaagcggctacaccttcagctcttactggatagaatgggtgaggcaggcacctggaaagggactggagtggattggagagattctgccaggagggggagatacaaattacaatgaaatcttcaaggggcgggccaccttttcagcggataccagcaagaatacagcttacctgcagatgaatagcctccgggcagaagataccgctgtttattattgcacgagacgggtgccaataagactggactattgggggcaagggactcttgtcaccgtcagttcaacgcgtatccagaaccctgatcctgccgtgtaccagctgcgggatagcaagagcagcgacaagagcgtgtgtctgttcaccgacttcgacagccagaccaacgtgtcccagagcaaggactccgacgtgtacatcaccgataagtgcgtgctggacatgcggagcatggacttcaagagcaactccgccgtggcctggtccaacaagtccgatttcgcctgcgccaacgccttcaacaacagcattatccccgaggacacattcttcccaagccccgagagcagctgcgacgtgaagctggtggaaaagagcttcgagacagacaccaacctgaacttccagatcctgtacgagatcctgctgggcaaggccaccctgtacgccgtgctggtgtctgccctggtgctgatggctatggtcaagcggaaggacagccgggga

SEQ ID NO: 6269 - DNA, 2688 bp, synthetic construct
  source 1..2688: mol_type = other DNA
atggccttaccagtgaccgccttgctcctgccgctggccttgctgctccacgccgccaggccggaagtgcagctggttgaatctggcggaggactggttcagcctggcggatctctgagactgtcttgtgccgccagcggcttcagcttcagcgacttttggatgagctgggtccgacaggcccctggcaaaggacttgaatgggtcgccacaatcagccaggccggcagcgagaaggactacgtggactctgtgaagggcagattcaccatcagccgggacaacgccaagaagtccctgtacctccagatgaacagcctgagagccgaggacaccgccgtgtactattgtgcctctggcgtgtacagcttcgactacagaggccagggcaccctggtcacagtctcttctggtaccggcggaggcggatctggcggcggaggtagcggtggcggaggatctgaattcgacatcgtgatgacacagagccctgatagcctggccgtgtctctgggagagagagccaccattaactgcaaggccagccagagcgtggactacgacggcgacagcttcctgaactggtatcagcagaagcccggccagcctcctaagctgctgatctacgccgccagcaatctggaaagcggcgtgccaagcagattttccggctctggcagcggcaccgatttcaccctgacaatatccagcctccagcctgaggacgtggccgtgtactactgccagcagagcaacgacgaccctctgacctttggacagggcaccaaggtggaaatcaaactcgagatccagaaccctgatcctgccgtgtaccagctgcgggatagcaagagcagcgacaagagcgtgtgtctgttcaccgacttcgacagccagaccaacgtgtcccagagcaaggactccgacgtgtacatcaccgataagtgcgtgctggacatgcggagcatggacttcaagagcaactccgccgtggcctggtccaacaagtccgatttcgcctgcgccaacgccttcaacaacagcattatccccgaggacacattcttcccaagccccgagagcagctgcgacgtgaagctggtggaaaagagcttcgagacagacaccaacctgaacttccagatcctgtacgagatcctgctgggcaaggccaccctgtacgccgtgctggtgtctgccctggtgctgatggctatggtcaagcggaaggacagccggggacgcgccaagagaagcggatctggcgtgaagcagaccctgaatttcgacctgctgaagctggctggcgacgtggaatccaacccaggccctactagtatggactggatttggcgcatccttttccttgtcggcgctgctaccggcgcgcattccgggccccagctccagctgcaagagtctggacctggcctggtcaagcctagcgagacactgagcctgacctgtaccgtgtccggcgatagcatcagcagcggcgattactactggggctggatcagacagcctcctggcaaaggactggaatggatcggccacatctactacagcggcgtgacctactacaaccccagcctgaagtccagagtgaccatcagcgtggacaccagccggaaccagttctccctgaagctgtctagcgtgacagccgccgataccgccgtgtactactgcaccagagaggacagcagcaactggcggagtagaggccagggaacactggtcacagttagctctggatccggcggaggcggaagtggaggcggaggatctggcggcggaggctctttcgaagtccaacttgtggagtctggagggggcctggtgcagcccggcggctctctcagactgtcttgtgcggcaagcggctacaccttcagctcttactggatagaatgggtgaggcaggcacctggaaagggactggagtggattggagagattctgccaggagggggagatacaaattacaatgaaatcttcaaggggcgggccaccttttcagcggataccagcaagaatacagcttacctgcagatgaatagcctccgggcagaagataccgctgtttattattgcacgagacgggtgccaataagactggactattgggggcaagggactcttgtcaccgtcagttcaacgcgtgaggacctgaagaacgtgttcccacctgaggtggccgtgttcgagcctagcgaggccgagatcagccacacccagaaagccaccctcgtgtgcctggctaccggcttctaccccgaccatgtggaactgtcttggtgggtcaacggcaaagaggtgcacagcggcgtgtgtaccgacccccagccactgaaagaacagcccgccctgaacgacagccggtactgcctgagcagcagactgagagtgtccgccaccttctggcagaacccccggaaccacttcagatgccaggtgcagttctacggcctgagcgagaacgacgagtggacccaggacagagccaagcccgtgacccagatcgtgtctgccgaagcctggggcagagccgattgcggctttaccagcgagagctaccagcagggcgtgctgagcgccaccaacctgagcgtgatcggcttcagaatcctgctgctgaaagtggccggctttaacctgctgatgaccctgcggctgtggtccagc

SEQ ID NO: 6270 - DNA, 2172 bp, synthetic construct
  source 1..2172: mol_type = other DNA
atggccttaccagtgaccgccttgctcctgccgctggccttgctgctccacgccgccaggccggacatcgtgatgacacagagccctgatagcctggccgtgtctctgggagagagagccaccattaactgcaaggccagccagagcgtggactacgacggcgacagcttcctgaactggtatcagcagaagcccggccagcctcctaagctgctgatctacgccgccagcaatctggaaagcggcgtgccaagcagattttccggctctggcagcggcaccgatttcaccctgacaatatccagcctccagcctgaggacgtggccgtgtactactgccagcagagcaacgacgaccctctgacctttggacagggcaccaaggtggaaatcaaactcgaggacctgaagaacgtgttcccacctgaggtggccgtgttcgagcctagcgaggccgagatcagccacacccagaaagccaccctcgtgtgcctggctaccggcttctaccccgaccatgtggaactgtcttggtgggtcaacggcaaagaggtgcacagcggcgtgtgtaccgacccccagccactgaaagaacagcccgccctgaacgacagccggtactgcctgagcagcagactgagagtgtccgccaccttctggcagaacccccggaaccacttcagatgccaggtgcagttctacggcctgagcgagaacgacgagtggacccaggacagagccaagcccgtgacccagatcgtgtctgccgaagcctggggcagagccgatgatgtgattaagatccactggcaggaaaagaagtccaacaccatcctgggcagccaggaaggcaacaccatgaagaccaacgacacctacatgaagttcagctggctgaccgtgcccgagaagtccctggacaaagaacacagatgcatcgtgcggcacgaaaacaacaagaacggcgtggaccaggaaatcatcttcccacccatcaagaccgatgtgattacaatggaccccaaggacaactgctccaaggacgccaacgataccctgctgctccagctgaccaacaccagcgcctactacatgtacttgttgctgctgctgaagtccgtggtgtacttcgccatcatcacatgctgcctgctgatggctatggtcaagcggaaggacagccggggaagggccaagcgatctggatctggagcaacaaacttctcactactcaaacaagcaggtgacgtggaggagaatcccgggcctactagtatggactggatttggcgcatccttttccttgtcggcgctgctaccggcgcgcattccttcgaagtccaacttgtggagtctggagggggcctggtgcagcccggcggctctctcagactgtcttgtgcggcaagcggctacaccttcagctcttactggatagaatgggtgaggcaggcacctggaaagggactggagtggattggagagattctgccaggagggggagatacaaattacaatgaaatcttcaaggggcgggccaccttttcagcggataccagcaagaatacagcttacctgcagatgaatagcctccgggcagaagataccgctgtttattattgcacgagacgggtgccaataagactggactattgggggcaagggactcttgtcaccgtcagttcaacgcgtatccagaaccctgatcctgccgtgtaccagctgcgggatagcaagagcagcgacaagagcgtgtgtctgttcaccgacttcgacagccagaccaacgtgtcccagagcaaggactccgacgtgtacatcaccgataagtgcgtgctggacatgcggagcatggacttcaagagcaactccgccgtggcctggtccaacaagtccgatttcgcctgcgccaacgccttcaacaacagcattatccccgaggacacattcttcccaagccccgagagcagcgactccaccgaccacgtgaagcccaaagagacagagaacaccaagcagcccagcaagagctgccacaagcccaaggccatcgtgcacaccgagaaagtgaacatgatgagcctgaccgtgctgggcctgcggatgctgttcgccaaaaccgtggccgtgaacttcctgctgaccgccaagctgttcttcctcctcaccgcc

SEQ ID NO: 6271 - DNA, 2184 bp, synthetic construct
  source 1..2184: mol_type = other DNA
atggccttaccagtgaccgccttgctcctgccgctggccttgctgctccacgccgccaggccggacatcgtgatgacacagagccctgatagcctggccgtgtctctgggagagagagccaccattaactgcaaggccagccagagcgtggactacgacggcgacagcttcctgaactggtatcagcagaagcccggccagcctcctaagctgctgatctacgccgccagcaatctggaaagcggcgtgccaagcagattttccggctctggcagcggcaccgatttcaccctgacaatatccagcctccagcctgaggacgtggccgtgtactactgccagcagagcaacgacgaccctctgacctttggacagggcaccaaggtggaaatcaaactcgagatccagaaccctgatcctgccgtgtaccagctgcgggatagcaagagcagcgacaagagcgtgtgtctgttcaccgacttcgacagccagaccaacgtgtcccagagcaaggactccgacgtgtacatcaccgataagtgcgtgctggacatgcggagcatggacttcaagagcaactccgccgtggcctggtccaacaagtccgatttcgcctgcgccaacgccttcaacaacagcattatccccgaggacacattcttcccaagccccgagagcagcgactccaccgaccacgtgaagcccaaagagacagagaacaccaagcagcccagcaagagctgccacaagcccaaggccatcgtgcacaccgagaaagtgaacatgatgagcctgaccgtgctgggcctgcggatgctgttcgccaaaaccgtggccgtgaacttcctgctgaccgccaagctgttcttcctcctcaccgcccgcgccaagagaagcggatctggcgtgaagcagaccctgaatttcgacctgctgaagctggctggcgacgtggaatccaacccaggccctactagtatggactggatttggcgcatccttttccttgtcggcgctgctaccggcgcgcattccttcgaagtccaacttgtggagtctggagggggcctggtgcagcccggcggctctctcagactgtcttgtgcggcaagcggctacaccttcagctcttactggatagaatgggtgaggcaggcacctggaaagggactggagtggattggagagattctgccaggagggggagatacaaattacaatgaaatcttcaaggggcgggccaccttttcagcggataccagcaagaatacagcttacctgcagatgaatagcctccgggcagaagataccgctgtttattattgcacgagacgggtgccaataagactggactattgggggcaagggactcttgtcaccgtcagttcaacgcgtgaggacctgaagaacgtgttcccacctgaggtggccgtgttcgagcctagcgaggccgagatcagccacacccagaaagccaccctcgtgtgcctggctaccggcttctaccccgaccatgtggaactgtcttggtgggtcaacggcaaagaggtgcacagcggcgtgtgtaccgacccccagccactgaaagaacagcccgccctgaacgacagccggtactgcctgagcagcagactgagagtgtccgccaccttctggcagaacccccggaaccacttcagatgccaggtgcagttctacggcctgagcgagaacgacgagtggacccaggacagagccaagcccgtgacccagatcgtgtctgccgaagcctggggcagagccgatgatgtgattaagatccactggcaggaaaagaagtccaacaccatcctgggcagccaggaaggcaacaccatgaagaccaacgacacctacatgaagttcagctggctgaccgtgcccgagaagtccctggacaaagaacacagatgcatcgtgcggcacgaaaacaacaagaacggcgtggaccaggaaatcatcttcccacccatcaagaccgatgtgattacaatggaccccaaggacaactgctccaaggacgccaacgataccctgctgctccagctgaccaacaccagcgcctactacatgtacttgttgctgctgctgaagtccgtggtgtacttcgccatcatcacatgctgcctgctgatggctatggtcaagcggaaggacagccgggga

SEQ ID NO: 6272 - DNA, 2577 bp, synthetic construct
  source 1..2577: mol_type = other DNA
atggccttaccagtgaccgccttgctcctgccgctggccttgctgctccacgccgccaggccggaagtgcagctggttgaatctggcggaggactggttcagcctggcggatctctgagactgtcttgtgccgccagcggcttcagcttcagcgacttttggatgagctgggtccgacaggcccctggcaaaggacttgaatgggtcgccacaatcagccaggccggcagcgagaaggactacgtggactctgtgaagggcagattcaccatcagccgggacaacgccaagaagtccctgtacctccagatgaacagcctgagagccgaggacaccgccgtgtactattgtgcctctggcgtgtacagcttcgactacagaggccagggcaccctggtcacagtctcttctggtaccggcggaggcggatctggcggcggaggtagcggtggcggaggatctgaattcgacatcgtgatgacacagagccctgatagcctggccgtgtctctgggagagagagccaccattaactgcaaggccagccagagcgtggactacgacggcgacagcttcctgaactggtatcagcagaagcccggccagcctcctaagctgctgatctacgccgccagcaatctggaaagcggcgtgccaagcagattttccggctctggcagcggcaccgatttcaccctgacaatatccagcctccagcctgaggacgtggccgtgtactactgccagcagagcaacgacgaccctctgacctttggacagggcaccaaggtggaaatcaaactcgaggacctgaagaacgtgttcccacctgaggtggccgtgttcgagcctagcgaggccgagatcagccacacccagaaagccaccctcgtgtgcctggctaccggcttctaccccgaccatgtggaactgtcttggtgggtcaacggcaaagaggtgcacagcggcgtgtgtaccgacccccagccactgaaagaacagcccgccctgaacgacagccggtactgcctgagcagcagactgagagtgtccgccaccttctggcagaacccccggaaccacttcagatgccaggtgcagttctacggcctgagcgagaacgacgagtggacccaggacagagccaagcccgtgacccagatcgtgtctgccgaagcctggggcagagccgatgatgtgattaagatccactggcaggaaaagaagtccaacaccatcctgggcagccaggaaggcaacaccatgaagaccaacgacacctacatgaagttcagctggctgaccgtgcccgagaagtccctggacaaagaacacagatgcatcgtgcggcacgaaaacaacaagaacggcgtggaccaggaaatcatcttcccacccatcaagaccgatgtgattacaatggaccccaaggacaactgctccaaggacgccaacgataccctgctgctccagctgaccaacaccagcgcctactacatgtacttgttgctgctgctgaagtccgtggtgtacttcgccatcatcacatgctgcctgctgatggctatggtcaagcggaaggacagccggggaagggccaagcgatctggatctggagcaacaaacttctcactactcaaacaagcaggtgacgtggaggagaatcccgggcctactagtatggactggatttggcgcatccttttccttgtcggcgctgctaccggcgcgcattccttcgaagtccaacttgtggagtctggagggggcctggtgcagcccggcggctctctcagactgtcttgtgcggcaagcggctacaccttcagctcttactggatagaatgggtgaggcaggcacctggaaagggactggagtggattggagagattctgccaggagggggagatacaaattacaatgaaatcttcaaggggcgggccaccttttcagcggataccagcaagaatacagcttacctgcagatgaatagcctccgggcagaagataccgctgtttattattgcacgagacgggtgccaataagactggactattgggggcaagggactcttgtcaccgtcagttcaacgcgtatccagaaccctgatcctgccgtgtaccagctgcgggatagcaagagcagcgacaagagcgtgtgtctgttcaccgacttcgacagccagaccaacgtgtcccagagcaaggactccgacgtgtacatcaccgataagtgcgtgctggacatgcggagcatggacttcaagagcaactccgccgtggcctggtccaacaagtccgatttcgcctgcgccaacgccttcaacaacagcattatccccgaggacacattcttcccaagccccgagagcagcgactccaccgaccacgtgaagcccaaagagacagagaacaccaagcagcccagcaagagctgccacaagcccaaggccatcgtgcacaccgagaaagtgaacatgatgagcctgaccgtgctgggcctgcggatgctgttcgccaaaaccgtggccgtgaacttcctgctgaccgccaagctgttcttcctcctcaccgcc

SEQ ID NO: 6273 - DNA, 2589 bp, synthetic construct
  source 1..2589: mol_type = other DNA
atggccttaccagtgaccgccttgctcctgccgctggccttgctgctccacgccgccaggccggaagtgcagctggttgaatctggcggaggactggttcagcctggcggatctctgagactgtcttgtgccgccagcggcttcagcttcagcgacttttggatgagctgggtccgacaggcccctggcaaaggacttgaatgggtcgccacaatcagccaggccggcagcgagaaggactacgtggactctgtgaagggcagattcaccatcagccgggacaacgccaagaagtccctgtacctccagatgaacagcctgagagccgaggacaccgccgtgtactattgtgcctctggcgtgtacagcttcgactacagaggccagggcaccctggtcacagtctcttctggtaccggcggaggcggatctggcggcggaggtagcggtggcggaggatctgaattcgacatcgtgatgacacagagccctgatagcctggccgtgtctctgggagagagagccaccattaactgcaaggccagccagagcgtggactacgacggcgacagcttcctgaactggtatcagcagaagcccggccagcctcctaagctgctgatctacgccgccagcaatctggaaagcggcgtgccaagcagattttccggctctggcagcggcaccgatttcaccctgacaatatccagcctccagcctgaggacgtggccgtgtactactgccagcagagcaacgacgaccctctgacctttggacagggcaccaaggtggaaatcaaactcgagatccagaaccctgatcctgccgtgtaccagctgcgggatagcaagagcagcgacaagagcgtgtgtctgttcaccgacttcgacagccagaccaacgtgtcccagagcaaggactccgacgtgtacatcaccgataagtgcgtgctggacatgcggagcatggacttcaagagcaactccgccgtggcctggtccaacaagtccgatttcgcctgcgccaacgccttcaacaacagcattatccccgaggacacattcttcccaagccccgagagcagcgactccaccgaccacgtgaagcccaaagagacagagaacaccaagcagcccagcaagagctgccacaagcccaaggccatcgtgcacaccgagaaagtgaacatgatgagcctgaccgtgctgggcctgcggatgctgttcgccaaaaccgtggccgtgaacttcctgctgaccgccaagctgttcttcctcctcaccgcccgcgccaagagaagcggatctggcgtgaagcagaccctgaatttcgacctgctgaagctggctggcgacgtggaatccaacccaggccctactagtatggactggatttggcgcatccttttccttgtcggcgctgctaccggcgcgcattccttcgaagtccaacttgtggagtctggagggggcctggtgcagcccggcggctctctcagactgtcttgtgcggcaagcggctacaccttcagctcttactggatagaatgggtgaggcaggcacctggaaagggactggagtggattggagagattctgccaggagggggagatacaaattacaatgaaatcttcaaggggcgggccaccttttcagcggataccagcaagaatacagcttacctgcagatgaatagcctccgggcagaagataccgctgtttattattgcacgagacgggtgccaataagactggactattgggggcaagggactcttgtcaccgtcagttcaacgcgtgaggacctgaagaacgtgttcccacctgaggtggccgtgttcgagcctagcgaggccgagatcagccacacccagaaagccaccctcgtgtgcctggctaccggcttctaccccgaccatgtggaactgtcttggtgggtcaacggcaaagaggtgcacagcggcgtgtgtaccgacccccagccactgaaagaacagcccgccctgaacgacagccggtactgcctgagcagcagactgagagtgtccgccaccttctggcagaacccccggaaccacttcagatgccaggtgcagttctacggcctgagcgagaacgacgagtggacccaggacagagccaagcccgtgacccagatcgtgtctgccgaagcctggggcagagccgatgatgtgattaagatccactggcaggaaaagaagtccaacaccatcctgggcagccaggaaggcaacaccatgaagaccaacgacacctacatgaagttcagctggctgaccgtgcccgagaagtccctggacaaagaacacagatgcatcgtgcggcacgaaaacaacaagaacggcgtggaccaggaaatcatcttcccacccatcaagaccgatgtgattacaatggaccccaaggacaactgctccaaggacgccaacgataccctgctgctccagctgaccaacaccagcgcctactacatgtacttgttgctgctgctgaagtccgtggtgtacttcgccatcatcacatgctgcctgctgatggctatggtcaagcggaaggacagccgggga

SEQ ID NO: 6274 - DNA, 2988 bp, synthetic construct
  source 1..2988: mol_type = other DNA
atggccttaccagtgaccgccttgctcctgccgctggccttgctgctccacgccgccaggccggaagtgcagctggttgaatctggcggaggactggttcagcctggcggatctctgagactgtcttgtgccgccagcggcttcagcttcagcgacttttggatgagctgggtccgacaggcccctggcaaaggacttgaatgggtcgccacaatcagccaggccggcagcgagaaggactacgtggactctgtgaagggcagattcaccatcagccgggacaacgccaagaagtccctgtacctccagatgaacagcctgagagccgaggacaccgccgtgtactattgtgcctctggcgtgtacagcttcgactacagaggccagggcaccctggtcacagtctcttctggtaccggcggaggcggatctggcggcggaggtagcggtggcggaggatctgaattcgacatcgtgatgacacagagccctgatagcctggccgtgtctctgggagagagagccaccattaactgcaaggccagccagagcgtggactacgacggcgacagcttcctgaactggtatcagcagaagcccggccagcctcctaagctgctgatctacgccgccagcaatctggaaagcggcgtgccaagcagattttccggctctggcagcggcaccgatttcaccctgacaatatccagcctccagcctgaggacgtggccgtgtactactgccagcagagcaacgacgaccctctgacctttggacagggcaccaaggtggaaatcaaactcgaggacctgaagaacgtgttcccacctgaggtggccgtgttcgagcctagcgaggccgagatcagccacacccagaaagccaccctcgtgtgcctggctaccggcttctaccccgaccatgtggaactgtcttggtgggtcaacggcaaagaggtgcacagcggcgtgtgtaccgacccccagccactgaaagaacagcccgccctgaacgacagccggtactgcctgagcagcagactgagagtgtccgccaccttctggcagaacccccggaaccacttcagatgccaggtgcagttctacggcctgagcgagaacgacgagtggacccaggacagagccaagcccgtgacccagatcgtgtctgccgaagcctggggcagagccgatgatgtgattaagatccactggcaggaaaagaagtccaacaccatcctgggcagccaggaaggcaacaccatgaagaccaacgacacctacatgaagttcagctggctgaccgtgcccgagaagtccctggacaaagaacacagatgcatcgtgcggcacgaaaacaacaagaacggcgtggaccaggaaatcatcttcccacccatcaagaccgatgtgattacaatggaccccaaggacaactgctccaaggacgccaacgataccctgctgctccagctgaccaacaccagcgcctactacatgtacttgttgctgctgctgaagtccgtggtgtacttcgccatcatcacatgctgcctgctgatggctatggtcaagcggaaggacagccggggaagggccaagcgatctggatctggagcaacaaacttctcactactcaaacaagcaggtgacgtggaggagaatcccgggcctactagtatggactggatttggcgcatccttttccttgtcggcgctgctaccggcgcgcattccgggccccagctccagctgcaagagtctggacctggcctggtcaagcctagcgagacactgagcctgacctgtaccgtgtccggcgatagcatcagcagcggcgattactactggggctggatcagacagcctcctggcaaaggactggaatggatcggccacatctactacagcggcgtgacctactacaaccccagcctgaagtccagagtgaccatcagcgtggacaccagccggaaccagttctccctgaagctgtctagcgtgacagccgccgataccgccgtgtactactgcaccagagaggacagcagcaactggcggagtagaggccagggaacactggtcacagttagctctggatccggcggaggcggaagtggaggcggaggatctggcggcggaggctctttcgaagtccaacttgtggagtctggagggggcctggtgcagcccggcggctctctcagactgtcttgtgcggcaagcggctacaccttcagctcttactggatagaatgggtgaggcaggcacctggaaagggactggagtggattggagagattctgccaggagggggagatacaaattacaatgaaatcttcaaggggcgggccaccttttcagcggataccagcaagaatacagcttacctgcagatgaatagcctccgggcagaagataccgctgtttattattgcacgagacgggtgccaataagactggactattgggggcaagggactcttgtcaccgtcagttcaacgcgtatccagaaccctgatcctgccgtgtaccagctgcgggatagcaagagcagcgacaagagcgtgtgtctgttcaccgacttcgacagccagaccaacgtgtcccagagcaaggactccgacgtgtacatcaccgataagtgcgtgctggacatgcggagcatggacttcaagagcaactccgccgtggcctggtccaacaagtccgatttcgcctgcgccaacgccttcaacaacagcattatccccgaggacacattcttcccaagccccgagagcagcgactccaccgaccacgtgaagcccaaagagacagagaacaccaagcagcccagcaagagctgccacaagcccaaggccatcgtgcacaccgagaaagtgaacatgatgagcctgaccgtgctgggcctgcggatgctgttcgccaaaaccgtggccgtgaacttcctgctgaccgccaagctgttcttcctcctcaccgcc

SEQ ID NO: 6275 - DNA, 3000 bp, synthetic construct
  source 1..3000: mol_type = other DNA
atggccttaccagtgaccgccttgctcctgccgctggccttgctgctccacgccgccaggccggaagtgcagctggttgaatctggcggaggactggttcagcctggcggatctctgagactgtcttgtgccgccagcggcttcagcttcagcgacttttggatgagctgggtccgacaggcccctggcaaaggacttgaatgggtcgccacaatcagccaggccggcagcgagaaggactacgtggactctgtgaagggcagattcaccatcagccgggacaacgccaagaagtccctgtacctccagatgaacagcctgagagccgaggacaccgccgtgtactattgtgcctctggcgtgtacagcttcgactacagaggccagggcaccctggtcacagtctcttctggtaccggcggaggcggatctggcggcggaggtagcggtggcggaggatctgaattcgacatcgtgatgacacagagccctgatagcctggccgtgtctctgggagagagagccaccattaactgcaaggccagccagagcgtggactacgacggcgacagcttcctgaactggtatcagcagaagcccggccagcctcctaagctgctgatctacgccgccagcaatctggaaagcggcgtgccaagcagattttccggctctggcagcggcaccgatttcaccctgacaatatccagcctccagcctgaggacgtggccgtgtactactgccagcagagcaacgacgaccctctgacctttggacagggcaccaaggtggaaatcaaactcgagatccagaaccctgatcctgccgtgtaccagctgcgggatagcaagagcagcgacaagagcgtgtgtctgttcaccgacttcgacagccagaccaacgtgtcccagagcaaggactccgacgtgtacatcaccgataagtgcgtgctggacatgcggagcatggacttcaagagcaactccgccgtggcctggtccaacaagtccgatttcgcctgcgccaacgccttcaacaacagcattatccccgaggacacattcttcccaagccccgagagcagcgactccaccgaccacgtgaagcccaaagagacagagaacaccaagcagcccagcaagagctgccacaagcccaaggccatcgtgcacaccgagaaagtgaacatgatgagcctgaccgtgctgggcctgcggatgctgttcgccaaaaccgtggccgtgaacttcctgctgaccgccaagctgttcttcctcctcaccgcccgcgccaagagaagcggatctggcgtgaagcagaccctgaatttcgacctgctgaagctggctggcgacgtggaatccaacccaggccctactagtatggactggatttggcgcatccttttccttgtcggcgctgctaccggcgcgcattccgggccccagctccagctgcaagagtctggacctggcctggtcaagcctagcgagacactgagcctgacctgtaccgtgtccggcgatagcatcagcagcggcgattactactggggctggatcagacagcctcctggcaaaggactggaatggatcggccacatctactacagcggcgtgacctactacaaccccagcctgaagtccagagtgaccatcagcgtggacaccagccggaaccagttctccctgaagctgtctagcgtgacagccgccgataccgccgtgtactactgcaccagagaggacagcagcaactggcggagtagaggccagggaacactggtcacagttagctctggatccggcggaggcggaagtggaggcggaggatctggcggcggaggctctttcgaagtccaacttgtggagtctggagggggcctggtgcagcccggcggctctctcagactgtcttgtgcggcaagcggctacaccttcagctcttactggatagaatgggtgaggcaggcacctggaaagggactggagtggattggagagattctgccaggagggggagatacaaattacaatgaaatcttcaaggggcgggccaccttttcagcggataccagcaagaatacagcttacctgcagatgaatagcctccgggcagaagataccgctgtttattattgcacgagacgggtgccaataagactggactattgggggcaagggactcttgtcaccgtcagttcaacgcgtgaggacctgaagaacgtgttcccacctgaggtggccgtgttcgagcctagcgaggccgagatcagccacacccagaaagccaccctcgtgtgcctggctaccggcttctaccccgaccatgtggaactgtcttggtgggtcaacggcaaagaggtgcacagcggcgtgtgtaccgacccccagccactgaaagaacagcccgccctgaacgacagccggtactgcctgagcagcagactgagagtgtccgccaccttctggcagaacccccggaaccacttcagatgccaggtgcagttctacggcctgagcgagaacgacgagtggacccaggacagagccaagcccgtgacccagatcgtgtctgccgaagcctggggcagagccgatgatgtgattaagatccactggcaggaaaagaagtccaacaccatcctgggcagccaggaaggcaacaccatgaagaccaacgacacctacatgaagttcagctggctgaccgtgcccgagaagtccctggacaaagaacacagatgcatcgtgcggcacgaaaacaacaagaacggcgtggaccaggaaatcatcttcccacccatcaagaccgatgtgattacaatggaccccaaggacaactgctccaaggacgccaacgataccctgctgctccagctgaccaacaccagcgcctactacatgtacttgttgctgctgctgaagtccgtggtgtacttcgccatcatcacatgctgcctgctgatggctatggtcaagcggaaggacagccgggga

SEQ ID NO: 6276 - DNA, 2166 bp, synthetic construct
  source 1..2166: mol_type = other DNA
atggccttaccagtgaccgccttgctcctgccgctggccttgctgctccacgccgccaggccggacatcgtgatgacacagagccctgatagcctggccgtgtctctgggagagagagccaccattaactgcaaggccagccagagcgtggactacgacggcgacagcttcctgaactggtatcagcagaagcccggccagcctcctaagctgctgatctacgccgccagcaatctggaaagcggcgtgccaagcagattttccggctctggcagcggcaccgatttcaccctgacaatatccagcctccagcctgaggacgtggccgtgtactactgccagcagagcaacgacgaccctctgacctttggacagggcaccaaggtggaaatcaaactcgaggacctgaagaacgtgttcccacctgaggtggccgtgttcgagcctagcgaggccgagatcagccacacccagaaagccaccctcgtgtgcctggctaccggcttctaccccgaccatgtggaactgtcttggtgggtcaacggcaaagaggtgcacagcggcgtgtgtaccgacccccagccactgaaagaacagcccgccctgaacgacagccggtactgcctgagcagcagactgagagtgtccgccaccttctggcagaacccccggaaccacttcagatgccaggtgcagttctacggcctgagcgagaacgacgagtggacccaggacagagccaagcccgtgacccagatcgtgtctgccgaagcctggggcagagccgatgatgtgattaagatccactggcaggaaaagaagtccaacaccatcctgggcagccaggaaggcaacaccatgaagaccaacgacacctacatgaagttcagctggctgaccgtgcccgagaagtccctggacaaagaacacagatgcatcgtgcggcacgaaaacaacaagaacggcgtggaccaggaaatcatcttcccacccatcaagaccgatgtgattacaatggaccccaaggacaactgctccaaggacgccaacgataccctgctgctccagctgaccaacaccagcgcctactacatgtacttgttgctgctgctgaagtccgtggtgtacttcgccatcatcacatgctgcctgctgcggagaaccgccttctgctgcaacggcgagaagtctagggccaagcgatctggatctggagcaacaaacttctcactactcaaacaagcaggtgacgtggaggagaatcccgggcctactagtatggactggatttggcgcatccttttccttgtcggcgctgctaccggcgcgcattccttcgaagtccaacttgtggagtctggagggggcctggtgcagcccggcggctctctcagactgtcttgtgcggcaagcggctacaccttcagctcttactggatagaatgggtgaggcaggcacctggaaagggactggagtggattggagagattctgccaggagggggagatacaaattacaatgaaatcttcaaggggcgggccaccttttcagcggataccagcaagaatacagcttacctgcagatgaatagcctccgggcagaagataccgctgtttattattgcacgagacgggtgccaataagactggactattgggggcaagggactcttgtcaccgtcagttcaacgcgtatccagaaccctgatcctgccgtgtaccagctgcgggatagcaagagcagcgacaagagcgtgtgtctgttcaccgacttcgacagccagaccaacgtgtcccagagcaaggactccgacgtgtacatcaccgataagtgcgtgctggacatgcggagcatggacttcaagagcaactccgccgtggcctggtccaacaagtccgatttcgcctgcgccaacgccttcaacaacagcattatccccgaggacacattcttcccaagccccgagagcagcgactccaccgaccacgtgaagcccaaagagacagagaacaccaagcagcccagcaagagctgccacaagcccaaggccatcgtgcacaccgagaaagtgaacatgatgagcctgaccgtgctgggcctgcggatgctgttcgccaaaaccgtggccgtgaacttcctgctgaccgccaagctgttcttcctc

SEQ ID NO: 6277 - DNA, 2178 bp, synthetic construct
  source 1..2178: mol_type = other DNA
atggccttaccagtgaccgccttgctcctgccgctggccttgctgctccacgccgccaggccggacatcgtgatgacacagagccctgatagcctggccgtgtctctgggagagagagccaccattaactgcaaggccagccagagcgtggactacgacggcgacagcttcctgaactggtatcagcagaagcccggccagcctcctaagctgctgatctacgccgccagcaatctggaaagcggcgtgccaagcagattttccggctctggcagcggcaccgatttcaccctgacaatatccagcctccagcctgaggacgtggccgtgtactactgccagcagagcaacgacgaccctctgacctttggacagggcaccaaggtggaaatcaaactcgagatccagaaccctgatcctgccgtgtaccagctgcgggatagcaagagcagcgacaagagcgtgtgtctgttcaccgacttcgacagccagaccaacgtgtcccagagcaaggactccgacgtgtacatcaccgataagtgcgtgctggacatgcggagcatggacttcaagagcaactccgccgtggcctggtccaacaagtccgatttcgcctgcgccaacgccttcaacaacagcattatccccgaggacacattcttcccaagccccgagagcagcgactccaccgaccacgtgaagcccaaagagacagagaacaccaagcagcccagcaagagctgccacaagcccaaggccatcgtgcacaccgagaaagtgaacatgatgagcctgaccgtgctgggcctgcggatgctgttcgccaaaaccgtggccgtgaacttcctgctgaccgccaagctgttcttcctccgcgccaagagaagcggatctggcgtgaagcagaccctgaatttcgacctgctgaagctggctggcgacgtggaatccaacccaggccctactagtatggactggatttggcgcatccttttccttgtcggcgctgctaccggcgcgcattccttcgaagtccaacttgtggagtctggagggggcctggtgcagcccggcggctctctcagactgtcttgtgcggcaagcggctacaccttcagctcttactggatagaatgggtgaggcaggcacctggaaagggactggagtggattggagagattctgccaggagggggagatacaaattacaatgaaatcttcaaggggcgggccaccttttcagcggataccagcaagaatacagcttacctgcagatgaatagcctccgggcagaagataccgctgtttattattgcacgagacgggtgccaataagactggactattgggggcaagggactcttgtcaccgtcagttcaacgcgtgaggacctgaagaacgtgttcccacctgaggtggccgtgttcgagcctagcgaggccgagatcagccacacccagaaagccaccctcgtgtgcctggctaccggcttctaccccgaccatgtggaactgtcttggtgggtcaacggcaaagaggtgcacagcggcgtgtgtaccgacccccagccactgaaagaacagcccgccctgaacgacagccggtactgcctgagcagcagactgagagtgtccgccaccttctggcagaacccccggaaccacttcagatgccaggtgcagttctacggcctgagcgagaacgacgagtggacccaggacagagccaagcccgtgacccagatcgtgtctgccgaagcctggggcagagccgatgatgtgattaagatccactggcaggaaaagaagtccaacaccatcctgggcagccaggaaggcaacaccatgaagaccaacgacacctacatgaagttcagctggctgaccgtgcccgagaagtccctggacaaagaacacagatgcatcgtgcggcacgaaaacaacaagaacggcgtggaccaggaaatcatcttcccacccatcaagaccgatgtgattacaatggaccccaaggacaactgctccaaggacgccaacgataccctgctgctccagctgaccaacaccagcgcctactacatgtacttgttgctgctgctgaagtccgtggtgtacttcgccatcatcacatgctgcctgctgcggagaaccgccttctgctgcaacggcgagaagtct

SEQ ID NO: 6278 - DNA, 2571 bp, synthetic construct
  source 1..2571: mol_type = other DNA
atggccttaccagtgaccgccttgctcctgccgctggccttgctgctccacgccgccaggccggaagtgcagctggttgaatctggcggaggactggttcagcctggcggatctctgagactgtcttgtgccgccagcggcttcagcttcagcgacttttggatgagctgggtccgacaggcccctggcaaaggacttgaatgggtcgccacaatcagccaggccggcagcgagaaggactacgtggactctgtgaagggcagattcaccatcagccgggacaacgccaagaagtccctgtacctccagatgaacagcctgagagccgaggacaccgccgtgtactattgtgcctctggcgtgtacagcttcgactacagaggccagggcaccctggtcacagtctcttctggtaccggcggaggcggatctggcggcggaggtagcggtggcggaggatctgaattcgacatcgtgatgacacagagccctgatagcctggccgtgtctctgggagagagagccaccattaactgcaaggccagccagagcgtggactacgacggcgacagcttcctgaactggtatcagcagaagcccggccagcctcctaagctgctgatctacgccgccagcaatctggaaagcggcgtgccaagcagattttccggctctggcagcggcaccgatttcaccctgacaatatccagcctccagcctgaggacgtggccgtgtactactgccagcagagcaacgacgaccctctgacctttggacagggcaccaaggtggaaatcaaactcgaggacctgaagaacgtgttcccacctgaggtggccgtgttcgagcctagcgaggccgagatcagccacacccagaaagccaccctcgtgtgcctggctaccggcttctaccccgaccatgtggaactgtcttggtgggtcaacggcaaagaggtgcacagcggcgtgtgtaccgacccccagccactgaaagaacagcccgccctgaacgacagccggtactgcctgagcagcagactgagagtgtccgccaccttctggcagaacccccggaaccacttcagatgccaggtgcagttctacggcctgagcgagaacgacgagtggacccaggacagagccaagcccgtgacccagatcgtgtctgccgaagcctggggcagagccgatgatgtgattaagatccactggcaggaaaagaagtccaacaccatcctgggcagccaggaaggcaacaccatgaagaccaacgacacctacatgaagttcagctggctgaccgtgcccgagaagtccctggacaaagaacacagatgcatcgtgcggcacgaaaacaacaagaacggcgtggaccaggaaatcatcttcccacccatcaagaccgatgtgattacaatggaccccaaggacaactgctccaaggacgccaacgataccctgctgctccagctgaccaacaccagcgcctactacatgtacttgttgctgctgctgaagtccgtggtgtacttcgccatcatcacatgctgcctgctgcggagaaccgccttctgctgcaacggcgagaagtctagggccaagcgatctggatctggagcaacaaacttctcactactcaaacaagcaggtgacgtggaggagaatcccgggcctactagtatggactggatttggcgcatccttttccttgtcggcgctgctaccggcgcgcattccttcgaagtccaacttgtggagtctggagggggcctggtgcagcccggcggctctctcagactgtcttgtgcggcaagcggctacaccttcagctcttactggatagaatgggtgaggcaggcacctggaaagggactggagtggattggagagattctgccaggagggggagatacaaattacaatgaaatcttcaaggggcgggccaccttttcagcggataccagcaagaatacagcttacctgcagatgaatagcctccgggcagaagataccgctgtttattattgcacgagacgggtgccaataagactggactattgggggcaagggactcttgtcaccgtcagttcaacgcgtatccagaaccctgatcctgccgtgtaccagctgcgggatagcaagagcagcgacaagagcgtgtgtctgttcaccgacttcgacagccagaccaacgtgtcccagagcaaggactccgacgtgtacatcaccgataagtgcgtgctggacatgcggagcatggacttcaagagcaactccgccgtggcctggtccaacaagtccgatttcgcctgcgccaacgccttcaacaacagcattatccccgaggacacattcttcccaagccccgagagcagcgactccaccgaccacgtgaagcccaaagagacagagaacaccaagcagcccagcaagagctgccacaagcccaaggccatcgtgcacaccgagaaagtgaacatgatgagcctgaccgtgctgggcctgcggatgctgttcgccaaaaccgtggccgtgaacttcctgctgaccgccaagctgttcttcctc

SEQ ID NO: 6279 - DNA, 2982 bp, synthetic construct
  source 1..2982: mol_type = other DNA
atggccttaccagtgaccgccttgctcctgccgctggccttgctgctccacgccgccaggccggaagtgcagctggttgaatctggcggaggactggttcagcctggcggatctctgagactgtcttgtgccgccagcggcttcagcttcagcgacttttggatgagctgggtccgacaggcccctggcaaaggacttgaatgggtcgccacaatcagccaggccggcagcgagaaggactacgtggactctgtgaagggcagattcaccatcagccgggacaacgccaagaagtccctgtacctccagatgaacagcctgagagccgaggacaccgccgtgtactattgtgcctctggcgtgtacagcttcgactacagaggccagggcaccctggtcacagtctcttctggtaccggcggaggcggatctggcggcggaggtagcggtggcggaggatctgaattcgacatcgtgatgacacagagccctgatagcctggccgtgtctctgggagagagagccaccattaactgcaaggccagccagagcgtggactacgacggcgacagcttcctgaactggtatcagcagaagcccggccagcctcctaagctgctgatctacgccgccagcaatctggaaagcggcgtgccaagcagattttccggctctggcagcggcaccgatttcaccctgacaatatccagcctccagcctgaggacgtggccgtgtactactgccagcagagcaacgacgaccctctgacctttggacagggcaccaaggtggaaatcaaactcgaggacctgaagaacgtgttcccacctgaggtggccgtgttcgagcctagcgaggccgagatcagccacacccagaaagccaccctcgtgtgcctggctaccggcttctaccccgaccatgtggaactgtcttggtgggtcaacggcaaagaggtgcacagcggcgtgtgtaccgacccccagccactgaaagaacagcccgccctgaacgacagccggtactgcctgagcagcagactgagagtgtccgccaccttctggcagaacccccggaaccacttcagatgccaggtgcagttctacggcctgagcgagaacgacgagtggacccaggacagagccaagcccgtgacccagatcgtgtctgccgaagcctggggcagagccgatgatgtgattaagatccactggcaggaaaagaagtccaacaccatcctgggcagccaggaaggcaacaccatgaagaccaacgacacctacatgaagttcagctggctgaccgtgcccgagaagtccctggacaaagaacacagatgcatcgtgcggcacgaaaacaacaagaacggcgtggaccaggaaatcatcttcccacccatcaagaccgatgtgattacaatggaccccaaggacaactgctccaaggacgccaacgataccctgctgctccagctgaccaacaccagcgcctactacatgtacttgttgctgctgctgaagtccgtggtgtacttcgccatcatcacatgctgcctgctgcggagaaccgccttctgctgcaacggcgagaagtctagggccaagcgatctggatctggagcaacaaacttctcactactcaaacaagcaggtgacgtggaggagaatcccgggcctactagtatggactggatttggcgcatccttttccttgtcggcgctgctaccggcgcgcattccgggccccagctccagctgcaagagtctggacctggcctggtcaagcctagcgagacactgagcctgacctgtaccgtgtccggcgatagcatcagcagcggcgattactactggggctggatcagacagcctcctggcaaaggactggaatggatcggccacatctactacagcggcgtgacctactacaaccccagcctgaagtccagagtgaccatcagcgtggacaccagccggaaccagttctccctgaagctgtctagcgtgacagccgccgataccgccgtgtactactgcaccagagaggacagcagcaactggcggagtagaggccagggaacactggtcacagttagctctggatccggcggaggcggaagtggaggcggaggatctggcggcggaggctctttcgaagtccaacttgtggagtctggagggggcctggtgcagcccggcggctctctcagactgtcttgtgcggcaagcggctacaccttcagctcttactggatagaatgggtgaggcaggcacctggaaagggactggagtggattggagagattctgccaggagggggagatacaaattacaatgaaatcttcaaggggcgggccaccttttcagcggataccagcaagaatacagcttacctgcagatgaatagcctccgggcagaagataccgctgtttattattgcacgagacgggtgccaataagactggactattgggggcaagggactcttgtcaccgtcagttcaacgcgtatccagaaccctgatcctgccgtgtaccagctgcgggatagcaagagcagcgacaagagcgtgtgtctgttcaccgacttcgacagccagaccaacgtgtcccagagcaaggactccgacgtgtacatcaccgataagtgcgtgctggacatgcggagcatggacttcaagagcaactccgccgtggcctggtccaacaagtccgatttcgcctgcgccaacgccttcaacaacagcattatccccgaggacacattcttcccaagccccgagagcagcgactccaccgaccacgtgaagcccaaagagacagagaacaccaagcagcccagcaagagctgccacaagcccaaggccatcgtgcacaccgagaaagtgaacatgatgagcctgaccgtgctgggcctgcggatgctgttcgccaaaaccgtggccgtgaacttcctgctgaccgccaagctgttcttcctc

SEQ ID NO: 6280 - DNA, 1860 bp, synthetic construct
  source 1..1860: mol_type = other DNA
atggccttaccagtgaccgccttgctcctgccgctggccttgctgctccacgccgccaggccggacatcgtgatgacacagagccctgatagcctggccgtgtctctgggagagagagccaccattaactgcaaggccagccagagcgtggactacgacggcgacagcttcctgaactggtatcagcagaagcccggccagcctcctaagctgctgatctacgccgccagcaatctggaaagcggcgtgccaagcagattttccggctctggcagcggcaccgatttcaccctgacaatatccagcctccagcctgaggacgtggccgtgtactactgccagcagagcaacgacgaccctctgacctttggacagggcaccaaggtggaaatcaaactcgaggacctgaagaacgtgttcccacctgaggtggccgtgttcgagcctagcgaggccgagatcagccacacccagaaagccaccctcgtgtgcctggctaccggcttctaccccgaccatgtggaactgtcttggtgggtcaacggcaaagaggtgcacagcggcgtgtctaccgacccccagccactgaaagaacagcccgccctgaacgacagccggtactgcctgagcagcagactgagagtgtccgccaccttctggcagaacccccggaaccacttcagatgccaggtgcagttctacggcctgagcgagaacgacgagtggacccaggacagagccaagcccgtgacccagatcgtgtctgccgaagcctggggcagagccgattgcgacgtgaagctggtggaaaagagcttcgagacagacaccaacctgaacttccagaacctgagcgtgatcggcttcagaatcctgctgctgaaagtggccggctttaacctgctgatgaccctgcggctgtggtccagcagggccaagcgatctggatctggagcaacaaacttctcactactcaaacaagcaggtgacgtggaggagaatcccgggcctactagtatggactggatttggcgcatccttttccttgtcggcgctgctaccggcgcgcattccttcgaagtccaacttgtggagtctggagggggcctggtgcagcccggcggctctctcagactgtcttgtgcggcaagcggctacaccttcagctcttactggatagaatgggtgaggcaggcacctggaaagggactggagtggattggagagattctgccaggagggggagatacaaattacaatgaaatcttcaaggggcgggccaccttttcagcggataccagcaagaatacagcttacctgcagatgaatagcctccgggcagaagataccgctgtttattattgcacgagacgggtgccaataagactggactattgggggcaagggactcttgtcaccgtcagttcaacgcgtatccagaaccctgatcctgccgtgtaccagctgcgggatagcaagagcagcgacaagagcgtgtgtctgttcaccgacttcgacagccagaccaacgtgtcccagagcaaggactccgacgtgtacatcaccgataagaccgtgctggacatgcggagcatggacttcaagagcaactccgccgtggcctggtccaacaagtccgatttcgcctgcgccaacgccttcaacaacagcattatccccgaggacacattcttcccaagccccgagagcagctgcggctttaccagcgagagctaccagcagggcgtgctgagcgccaccatcctgtacgagatcctgctgggcaaggccaccctgtacgccgtgctggtgtctgccctggtgctgatggctatggtcaagcggaaggacagccgggga

SEQ ID NO: 6281 - DNA, 1860 bp, synthetic construct
  source 1..1860: mol_type = other DNA
atggccttaccagtgaccgccttgctcctgccgctggccttgctgctccacgccgccaggccggacatcgtgatgacacagagccctgatagcctggccgtgtctctgggagagagagccaccattaactgcaaggccagccagagcgtggactacgacggcgacagcttcctgaactggtatcagcagaagcccggccagcctcctaagctgctgatctacgccgccagcaatctggaaagcggcgtgccaagcagattttccggctctggcagcggcaccgatttcaccctgacaatatccagcctccagcctgaggacgtggccgtgtactactgccagcagagcaacgacgaccctctgacctttggacagggcaccaaggtggaaatcaaactcgaggacctgaagaacgtgttcccacctgaggtggccgtgttcgagcctagcgaggccgagatcagccacacccagaaagccaccctcgtgtgcctggctaccggcttctaccccgaccatgtggaactgtcttggtgggtcaacggcaaagaggtgcacagcggcgtgtctaccgacccccagccactgaaagaacagcccgccctgaacgacagccggtactgcctgagcagcagactgagagtgtccgccaccttctggcagaacccccggaaccacttcagatgccaggtgcagttctacggcctgagcgagaacgacgagtggacccaggacagagccaagcccgtgacccagatcgtgtctgccgaagcctggggcagagccgattgcggctttaccagcgagagctaccagcagggcgtgctgagcgccaccaacctgagcgtgatcggcttcagaatcctgctgctgaaagtggccggctttaacctgctgatgaccctgcggctgtggtccagcagggccaagcgatctggatctggagcaacaaacttctcactactcaaacaagcaggtgacgtggaggagaatcccgggcctactagtatggactggatttggcgcatccttttccttgtcggcgctgctaccggcgcgcattccttcgaagtccaacttgtggagtctggagggggcctggtgcagcccggcggctctctcagactgtcttgtgcggcaagcggctacaccttcagctcttactggatagaatgggtgaggcaggcacctggaaagggactggagtggattggagagattctgccaggagggggagatacaaattacaatgaaatcttcaaggggcgggccaccttttcagcggataccagcaagaatacagcttacctgcagatgaatagcctccgggcagaagataccgctgtttattattgcacgagacgggtgccaataagactggactattgggggcaagggactcttgtcaccgtcagttcaacgcgtatccagaaccctgatcctgccgtgtaccagctgcgggatagcaagagcagcgacaagagcgtgtgtctgttcaccgacttcgacagccagaccaacgtgtcccagagcaaggactccgacgtgtacatcaccgataagaccgtgctggacatgcggagcatggacttcaagagcaactccgccgtggcctggtccaacaagtccgatttcgcctgcgccaacgccttcaacaacagcattatccccgaggacacattcttcccaagccccgagagcagctgcgacgtgaagctggtggaaaagagcttcgagacagacaccaacctgaacttccagatcctgtacgagatcctgctgggcaaggccaccctgtacgccgtgctggtgtctgccctggtgctgatggctatggtcaagcggaaggacagccgggga

SEQ ID NO: 6282 - DNA, 2172 bp, synthetic construct
  source 1..2172: mol_type = other DNA
atggccttaccagtgaccgccttgctcctgccgctggccttgctgctccacgccgccaggccggacatcgtgatgacacagagccctgatagcctggccgtgtctctgggagagagagccaccattaactgcaaggccagccagagcgtggactacgacggcgacagcttcctgaactggtatcagcagaagcccggccagcctcctaagctgctgatctacgccgccagcaatctggaaagcggcgtgccaagcagattttccggctctggcagcggcaccgatttcaccctgacaatatccagcctccagcctgaggacgtggccgtgtactactgccagcagagcaacgacgaccctctgacctttggacagggcaccaaggtggaaatcaaactcgaggacctgaagaacgtgttcccacctgaggtggccgtgttcgagcctagcgaggccgagatcagccacacccagaaagccaccctcgtgtgcctggctaccggcttctaccccgaccatgtggaactgtcttggtgggtcaacggcaaagaggtgcacagcggcgtgtctaccgacccccagccactgaaagaacagcccgccctgaacgacagccggtactgcctgagcagcagactgagagtgtccgccaccttctggcagaacccccggaaccacttcagatgccaggtgcagttctacggcctgagcgagaacgacgagtggacccaggacagagccaagcccgtgacccagatcgtgtctgccgaagcctggggcagagccgatgatgtgattaagatccactggcaggaaaagaagtccaacaccatcctgggcagccaggaaggcaacaccatgaagaccaacgacacctacatgaagttcagctggctgaccgtgcccgagaagtccctggacaaagaacacagatgcatcgtgcggcacgaaaacaacaagaacggcgtggaccaggaaatcatcttcccacccatcaagaccgatgtgattacaatggaccccaaggacaactgctccaaggacgccaacgataccctgctgctccagctgaccaacaccagcgcctactacatgtacttgttgctgctgctgaagtccgtggtgtacttcgccatcatcacatgctgcctgctgatggctatggtcaagcggaaggacagccggggaagggccaagcgatctggatctggagcaacaaacttctcactactcaaacaagcaggtgacgtggaggagaatcccgggcctactagtatggactggatttggcgcatccttttccttgtcggcgctgctaccggcgcgcattccttcgaagtccaacttgtggagtctggagggggcctggtgcagcccggcggctctctcagactgtcttgtgcggcaagcggctacaccttcagctcttactggatagaatgggtgaggcaggcacctggaaagggactggagtggattggagagattctgccaggagggggagatacaaattacaatgaaatcttcaaggggcgggccaccttttcagcggataccagcaagaatacagcttacctgcagatgaatagcctccgggcagaagataccgctgtttattattgcacgagacgggtgccaataagactggactattgggggcaagggactcttgtcaccgtcagttcaacgcgtatccagaaccctgatcctgccgtgtaccagctgcgggatagcaagagcagcgacaagagcgtgtgtctgttcaccgacttcgacagccagaccaacgtgtcccagagcaaggactccgacgtgtacatcaccgataagaccgtgctggacatgcggagcatggacttcaagagcaactccgccgtggcctggtccaacaagtccgatttcgcctgcgccaacgccttcaacaacagcattatccccgaggacacattcttcccaagccccgagagcagcgactccaccgaccacgtgaagcccaaagagacagagaacaccaagcagcccagcaagagctgccacaagcccaaggccatcgtgcacaccgagaaagtgaacatgatgagcctgaccgtgctgggcctgcggatgctgttcgccaaaaccgtggccgtgaacttcctgctgaccgccaagctgttcttcctcctcaccgcc

SEQ ID NO: 6283 - DNA, 2166 bp, synthetic construct
  source 1..2166: mol_type = other DNA
atggccttaccagtgaccgccttgctcctgccgctggccttgctgctccacgccgccaggccggacatcgtgatgacacagagccctgatagcctggccgtgtctctgggagagagagccaccattaactgcaaggccagccagagcgtggactacgacggcgacagcttcctgaactggtatcagcagaagcccggccagcctcctaagctgctgatctacgccgccagcaatctggaaagcggcgtgccaagcagattttccggctctggcagcggcaccgatttcaccctgacaatatccagcctccagcctgaggacgtggccgtgtactactgccagcagagcaacgacgaccctctgacctttggacagggcaccaaggtggaaatcaaactcgaggacctgaagaacgtgttcccacctgaggtggccgtgttcgagcctagcgaggccgagatcagccacacccagaaagccaccctcgtgtgcctggctaccggcttctaccccgaccatgtggaactgtcttggtgggtcaacggcaaagaggtgcacagcggcgtgtctaccgacccccagccactgaaagaacagcccgccctgaacgacagccggtactgcctgagcagcagactgagagtgtccgccaccttctggcagaacccccggaaccacttcagatgccaggtgcagttctacggcctgagcgagaacgacgagtggacccaggacagagccaagcccgtgacccagatcgtgtctgccgaagcctggggcagagccgatgatgtgattaagatccactggcaggaaaagaagtccaacaccatcctgggcagccaggaaggcaacaccatgaagaccaacgacacctacatgaagttcagctggctgaccgtgcccgagaagtccctggacaaagaacacagatgcatcgtgcggcacgaaaacaacaagaacggcgtggaccaggaaatcatcttcccacccatcaagaccgatgtgattacaatggaccccaaggacaactgctccaaggacgccaacgataccctgctgctccagctgaccaacaccagcgcctactacatgtacttgttgctgctgctgaagtccgtggtgtacttcgccatcatcacatgctgcctgctgcggagaaccgccttctgctgcaacggcgagaagtctagggccaagcgatctggatctggagcaacaaacttctcactactcaaacaagcaggtgacgtggaggagaatcccgggcctactagtatggactggatttggcgcatccttttccttgtcggcgctgctaccggcgcgcattccttcgaagtccaacttgtggagtctggagggggcctggtgcagcccggcggctctctcagactgtcttgtgcggcaagcggctacaccttcagctcttactggatagaatgggtgaggcaggcacctggaaagggactggagtggattggagagattctgccaggagggggagatacaaattacaatgaaatcttcaaggggcgggccaccttttcagcggataccagcaagaatacagcttacctgcagatgaatagcctccgggcagaagataccgctgtttattattgcacgagacgggtgccaataagactggactattgggggcaagggactcttgtcaccgtcagttcaacgcgtatccagaaccctgatcctgccgtgtaccagctgcgggatagcaagagcagcgacaagagcgtgtgtctgttcaccgacttcgacagccagaccaacgtgtcccagagcaaggactccgacgtgtacatcaccgataagaccgtgctggacatgcggagcatggacttcaagagcaactccgccgtggcctggtccaacaagtccgatttcgcctgcgccaacgccttcaacaacagcattatccccgaggacacattcttcccaagccccgagagcagcgactccaccgaccacgtgaagcccaaagagacagagaacaccaagcagcccagcaagagctgccacaagcccaaggccatcgtgcacaccgagaaagtgaacatgatgagcctgaccgtgctgggcctgcggatgctgttcgccaaaaccgtggccgtgaacttcctgctgaccgccaagctgttcttcctc

SEQ ID NO: 6284 - DNA, 2601 bp, synthetic construct
  source 1..2601: mol_type = other DNA
atggccttaccagtgaccgccttgctcctgccgctggccttgctgctccacgccgccaggccgctcgaggaggacctgaagaacgtgttcccacctgaggtggccgtgttcgagcctagcgaggccgagatcagccacacccagaaagccaccctcgtgtgcctggctaccggcttctaccccgaccatgtggaactgtcttggtgggtcaacggcaaagaggtgcacagcggcgtgtgtaccgacccccagccactgaaagaacagcccgccctgaacgacagccggtactgcctgagcagcagactgagagtgtccgccaccttctggcagaacccccggaaccacttcagatgccaggtgcagttctacggcctgagcgagaacgacgagtggacccaggacagagccaagcccgtgacccagatcgtgtctgccgaagcctggggcagagccgattgcggctttaccagcgagagctaccagcagggcgtgctgagcgccaccaacctgagcgtgatcggcttcagaatcctgctgctgaaagtggccggctttaacctgctgatgaccctgcggctgtggtccagcagggccaagcgatctggatctggagcaacaaacttctcactactcaaacaagcaggtgacgtggaggagaatcccgggcctactagcatggccttaccagtgaccgccttgctcctgccgctggccttgctgctccacgccgccaggccggacatcgtgatgacacagagccctgatagcctggccgtgtctctgggagagagagccaccattaactgcaaggccagccagagcgtggactacgacggcgacagcttcctgaactggtatcagcagaagcccggccagcctcctaagctgctgatctacgccgccagcaatctggaaagcggcgtgccaagcagattttccggctctggcagcggcaccgatttcaccctgacaatatccagcctccagcctgaggacgtggccgtgtactactgccagcagagcaacgacgaccctctgacctttggacagggcaccaaggtggaaatcaaaggcggaggcggaagtggaggcggaggatctggcggcggaggctctgaagtccaacttgtggagtctggagggggcctggtgcagcccggcggctctctcagactgtcttgtgcggcaagcggctacaccttcagctcttactggatagaatgggtgaggcaggcacctggaaagggactggagtggattggagagattctgccaggagggggagatacaaattacaatgaaatcttcaaggggcgggccaccttttcagcggataccagcaagaatacagcttacctgcagatgaatagcctccgggcagaagataccgctgtttattattgcacgagacgggtgccaataagactggactattgggggcaagggactcttgtcaccgtcagttcaacgcgtatccagaaccctgatcctgccgtgtaccagctgcgggatagcaagagcagcgacaagagcgtgtgtctgttcaccgacttcgacagccagaccaacgtgtcccagagcaaggactccgacgtgtacatcaccgataagtgcgtgctggacatgcggagcatggacttcaagagcaactccgccgtggcctggtccaacaagtccgatttcgcctgcgccaacgccttcaacaacagcattatccccgaggacacattcttcccaagccccgagagcagctgcgacgtgaagctggtggaaaagagcttcgagacagacaccaacctgaacttccagatcctgtacgaggtgatcggcttcagaatcctgctgctgaaagtggccggctttaacctgctgatgaccctgcggctgtggtccagccgcgccaagagaagcggatctggcgtgaagcagaccctgaatttcgacctgctgaagctggctggcgacgtggaatccaacccaggcccttctagaggccatatgaccgagtacaagcccacggtgcgcctcgccacccgcgacgacgtccccagggccgtacgcaccctcgccgccgcgttcgccgactaccccgccacgcgccacaccgtcgatccggaccgccacatcgagcgggtcaccgagctgcaagaactcttcctcacgcgcgtcgggctcgacatcggcaaggtgtgggtcgcggacgacggcgccgcggtggcggtctggaccacgccggagagcgtcgaagcgggggcggtgttcgccgagatcggcccgcgcatggccgagttgagcggttcccggctggccgcgcagcaacagatggaaggcctcctggcgccgcaccggcccaaggagcccgcgtggttcctggccaccgtcggcgtctcgcccgaccaccagggcaagggtctgggcagcgccgtcgtgctccccggagtggaggcggccgagcgcgccggggtgcccgccttcctggagacctccgcgccccgcaacctccccttctacgagcggctcggcttcaccgtcaccgccgacgtcgaggtgcccgaaggaccgcgcacctggtgcatgacccgcaagcccggtgcctga

SEQ ID NO: 6285 - DNA, 2601 bp, synthetic construct
  source 1..2601: mol_type = other DNA
atggccttaccagtgaccgccttgctcctgccgctggccttgctgctccacgccgccaggccgctcgagatccagaaccctgatcctgccgtgtaccagctgcgggatagcaagagcagcgacaagagcgtgtgtctgttcaccgacttcgacagccagaccaacgtgtcccagagcaaggactccgacgtgtacatcaccgataagtgcgtgctggacatgcggagcatggacttcaagagcaactccgccgtggcctggtccaacaagtccgatttcgcctgcgccaacgccttcaacaacagcattatccccgaggacacattcttcccaagccccgagagcagctgcgacgtgaagctggtggaaaagagcttcgagacagacaccaacctgaacttccagatcctgtacgaggtgatcggcttcagaatcctgctgctgaaagtggccggctttaacctgctgatgaccctgcggctgtggtccagcagggccaagcgatctggatctggagcaacaaacttctcactactcaaacaagcaggtgacgtggaggagaatcccgggcctactagcatggccttaccagtgaccgccttgctcctgccgctggccttgctgctccacgccgccaggccggacatcgtgatgacacagagccctgatagcctggccgtgtctctgggagagagagccaccattaactgcaaggccagccagagcgtggactacgacggcgacagcttcctgaactggtatcagcagaagcccggccagcctcctaagctgctgatctacgccgccagcaatctggaaagcggcgtgccaagcagattttccggctctggcagcggcaccgatttcaccctgacaatatccagcctccagcctgaggacgtggccgtgtactactgccagcagagcaacgacgaccctctgacctttggacagggcaccaaggtggaaatcaaaggcggaggcggaagtggaggcggaggatctggcggcggaggctctgaagtccaacttgtggagtctggagggggcctggtgcagcccggcggctctctcagactgtcttgtgcggcaagcggctacaccttcagctcttactggatagaatgggtgaggcaggcacctggaaagggactggagtggattggagagattctgccaggagggggagatacaaattacaatgaaatcttcaaggggcgggccaccttttcagcggataccagcaagaatacagcttacctgcagatgaatagcctccgggcagaagataccgctgtttattattgcacgagacgggtgccaataagactggactattgggggcaagggactcttgtcaccgtcagttcaacgcgtgaggacctgaagaacgtgttcccacctgaggtggccgtgttcgagcctagcgaggccgagatcagccacacccagaaagccaccctcgtgtgcctggctaccggcttctaccccgaccatgtggaactgtcttggtgggtcaacggcaaagaggtgcacagcggcgtgtgtaccgacccccagccactgaaagaacagcccgccctgaacgacagccggtactgcctgagcagcagactgagagtgtccgccaccttctggcagaacccccggaaccacttcagatgccaggtgcagttctacggcctgagcgagaacgacgagtggacccaggacagagccaagcccgtgacccagatcgtgtctgccgaagcctggggcagagccgattgcggctttaccagcgagagctaccagcagggcgtgctgagcgccaccaacctgagcgtgatcggcttcagaatcctgctgctgaaagtggccggctttaacctgctgatgaccctgcggctgtggtccagccgcgccaagagaagcggatctggcgtgaagcagaccctgaatttcgacctgctgaagctggctggcgacgtggaatccaacccaggcccttctagaggccatatgaccgagtacaagcccacggtgcgcctcgccacccgcgacgacgtccccagggccgtacgcaccctcgccgccgcgttcgccgactaccccgccacgcgccacaccgtcgatccggaccgccacatcgagcgggtcaccgagctgcaagaactcttcctcacgcgcgtcgggctcgacatcggcaaggtgtgggtcgcggacgacggcgccgcggtggcggtctggaccacgccggagagcgtcgaagcgggggcggtgttcgccgagatcggcccgcgcatggccgagttgagcggttcccggctggccgcgcagcaacagatggaaggcctcctggcgccgcaccggcccaaggagcccgcgtggttcctggccaccgtcggcgtctcgcccgaccaccagggcaagggtctgggcagcgccgtcgtgctccccggagtggaggcggccgagcgcgccggggtgcccgccttcctggagacctccgcgccccgcaacctccccttctacgagcggctcggcttcaccgtcaccgccgacgtcgaggtgcccgaaggaccgcgcacctggtgcatgacccgcaagcccggtgcctga

SEQ ID NO: 6286 - DNA, 2601 bp, synthetic construct; identical to SEQ ID NO: 6284
  source 1..2601: mol_type = other DNA

SEQ ID NO: 6287 - DNA, 2925 bp, synthetic construct
  source 1..2925: mol_type = other DNA
atggccttaccagtgaccgccttgctcctgccgctggccttgctgctccacgccgccaggccgctcgaggaggacctgaagaacgtgttcccacctgaggtggccgtgttcgagcctagcgaggccgagatcagccacacccagaaagccaccctcgtgtgcctggctaccggcttctaccccgaccatgtggaactgtcttggtgggtcaacggcaaagaggtgcacagcggcgtgtctaccgacccccagccactgaaagaacagcccgccctgaacgacagccggtactgcctgagcagcagactgagagtgtccgccaccttctggcagaacccccggaaccacttcagatgccaggtgcagttctacggcctgagcgagaacgacgagtggacccaggacagagccaagcccgtgacccagatcgtgtctgccgaagcctggggcagagccgatgatgtgattaagatccactggcaggaaaagaagtccaacaccatcctgggcagccaggaaggcaacaccatgaagaccaacgacacctacatgaagttcagctggctgaccgtgcccgagaagtccctggacaaagaacacagatgcatcgtgcggcacgaaaacaacaagaacggcgtggaccaggaaatcatcttcccacccatcaagaccgatgtgattacaatggaccccaaggacaactgctccaaggacgccaacgataccctgctgctccagctgaccaacaccagcgcctactacatgtacttgttgctgctgctgaagtccgtggtgtacttcgccatcatcacatgctgcctgctgatggctatggtcaagcggaaggacagccggggaagggccaagcgatctggatctggagcaacaaacttctcactactcaaacaagcaggtgacgtggaggagaatcccgggcctactagcatggccttaccagtgaccgccttgctcctgccgctggccttgctgctccacgccgccaggccggacatcgtgatgacacagagccctgatagcctggccgtgtctctgggagagagagccaccattaactgcaaggccagccagagcgtggactacgacggcgacagcttcctgaactggtatcagcagaagcccggccagcctcctaagctgctgatctacgccgccagcaatctggaaagcggcgtgccaagcagattttccggctctggcagcggcaccgatttcaccctgacaatatccagcctccagcctgaggacgtggccgtgtactactgccagcagagcaacgacgaccctctgacctttggacagggcaccaaggtggaaatcaaaggcggaggcggaagtggaggcggaggatctggcggcggaggctctgaagtccaacttgtggagtctggagggggcctggtgcagcccggcggctctctcagactgtcttgtgcggcaagcggctacaccttcagctcttactggatagaatgggtgaggcaggcacctggaaagggactggagtggattggagagattctgccaggagggggagatacaaattacaatgaaatcttcaaggggcgggccaccttttcagcggataccagcaagaatacagcttacctgcagatgaatagcctccgggcagaagataccgctgtttattattgcacgagacgggtgccaataagactggactattgggggcaagggactcttgtcaccgtcagttcaacgcgtatccagaaccctgatcctgccgtgtaccagctgcgggatagcaagagcagcgacaagagcgtgtgtctgttcaccgacttcgacagccagaccaacgtgtcccagagcaaggactccgacgtgtacatcaccgataagaccgtgctggacatgcggagcatggacttcaagagcaactccgccgtggcctggtccaacaagtccgatttcgcctgcgccaacgccttcaacaacagcattatccccgaggacacattcttcccaagccccgagagcagcgactccaccgaccacgtgaagcccaaagagacagagaacaccaagcagcccagcaagagctgccacaagcccaaggccatcgtgcacaccgagaaagtgaacatgatgagcctgaccgtgctgggcctgcggatgctgttcgccaaaaccgtggccgtgaacttcctgctgaccgccaagctgttcttcctcctcaccgcccgcgccaagagaagcggatctggcgtgaagcagaccctgaatttcgacctgctgaagctggctggcgacgtggaatccaacccaggcccttctagaggccatatgaccgagtacaagcccacggtgcgcctcgccacccgcgacgacgtccccagggccgtacgcaccctcgccgccgcgttcgccgactaccccgccacgcgccacaccgtcgatccggaccgccacatcgagcgggtcaccgagctgcaagaactcttcctcacgcgcgtcgggctcgacatcggcaaggtgtgggtcgcggacgacggcgccgcggtggcggtctggaccacgccggagagcgtcgaagcgggggcggtgttcgccgagatcggcccgcgcatggccgagttgagcggttcccggctggccgcgcagcaacagatggaaggcctcctggcgccgcaccggcccaaggagcccgcgtggttcctggccaccgtcggcgtctcgcccgaccaccagggcaagggtctgggcagcgccgtcgtgctccccggagtggaggcggccgagcgcgccggggtgcccgccttcctggagacctccgcgccccgcaacctccccttctacgagcggctcggcttcaccgtcaccgccgacgtcgaggtgcccgaaggaccgcgcacctggtgcatgacccgcaagcccggtgcctga

SEQ ID NO: 6288 - DNA, 2925 bp, synthetic construct
  source 1..2925: mol_type = other DNA
atggccttaccagtgaccgccttgctcctgccgctggccttgctgctccacgccgccaggccgctcgagatccagaaccctgatcctgccgtgtaccagctgcgggatagcaagagcagcgacaagagcgtgtgtctgttcaccgacttcgacagccagaccaacgtgtcccagagcaaggactccgacgtgtacatcaccgataagaccgtgctggacatgcggagcatggacttcaagagcaactccgccgtggcctggtccaacaagtccgatttcgcctgcgccaacgccttcaacaacagcattatccccgaggacacattcttcccaagccccgagagcagcgactccaccgaccacgtgaagcccaaagagacagagaacaccaagcagcccagcaagagctgccacaagcccaaggccatcgtgcacaccgagaaagtgaacatgatgagcctgaccgtgctgggcctgcggatgctgttcgccaaaaccgtggccgtgaacttcctgctgaccgccaagctgttcttcctcctcaccgccagggccaagcgatctggatctggagcaacaaacttctcactactcaaacaagcaggtgacgtggaggagaatcccgggcctactagcatggccttaccagtgaccgccttgctcctgccgctggccttgctgctccacgccgccaggccggacatcgtgatgacacagagccctgatagcctggccgtgtctctgggagagagagccaccattaactgcaaggccagccagagcgtggactacgacggcgacagcttcctgaactggtatcagcagaagcccggccagcctcctaagctgctgatctacgccgccagcaatctggaaagcggcgtgccaagcagattttccggctctggcagcggcaccgatttcaccctgacaatatccagcctccagcctgaggacgtggccgtgtactactgccagcagagcaacgacgaccctctgacctttggacagggcaccaaggtggaaatcaaaggcggaggcggaagtggaggcggaggatctggcggcggaggctctgaagtccaacttgtggagtctggagggggcctggtgcagcccggcggctctctcagactgtcttgtgcggcaagcggctacaccttcagctcttactggatagaatgggtgaggcaggcacctggaaagggactggagtggattggagagattctgccaggagggggagatacaaattacaatgaaatcttcaaggggcgggccaccttttcagcggataccagcaagaatacagcttacctgcagatgaatagcctccgggcagaagataccgctgtttattattgcacgagacgggtgccaataagactggactattgggggcaagggactcttgtcaccgtcagttcaacgcgtgaggacctgaagaacgtgttcccacctgaggtggccgtgttcgagcctagcgaggccgagatcagccacacccagaaagccaccctcgtgtgcctggctaccggcttctaccccgaccatgtggaactgtcttggtgggtcaacggcaaagaggtgcacagcggcgtgtctaccgacccccagccactgaaagaacagcccgccctgaacgacagccggtactgcctgagcagcagactgagagtgtccgccaccttctggcagaacccccggaaccacttcagatgccaggtgcagttctacggcctgagcgagaacgacgagtggacccaggacagagccaagcccgtgacccagatcgtgtctgccgaagcctggggcagagccgatgatgtgattaagatccactggcaggaaaagaagtccaacaccatcctgggcagccaggaaggcaacaccatgaagaccaacgacacctacatgaagttcagctggctgaccgtgcccgagaagtccctggacaaagaacacagatgcatcgtgcggcacgaaaacaacaagaacggcgtggaccaggaaatcatcttcccacccatcaagaccgatgtgattacaatggaccccaaggacaactgctccaaggacgccaacgataccctgctgctccagctgaccaacaccagcgcctactacatgtacttgttgctgctgctgaagtccgtggtgtacttcgccatcatcacatgctgcctgctgatggctatggtcaagcggaaggacagccggggacgcgccaagagaagcggatctggcgtgaagcagaccctgaatttcgacctgctgaagctggctggcgacgtggaatccaacccaggcccttctagaggccatatgaccgagtacaagcccacggtgcgcctcgccacccgcgacgacgtccccagggccgtacgcaccctcgccgccgcgttcgccgactaccccgccacgcgccacaccgtcgatccggaccgccacatcgagcgggtcaccgagctgcaagaactcttcctcacgcgcgtcgggctcgacatcggcaaggtgtgggtcgcggacgacggcgccgcggtggcggtctggaccacgccggagagcgtcgaagcgggggcggtgttcgccgagatcggcccgcgcatggccgagttgagcggttcccggctggccgcgcagcaacagatggaaggcctcctggcgccgcaccggcccaaggagcccgcgtggttcctggccaccgtcggcgtctcgcccgaccaccagggcaagggtctgggcagcgccgtcgtgctccccggagtggaggcggccgagcgcgccggggtgcccgccttcctggagacctccgcgccccgcaacctccccttctacgagcggctcggcttcaccgtcaccgccgacgtcgaggtgcccgaaggaccgcgcacctggtgcatgacccgcaagcccggtgcctga

SEQ ID NO: 6289 - DNA, 2919 bp, synthetic construct
  source 1..2919: mol_type = other DNA
atggccttaccagtgaccgccttgctcctgccgctggccttgctgctccacgccgccaggccgctcgaggaggacctgaagaacgtgttcccacctgaggtggccgtgttcgagcctagcgaggccgagatcagccacacccagaaagccaccctcgtgtgcctggctaccggcttctaccccgaccatgtggaactgtcttggtgggtcaacggcaaagaggtgcacagcggcgtgtgtaccgacccccagccactgaaagaacagcccgccctgaacgacagccggtactgcctgagcagcagactgagagtgtccgccaccttctggcagaacccccggaaccacttcagatgccaggtgcagttctacggcctgagcgagaacgacgagtggacccaggacagagccaagcccgtgacccagatcgtgtctgccgaagcctggggcagagccgatgatgtgattaagatccactggcaggaaaagaagtccaacaccatcctgggcagccaggaaggcaacaccatgaagaccaacgacacctacatgaagttcagctggctgaccgtgcccgagaagtccctggacaaagaacacagatgcatcgtgcggcacgaaaacaacaagaacggcgtggaccaggaaatcatcttcccacccatcaagaccgatgtgattacaatggaccccaaggacaactgctccaaggacgccaacgataccctgctgctccagctgaccaacaccagcgcctactacatgtacttgttgctgctgctgaagtccgtggtgtacttcgccatcatcacatgctgcctgctgcggagaaccgccttctgctgcaacggcgagaagtctagggccaagcgatctggatctggagcaacaaacttctcactactcaaacaagcaggtgacgtggaggagaatcccgggcctactagcatggccttaccagtgaccgccttgctcctgccgctggccttgctgctccacgccgccaggccggacatcgtgatgacacagagccctgatagcctggccgtgtctctgggagagagagccaccattaactgcaaggccagccagagcgtggactacgacggcgacagcttcctgaactggtatcagcagaagcccggccagcctcctaagctgctgatctacgccgccagcaatctggaaagcggcgtgccaagcagattttccggctctggcagcggcaccgatttcaccctgacaatatccagcctccagcctgaggacgtggccgtgtactactgccagcagagcaacgacgaccctctgacctttggacagggcaccaaggtggaaatcaaaggcggaggcggaagtggaggcggaggatctggcggcggaggctctgaagtccaacttgtggagtctggagggggcctggtgcagcccggcggctctctcagactgtcttgtgcggcaagcggctacaccttcagctcttactggatagaatgggtgaggcaggcacctggaaagggactggagtggattggagagattctgccaggagggggagatacaaattacaatgaaatcttcaaggggcgggccaccttttcagcggataccagcaagaatacagcttacctgcagatgaatagcctccgggcagaagataccgctgtttattattgcacgagacgggtgccaataagactggactattgggggcaagggactcttgtcaccgtcagttcaacgcgtatccagaaccctgatcctgccgtgtaccagctgcgggatagcaagagcagcgacaagagcgtgtgtctgttcaccgacttcgacagccagaccaacgtgtcccagagcaaggactccgacgtgtacatcaccgataagtgcgtgctggacatgcggagcatggacttcaagagcaactccgccgtggcctggtccaacaagtccgatttcgcctgcgccaacgccttcaacaacagcattatccccgaggacacattcttcccaagccccgagagcagcgactccaccgaccacgtgaagcccaaagagacagagaacaccaagcagcccagcaagagctgccacaagcccaaggccatcgtgcacaccgagaaagtgaacatgatgagcctgaccgtgctgggcctgcggatgctgttcgccaaaaccgtggccgtgaacttcctgctgaccgccaagctgttcttcctccgcgccaagagaagcggatctggcgtgaagcagaccctgaatttcgacctgctgaagctggctggcgacgtggaatccaacccaggcccttctagaggccatatgaccgagtacaagcccacggtgcgcctcgccacccgcgacgacgtccccagggccgtacgcaccctcgccgccgcgttcgccgactaccccgccacgcgccacaccgtcgatccggaccgccacatcgagcgggtcaccgagctgcaagaactcttcctcacgcgcgtcgggctcgacatcggcaaggtgtgggtcgcggacgacggcgccgcggtggcggtctggaccacgccggagagcgtcgaagcgggggcggtgttcgccgagatcggcccgcgcatggccgagttgagcggttcccggctggccgcgcagcaacagatggaaggcctcctggcgccgcaccggcccaaggagcccgcgtggttcctggccaccgtcggcgtctcgcccgaccaccagggcaagggtctgggcagcgccgtcgtgctccccggagtggaggcggccgagcgcgccggggtgcccgccttcctggagacctccgcgccccgcaacctccccttctacgagcggctcggcttcaccgtcaccgccgacgtcgaggtgcccgaaggaccgcgcacctggtgcatgacccgcaagcccggtgcctga

SEQ ID NO: 6290 - DNA, 2919 bp, synthetic construct
  source 1..2919: mol_type = other DNA
atggccttaccagtgaccgccttgctcctgccgctggccttgctgctccacgccgccaggccgctcgagatccagaaccctgatcctgccgtgtaccagctgcgggatagcaagagcagcgacaagagcgtgtgtctgttcaccgacttcgacagccagaccaacgtgtcccagagcaaggactccgacgtgtacatcaccgataagtgcgtgctggacatgcggagcatggacttcaagagcaactccgccgtggcctggtccaacaagtccgatttcgcctgcgccaacgccttcaacaacagcattatccccgaggacacattcttcccaagccccgagagcagcgactccaccgaccacgtgaagcccaaagagacagagaacaccaagcagcccagcaagagctgccacaagcccaaggccatcgtgcacaccgagaaagtgaacatgatgagcctgaccgtgctgggcctgcggatgctgttcgccaaaaccgtggccgtgaacttcctgctgaccgccaagctgttcttcctcagggccaagcgatctggatctggagcaacaaacttctcactactcaaacaagcaggtgacgtggaggagaatcccgggcctactagcatggccttaccagtgaccgccttgctcctgccgctggccttgctgctccacgccgccaggccggacatcgtgatgacacagagccctgatagcctggccgtgtctctgggagagagagccaccattaactgcaaggccagccagagcgtggactacgacggcgacagcttcctgaactggtatcagcagaagcccggccagcctcctaagctgctgatctacgccgccagcaatctggaaagcggcgtgccaagcagattttccggctctggcagcggcaccgatttcaccctgacaatatccagcctccagcctgaggacgtggccgtgtactactgccagcagagcaacgacgaccctctgacctttggacagggcaccaaggtggaaatcaaaggcggaggcggaagtggaggcggaggatctggcggcggaggctctgaagtccaacttgtggagtctggagggggcctggtgcagcccggcggctctctcagactgtcttgtgcggcaagcggctacaccttcagctcttactggatagaatgggtgaggcaggcacctggaaagggactggagtggattggagagattctgccaggagggggagatacaaattacaatgaaatcttcaaggggcgggccaccttttcagcggataccagcaagaatacagcttacctgcagatgaatagcctccgggcagaagataccgctgtttattattgcacgagacgggtgccaataagactggactattgggggcaagggactcttgtcaccgtcagttcaacgcgtgaggacctgaagaacgtgttcccacctgaggtggccgtgttcgagcctagcgaggccgagatcagccacacccagaaagccaccctcgtgtgcctggctaccggcttctaccccgaccatgtggaactgtcttggtgggtcaacggcaaagaggtgcacagcggcgtgtgtaccgacccccagccactgaaagaacagcccgccctgaacgacagccggtactgcctgagcagcagactgagagtgtccgccaccttctggcagaacccccggaaccacttcagatgccaggtgcagttctacggcctgagcgagaacgacgagtggacccaggacagagccaagcccgtgacccagatcgtgtctgccgaagcctggggcagagccgatgatgtgattaagatccactggcaggaaaagaagtccaacaccatcctgggcagccaggaaggcaacaccatgaagaccaacgacacctacatgaagttcagctggctgaccgtgcccgagaagtccctggacaaagaacacagatgcatcgtgcggcacgaaaacaacaagaacggcgtggaccaggaaatcatcttcccacccatcaagaccgatgtgattacaatggaccccaaggacaactgctccaaggacgccaacgataccctgctgctccagctgaccaacaccagcgcctactacatgtacttgttgctgctgctgaagtccgtggtgtacttcgccatcatcacatgctgcctgctgcggagaaccgccttctgctgcaacggcgagaagtctcgcgccaagagaagcggatctggcgtgaagcagaccctgaatttcgacctgctgaagctggctggcgacgtggaatccaacccaggcccttctagaggccatatgaccgagtacaagcccacggtgcgcctcgccacccgcgacgacgtccccagggccgtacgcaccctcgccgccgcgttcgccgactaccccgccacgcgccacaccgtcgatccggaccgccacatcgagcgggtcaccgagctgcaagaactcttcctcacgcgcgtcgggctcgacatcggcaaggtgtgggtcgcggacgacggcgccgcggtggcggtctggaccacgccggagagcgtcgaagcgggggcggtgttcgccgagatcggcccgcgcatggccgagttgagcggttcccggctggccgcgcagcaacagatggaaggcctcctggcgccgcaccggcccaaggagcccgcgtggttcctggccaccgtcggcgtctcgcccgaccaccagggcaagggtctgggcagcgccgtcgtgctccccggagtggaggcggccgagcgcgccggggtgcccgccttcctggagacctccgcgccccgcaacctccccttctacgagcggctcggcttcaccgtcaccgccgacgtcgaggtgcccgaaggaccgcgcacctggtgcatgacccgcaagcccggtgcctga

SEQ ID NO: 6291 - DNA, 2919 bp, synthetic construct
  source 1..2919: mol_type = other DNA
atggccttaccagtgaccgccttgctcctgccgctggccttgctgctccacgccgccaggccgctcgaggaggacctgaagaacgtgttcccacctgaggtggccgtgttcgagcctagcgaggccgagatcagccacacccagaaagccaccctcgtgtgcctggctaccggcttctaccccgaccatgtggaactgtcttggtgggtcaacggcaaagaggtgcacagcggcgtgtctaccgacccccagccactgaaagaacagcccgccctgaacgacagccggtactgcctgagcagcagactgagagtgtccgccaccttctggcagaacccccggaaccacttcagatgccaggtgcagttctacggcctgagcgagaacgacgagtggacccaggacagagccaagcccgtgacccagatcgtgtctgccgaagcctggggcagagccgatgatgtgattaagatccactggcaggaaaagaagtccaacaccatcctgggcagccaggaaggcaacaccatgaagaccaacgacacctacatgaagttcagctggctgaccgtgcccgagaagtccctggacaaagaacacagatgcatcgtgcggcacgaaaacaacaagaacggcgtggaccaggaaatcatcttcccacccatcaagaccgatgtgattacaatggaccccaaggacaactgctccaaggacgccaacgataccctgctgctccagctgaccaacaccagcgcctactacatgtacttgttgctgctgctgaagtccgtggtgtacttcgccatcatcacatgctgcctgctgcggagaaccgccttctgctgcaacggcgagaagtctagggccaagcgatctggatctggagcaacaaacttctcactactcaaacaagcaggtgacgtggaggagaatcccgggcctactagcatggccttaccagtgaccgccttgctcctgccgctggccttgctgctccacgccgccaggccggacatcgtgatgacacagagccctgatagcctggccgtgtctctgggagagagagccaccattaactgcaaggccagccagagcgtggactacgacggcgacagcttcctgaactggtatcagcagaagcccggccagcctcctaagctgctgatctacgccgccagcaatctggaaagcggcgtgccaagcagattttccggctctggcagcggcaccgatttcaccctgacaatatccagcctccagcctgaggacgtggccgtgtactactgccagcagagcaacgacgaccctctgacctttggacagggcaccaaggtggaaatcaaaggcggaggcggaagtggaggcggaggatctggcggcggaggctctgaagtccaacttgtggagtctggagggggcctggtgcagcccggcggctctctcagactgtcttgtgcggcaagcggctacaccttcagctcttactggatagaatgggtgaggcaggcacctggaaagggactggagtggattggagagattctgccaggagggggagatacaaattacaatgaaatcttcaaggggcgggccaccttttcagcggataccagcaagaatacagcttacctgcagatgaatagcctccgggcagaagataccgctgtttattattgcacgagacgggtgccaataagactggactattgggggcaagggactcttgtcaccgtcagttcaacgcgtatccagaaccctgatcctgccgtgtaccagctgcgggatagcaagagcagcgacaagagcgtgtgtctgttcaccgacttcgacagccagaccaacgtgtcccagagcaaggactccgacgtgtacatcaccgataagaccgtgctggacatgcggagcatggacttcaagagcaactccgccgtggcctggtccaacaagtccgatttcgcctgcgccaacgccttcaacaacagcattatccccgaggacacattcttcccaagccccgagagcagcgactccaccgaccacgtgaagcccaaagagacagagaacaccaagcagcccagcaagagctgccacaagcccaaggccatcgtgcacaccgagaaagtgaacatgatgagcctgaccgtgctgggcctgcggatgctgttcgccaaaaccgtggccgtgaacttcctgctgaccgccaagctgttcttcctccgcgccaagagaagcggatctggcgtgaagcagaccctgaatttcgacctgctgaagctggctggcgacgtggaatccaacccaggcccttctagaggccatatgaccgagtacaagcccacggtgcgcctcgccacccgcgacgacgtccccagggccgtacgcaccctcgccgccgcgttcgccgactaccccgccacgcgccacaccgtcgatccggaccgccacatcgagcgggtcaccgagctgcaagaactcttcctcacgcgcgtcgggctcgacatcggcaaggtgtgggtcgcggacgacggcgccgcggtggcggtctggaccacgccggagagcgtcgaagcgggggcggtgttcgccgagatcggcccgcgcatggccgagttgagcggttcccggctggccgcgcagcaacagatggaaggcctcctggcgccgcaccggcccaaggagcccgcgtggttcctggccaccgtcggcgtctcgcccgaccaccagggcaagggtctgggcagcgccgtcgtgctccccggagtggaggcggccgagcgcgccggggtgcccgccttcctggagacctccgcgccccgcaacctccccttctacgagcggctcggcttcaccgtcaccgccgacgtcgaggtgcccgaaggaccgcgcacctggtgcatgacccgcaagcccggtgcctga

SEQ ID NO: 6292 - DNA, 2919 bp, synthetic construct
  source 1..2919: mol_type = other DNA
atggccttaccagtgaccgccttgctcctgccgctggccttgctgctccacgccgccaggccgctcgagatccagaaccctgatcctgccgtgtaccagctgcgggatagcaagagcagcgacaagagcgtgtgtctgttcaccgacttcgacagccagaccaacgtgtcccagagcaaggactccgacgtgtacatcaccgataagaccgtgctggacatgcggagcatggacttcaagagcaactccgccgtggcctggtccaacaagtccgatttcgcctgcgccaacgccttcaacaacagcattatccccgaggacacattcttcccaagccccgagagcagcgactccaccgaccacgtgaagcccaaagagacagagaacaccaagcagcccagcaagagctgccacaagcccaaggccatcgtgcacaccgagaaagtgaacatgatgagcctgaccgtgctgggcctgcggatgctgttcgccaaaaccgtggccgtgaacttcctgctgaccgccaagctgttcttcctcagggccaagcgatctggatctggagcaacaaacttctcactactcaaacaagcaggtgacgtggaggagaatcccgggcctactagcatggccttaccagtgaccgccttgctcctgccgctggccttgctgctccacgccgccaggccggacatcgtgatgacacagagccctgatagcctggccgtgtctctgggagagagagccaccattaactgcaaggccagccagagcgtggactacgacggcgacagcttcctgaactggtatcagcagaagcccggccagcctcctaagctgctgatctacgccgccagcaatctggaaagcggcgtgccaagcagattttccggctctggcagcggcaccgatttcaccctgacaatatccagcctccagcctgaggacgtggccgtgtactactgccagcagagcaacgacgaccctctgacctttggacagggcaccaaggtggaaatcaaaggcggaggcggaagtggaggcggaggatctggcggcggaggctctgaagtccaacttgtggagtctggagggggcctggtgcagcccggcggctctctcagactgtcttgtgcggcaagcggctacaccttcagctcttactggatagaatgggtgaggcaggcacctggaaagggactggagtggattggagagattctgccaggagggggagatacaaattacaatgaaatcttcaaggggcgggccaccttttcagcggataccagcaagaatacagcttacctgcagatgaatagcctccgggcagaagataccgctgtttattattgcacgagacgggtgccaataagactggactattgggggcaagggactcttgtcaccgtcagttcaacgcgtgaggacctgaagaacgtgttcccacctgaggtggccgtgttcgagcctagcgaggccgagatcagccacacccagaaagccaccctcgtgtgcctggctaccggcttctaccccgaccatgtggaactgtcttggtgggtcaacggcaaagaggtgcacagcggcgtgtctaccgacccccagccactgaaagaacagcccgccctgaacgacagccggtactgcctgagcagcagactgagagtgtccgccaccttctggcagaacccccggaaccacttcagatgccaggtgcagttctacggcctgagcgagaacgacgagtggacccaggacagagccaagcccgtgacccagatcgtgtctgccgaagcctggggcagagccgatgatgtgattaagatccactggcaggaaaagaagtccaacaccatcctgggcagccaggaaggcaacaccatgaagaccaacgacacctacatgaagttcagctggctgaccgtgcccgagaagtccctggacaaagaacacagatgcatcgtgcggcacgaaaacaacaagaacggcgtggaccaggaaatcatcttcccacccatcaagaccgatgtgattacaatggaccccaaggacaactgctccaaggacgccaacgataccctgctgctccagctgaccaacaccagcgcctactacatgtacttgttgctgctgctgaagtccgtggtgtacttcgccatcatcacatgctgcctgctgcggagaaccgccttctgctgcaacggcgagaagtctcgcgccaagagaagcggatctggcgtgaagcagaccctgaatttcgacctgctgaagctggctggcgacgtggaatccaacccaggcccttctagaggccatatgaccgagtacaagcccacggtgcgcctcgccacccgcgacgacgtccccagggccgtacgcaccctcgccgccgcgttcgccgactaccccgccacgcgccacaccgtcgatccggaccgccacatcgagcgggtcaccgagctgcaagaactcttcctcacgcgcgtcgggctcgacatcggcaaggtgtgggtcgcggacgacggcgccgcggtggcggtctggaccacgccggagagcgtcgaagcgggggcggtgttcgccgagatcggcccgcgcatggccgagttgagcggttcccggctggccgcgcagcaacagatggaaggcctcctggcgccgcaccggcccaaggagcccgcgtggttcctggccaccgtcggcgtctcgcccgaccaccagggcaagggtctgggcagcgccgtcgtgctccccggagtggaggcggccgagcgcgccggggtgcccgccttcctggagacctccgcgccccgcaacctccccttctacgagcggctcggcttcaccgtcaccgccgacgtcgaggtgcccgaaggaccgcgcacctggtgcatgacccgcaagcccggtgcctga

SEQ ID NO: 6293 - DNA, 2613 bp, synthetic construct
  source 1..2613: mol_type = other DNA
atggccttaccagtgaccgccttgctcctgccgctggccttgctgctccacgccgccaggccgctcgaggaggacctgaagaacgtgttcccacctgaggtggccgtgttcgagcctagcaaggccgagatcgcccacacccagaaagccaccctcgtgtgcctggctaccggcttctaccccgaccatgtggaactgtcttggtgggtcaacggcaaagaggtgcacagcggcgtgtgtaccgacccccagccactgaaagaacagcccgccctgaacgacagccggtactgcctgagcagcagactgagagtgtccgccaccttctggcagaacccccggaaccacttcagatgccaggtgcagttctacggcctgagcgagaacgacgagtggacccaggacagagccaagcccgtgacccagatcgtgtctgccgaagcctggggcagagccgattgcggcatcaccagcgccagctaccaccagggcgtgctgagcgccaccatcctgtacgagatcctgctgggcaaggccaccctgtacgccgtgctggtgtctgccctggtgctgatggctatggtcaagcggaaggacagccggggaagggccaagcgatctggatctggagcaacaaacttctcactactcaaacaagcaggtgacgtggaggagaatcccgggcctactagcatggccttaccagtgaccgccttgctcctgccgctggccttgctgctccacgccgccaggccggacatcgtgatgacacagagccctgatagcctggccgtgtctctgggagagagagccaccattaactgcaaggccagccagagcgtggactacgacggcgacagcttcctgaactggtatcagcagaagcccggccagcctcctaagctgctgatctacgccgccagcaatctggaaagcggcgtgccaagcagattttccggctctggcagcggcaccgatttcaccctgacaatatccagcctccagcctgaggacgtggccgtgtactactgccagcagagcaacgacgaccctctgacctttggacagggcaccaaggtggaaatcaaaggcggaggcggaagtggaggcggaggatctggcggcggaggctctgaagtccaacttgtggagtctggagggggcctggtgcagcccggcggctctctcagactgtcttgtgcggcaagcggctacaccttcagctcttactggatagaatgggtgaggcaggcacctggaaagggactggagtggattggagagattctgccaggagggggagatacaaattacaatgaaatcttcaaggggcgggccaccttttcagcggataccagcaagaatacagcttacctgcagatgaatagcctccgggcagaagataccgctgtttattattgcacgagacgggtgccaataagactggactattgggggcaagggactcttgtcaccgtcagttcaacgcgtatccagaaccctgatcctgccgtgtaccagctgcgggatagcaagagcagcgacaagagcgtgtgtctgttcaccgacttcgacagccagaccaacgtgtcccagagcaaggactccgacgtgtacatcaccgataagtgcgtgctggacatgcggagcatggacttcaagagcaactccgccgtggcctggtccaacaagtccgatttcgcctgcgccaacgccttcaacaacagcattatccccgaggacacattcttcccaagcagcgacgtgccctgcgacgtgaagctggtggaaaagagcttcgagacagacaccaacctgaacttccagaacctgagcgtgatcggcttcagaatcctgctgctgaaagtggccggctttaacctgctgatgaccctgcggctgtggtccagccgcgccaagagaagcggatctggcgtgaagcagaccctgaatttcgacctgctgaagctggctggcgacgtggaatccaacccaggcccttctagaggccatatgaccgagtacaagcccacggtgcgcctcgccacccgcgacgacgtccccagggccgtacgcaccctcgccgccgcgttcgccgactaccccgccacgcgccacaccgtcgatccggaccgccacatcgagcgggtcaccgagctgcaagaactcttcctcacgcgcgtcgggctcgacatcggcaaggtgtgggtcgcggacgacggcgccgcggtggcggtctggaccacgccggagagcgtcgaagcgggggcggtgttcgccgagatcggcccgcgcatggccgagttgagcggttcccggctggccgcgcagcaacagatggaaggcctcctggcgccgcaccggcccaaggagcccgcgtggttcctggccaccgtcggcgtctcgcccgaccaccagggcaagggtctgggcagcgccgtcgtgctccccggagtggaggcggccgagcgcgccggggtgcccgccttcctggagacctccgcgccccgcaacctccccttctacgagcggctcggcttcaccgtcaccgccgacgtcgaggtgcccgaaggaccgcgcacctggtgcatgacccgcaagcccggtgcctga

SEQ ID NO: 6294 - DNA, 2613 bp, synthetic construct
  source 1..2613: mol_type = other DNA
atggccttaccagtgaccgccttgctcctgccgctggccttgctgctccacgccgccaggccgctcgagatccagaaccctgatcctgccgtgtaccagctgcgggatagcaagagcagcgacaagagcgtgtgtctgttcaccgacttcgacagccagaccaacgtgtcccagagcaaggactccgacgtgtacatcaccgataagtgcgtgctggacatgcggagcatggacttcaagagcaactccgccgtggcctggtccaacaagtccgatttcgcctgcgccaacgccttcaacaacagcattatccccgaggacacattcttcccaagcagcgacgtgccctgcgacgtgaagctggtggaaaagagcttcgagacagacaccaacctgaacttccagaacctgagcgtgatcggcttcagaatcctgctgctgaaagtggccggctttaacctgctgatgaccctgcggctgtggtccagcagggccaagcgatctggatctggagcaacaaacttctcactactcaaacaagcaggtgacgtggaggagaatcccgggcctactagcatggccttaccagtgaccgccttgctcctgccgctggccttgctgctccacgccgccaggccggacatcgtgatgacacagagccctgatagcctggccgtgtctctgggagagagagccaccattaactgcaaggccagccagagcgtggactacgacggcgacagcttcctgaactggtatcagcagaagcccggccagcctcctaagctgctgatctacgccgccagcaatctggaaagcggcgtgccaagcagattttccggctctggcagcggcaccgatttcaccctgacaatatccagcctccagcctgaggacgtggccgtgtactactgccagcagagcaacgacgaccctctgacctttggacagggcaccaaggtggaaatcaaaggcggaggcggaagtggaggcggaggatctggcggcggaggctctgaagtccaacttgtggagtctggagggggcctggtgcagcccggcggctctctcagactgtcttgtgcggcaagcggctacaccttcagctcttactggatagaatgggtgaggcaggcacctggaaagggactggagtggattggagagattctgccaggagggggagatacaaattacaatgaaatcttcaaggggcgggccaccttttcagcggataccagcaagaatacagcttacctgcagatgaatagcctccgggcagaagataccgctgtttattattgcacgagacgggtgccaataagactggactattgggggcaagggactcttgtcaccgtcagttcaacgcgtgaggacctgaagaacgtgttcccacctgaggtggccgtgttcgagcctagcaaggccgagatcgcccacacccagaaagccaccctcgtgtgcctggctaccggcttctaccccgaccatgtggaactgtcttggtgggtcaacggcaaagaggtgcacagcggcgtgtgtaccgacccccagccactgaaagaacagcccgccctgaacgacagccggtactgcctgagcagcagactgagagtgtccgccaccttctggcagaacccccggaaccacttcagatgccaggtgcagttctacggcctgagcgagaacgacgagtggacccaggacagagccaagcccgtgacccagatcgtgtctgccgaagcctggggcagagccgattgcggcatcaccagcgccagctaccaccagggcgtgctgagcgccaccatcctgtacgagatcctgctgggcaaggccaccctgtacgccgtgctggtgtctgccctggtgctgatggctatggtcaagcggaaggacagccggggacgcgccaagagaagcggatctggcgtgaagcagaccctgaatttcgacctgctgaagctggctggcgacgtggaatccaacccaggcccttctagaggccatatgaccgagtacaagcccacggtgcgcctcgccacccgcgacgacgtccccagggccgtacgcaccctcgccgccgcgttcgccgactaccccgccacgcgccacaccgtcgatccggaccgccacatcgagcgggtcaccgagctgcaagaactcttcctcacgcgcgtcgggctcgacatcggcaaggtgtgggtcgcggacgacggcgccgcggtggcggtctggaccacgccggagagcgtcgaagcgggggcggtgttcgccgagatcggcccgcgcatggccgagttgagcggttcccggctggccgcgcagcaacagatggaaggcctcctggcgccgcaccggcccaaggagcccgcgtggttcctggccaccgtcggcgtctcgcccgaccaccagggcaagggtctgggcagcgccgtcgtgctccccggagtggaggcggccgagcgcgccggggtgcccgccttcctggagacctccgcgccccgcaacctccccttctacgagcggctcggcttcaccgtcaccgccgacgtcgaggtgcccgaaggaccgcgcacctggtgcatgacccgcaagcccggtgcctga

SEQ ID NO: 6295 - DNA, 2292 bp, synthetic construct
  source 1..2292: mol_type = other DNA
atggccttaccagtgaccgccttgctcctgccgctggccttgctgctccacgccgccaggccgctcgagcagagttttgggttgttggaccctaaattgtgctatctgttggacggaatcctgttcatttacggagtgatcctgaccgcattgttcctgcgggttaagttttccagatccgcagacgcacccgcttaccaacaagggcagaaccaactctacaatgaacttaatttggggcggagggaagagtacgacgttctggacaaaaggaggggacgagatcccgagatgggcggaaagcctcagcgaaggaagaatccgcaagaggggctttataacgaactccagaaagataaaatggcagaagcctatagtgagattgggatgaagggagaaaggaggaggggtaaaggtcacgatgggttgtaccaaggattgagcacagccactaaagatacctatgatgcgctccacatgcaggccctgccgccaagaagggccaagcgatctggatctggagcaacaaacttctcactactcaaacaagcaggtgacgtggaggagaatcccgggcctactagcatggccttaccagtgaccgccttgctcctgccgctggccttgctgctccacgccgccaggccggacatcgtgatgacacagagccctgatagcctggccgtgtctctgggagagagagccaccattaactgcaaggccagccagagcgtggactacgacggcgacagcttcctgaactggtatcagcagaagcccggccagcctcctaagctgctgatctacgccgccagcaatctggaaagcggcgtgccaagcagattttccggctctggcagcggcaccgatttcaccctgacaatatccagcctccagcctgaggacgtggccgtgtactactgccagcagagcaacgacgaccctctgacctttggacagggcaccaaggtggaaatcaaaggcggaggcggaagtggaggcggaggatctggcggcggaggctctgaagtccaacttgtggagtctggagggggcctggtgcagcccggcggctctctcagactgtcttgtgcggcaagcggctacaccttcagctcttactggatagaatgggtgaggcaggcacctggaaagggactggagtggattggagagattctgccaggagggggagatacaaattacaatgaaatcttcaaggggcgggccaccttttcagcggataccagcaagaatacagcttacctgcagatgaatagcctccgggcagaagataccgctgtttattattgcacgagacgggtgccaataagactggactattgggggcaagggactcttgtcaccgtcagttcaacgcgtgagctgggagagcctcagctgtgctatatcctggacgccatcctgtttctgtacggcatcgtgctgaccctgctgtactgccggctgaagatccaagtgcggaaggccgccatcaccagctacgagaaatccgacggcgtgtacaccggcctgagcaccagaaatcaagagacatacgagacactgaagcacgaaaagcctccacaacgcgccaagagaagcggatctggcgtgaagcagaccctgaatttcgacctgctgaagctggctggcgacgtggaatccaacccaggcccttctagaggccatatgaccgagtacaagcccacggtgcgcctcgccacccgcgacgacgtccccagggccgtacgcaccctcgccgccgcgttcgccgactaccccgccacgcgccacaccgtcgatccggaccgccacatcgagcgggtcaccgagctgcaagaactcttcctcacgcgcgtcgggctcgacatcggcaaggtgtgggtcgcggacgacggcgccgcggtggcggtctggaccacgccggagagcgtcgaagcgggggcggtgttcgccgagatcggcccgcgcatggccgagttgagcggttcccggctggccgcgcagcaacagatggaaggcctcctggcgccgcaccggcccaaggagcccgcgtggttcctggccaccgtcggcgtctcgcccgaccaccagggcaagggtctgggcagcgccgtcgtgctccccggagtggaggcggccgagcgcgccggggtgcccgccttcctggagacctccgcgccccgcaacctccccttctacgagcggctcggcttcaccgtcaccgccgacgtcgaggtgcccgaaggaccgcgcacctggtgcatgacccgcaagcccggtgcctga

SEQ ID NO: 6296 - DNA, 2925 bp, synthetic construct; identical to SEQ ID NO: 6287
  source 1..2925: mol_type = other DNA

SEQ ID NO: 6297 - DNA, 2925 bp, synthetic construct; identical to SEQ ID NO: 6288
  source 1..2925: mol_type = other DNA

SEQ ID NO: 6298 - DNA, 2922 bp, synthetic construct
  source 1..2922: mol_type = other DNA
atggccttaccagtgaccgccttgctcctgccgctggccttgctgctccacgccgccaggccgctcgaggaggaggacctgaagaacgtgttcccacctgaggtggccgtgttcgagcctagcgaggccgagatcagccacacccagaaagccaccctcgtgtgcctggctaccggcttctaccccgaccatgtggaactgtcttggtgggtcaacggcaaagaggtgcacagcggcgtgtgtaccgacccccagccactgaaagaacagcccgccctgaacgacagccggtactgcctgagcagcagactgagagtgtccgccaccttctggcagaacccccggaaccacttcagatgccaggtgcagttctacggcctgagcgagaacgacgagtggacccaggacagagccaagcccgtgacccagatcgtgtctgccgaagcctggggcagagccgatgatgtgattaagatccactggcaggaaaagaagtccaacaccatcctgggcagccaggaaggcaacaccatgaagaccaacgacacctacatgaagttcagctggctgaccgtgcccgagaagtccctggacaaagaacacagatgcatcgtgcggcacgaaaacaacaagaacggcgtggaccaggaaatcatcttcccacccatcaagaccgatgtgattacaatggaccccaaggacaactgctccaaggacgccaacgataccctgctgctccagctgaccaacaccagcgcctactacatgtacttgttgctgctgctgaagtccgtggtgtacttcgccatcatcacatgctgcctgctgcggagaaccgccttctgctgcaacggcgagaagtctagggccaagcgatctggatctggagcaacaaacttctcactactcaaacaagcaggtgacgtggaggagaatcccgggcctactagcatggccttaccagtgaccgccttgctcctgccgctggccttgctgctccacgccgccaggccggacatcgtgatgacacagagccctgatagcctggccgtgtctctgggagagagagccaccattaactgcaaggccagccagagcgtggactacgacggcgacagcttcctgaactggtatcagcagaagcccggccagcctcctaagctgctgatctacgccgccagcaatctggaaagcggcgtgccaagcagattttccggctctggcagcggcaccgatttcaccctgacaatatccagcctccagcctgaggacgtggccgtgtactactgccagcagagcaacgacgaccctctgacctttggacagggcaccaaggtggaaatcaaaggcggaggcggaagtggaggcggaggatctggcggcggaggctctgaagtccaacttgtggagtctggagggggcctggtgcagcccggcggctctctcagactgtcttgtgcggcaagcggctacaccttcagctcttactggatagaatgggtgaggcaggcacctggaaagggactggagtggattggagagattctgccaggagggggagatacaaattacaatgaaatcttcaaggggcgggccaccttttcagcggataccagcaagaatacagcttacctgcagatgaatagcctccgggcagaagataccgctgtttattattgcacgagacgggtgccaataagactggactattgggggcaagggactcttgtcaccgtcagttcaacgcgtatccagaaccctgatcctgccgtgtaccagctgcgggatagcaagagcagcgacaagagcgtgtgtctgttcaccgacttcgacagccagaccaacgtgtcccagagcaaggactccgacgtgtacatcaccgataagtgcgtgctggacatgcggagcatggacttcaagagcaactccgccgtggcctggtccaacaagtccgatttcgcctgcgccaacgccttcaacaacagcattatccccgaggacacattcttcccaagccccgagagcagcgactccaccgaccacgtgaagcccaaagagacagagaacaccaagcagcccagcaagagctgccacaagcccaaggccatcgtgcacaccgagaaagtgaacatgatgagcctgaccgtgctgggcctgcggatgctgttcgccaaaaccgtggccgtgaacttcctgctgaccgccaagctgttcttcctccgcgccaagagaagcggatctggcgtgaagcagaccctgaatttcgacctgctgaagctggctggcgacgtggaatccaacccaggcccttctagaggccatatgaccgagtacaagcccacggtgcgcctcgccacccgcgacgacgtccccagggccgtacgcaccctcgccgccgcgttcgccgactaccccgccacgcgccacaccgtcgatccggaccgccacatcgagcgggtcaccgagctgcaagaactcttcctcacgcgcgtcgggctcgacatcggcaaggtgtgggtcgcggacgacggcgccgcggtggcggtctggaccacgccggagagcgtcgaagcgggggcggtgttcgccgagatcggcccgcgcatggccgagttgagcggttcccggctggccgcgcagcaacagatggaaggcctcctggcgccgcaccggcccaaggagcccgcgtggttcctggccaccgtcggcgtctcgcccgaccaccagggcaagggtctgggcagcgccgtcgtgctccccggagtggaggcggccgagcgcgccggggtgcccgccttcctggagacctccgcgccccgcaacctccccttctacgagcggctcggcttcaccgtcaccgccgacgtcgaggtgcccgaaggaccgcgcacctggtgcatgacccgcaagcccggtgcctga

SEQ ID NO: 6299 - DNA, 2922 bp, synthetic construct
  source 1..2922: mol_type = other DNA
atggccttaccagtgaccgccttgctcctgccgctggccttgctgctccacgccgccaggccgctcgagatccagaaccctgatcctgccgtgtaccagctgcgggatagcaagagcagcgacaagagcgtgtgtctgttcaccgacttcgacagccagaccaacgtgtcccagagcaaggactccgacgtgtacatcaccgataagtgcgtgctggacatgcggagcatggacttcaagagcaactccgccgtggcctggtccaacaagtccgatttcgcctgcgccaacgccttcaacaacagcattatccccgaggacacattcttcccaagccccgagagcagcgactccaccgaccacgtgaagcccaaagagacagagaacaccaagcagcccagcaagagctgccacaagcccaaggccatcgtgcacaccgagaaagtgaacatgatgagcctgaccgtgctgggcctgcggatgctgttcgccaaaaccgtggccgtgaacttcctgctgaccgccaagctgttcttcctcagggccaagcgatctggatctggagcaacaaacttctcactactcaaacaagcaggtgacgtggaggagaatcccgggcctactagcatggccttaccagtgaccgccttgctcctgccgctggccttgctgctccacgccgccaggccggacatcgtgatgacacagagccctgatagcctggccgtgtctctgggagagagagccaccattaactgcaaggccagccagagcgtggactacgacggcgacagcttcctgaactggtatcagcagaagcccggccagcctcctaagctgctgatctacgccgccagcaatctggaaagcggcgtgccaagcagattttccggctctggcagcggcaccgatttcaccctgacaatatccagcctccagcctgaggacgtggccgtgtactactgccagcagagcaacgacgaccctctgacctttggacagggcaccaaggtggaaatcaaaggcggaggcggaagtggaggcggaggatctggcggcggaggctctgaagtccaacttgtggagtctggagggggcctggtgcagcccggcggctctctcagactgtcttgtgcggcaagcggctacaccttcagctcttactggatagaatgggtgaggcaggcacctggaaagggactggagtggattggagagattctgccaggagggggagatacaaattacaatgaaatcttcaaggggcgggccaccttttcagcggataccagcaagaatacagcttacctgcagatgaatagcctccgggcagaagataccgctgtttattattgcacgagacgggtgccaataagactggactattgggggcaagggactcttgtcaccgtcagttcaacgcgtgaggaggacctgaagaacgtgttcccacctgaggtggccgtgttcgagcctagcgaggccgagatcagccacacccagaaagccaccctcgtgtgcctggctaccggcttctaccccgaccatgtggaactgtcttggtgggtcaacggcaaagaggtgcacagcggcgtgtgtaccgacccccagccactgaaagaacagcccgccctgaacgacagccggtactgcctgagcagcagactgagagtgtccgccaccttctggcagaacccccggaaccacttcagatgccaggtgcagttctacggcctgagcgagaacgacgagtggacccaggacagagccaagcccgtgacccagatcgtgtctgccgaagcctggggcagagccgatgatgtgattaagatccactggcaggaaaagaagtccaacaccatcctgggcagccaggaaggcaacaccatgaagaccaacgacacctacatgaagttcagctggctgaccgtgcccgagaagtccctggacaaagaacacagatgcatcgtgcggcacgaaaacaacaagaacggcgtggaccaggaaatcatcttcccacccatcaagaccgatgtgattacaatggaccccaaggacaactgctccaaggacgccaacgataccctgctgctccagctgaccaacaccagcgcctactacatgtacttgttgctgctgctgaagtccgtggtgtacttcgccatcatcacatgctgcctgctgcggagaaccgccttctgctgcaacggcgagaagtctcgcgccaagagaagcggatctggcgtgaagcagaccctgaatttcgacctgctgaagctggctggcgacgtggaatccaacccaggcccttctagaggccatatgaccgagtacaagcccacggtgcgcctcgccacccgcgacgacgtccccagggccgtacgcaccctcgccgccgcgttcgccgactaccccgccacgcgccacaccgtcgatccggaccgccacatcgagcgggtcaccgagctgcaagaactcttcctcacgcgcgtcgggctcgacatcggcaaggtgtgggtcgcggacgacggcgccgcggtggcggtctggaccacgccggagagcgtcgaagcgggggcggtgttcgccgagatcggcccgcgcatggccgagttgagcggttcccggctggccgcgcagcaacagatggaaggcctcctggcgccgcaccggcccaaggagcccgcgtggttcctggccaccgtcggcgtctcgcccgaccaccagggcaagggtctgggcagcgccgtcgtgctccccggagtggaggcggccgagcgcgccggggtgcccgccttcctggagacctccgcgccccgcaacctccccttctacgagcggctcggcttcaccgtcaccgccgacgtcgaggtgcccgaaggaccgcgcacctggtgcatgacccgcaagcccggtgcctga

SEQ ID NO: 6300 - DNA, 2613 bp, synthetic construct
  source 1..2613: mol_type = other DNA
atggccttaccagtgaccgccttgctcctgccgctggccttgctgctccacgccgccaggccgctcgaggaggacctgaagaacgtgttcccacctgaggtggccgtgttcgagcctagcgaggccgagatcagccacacccagaaagccaccctcgtgtgcctggctaccggcttctaccccgaccatgtggaactgtcttggtgggtcaacggcaaagaggtgcacagcggcgtgtctaccgacccccagccactgaaagaacagcccgccctgaacgacagccggtactgcctgagcagcagactgagagtgtccgccaccttctggcagaacccccggaaccacttcagatgccaggtgcagttctacggcctgagcgagaacgacgagtggacccaggacagagccaagcccgtgacccagatcgtgtctgccgaagcctggggcagagccgattgcggctttaccagcgagagctaccagcagggcgtgctgagcgccaccaacctgagcgtgatcggcttcagaatcctgctgctgaaagtggccggctttaacctgctgatgaccctgcggctgtggtccagcagggccaagcgatctggatctggagcaacaaacttctcactactcaaacaagcaggtgacgtggaggagaatcccgggcctactagcatggccttaccagtgaccgccttgctcctgccgctggccttgctgctccacgccgccaggccggacatcgtgatgacacagagccctgatagcctggccgtgtctctgggagagagagccaccattaactgcaaggccagccagagcgtggactacgacggcgacagcttcctgaactggtatcagcagaagcccggccagcctcctaagctgctgatctacgccgccagcaatctggaaagcggcgtgccaagcagattttccggctctggcagcggcaccgatttcaccctgacaatatccagcctccagcctgaggacgtggccgtgtactactgccagcagagcaacgacgaccctctgacctttggacagggcaccaaggtggaaatcaaaggcggaggcggaagtggaggcggaggatctggcggcggaggctctgaagtccaacttgtggagtctggagggggcctggtgcagcccggcggctctctcagactgtcttgtgcggcaagcggctacaccttcagctcttactggatagaatgggtgaggcaggcacctggaaagggactggagtggattggagagattctgccaggagggggagatacaaattacaatgaaatcttcaaggggcgggccaccttttcagcggataccagcaagaatacagcttacctgcagatgaatagcctccgggcagaagataccgctgtttattattgcacgagacgggtgccaataagactggactattgggggcaagggactcttgtcaccgtcagttcaacgcgtatccagaaccctgatcctgccgtgtaccagctgcgggatagcaagagcagcgacaagagcgtgtgtctgttcaccgacttcgacagccagaccaacgtgtcccagagcaaggactccgacgtgtacatcaccgataagaccgtgctggacatgcggagcatggacttcaagagcaactccgccgtggcctggtccaacaagtccgatttcgcctgcgccaacgccttcaacaacagcattatccccgaggacacattcttcccaagccccgagagcagctgcgacgtgaagctggtggaaaagagcttcgagacagacaccaacctgaacttccagatcctgtacgagatcctgctgggcaaggccaccctgtacgccgtgctggtgtctgccctggtgctgatggctatggtcaagcggaaggacagccggggacgcgccaagagaagcggatctggcgtgaagcagaccctgaatttcgacctgctgaagctggctggcgacgtggaatccaacccaggcccttctagaggccatatgaccgagtacaagcccacggtgcgcctcgccacccgcgacgacgtccccagggccgtacgcaccctcgccgccgcgttcgccgactaccccgccacgcgccacaccgtcgatccggaccgccacatcgagcgggtcaccgagctgcaagaactcttcctcacgcgcgtcgggctcgacatcggcaaggtgtgggtcgcggacgacggcgccgcggtggcggtctggaccacgccggagagcgtcgaagcgggggcggtgttcgccgagatcggcccgcgcatggccgagttgagcggttcccggctggccgcgcagcaacagatggaaggcctcctggcgccgcaccggcccaaggagcccgcgtggttcctggccaccgtcggcgtctcgcccgaccaccagggcaagggtctgggcagcgccgtcgtgctccccggagtggaggcggccgagcgcgccggggtgcccgccttcctggagacctccgcgccccgcaacctccccttctacgagcggctcggcttcaccgtcaccgccgacgtcgaggtgcccgaaggaccgcgcacctggtgcatgacccgcaagcccggtgcctga

SEQ ID NO: 6301 - DNA, 2613 bp, synthetic construct
  source 1..2613: mol_type = other DNA
atggccttaccagtgaccgccttgctcctgccgctggccttgctgctccacgccgccaggccgctcgagatccagaaccctgatcctgccgtgtaccagctgcgggatagcaagagcagcgacaagagcgtgtgtctgttcaccgacttcgacagccagaccaacgtgtcccagagcaaggactccgacgtgtacatcaccgataagaccgtgctggacatgcggagcatggacttcaagagcaactccgccgtggcctggtccaacaagtccgatttcgcctgcgccaacgccttcaacaacagcattatccccgaggacacattcttcccaagccccgagagcagctgcgacgtgaagctggtggaaaagagcttcgagacagacaccaacctgaacttccagatcctgtacgagatcctgctgggcaaggccaccctgtacgccgtgctggtgtctgccctggtgctgatggctatggtcaagcggaaggacagccggggaagggccaagcgatctggatctggagcaacaaacttctcactactcaaacaagcaggtgacgtggaggagaatcccgggcctactagcatggccttaccagtgaccgccttgctcctgccgctggccttgctgctccacgccgccaggccggacatcgtgatgacacagagccctgatagcctggccgtgtctctgggagagagagccaccattaactgcaaggccagccagagcgtggactacgacggcgacagcttcctgaactggtatcagcagaagcccggccagcctcctaagctgctgatctacgccgccagcaatctggaaagcggcgtgccaagcagattttccggctctggcagcggcaccgatttcaccctgacaatatccagcctccagcctgaggacgtggccgtgtactactgccagcagagcaacgacgaccctctgacctttggacagggcaccaaggtggaaatcaaaggcggaggcggaagtggaggcggaggatctggcggcggaggctctgaagtccaacttgtggagtctggagggggcctggtgcagcccggcggctctctcagactgtcttgtgcggcaagcggctacaccttcagctcttactggatagaatgggtgaggcaggcacctggaaagggactggagtggattggagagattctgccaggagggggagatacaaattacaatgaaatcttcaaggggcgggccaccttttcagcggataccagcaagaatacagcttacctgcagatgaatagcctccgggcagaagataccgctgtttattattgcacgagacgggtgccaataagactggactattgggggcaagggactcttgtcaccgtcagttcaacgcgtgaggacctgaagaacgtgttcccacctgaggtggccgtgttcgagcctagcgaggccgagatcagccacacccagaaagccaccctcgtgtgcctggctaccggcttctaccccgaccatgtggaactgtcttggtgggtcaacggcaaagaggtgcacagcggcgtgtctaccgacccccagccactgaaagaacagcccgccctgaacgacagccggtactgcctgagcagcagactgagagtgtccgccaccttctggcagaacccccggaaccacttcagatgccaggtgcagttctacggcctgagcgagaacgacgagtggacccaggacagagccaagcccgtgacccagatcgtgtctgccgaagcctggggcagagccgattgcggctttaccagcgagagctaccagcagggcgtgctgagcgccaccaacctgagcgtgatcggcttcagaatcctgctgctgaaagtggccggctttaacctgctgatgaccctgcggctgtggtccagccgcgccaagagaagcggatctggcgtgaagcagaccctgaatttcgacctgctgaagctggctggcgacgtggaatccaacccaggcccttctagaggccatatgaccgagtacaagcccacggtgcgcctcgccacccgcgacgacgtccccagggccgtacgcaccctcgccgccgcgttcgccgactaccccgccacgcgccacaccgtcgatccggaccgccacatcgagcgggtcaccgagctgcaagaactcttcctcacgcgcgtcgggctcgacatcggcaaggtgtgggtcgcggacgacggcgccgcggtggcggtctggaccacgccggagagcgtcgaagcgggggcggtgttcgccgagatcggcccgcgcatggccgagttgagcggttcccggctggccgcgcagcaacagatggaaggcctcctggcgccgcaccggcccaaggagcccgcgtggttcctggccaccgtcggcgtctcgcccgaccaccagggcaagggtctgggcagcgccgtcgtgctccccggagtggaggcggccgagcgcgccggggtgcccgccttcctggagacctccgcgccccgcaacctccccttctacgagcggctcggcttcaccgtcaccgccgacgtcgaggtgcccgaaggaccgcgcacctggtgcatgacccgcaagcccggtgcctga

SEQ ID NO: 6302 - DNA, 2613 bp, synthetic construct
  source 1..2613: mol_type = other DNA
atggccttaccagtgaccgccttgctcctgccgctggccttgctgctccacgccgccaggccgctcgaggaggacctgaagaacgtgttcccacctgaggtggccgtgttcgagcctagcgaggccgagatcagccacacccagaaagccaccctcgtgtgcctggctaccggcttctaccccgaccatgtggaactgtcttggtgggtcaacggcaaagaggtgcacagcggcgtgtgtaccgacccccagccactgaaagaacagcccgccctgaacgacagccggtactgcctgagcagcagactgagagtgtccgccaccttctggcagaacccccggaaccacttcagatgccaggtgcagttctacggcctgagcgagaacgacgagtggacccaggacagagccaagcccgtgacccagatcgtgtctgccgaagcctggggcagagccgattgcgacgtgaagctggtggaaaagagcttcgagacagacaccaacctgaacttccagaacctgagcgtgatcggcttcagaatcctgctgctgaaagtggccggctttaacctgctgatgaccctgcggctgtggtccagcagggccaagcgatctggatctggagcaacaaacttctcactactcaaacaagcaggtgacgtggaggagaatcccgggcctactagcatggccttaccagtgaccgccttgctcctgccgctggccttgctgctccacgccgccaggccggacatcgtgatgacacagagccctgatagcctggccgtgtctctgggagagagagccaccattaactgcaaggccagccagagcgtggactacgacggcgacagcttcctgaactggtatcagcagaagcccggccagcctcctaagctgctgatctacgccgccagcaatctggaaagcggcgtgccaagcagattttccggctctggcagcggcaccgatttcaccctgacaatatccagcctccagcctgaggacgtggccgtgtactactgccagcagagcaacgacgaccctctgacctttggacagggcaccaaggtggaaatcaaaggcggaggcggaagtggaggcggaggatctggcggcggaggctctgaagtccaacttgtggagtctggagggggcctggtgcagcccggcggctctctcagactgtcttgtgcggcaagcggctacaccttcagctcttactggatagaatgggtgaggcaggcacctggaaagggactggagtggattggagagattctgccaggagggggagatacaaattacaatgaaatcttcaaggggcgggccaccttttcagcggataccagcaagaatacagcttacctgcagatgaatagcctccgggcagaagataccgctgtttattattgcacgagacgggtgccaataagactggactattgggggcaagggactcttgtcaccgtcagttcaacgcgtatccagaaccctgatcctgccgtgtaccagctgcgggatagcaagagcagcgacaagagcgtgtgtctgttcaccgacttcgacagccagaccaacgtgtcccagagcaaggactccgacgtgtacatcaccgataagtgcgtgctggacatgcggagcatggacttcaagagcaactccgccgtggcctggtccaacaagtccgatttcgcctgcgccaacgccttcaacaacagcattatccccgaggacacattcttcccaagccccgagagcagctgcggctttaccagcgagagctaccagcagggcgtgctgagcgccaccatcctgtacgagatcctgctgggcaaggccaccctgtacgccgtgctggtgtctgccctggtgctgatggctatggtcaagcggaaggacagccggggacgcgccaagagaagcggatctggcgtgaagcagaccctgaatttcgacctgctgaagctggctggcgacgtggaatccaacccaggcccttctagaggccatatgaccgagtacaagcccacggtgcgcctcgccacccgcgacgacgtccccagggccgtacgcaccctcgccgccgcgttcgccgactaccccgccacgcgccacaccgtcgatccggaccgccacatcgagcgggtcaccgagctgcaagaactcttcctcacgcgcgtcgggctcgacatcggcaaggtgtgggtcgcggacgacggcgccgcggtggcggtctggaccacgccggagagcgtcgaagcgggggcggtgttcgccgagatcggcccgcgcatggccgagttgagcggttcccggctggccgcgcagcaacagatggaaggcctcctggcgccgcaccggcccaaggagcccgcgtggttcctggccaccgtcggcgtctcgcccgaccaccagggcaagggtctgggcagcgccgtcgtgctccccggagtggaggcggccgagcgcgccggggtgcccgccttcctggagacctccgcgccccgcaacctccccttctacgagcggctcggcttcaccgtcaccgccgacgtcgaggtgcccgaaggaccgcgcacctggtgcatgacccgcaagcccggtgcctga

SEQ ID NO: 6303 - DNA, 2613 bp, synthetic construct
  source 1..2613: mol_type = other DNA
atggccttaccagtgaccgccttgctcctgccgctggccttgctgctccacgccgccaggccgctcgaggaggacctgaagaacgtgttcccacctgaggtggccgtgttcgagcctagcgaggccgagatcagccacacccagaaagccaccctcgtgtgcctggctaccggcttctaccccgaccatgtggaactgtcttggtgggtcaacggcaaagaggtgcacagcggcgtgtctaccgacccccagccactgaaagaacagcccgccctgaacgacagccggtactgcctgagcagcagactgagagtgtccgccaccttctggcagaacccccggaaccacttcagatgccaggtgcagttctacggcctgagcgagaacgacgagtggacccaggacagagccaagcccgtgacccagatcgtgtctgccgaagcctggggcagagccgattgcgacgtgaagctggtggaaaagagcttcgagacagacaccaacctgaacttccagaacctgagcgtgatcggcttcagaatcctgctgctgaaagtggccggctttaacctgctgatgaccctgcggctgtggtccagcagggccaagcgatctggatctggagcaacaaacttctcactactcaaacaagcaggtgacgtggaggagaatcccgggcctactagcatggccttaccagtgaccgccttgctcctgccgctggccttgctgctccacgccgccaggccggacatcgtgatgacacagagccctgatagcctggccgtgtctctgggagagagagccaccattaactgcaaggccagccagagcgtggactacgacggcgacagcttcctgaactggtatcagcagaagcccggccagcctcctaagctgctgatctacgccgccagcaatctggaaagcggcgtgccaagcagattttccggctctggcagcggcaccgatttcaccctgacaatatccagcctccagcctgaggacgtggccgtgtactactgccagcagagcaacgacgaccctctgacctttggacagggcaccaaggtggaaatcaaaggcggaggcggaagtggaggcggaggatctggcggcggaggctctgaagtccaacttgtggagtctggagggggcctggtgcagcccggcggctctctcagactgtcttgtgcggcaagcggctacaccttcagctcttactggatagaatgggtgaggcaggcacctggaaagggactggagtggattggagagattctgccaggagggggagatacaaattacaatgaaatcttcaaggggcgggccaccttttcagcggataccagcaagaatacagcttacctgcagatgaatagcctccgggcagaagataccgctgtttattattgcacgagacgggtgccaataagactggactattgggggcaagggactcttgtcaccgtcagttcaacgcgtatccagaaccctgatcctgccgtgtaccagctgcgggatagcaagagcagcgacaagagcgtgtgtctgttcaccgacttcgacagccagaccaacgtgtcccagagcaaggactccgacgtgtacatcaccgataagaccgtgctggacatgcggagcatggacttcaagagcaactccgccgtggcctggtccaacaagtccgatttcgcctgcgccaacgccttcaacaacagcattatccccgaggacacattcttcccaagccccgagagcagctgcggctttaccagcgagagctaccagcagggcgtgctgagcgccaccatcctgtacgagatcctgctgggcaaggccaccctgtacgccgtgctggtgtctgccctggtgctgatggctatggtcaagcggaaggacagccggggacgcgccaagagaagcggatctggcgtgaagcagaccctgaatttcgacctgctgaagctggctggcgacgtggaatccaacccaggcccttctagaggccatatgaccgagtacaagcccacggtgcgcctcgccacccgcgacgacgtccccagggccgtacgcaccctcgccgccgcgttcgccgactaccccgccacgcgccacaccgtcgatccggaccgccacatcgagcgggtcaccgagctgcaagaactcttcctcacgcgcgtcgggctcgacatcggcaaggtgtgggtcgcggacgacggcgccgcggtggcggtctggaccacgccggagagcgtcgaagcgggggcggtgttcgccgagatcggcccgcgcatggccgagttgagcggttcccggctggccgcgcagcaacagatggaaggcctcctggcgccgcaccggcccaaggagcccgcgtggttcctggccaccgtcggcgtctcgcccgaccaccagggcaagggtctgggcagcgccgtcgtgctccccggagtggaggcggccgagcgcgccggggtgcccgccttcctggagacctccgcgccccgcaacctccccttctacgagcggctcggcttcaccgtcaccgccgacgtcgaggtgcccgaaggaccgcgcacctggtgcatgacccgcaagcccggtgcctga

SEQ ID NO: 6304 - DNA, 2922 bp, synthetic construct
  source 1..2922: mol_type = other DNA
atggccttaccagtgaccgccttgctcctgccgctggccttgctgctccacgccgccaggccgctcgaggaggaggacctgaagaacgtgttcccacctgaggtggccgtgttcgagcctagcgaggccgagatcagccacacccagaaagccaccctcgtgtgcctggctaccggcttctaccccgaccatgtggaactgtcttggtgggtcaacggcaaagaggtgcacagcggcgtgtctaccgacccccagccactgaaagaacagcccgccctgaacgacagccggtactgcctgagcagcagactgagagtgtccgccaccttctggcagaacccccggaaccacttcagatgccaggtgcagttctacggcctgagcgagaacgacgagtggacccaggacagagccaagcccgtgacccagatcgtgtctgccgaagcctggggcagagccgatgatgtgattaagatccactggcaggaaaagaagtccaacaccatcctgggcagccaggaaggcaacaccatgaagaccaacgacacctacatgaagttcagctggctgaccgtgcccgagaagtccctggacaaagaacacagatgcatcgtgcggcacgaaaacaacaagaacggcgtggaccaggaaatcatcttcccacccatcaagaccgatgtgattacaatggaccccaaggacaactgctccaaggacgccaacgataccctgctgctccagctgaccaacaccagcgcctactacatgtacttgttgctgctgctgaagtccgtggtgtacttcgccatcatcacatgctgcctgctgcggagaaccgccttctgctgcaacggcgagaagtctagggccaagcgatctggatctggagcaacaaacttctcactactcaaacaagcaggtgacgtggaggagaatcccgggcctactagcatggccttaccagtgaccgccttgctcctgccgctggccttgctgctccacgccgccaggccggacatcgtgatgacacagagccctgatagcctggccgtgtctctgggagagagagccaccattaactgcaaggccagccagagcgtggactacgacggcgacagcttcctgaactggtatcagcagaagcccggccagcctcctaagctgctgatctacgccgccagcaatctggaaagcggcgtgccaagcagattttccggctctggcagcggcaccgatttcaccctgacaatatccagcctccagcctgaggacgtggccgtgtactactgccagcagagcaacgacgaccctctgacctttggacagggcaccaaggtggaaatcaaaggcggaggcggaagtggaggcggaggatctggcggcggaggctctgaagtccaacttgtggagtctggagggggcctggtgcagcccggcggctctctcagactgtcttgtgcggcaagcggctacaccttcagctcttactggatagaatgggtgaggcaggcacctggaaagggactggagtggattggagagattctgccaggagggggagatacaaattacaatgaaatcttcaaggggcgggccaccttttcagcggataccagcaagaatacagcttacctgcagatgaatagcctccgggcagaagataccgctgtttattattgcacgagacgggtgccaataagactggactattgggggcaagggactcttgtcaccgtcagttcaacgcgtatccagaaccctgatcctgccgtgtaccagctgcgggatagcaagagcagcgacaagagcgtgtgtctgttcaccgacttcgacagccagaccaacgtgtcccagagcaaggactccgacgtgtacatcaccgataagaccgtgctggacatgcggagcatggacttcaagagcaactccgccgtggcctggtccaacaagtccgatttcgcctgcgccaacgccttcaacaacagcattatccccgaggacacattcttcccaagccccgagagcagcgactccaccgaccacgtgaagcccaaagagacagagaacaccaagcagcccagcaagagctgccacaagcccaaggccatcgtgcacaccgagaaagtgaacatgatgagcctgaccgtgctgggcctgcggatgctgttcgccaaaaccgtggccgtgaacttcctgctgaccgccaagctgttcttcctccgcgccaagagaagcggatctggcgtgaagcagaccctgaatttcgacctgctgaagctggctggcgacgtggaatccaacccaggcccttctagaggccatatgaccgagtacaagcccacggtgcgcctcgccacccgcgacgacgtccccagggccgtacgcaccctcgccgccgcgttcgccgactaccccgccacgcgccacaccgtcgatccggaccgccacatcgagcgggtcaccgagctgcaagaactcttcctcacgcgcgtcgggctcgacatcggcaaggtgtgggtcgcggacgacggcgccgcggtggcggtctggaccacgccggagagcgtcgaagcgggggcggtgttcgccgagatcggcccgcgcatggccgagttgagcggttcccggctggccgcgcagcaacagatggaaggcctcctggcgccgcaccggcccaaggagcccgcgtggttcctggccaccgtcggcgtctcgcccgaccaccagggcaagggtctgggcagcgccgtcgtgctccccggagtggaggcggccgagcgcgccggggtgcccgccttcctggagacctccgcgccccgcaacctccccttctacgagcggctcggcttcaccgtcaccgccgacgtcgaggtgcccgaaggaccgcgcacctggtgcatgacccgcaagcccggtgcctga

SEQ ID NO: 6305 - DNA, 2613 bp, synthetic construct
  source 1..2613: mol_type = other DNA
atggccttaccagtgaccgccttgctcctgccgctggccttgctgctccacgccgccaggccgctcgaggaggacctgaagaacgtgttcccacctgaggtggccgtgttcgagcctagcgaggccgagatcagccacacccagaaagccaccctcgtgtgcctggctaccggcttctaccccgaccatgtggaactgtcttggtgggtcaacggcaaagaggtgcacagcggcgtgtgtaccgacccccagccactgaaagaacagcccgccctgaacgacagccggtactgcctgagcagcagactgagagtgtccgccaccttctggcagaacccccggaaccacttcagatgccaggtgcagttctacggcctgagcgagaacgacgagtggacccaggacagagccaagcccgtgacccagatcgtgtctgccgaagcctggggcagagccgattgcggctttaccagcgagagctaccagcagggcgtgctgagcgccaccaacctgagcgtgatcggcttcagaatcctgctgctgaaagtggccggctttaacctgctgatgaccctgcggctgtggtccagcagggccaagcgatctggatctggagcaacaaacttctcactactcaaacaagcaggtgacgtggaggagaatcccgggcctactagcatggccttaccagtgaccgccttgctcctgccgctggccttgctgctccacgccgccaggccggacatcgtgatgacacagagccctgatagcctggccgtgtctctgggagagagagccaccattaactgcaaggccagccagagcgtggactacgacggcgacagcttcctgaactggtatcagcagaagcccggccagcctcctaagctgctgatctacgccgccagcaatctggaaagcggcgtgccaagcagattttccggctctggcagcggcaccgatttcaccctgacaatatccagcctccagcctgaggacgtggccgtgtactactgccagcagagcaacgacgaccctctgacctttggacagggcaccaaggtggaaatcaaaggcggaggcggaagtggaggcggaggatctggcggcggaggctctgaagtccaacttgtggagtctggagggggcctggtgcagcccggcggctctctcagactgtcttgtgcggcaagcggctacaccttcagctcttactggatagaatgggtgaggcaggcacctggaaagggactggagtggattggagagattctgccaggagggggagatacaaattacaatgaaatcttcaaggggcgggccaccttttcagcggataccagcaagaatacagcttacctgcagatgaatagcctccgggcagaagataccgctgtttattattgcacgagacgggtgccaataagactggactattgggggcaagggactcttgtcaccgtcagttcaacgcgtatccagaaccctgatcctgccgtgtaccagctgcgggatagcaagagcagcgacaagagcgtgtgtctgttcaccgacttcgacagccagaccaacgtgtcccagagcaaggactccgacgtgtacatcaccgataagtgcgtgctggacatgcggagcatggacttcaagagcaactccgccgtggcctggtccaacaagtccgatttcgcctgcgccaacgccttcaacaacagcattatccccgaggacacattcttcccaagccccgagagcagctgcgacgtgaagctggtggaaaagagcttcgagacagacaccaacctgaacttccagatcctgtacgagatcctgctgggcaaggccaccctgtacgccgtgctggtgtctgccctggtgctgatggctatggtcaagcggaaggacagccggggacgcgccaagagaagcggatctggcgtgaagcagaccctgaatttcgacctgctgaagctggctggcgacgtggaatccaacccaggcccttctagaggccatatgaccgagtacaagcccacggtgcgcctcgccacccgcgacgacgtccccagggccgtacgcaccctcgccgccgcgttcgccgactaccccgccacgcgccacaccgtcgatccggaccgccacatcgagcgggtcaccgagctgcaagaactcttcctcacgcgcgtcgggctcgacatcggcaaggtgtgggtcgcggacgacggcgccgcggtggcggtctggaccacgccggagagcgtcgaagcgggggcggtgttcgccgagatcggcccgcgcatggccgagttgagcggttcccggctggccgcgcagcaacagatggaaggcctcctggcgccgcaccggcccaaggagcccgcgtggttcctggccaccgtcggcgtctcgcccgaccaccagggcaagggtctgggcagcgccgtcgtgctccccggagtggaggcggccgagcgcgccggggtgcccgccttcctggagacctccgcgccccgcaacctccccttctacgagcggctcggcttcaccgtcaccgccgacgtcgaggtgcccgaaggaccgcgcacctggtgcatgacccgcaagcccggtgcctga

SEQ ID NO: 6306 - DNA, 2700 bp, synthetic construct
  source 1..2700: mol_type = other DNA
atggccttaccagtgaccgccttgctcctgccgctggccttgctgctccacgccgccaggccgctcgaggaggaggacctgaagaacgtgttcccacctgaggtggccgtgttcgagcctagcgaggccgagatcagccacacccagaaagccaccctcgtgtgcctggctaccggcttctaccccgaccatgtggaactgtcttggtgggtcaacggcaaagaggtgcacagcggcgtgtgtaccgacccccagccactgaaagaacagcccgccctgaacgacagccggtactgcctgagcagcagactgagagtgtccgccaccttctggcagaacccccggaaccacttcagatgccaggtgcagttctacggcctgagcgagaacgacgagtggacccaggacagagccaagcccgtgacccagatcgtgtctgccgaagcctggggcagagccgattgcggctttaccagcgagagctaccagcagggcgtgctgagcgccaccaacctgagcgtgatcggcttcagaatcctgctgctgaaagtggccggctttaacctgctgatgaccctgcggctgtggtccagcagggccaagcgatctggatctggagcaacaaacttctcactactcaaacaagcaggtgacgtggaggagaatcccgggcctactagcatggccttaccagtgaccgccttgctcctgccgctggccttgctgctccacgccgccaggccggacatcgtgatgacacagagccctgatagcctggccgtgtctctgggagagagagccaccattaactgcaaggccagccagagcgtggactacgacggcgacagcttcctgaactggtatcagcagaagcccggccagcctcctaagctgctgatctacgccgccagcaatctggaaagcggcgtgccaagcagattttccggctctggcagcggcaccgatttcaccctgacaatatccagcctccagcctgaggacgtggccgtgtactactgccagcagagcaacgacgaccctctgacctttggacagggcaccaaggtggaaatcaaaggcggaggcggaagtggaggcggaggatctggcggcggaggctctgaagtccaacttgtggagtctggagggggcctggtgcagcccggcggctctctcagactgtcttgtgcggcaagcggctacaccttcagctcttactggatagaatgggtgaggcaggcacctggaaagggactggagtggattggagagattctgccaggagggggagatacaaattacaatgaaatcttcaaggggcgggccaccttttcagcggataccagcaagaatacagcttacctgcagatgaatagcctccgggcagaagataccgctgtttattattgcacgagacgggtgccaataagactggactattgggggcaagggactcttgtcaccgtcagttcaacgcgtggacagcctaaggccaatcctaccgtgacactgttccctccaagcagcgaagaactccaggccaacaaggccacacttgtgtgcctgatctccgacttctaccctggggctgtgacagtggcttggaaggccgatggatctcctgtgaaagccggcgtggaaaccaccaagccatccaagcagagcaacaacaaatacgccgccagctcctacctgagcctgacacctgagcagtggaagtcccacagatcctacagctgccaagtgacccacgaaggcagcaccgtggaaaagacagtggcccctacagagtgcagccccatcaagaccgatgtgattacaatggaccccaaggacaactgctccaaggacgccaacgataccctgctgctccagctgaccaacaccagcgcctactacatgtacttgttgctgctgctgaagtccgtggtgtacttcgccatcatcacatgctgcctgctgcggagaaccgccttctgctgcaacggcgagaagtctcgcgccaagagaagcggatctggcgtgaagcagaccctgaatttcgacctgctgaagctggctggcgacgtggaatccaacccaggcccttctagaggccatatgaccgagtacaagcccacggtgcgcctcgccacccgcgacgacgtccccagggccgtacgcaccctcgccgccgcgttcgccgactaccccgccacgcgccacaccgtcgatccggaccgccacatcgagcgggtcaccgagctgcaagaactcttcctcacgcgcgtcgggctcgacatcggcaaggtgtgggtcgcggacgacggcgccgcggtggcggtctggaccacgccggagagcgtcgaagcgggggcggtgttcgccgagatcggcccgcgcatggccgagttgagcggttcccggctggccgcgcagcaacagatggaaggcctcctggcgccgcaccggcccaaggagcccgcgtggttcctggccaccgtcggcgtctcgcccgaccaccagggcaagggtctgggcagcgccgtcgtgctccccggagtggaggcggccgagcgcgccggggtgcccgccttcctggagacctccgcgccccgcaacctccccttctacgagcggctcggcttcaccgtcaccgccgacgtcgaggtgcccgaaggaccgcgcacctggtgcatgacccgcaagcccggtgcctga

SEQ ID NO: 6307 - DNA, 2700 bp, synthetic construct
  source 1..2700: mol_type = other DNA
atggccttaccagtgaccgccttgctcctgccgctggccttgctgctccacgccgccaggccgctcgagggacagcctaaggccaatcctaccgtgacactgttccctccaagcagcgaagaactccaggccaacaaggccacacttgtgtgcctgatctccgacttctaccctggggctgtgacagtggcttggaaggccgatggatctcctgtgaaagccggcgtggaaaccaccaagccatccaagcagagcaacaacaaatacgccgccagctcctacctgagcctgacacctgagcagtggaagtcccacagatcctacagctgccaagtgacccacgaaggcagcaccgtggaaaagacagtggcccctacagagtgcagccccatcaagaccgatgtgattacaatggaccccaaggacaactgctccaaggacgccaacgataccctgctgctccagctgaccaacaccagcgcctactacatgtacttgttgctgctgctgaagtccgtggtgtacttcgccatcatcacatgctgcctgctgcggagaaccgccttctgctgcaacggcgagaagtctagggccaagcgatctggatctggagcaacaaacttctcactactcaaacaagcaggtgacgtggaggagaatcccgggcctactagcatggccttaccagtgaccgccttgctcctgccgctggccttgctgctccacgccgccaggccggacatcgtgatgacacagagccctgatagcctggccgtgtctctgggagagagagccaccattaactgcaaggccagccagagcgtggactacgacggcgacagcttcctgaactggtatcagcagaagcccggccagcctcctaagctgctgatctacgccgccagcaatctggaaagcggcgtgccaagcagattttccggctctggcagcggcaccgatttcaccctgacaatatccagcctccagcctgaggacgtggccgtgtactactgccagcagagcaacgacgaccctctgacctttggacagggcaccaaggtggaaatcaaaggcggaggcggaagtggaggcggaggatctggcggcggaggctctgaagtccaacttgtggagtctggagggggcctggtgcagcccggcggctctctcagactgtcttgtgcggcaagcggctacaccttcagctcttactggatagaatgggtgaggcaggcacctggaaagggactggagtggattggagagattctgccaggagggggagatacaaattacaatgaaatcttcaaggggcgggccaccttttcagcggataccagcaagaatacagcttacctgcagatgaatagcctccgggcagaagataccgctgtttattattgcacgagacgggtgccaataagactggactattgggggcaagggactcttgtcaccgtcagttcaacgcgtgaggaggacctgaagaacgtgttcccacctgaggtggccgtgttcgagcctagcgaggccgagatcagccacacccagaaagccaccctcgtgtgcctggctaccggcttctaccccgaccatgtggaactgtcttggtgggtcaacggcaaagaggtgcacagcggcgtgtgtaccgacccccagccactgaaagaacagcccgccctgaacgacagccggtactgcctgagcagcagactgagagtgtccgccaccttctggcagaacccccggaaccacttcagatgccaggtgcagttctacggcctgagcgagaacgacgagtggacccaggacagagccaagcccgtgacccagatcgtgtctgccgaagcctggggcagagccgattgcggctttaccagcgagagctaccagcagggcgtgctgagcgccaccaacctgagcgtgatcggcttcagaatcctgctgctgaaagtggccggctttaacctgctgatgaccctgcggctgtggtccagccgcgccaagagaagcggatctggcgtgaagcagaccctgaatttcgacctgctgaagctggctggcgacgtggaatccaacccaggcccttctagaggccatatgaccgagtacaagcccacggtgcgcctcgccacccgcgacgacgtccccagggccgtacgcaccctcgccgccgcgttcgccgactaccccgccacgcgccacaccgtcgatccggaccgccacatcgagcgggtcaccgagctgcaagaactcttcctcacgcgcgtcgggctcgacatcggcaaggtgtgggtcgcggacgacggcgccgcggtggcggtctggaccacgccggagagcgtcgaagcgggggcggtgttcgccgagatcggcccgcgcatggccgagttgagcggttcccggctggccgcgcagcaacagatggaaggcctcctggcgccgcaccggcccaaggagcccgcgtggttcctggccaccgtcggcgtctcgcccgaccaccagggcaagggtctgggcagcgccgtcgtgctccccggagtggaggcggccgagcgcgccggggtgcccgccttcctggagacctccgcgccccgcaacctccccttctacgagcggctcggcttcaccgtcaccgccgacgtcgaggtgcccgaaggaccgcgcacctggtgcatgacccgcaagcccggtgcctga

SEQ ID NO: 6308 - DNA, 2691 bp, synthetic construct
  source 1..2691: mol_type = other DNA
atggccttaccagtgaccgccttgctcctgccgctggccttgctgctccacgccgccaggccgctcgaggaggcctctacaaagggaccctccgtgtttcctctggctcccagcagcaagtctacaagcggaggaacagccgctctgggctgcctggtcaaggattactttcccgagcctgtgaccgtgtcctggaatagcggagcactgacaagcggcgtgcacacctttccagccgtgctgcaaagcagcggcctgtactctctgagcagcgtggtcacagtgcctagctctagcctgggcacccagacctacatctgcaatgtgaaccacaagcctagcaacaccaaggtggacaagagagtggaacccaagagctgtcccatcaagaccgatgtgattacaatggaccccaaggacaactgctccaaggacgccaacgataccctgctgctccagctgaccaacaccagcgcctactacatgtacttgttgctgctgctgaagtccgtggtgtacttcgccatcatcacatgctgcctgctgcggagaaccgccttctgctgcaacggcgagaagtctagggccaagcgatctggatctggagcaacaaacttctcactactcaaacaagcaggtgacgtggaggagaatcccgggcctactagcatggccttaccagtgaccgccttgctcctgccgctggccttgctgctccacgccgccaggccggacatcgtgatgacacagagccctgatagcctggccgtgtctctgggagagagagccaccattaactgcaaggccagccagagcgtggactacgacggcgacagcttcctgaactggtatcagcagaagcccggccagcctcctaagctgctgatctacgccgccagcaatctggaaagcggcgtgccaagcagattttccggctctggcagcggcaccgatttcaccctgacaatatccagcctccagcctgaggacgtggccgtgtactactgccagcagagcaacgacgaccctctgacctttggacagggcaccaaggtggaaatcaaaggcggaggcggaagtggaggcggaggatctggcggcggaggctctgaagtccaacttgtggagtctggagggggcctggtgcagcccggcggctctctcagactgtcttgtgcggcaagcggctacaccttcagctcttactggatagaatgggtgaggcaggcacctggaaagggactggagtggattggagagattctgccaggagggggagatacaaattacaatgaaatcttcaaggggcgggccaccttttcagcggataccagcaagaatacagcttacctgcagatgaatagcctccgggcagaagataccgctgtttattattgcacgagacgggtgccaataagactggactattgggggcaagggactcttgtcaccgtcagttcaacgcgtggacagcctaaggccaatcctaccgtgacactgttccctccaagcagcgaagaactccaggccaacaaggccacacttgtgtgcctgatctccgacttctaccctggggctgtgacagtggcttggaaggccgatggatctcctgtgaaagccggcgtggaaaccaccaagccatccaagcagagcaacaacaaatacgccgccagctcctacctgagcctgacacctgagcagtggaagtcccacagatcctacagctgccaagtgacccacgaaggcagcaccgtggaaaagacagtggcccctacagagtgcagcgaagtgaaaaccgactccaccgaccacgtgaagcccaaagagacagagaacaccaagcagcccagcaagagctgccacaagcccaaggccatcgtgcacaccgagaaagtgaacatgatgagcctgaccgtgctgggcctgcggatgctgttcgccaaaaccgtggccgtgaacttcctgctgaccgccaagctgttcttcctccgcgccaagagaagcggatctggcgtgaagcagaccctgaatttcgacctgctgaagctggctggcgacgtggaatccaacccaggcccttctagaggccatatgaccgagtacaagcccacggtgcgcctcgccacccgcgacgacgtccccagggccgtacgcaccctcgccgccgcgttcgccgactaccccgccacgcgccacaccgtcgatccggaccgccacatcgagcgggtcaccgagctgcaagaactcttcctcacgcgcgtcgggctcgacatcggcaaggtgtgggtcgcggacgacggcgccgcggtggcggtctggaccacgccggagagcgtcgaagcgggggcggtgttcgccgagatcggcccgcgcatggccgagttgagcggttcccggctggccgcgcagcaacagatggaaggcctcctggcgccgcaccggcccaaggagcccgcgtggttcctggccaccgtcggcgtctcgcccgaccaccagggcaagggtctgggcagcgccgtcgtgctccccggagtggaggcggccgagcgcgccggggtgcccgccttcctggagacctccgcgccccgcaacctccccttctacgagcggctcggcttcaccgtcaccgccgacgtcgaggtgcccgaaggaccgcgcacctggtgcatgacccgcaagcccggtgcctga

SEQ ID NO: 6309 - DNA, 2625 bp, synthetic construct
  source 1..2625: mol_type = other DNA
atggccttaccagtgaccgccttgctcctgccgctggccttgctgctccacgccgccaggccgctcgaggaggcctctacaaagggaccctccgtgtttcctctggctcccagcagcaagtctacaagcggaggaacagccgctctgggctgcctggtcaaggattactttcccgagcctgtgaccgtgtcctggaatagcggagcactgacaagcggcgtgcacacctttccagccgtgctgcaaagcagcggcctgtactctctgagcagcgtggtcacagtgcctagctctagcctgggcacccagacctacatctgcaatgtgaaccacaagcctagcaacaccaaggtggacaagagagtggaacccaagagctgtggcagagccgattgcggctttaccagcgagagctaccagcagggcgtgctgagcgccaccatcctgtacgagatcctgctgggcaaggccaccctgtacgccgtgctggtgtctgccctggtgctgatggctatggtcaagcggaaggacagccggggaagggccaagcgatctggatctggagcaacaaacttctcactactcaaacaagcaggtgacgtggaggagaatcccgggcctactagcatggccttaccagtgaccgccttgctcctgccgctggccttgctgctccacgccgccaggccggacatcgtgatgacacagagccctgatagcctggccgtgtctctgggagagagagccaccattaactgcaaggccagccagagcgtggactacgacggcgacagcttcctgaactggtatcagcagaagcccggccagcctcctaagctgctgatctacgccgccagcaatctggaaagcggcgtgccaagcagattttccggctctggcagcggcaccgatttcaccctgacaatatccagcctccagcctgaggacgtggccgtgtactactgccagcagagcaacgacgaccctctgacctttggacagggcaccaaggtggaaatcaaaggcggaggcggaagtggaggcggaggatctggcggcggaggctctgaagtccaacttgtggagtctggagggggcctggtgcagcccggcggctctctcagactgtcttgtgcggcaagcggctacaccttcagctcttactggatagaatgggtgaggcaggcacctggaaagggactggagtggattggagagattctgccaggagggggagatacaaattacaatgaaatcttcaaggggcgggccaccttttcagcggataccagcaagaatacagcttacctgcagatgaatagcctccgggcagaagataccgctgtttattattgcacgagacgggtgccaataagactggactattgggggcaagggactcttgtcaccgtcagttcaacgcgtggacagcctaaggccaatcctaccgtgacactgttccctccaagcagcgaagaactccaggccaacaaggccacacttgtgtgcctgatctccgacttctaccctggggctgtgacagtggcttggaaggccgatggatctcctgtgaaagccggcgtggaaaccaccaagccatccaagcagagcaacaacaaatacgccgccagctcctacctgagcctgacacctgagcagtggaagtcccacagatcctacagctgccaagtgacccacgaaggcagcaccgtggaaaagacagtggcccctacagagtgcagcatccccgaggacacattcttcccaagccccgagagcagctgcgacgtgaagctggtggaaaagagcttcgagacagacaccaacctgaacttccagaacctgagcgtgatcggcttcagaatcctgctgctgaaagtggccggctttaacctgctgatgaccctgcggctgtggtccagccgcgccaagagaagcggatctggcgtgaagcagaccctgaatttcgacctgctgaagctggctggcgacgtggaatccaacccaggcccttctagaggccatatgaccgagtacaagcccacggtgcgcctcgccacccgcgacgacgtccccagggccgtacgcaccctcgccgccgcgttcgccgactaccccgccacgcgccacaccgtcgatccggaccgccacatcgagcgggtcaccgagctgcaagaactcttcctcacgcgcgtcgggctcgacatcggcaaggtgtgggtcgcggacgacggcgccgcggtggcggtctggaccacgccggagagcgtcgaagcgggggcggtgttcgccgagatcggcccgcgcatggccgagttgagcggttcccggctggccgcgcagcaacagatggaaggcctcctggcgccgcaccggcccaaggagcccgcgtggttcctggccaccgtcggcgtctcgcccgaccaccagggcaagggtctgggcagcgccgtcgtgctccccggagtggaggcggccgagcgcgccggggtgcccgccttcctggagacctccgcgccccgcaacctccccttctacgagcggctcggcttcaccgtcaccgccgacgtcgaggtgcccgaaggaccgcgcacctggtgcatgacccgcaagcccggtgcctga

SEQ ID NO: 6310 - DNA, 2625 bp, synthetic construct
  source 1..2625: mol_type = other DNA
atggccttaccagtgaccgccttgctcctgccgctggccttgctgctccacgccgccaggccgctcgaggaggcctctacaaagggaccctccgtgtttcctctggctcccagcagcaagtctacaagcggaggaacagccgctctgggctgcctggtcaaggattactttcccgagcctgtgaccgtgtcctggaatagcggagcactgacaagcggcgtgcacacctttccagccgtgctgcaaagcagcggcctgtactctctgagcagcgtggtcacagtgcctagctctagcctgggcacccagacctacatctgcaatgtgaaccacaagcctagcaacaccaaggtggacaagagagtggaacccaagagctgtatccccgaggacacattcttcccaagccccgagagcagctgcgacgtgaagctggtggaaaagagcttcgagacagacaccaacctgaacttccagaacctgagcgtgatcggcttcagaatcctgctgctgaaagtggccggctttaacctgctgatgaccctgcggctgtggtccagcagggccaagcgatctggatctggagcaacaaacttctcactactcaaacaagcaggtgacgtggaggagaatcccgggcctactagcatggccttaccagtgaccgccttgctcctgccgctggccttgctgctccacgccgccaggccggacatcgtgatgacacagagccctgatagcctggccgtgtctctgggagagagagccaccattaactgcaaggccagccagagcgtggactacgacggcgacagcttcctgaactggtatcagcagaagcccggccagcctcctaagctgctgatctacgccgccagcaatctggaaagcggcgtgccaagcagattttccggctctggcagcggcaccgatttcaccctgacaatatccagcctccagcctgaggacgtggccgtgtactactgccagcagagcaacgacgaccctctgacctttggacagggcaccaaggtggaaatcaaaggcggaggcggaagtggaggcggaggatctggcggcggaggctctgaagtccaacttgtggagtctggagggggcctggtgcagcccggcggctctctcagactgtcttgtgcggcaagcggctacaccttcagctcttactggatagaatgggtgaggcaggcacctggaaagggactggagtggattggagagattctgccaggagggggagatacaaattacaatgaaatcttcaaggggcgggccaccttttcagcggataccagcaagaatacagcttacctgcagatgaatagcctccgggcagaagataccgctgtttattattgcacgagacgggtgccaataagactggactattgggggcaagggactcttgtcaccgtcagttcaacgcgtggacagcctaaggccaatcctaccgtgacactgttccctccaagcagcgaagaactccaggccaacaaggccacacttgtgtgcctgatctccgacttctaccctggggctgtgacagtggcttggaaggccgatggatctcctgtgaaagccggcgtggaaaccaccaagccatccaagcagagcaacaacaaatacgccgccagctcctacctgagcctgacacctgagcagtggaagtcccacagatcctacagctgccaagtgacccacgaaggcagcaccgtggaaaagacagtggcccctacagagtgcagcggcagagccgattgcggctttaccagcgagagctaccagcagggcgtgctgagcgccaccatcctgtacgagatcctgctgggcaaggccaccctgtacgccgtgctggtgtctgccctggtgctgatggctatggtcaagcggaaggacagccggggacgcgccaagagaagcggatctggcgtgaagcagaccctgaatttcgacctgctgaagctggctggcgacgtggaatccaacccaggcccttctagaggccatatgaccgagtacaagcccacggtgcgcctcgccacccgcgacgacgtccccagggccgtacgcaccctcgccgccgcgttcgccgactaccccgccacgcgccacaccgtcgatccggaccgccacatcgagcgggtcaccgagctgcaagaactcttcctcacgcgcgtcgggctcgacatcggcaaggtgtgggtcgcggacgacggcgccgcggtggcggtctggaccacgccggagagcgtcgaagcgggggcggtgttcgccgagatcggcccgcgcatggccgagttgagcggttcccggctggccgcgcagcaacagatggaaggcctcctggcgccgcaccggcccaaggagcccgcgtggttcctggccaccgtcggcgtctcgcccgaccaccagggcaagggtctgggcagcgccgtcgtgctccccggagtggaggcggccgagcgcgccggggtgcccgccttcctggagacctccgcgccccgcaacctccccttctacgagcggctcggcttcaccgtcaccgccgacgtcgaggtgcccgaaggaccgcgcacctggtgcatgacccgcaagcccggtgcctga

SEQ ID NO: 6311 - DNA, 1860 bp, synthetic construct
  source 1..1860: mol_type = other DNA
atggccttaccagtgaccgccttgctcctgccgctggccttgctgctccacgccgccaggccggacatcgtgatgacacagagccctgatagcctggccgtgtctctgggagagagagccaccattaactgcaaggccagccagagcgtggactacgacggcgacagcttcctgaactggtatcagcagaagcccggccagcctcctaagctgctgatctacgccgccagcaatctggaaagcggcgtgccaagcagattttccggctctggcagcggcaccgatttcaccctgacaatatccagcctccagcctgaggacgtggccgtgtactactgccagcagagcaacgacgaccctctgacctttggacagggcaccaaggtggaaatcaaactcgaggacctgaagaacgtgttcccacctgaggtggccgtgttcgagcctagcgaggccgagatcagccacacccagaaagccaccctcgtgtgcctggctaccggcttctaccccgaccatgtggaactgtcttggtgggtcaacggcaaagaggtgcacagcggcgtgtgtaccgacccccagccactgaaagaacagcccgccctgaacgacagccggtactgcctgagcagcagactgagagtgtccgccaccttctggcagaacccccggaaccacttcagatgccaggtgcagttctacggcctgagcgagaacgacgagtggacccaggacagagccaagcccgtgacccagatcgtgtctgccgaagcctggggcagagccgatagcggctttaccagcgagagctaccagcagggcgtgctgagcgccaccatcctgtacgagatcctgctgggcaaggccaccctgtacgccgtgctggtgtctgccctggtgctgatggctatggtcaagcggaaggacagccggggaagggccaagcgatctggatctggagcaacaaacttctcactactcaaacaagcaggtgacgtggaggagaatcccgggcctactagtatggactggatttggcgcatccttttccttgtcggcgctgctaccggcgcgcattccttcgaagtccaacttgtggagtctggagggggcctggtgcagcccggcggctctctcagactgtcttgtgcggcaagcggctacaccttcagctcttactggatagaatgggtgaggcaggcacctggaaagggactggagtggattggagagattctgccaggagggggagatacaaattacaatgaaatcttcaaggggcgggccaccttttcagcggataccagcaagaatacagcttacctgcagatgaatagcctccgggcagaagataccgctgtttattattgcacgagacgggtgccaataagactggactattgggggcaagggactcttgtcaccgtcagttcaacgcgtatccagaaccctgatcctgccgtgtaccagctgcgggatagcaagagcagcgacaagagcgtgtgtctgttcaccgacttcgacagccagaccaacgtgtcccagagcaaggactccgacgtgtacatcaccgataagtgcgtgctggacatgcggagcatggacttcaagagcaactccgccgtggcctggtccaacaagtccgatttcgcctgcgccaacgccttcaacaacagcattatccccgaggacacattcttcccaagccccgagagcagcagcgacgtgaagctggtggaaaagagcttcgagacagacaccaacctgaacttccagaacctgagcgtgatcggcttcagaatcctgctgctgaaagtggccggctttaacctgctgatgaccctgcggctgtggtccagc

SEQ ID NO: 6312 - DNA, 2700 bp, synthetic construct
  source 1..2700: mol_type = other DNA
atggccttaccagtgaccgccttgctcctgccgctggccttgctgctccacgccgccaggccggaggttcagctgcttgagtctggcggaggactggttcaacctggcggaagcctgagactgtcttgtgccgcctctggcagaaccttcagcatgggctggtatagacaggcccctggcaagggcctcgaatttgtgtctgccatcacatacagcggcggcagcccttactacgccgattctgtgaagggcagattcaccatcagccgggacaacagcaagaacaccgtgtacctccagatgaacagcctgagagccgaggacaccgccgtgtactactgtgccgccaatccaacctacggcagcgactggaatgccgagaattggggccagggcacactggtcacagtgtctagtggtaccggcggaggcggatctggcggcggaggtagcggtggcggaggatctgaattcgacatcgtgatgacacagagccctgatagcctggccgtgtctctgggagagagagccaccattaactgcaaggccagccagagcgtggactacgacggcgacagcttcctgaactggtatcagcagaagcccggccagcctcctaagctgctgatctacgccgccagcaatctggaaagcggcgtgccaagcagattttccggctctggcagcggcaccgatttcaccctgacaatatccagcctccagcctgaggacgtggccgtgtactactgccagcagagcaacgacgaccctctgacctttggacagggcaccaaggtggaaatcaaactcgagatccagaaccctgatcctgccgtgtaccagctgcgggatagcaagagcagcgacaagagcgtgtgtctgttcaccgacttcgacagccagaccaacgtgtcccagagcaaggactccgacgtgtacatcaccgataagtgcgtgctggacatgcggagcatggacttcaagagcaactccgccgtggcctggtccaacaagtccgatttcgcctgcgccaacgccttcaacaacagcattatccccgaggacacattcttcccaagcagcgacgtgccctgcgacgtgaagctggtggaaaagagcttcgagacagacaccaacctgaacttccagaacctgagcgtgatcggcttcagaatcctgctgctgaaagtggccggctttaacctgctgatgaccctgcggctgtggtccagccgcgccaagagaagcggatctggcgtgaagcagaccctgaatttcgacctgctgaagctggctggcgacgtggaatccaacccaggccctactagtaccatggactggatttggcgcatccttttccttgtcggcgctgctaccggcacccattccgggcccgaagtgcaactggttgaatccggtggcggcctggtgcaacccggcggatctctcagacttagctgtgccgcctccggcagaaccttcacaatgggatggtacaggcaggctccagggaaagagagagagttcgtcgccgccatctctctgtctcccacactggcctactacgccgactctgtgaaaggccggttcaccatctccagagataatagcaagaacaccgtggtgctgcaaatgaactctctgagagccgaggatacagccctgtactattgtgccgctgaccggaagtccgtgatgagcatcagacccgattactggggacagggcacactggtcacagtgtctagtggatccggcggcggaggatctggcggaggcggatctgggggcggaggctctttcgaagtccaacttgtggagtctggagggggcctggtgcagcccggcggctctctcagactgtcttgtgcggcaagcggctacaccttcagctcttactggatagaatgggtgaggcaggcacctggaaagggactggagtggattggagagattctgccaggagggggagatacaaattacaatgaaatcttcaaggggcgggccaccttttcagcggataccagcaagaatacagcttacctgcagatgaatagcctccgggcagaagataccgctgtttattattgcacgagacgggtgccaataagactggactattgggggcaagggactcttgtcaccgtcagttcaacgcgtgaggacctgaagaacgtgttcccacctgaggtggccgtgttcgagcctagcaaggccgagatcgcccacacccagaaagccaccctcgtgtgcctggctaccggcttctaccccgaccatgtggaactgtcttggtgggtcaacggcaaagaggtgcacagcggcgtgtgtaccgacccccagccactgaaagaacagcccgccctgaacgacagccggtactgcctgagcagcagactgagagtgtccgccaccttctggcagaacccccggaaccacttcagatgccaggtgcagttctacggcctgagcgagaacgacgagtggacccaggacagagccaagcccgtgacccagatcgtgtctgccgaagcctggggcagagccgattgcggcatcaccagcgccagctaccaccagggcgtgctgagcgccaccatcctgtacgagatcctgctgggcaaggccaccctgtacgccgtgctggtgtctgccctggtgctgatggctatggtcaagcggaaggacagccggggataa

SEQ ID NO: 6313 - DNA, 2700 bp, synthetic construct
  source 1..2700: mol_type = other DNA
atggccttaccagtgaccgccttgctcctgccgctggccttgctgctccacgccgccaggccggaagtgcagctggttgaatctggcggaggactggttcaggctggcggatctctgagactgtcttgtgccgccagcggcagaacctttagcatgggctggtttagacaggcccctggcaaagagagagagttcgtcgccgccatcacatactctggcggcagcccttactacgccgactctgtgaagggcagattcaccatcagccgggacaacgccaagaacaccgtgtacctccagatgaacagcctgaagcctgaggacaccgccgtgtactactgcgccgccaatccaacatacggcagcgactggaacgccgagaattggggccagggaacccaagtgacagtgtctagcggtaccggcggaggcggatctggcggcggaggtagcggtggcggaggatctgaattcgacatcgtgatgacacagagccctgatagcctggccgtgtctctgggagagagagccaccattaactgcaaggccagccagagcgtggactacgacggcgacagcttcctgaactggtatcagcagaagcccggccagcctcctaagctgctgatctacgccgccagcaatctggaaagcggcgtgccaagcagattttccggctctggcagcggcaccgatttcaccctgacaatatccagcctccagcctgaggacgtggccgtgtactactgccagcagagcaacgacgaccctctgacctttggacagggcaccaaggtggaaatcaaactcgagatccagaaccctgatcctgccgtgtaccagctgcgggatagcaagagcagcgacaagagcgtgtgtctgttcaccgacttcgacagccagaccaacgtgtcccagagcaaggactccgacgtgtacatcaccgataagtgcgtgctggacatgcggagcatggacttcaagagcaactccgccgtggcctggtccaacaagtccgatttcgcctgcgccaacgccttcaacaacagcattatccccgaggacacattcttcccaagcagcgacgtgccctgcgacgtgaagctggtggaaaagagcttcgagacagacaccaacctgaacttccagaacctgagcgtgatcggcttcagaatcctgctgctgaaagtggccggctttaacctgctgatgaccctgcggctgtggtccagccgcgccaagagaagcggatctggcgtgaagcagaccctgaatttcgacctgctgaagctggctggcgacgtggaatccaacccaggccctactagtaccatggactggatttggcgcatccttttccttgtcggcgctgctaccggcgcccattccgggcccgaagtgcaactggttgaatccggtggcggcctggtgcaacccggcggatctctcagacttagctgtgccgcctccggcagaaccttcacaatgggatggtacaggcaggctccagggaaagagagagagttcgtcgccgccatctctctgtctcccacactggcctactacgccgactctgtgaaaggccggttcaccatctccagagataatagcaagaacaccgtggtgctgcaaatgaactctctgagagccgaggatacagccctgtactattgtgccgctgaccggaagtccgtgatgagcatcagacccgattactggggacagggcacactggtcacagtgtctagtggatccggcggcggaggatctggcggaggcggatctgggggcggaggctctttcgaagtccaacttgtggagtctggagggggcctggtgcagcccggcggctctctcagactgtcttgtgcggcaagcggctacaccttcagctcttactggatagaatgggtgaggcaggcacctggaaagggactggagtggattggagagattctgccaggagggggagatacaaattacaatgaaatcttcaaggggcgggccaccttttcagcggataccagcaagaatacagcttacctgcagatgaatagcctccgggcagaagataccgctgtttattattgcacgagacgggtgccaataagactggactattgggggcaagggactcttgtcaccgtcagttcaacgcgtgaggacctgaagaacgtgttcccacctgaggtggccgtgttcgagcctagcaaggccgagatcgcccacacccagaaagccaccctcgtgtgcctggctaccggcttctaccccgaccatgtggaactgtcttggtgggtcaacggcaaagaggtgcacagcggcgtgtgtaccgacccccagccactgaaagaacagcccgccctgaacgacagccggtactgcctgagcagcagactgagagtgtccgccaccttctggcagaacccccggaaccacttcagatgccaggtgcagttctacggcctgagcgagaacgacgagtggacccaggacagagccaagcccgtgacccagatcgtgtctgccgaagcctggggcagagccgattgcggcatcaccagcgccagctaccaccagggcgtgctgagcgccaccatcctgtacgagatcctgctgggcaaggccaccctgtacgccgtgctggtgtctgccctggtgctgatggctatggtcaagcggaaggacagccggggataa

SEQ ID NO: 6314 - DNA, 2691 bp, synthetic construct
  source 1..2691: mol_type = other DNA
atggccttaccagtgaccgccttgctcctgccgctggccttgctgctccacgccgccaggccggaagtgcagctggttgaatctggcggaggactggttcaggctggcggatctctgagactgtcttgtgccgccagcggcagaacctttagcatgggctggtttagacaggcccctggcaaagagagagagttcgtcgccgccatcacatactctggcggcagcccttactacgccgactctgtgaagggcagattcaccatcagccgggacaacgccaagaacaccgtgtacctccagatgaacagcctgaagcctgaggacaccgccgtgtactactgcgccgccaatccaacatacggcagcgactggaacgccgagaattggggccagggaacccaagtgacagtgtctagcggtaccggcggaggcggatctggcggcggaggtagcggtggcggaggatctgaattcgacatcgtgatgacacagagccctgatagcctggccgtgtctctgggagagagagccaccattaactgcaaggccagccagagcgtggactacgacggcgacagcttcctgaactggtatcagcagaagcccggccagcctcctaagctgctgatctacgccgccagcaatctggaaagcggcgtgccaagcagattttccggctctggcagcggcaccgatttcaccctgacaatatccagcctccagcctgaggacgtggccgtgtactactgccagcagagcaacgacgaccctctgacctttggacagggcaccaaggtggaaatcaaactcgaggacctgaagaacgtgttcccacctgaggtggccgtgttcgagcctagcgaggccgagatcagccacacccagaaagccaccctcgtgtgcctggctaccggcttctaccccgaccatgtggaactgtcttggtgggtcaacggcaaagaggtgcacagcggcgtgtgtaccgacccccagccactgaaagaacagcccgccctgaacgacagccggtactgcctgagcagcagactgagagtgtccgccaccttctggcagaacccccggaaccacttcagatgccaggtgcagttctacggcctgagcgagaacgacgagtggacccaggacagagccaagcccgtgacccagatcgtgtctgccgaagcctggggcagagccgattgcggctttaccagcgagagctaccagcagggcgtgctgagcgccaccatcctgtacgagatcctgctgggcaaggccaccctgtacgccgtgctggtgtctgccctggtgctgatggctatggtcaagcggaaggacagccggggaagggccaagcgatctggatctggagcaacaaacttctcactactcaaacaagcaggtgacgtggaggagaatcccgggcctactagtgccaccatggactggatttggcgcatccttttccttgtcggcgctgctaccggcgcccattccgggcccgaagtgcaactggttgaatccggtggcggcctggtgcaagcaggcggatctctcagacttagctgtgccgcctccggcagaaccttcacaatgggatggtttaggcaggctccagggaaagagagagagttcgtcgccgccatctctctgtctcccacactggcctactacgccgactctgtgaaaggccggttcaccatctccagagataatgccaagaacaccgtggtgctgcaaatgaactctctgaaacccgaggatacagccctgtactattgtgccgctgaccggaagtccgtgatgagcatcagacccgattactggggacagggcacacaagtcacagtgtcctctggatccggcggcggaggatctggcggaggcggatctgggggcggaggctctttcgaagtccaacttgtggagtctggagggggcctggtgcagcccggcggctctctcagactgtcttgtgcggcaagcggctacaccttcagctcttactggatagaatgggtgaggcaggcacctggaaagggactggagtggattggagagattctgccaggagggggagatacaaattacaatgaaatcttcaaggggcgggccaccttttcagcggataccagcaagaatacagcttacctgcagatgaatagcctccgggcagaagataccgctgtttattattgcacgagacgggtgccaataagactggactattgggggcaagggactcttgtcaccgtcagttcaacgcgtatccagaaccctgatcctgccgtgtaccagctgcgggatagcaagagcagcgacaagagcgtgtgtctgttcaccgacttcgacagccagaccaacgtgtcccagagcaaggactccgacgtgtacatcaccgataagtgcgtgctggacatgcggagcatggacttcaagagcaactccgccgtggcctggtccaacaagtccgatttcgcctgcgccaacgccttcaacaacagcattatccccgaggacacattcttcccaagccccgagagcagctgcgacgtgaagctggtggaaaagagcttcgagacagacaccaacctgaacttccagaacctgagcgtgatcggcttcagaatcctgctgctgaaagtggccggctttaacctgctgatgaccctgcggctgtggtccagctaa

SEQ ID NO: 6315 - DNA, 2304 bp, synthetic construct
  source 1..2304: mol_type = other DNA
atggccttaccagtgaccgccttgctcctgccgctggccttgctgctccacgccgccaggccggaagtgcagctggttgaatctggcggaggactggttcagcctggcggatctctgagactgagctgtgaagccagcggcttcgccagcgacgattacatcatcggctggttcagacaggcccctggcaaagagagagagggcgtcagctgcatcagctctaagtacgccaacaccgtgtacaccgacagcgtgaagggcagattcagactgagcagaggcaccgccaagaataccgtgtacctccagatgagcgccctgaagcctgaggataccgccgtgtactactgcgctatggacagccgcagagtgacatgccctgagatcagcaccatgcaccggaacttcgattcttggggccagggcacactggtcacagtgtcatctggtaccggcggaggcggatctggcggcggaggtagcggtggcggaggatctgaattcgacatcgtgatgacacagagccctgatagcctggccgtgtctctgggagagagagccaccattaactgcaaggccagccagagcgtggactacgacggcgacagcttcctgaactggtatcagcagaagcccggccagcctcctaagctgctgatctacgccgccagcaatctggaaagcggcgtgccaagcagattttccggctctggcagcggcaccgatttcaccctgacaatatccagcctccagcctgaggacgtggccgtgtactactgccagcagagcaacgacgaccctctgacctttggacagggcaccaaggtggaaatcaaactcgaggacctgaagaacgtgttcccacctgaggtggccgtgttcgagcctagcaaggccgagatcgcccacacccagaaagccaccctcgtgtgcctggctaccggcttctaccccgaccatgtggaactgtcttggtgggtcaacggcaaagaggtgcacagcggcgtgtgtaccgacccccagccactgaaagaacagcccgccctgaacgacagccggtactgcctgagcagcagactgagagtgtccgccaccttctggcagaacccccggaaccacttcagatgccaggtgcagttctacggcctgagcgagaacgacgagtggacccaggacagagccaagcccgtgacccagatcgtgtctgccgaagcctggggcagagccgattgcggcatcaccagcgccagctaccaccagggcgtgctgagcgccaccatcctgtacgagatcctgctgggcaaggccaccctgtacgccgtgctggtgtctgccctggtgctgatggctatggtcaagcggaaggacagccggggaagggccaagcgatctggatctggagcaacaaacttctcactactcaaacaagcaggtgacgtggaggagaatcccgggcctactagtatggactggatttggcgcatccttttccttgtcggcgctgctaccggcgcgcattccttcgaagtccaacttgtggagtctggagggggcctggtgcagcccggcggctctctcagactgtcttgtgcggcaagcggctacaccttcagctcttactggatagaatgggtgaggcaggcacctggaaagggactggagtggattggagagattctgccaggagggggagatacaaattacaatgaaatcttcaaggggcgggccaccttttcagcggataccagcaagaatacagcttacctgcagatgaatagcctccgggcagaagataccgctgtttattattgcacgagacgggtgccaataagactggactattgggggcaagggactcttgtcaccgtcagttcaacgcgtatccagaaccctgatcctgccgtgtaccagctgcgggatagcaagagcagcgacaagagcgtgtgtctgttcaccgacttcgacagccagaccaacgtgtcccagagcaaggactccgacgtgtacatcaccgataagtgcgtgctggacatgcggagcatggacttcaagagcaactccgccgtggcctggtccaacaagtccgatttcgcctgcgccaacgccttcaacaacagcattatccccgaggacacattcttcccaagcagcgacgtgccctgcgacgtgaagctggtggaaaagagcttcgagacagacaccaacctgaacttccagaacctgagcgtgatcggcttcagaatcctgctgctgaaagtggccggctttaacctgctgatgaccctgcggctgtggtccagctaa

SEQ ID NO: 6316 - DNA, 2277 bp, synthetic construct
  source 1..2277: mol_type = other DNA
atggccttaccagtgaccgccttgctcctgccgctggccttgctgctccacgccgccaggccggacatcgtgatgacacagagccctgatagcctggccgtgtctctgggagagagagccaccattaactgcaaggccagccagagcgtggactacgacggcgacagcttcctgaactggtatcagcagaagcccggccagcctcctaagctgctgatctacgccgccagcaatctggaaagcggcgtgccaagcagattttccggctctggcagcggcaccgatttcaccctgacaatatccagcctccagcctgaggacgtggccgtgtactactgccagcagagcaacgacgaccctctgacctttggacagggcaccaaggtggaaatcaaactcgaggacctgaagaacgtgttcccacctgaggtggccgtgttcgagcctagcgaggccgagatcagccacacccagaaagccaccctcgtgtgcctggctaccggcttctaccccgaccatgtggaactgtcttggtgggtcaacggcaaagaggtgcacagcggcgtgtgtaccgacccccagccactgaaagaacagcccgccctgaacgacagccggtactgcctgagcagcagactgagagtgtccgccaccttctggcagaacccccggaaccacttcagatgccaggtgcagttctacggcctgagcgagaacgacgagtggacccaggacagagccaagcccgtgacccagatcgtgtctgccgaagcctggggcagagccgattgcggctttaccagcgagagctaccagcagggcgtgctgagcgccaccatcctgtacgagatcctgctgggcaaggccaccctgtacgccgtgctggtgtctgccctggtgctgatggctatggtcaagcggaaggacagccggggaagggccaagcgatctggatctggagcaacaaacttctcactactcaaacaagcaggtgacgtggaggagaatcccgggcctactagtaccatggactggatttggcgcatccttttccttgtcggcgctgctaccggcgcccattccgggcccgaagtgcaactggttgaatccggtggcggcctggtgcaacccggcggatctctcagacttagctgtgccgcctccggcagaaccttcacaatgggatggtacaggcaggctccagggaaagagagagagttcgtcgccgccatctctctgtctcccacactggcctactacgccgactctgtgaaaggccggttcaccatctccagagataatagcaagaacaccgtggtgctgcaaatgaactctctgagagccgaggatacagccctgtactattgtgccgctgaccggaagtccgtgatgagcatcagacccgattactggggacagggcacactggtcacagtgtctagtggatccggcggcggaggatctggcggaggcggatctgggggcggaggctctttcgaagtccaacttgtggagtctggagggggcctggtgcagcccggcggctctctcagactgtcttgtgcggcaagcggctacaccttcagctcttactggatagaatgggtgaggcaggcacctggaaagggactggagtggattggagagattctgccaggagggggagatacaaattacaatgaaatcttcaaggggcgggccaccttttcagcggataccagcaagaatacagcttacctgcagatgaatagcctccgggcagaagataccgctgtttattattgcacgagacgggtgccaataagactggactattgggggcaagggactcttgtcaccgtcagttcaacgcgtatccagaaccctgatcctgccgtgtaccagctgcgggatagcaagagcagcgacaagagcgtgtgtctgttcaccgacttcgacagccagaccaacgtgtcccagagcaaggactccgacgtgtacatcaccgataagtgcgtgctggacatgcggagcatggacttcaagagcaactccgccgtggcctggtccaacaagtccgatttcgcctgcgccaacgccttcaacaacagcattatccccgaggacacattcttcccaagccccgagagcagctgcgacgtgaagctggtggaaaagagcttcgagacagacaccaacctgaacttccagaacctgagcgtgatcggcttcagaatcctgctgctgaaagtggccggctttaacctgctgatgaccctgcggctgtggtccagctaa

SEQ ID NO: 6317 - DNA, 2295 bp, synthetic construct
  source 1..2295: mol_type = other DNA
atggccttaccagtgaccgccttgctcctgccgctggccttgctgctccacgccgccaggccggacatcgtgatgacacagagccctgatagcctggccgtgtctctgggagagagagccaccattaactgcaaggccagccagagcgtggactacgacggcgacagcttcctgaactggtatcagcagaagcccggccagcctcctaagctgctgatctacgccgccagcaatctggaaagcggcgtgccaagcagattttccggctctggcagcggcaccgatttcaccctgacaatatccagcctccagcctgaggacgtggccgtgtactactgccagcagagcaacgacgaccctctgacctttggacagggcaccaaggtggaaatcaaactcgaggacctgaagaacgtgttcccacctgaggtggccgtgttcgagcctagcgaggccgagatcagccacacccagaaagccaccctcgtgtgcctggctaccggcttctaccccgaccatgtggaactgtcttggtgggtcaacggcaaagaggtgcacagcggcgtgtgtaccgacccccagccactgaaagaacagcccgccctgaacgacagccggtactgcctgagcagcagactgagagtgtccgccaccttctggcagaacccccggaaccacttcagatgccaggtgcagttctacggcctgagcgagaacgacgagtggacccaggacagagccaagcccgtgacccagatcgtgtctgccgaagcctggggcagagccgattgcggctttaccagcgagagctaccagcagggcgtgctgagcgccaccatcctgtacgagatcctgctgggcaaggccaccctgtacgccgtgctggtgtctgccctggtgctgatggctatggtcaagcggaaggacagccggggaagggccaagcgatctggatctggagcaacaaacttctcactactcaaacaagcaggtgacgtggaggagaatcccgggcctactagtaccatggactggatttggcgcatccttttccttgtcggcgctgctaccggcgcccattccgggccccaggtgcagctggttgaatctggcggaggactggttcagcctggcggatctctgagactgtcttgtgccgccagcggcaacatcaacagcagaaactgcatgggctggttcagacaggcccctggcaagggaagagaaggcgtggcagctatcggccaagtgaccggcagaacctactacgtggacagcgtgaagggcagattcaccatcagcctggacaacagcaagaacaccctgtacctccagatgaacagcctgagagccgaggacaccgccgtgtactattgtgctgctgcccctggctgtctgctgtctgcacttagaagcgccgactacagaaactggggccagggcacactggtcaccgtttcttctggatccggcggcggaggatctggcggaggcggatctgggggcggaggctctttcgaagtccaacttgtggagtctggagggggcctggtgcagcccggcggctctctcagactgtcttgtgcggcaagcggctacaccttcagctcttactggatagaatgggtgaggcaggcacctggaaagggactggagtggattggagagattctgccaggagggggagatacaaattacaatgaaatcttcaaggggcgggccaccttttcagcggataccagcaagaatacagcttacctgcagatgaatagcctccgggcagaagataccgctgtttattattgcacgagacgggtgccaataagactggactattgggggcaagggactcttgtcaccgtcagttcaacgcgtatccagaaccctgatcctgccgtgtaccagctgcgggatagcaagagcagcgacaagagcgtgtgtctgttcaccgacttcgacagccagaccaacgtgtcccagagcaaggactccgacgtgtacatcaccgataagtgcgtgctggacatgcggagcatggacttcaagagcaactccgccgtggcctggtccaacaagtccgatttcgcctgcgccaacgccttcaacaacagcattatccccgaggacacattcttcccaagccccgagagcagctgcgacgtgaagctggtggaaaagagcttcgagacagacaccaacctgaacttccagaacctgagcgtgatcggcttcagaatcctgctgctgaaagtggccggctttaacctgctgatgaccctgcggctgtggtccagc

SEQ ID NO: 6318 - DNA, 2298 bp, synthetic construct
  source 1..2298: mol_type = other DNA
atggccttaccagtgaccgccttgctcctgccgctggccttgctgctccacgccgccaggccggacatcgtgatgacacagagccctgatagcctggccgtgtctctgggagagagagccaccattaactgcaaggccagccagagcgtggactacgacggcgacagcttcctgaactggtatcagcagaagcccggccagcctcctaagctgctgatctacgccgccagcaatctggaaagcggcgtgccaagcagattttccggctctggcagcggcaccgatttcaccctgacaatatccagcctccagcctgaggacgtggccgtgtactactgccagcagagcaacgacgaccctctgacctttggacagggcaccaaggtggaaatcaaactcgaggacctgaagaacgtgttcccacctgaggtggccgtgttcgagcctagcgaggccgagatcagccacacccagaaagccaccctcgtgtgcctggctaccggcttctaccccgaccatgtggaactgtcttggtgggtcaacggcaaagaggtgcacagcggcgtgtgtaccgacccccagccactgaaagaacagcccgccctgaacgacagccggtactgcctgagcagcagactgagagtgtccgccaccttctggcagaacccccggaaccacttcagatgccaggtgcagttctacggcctgagcgagaacgacgagtggacccaggacagagccaagcccgtgacccagatcgtgtctgccgaagcctggggcagagccgattgcggctttaccagcgagagctaccagcagggcgtgctgagcgccaccatcctgtacgagatcctgctgggcaaggccaccctgtacgccgtgctggtgtctgccctggtgctgatggctatggtcaagcggaaggacagccggggaagggccaagcgatctggatctggagcaacaaacttctcactactcaaacaagcaggtgacgtggaggagaatcccgggcctactagtaccatggactggatttggcgcatccttttccttgtcggcgctgctaccggcgcccattccgggccccaggtgcagctggttgaatctggcggaggatctgttcaggctggcggctctctgagactgtcttgtggcgcttccggcaacatcagcagcagaaactgcatgggctggttcagacaggcccctggcaaagagagagaaggcgttgccgccatcggacaagtgaccggcagatcctactacgtggacagcgtgaagggcagattcaccatcagcctggacaacgccaagaacaccctgtacctccagatgaacacactgaagcccgaggacaccgccatgtactactgtgctgctgcccctggctgtctgctgtctgcacttagaagcgccgactacagaaactggggccagggaacccaagtgacagtgtctagtggatccggcggcggaggatctggcggaggcggatctgggggcggaggctctttcgaagtccaacttgtggagtctggagggggcctggtgcagcccggcggctctctcagactgtcttgtgcggcaagcggctacaccttcagctcttactggatagaatgggtgaggcaggcacctggaaagggactggagtggattggagagattctgccaggagggggagatacaaattacaatgaaatcttcaaggggcgggccaccttttcagcggataccagcaagaatacagcttacctgcagatgaatagcctccgggcagaagataccgctgtttattattgcacgagacgggtgccaataagactggactattgggggcaagggactcttgtcaccgtcagttcaacgcgtatccagaaccctgatcctgccgtgtaccagctgcgggatagcaagagcagcgacaagagcgtgtgtctgttcaccgacttcgacagccagaccaacgtgtcccagagcaaggactccgacgtgtacatcaccgataagtgcgtgctggacatgcggagcatggacttcaagagcaactccgccgtggcctggtccaacaagtccgatttcgcctgcgccaacgccttcaacaacagcattatccccgaggacacattcttcccaagccccgagagcagctgcgacgtgaagctggtggaaaagagcttcgagacagacaccaacctgaacttccagaacctgagcgtgatcggcttcagaatcctgctgctgaaagtggccggctttaacctgctgatgaccctgcggctgtggtccagctaa

SEQ ID NO: 6319 - DNA, 2721 bp, synthetic construct
  source 1..2721: mol_type = other DNA
atggccttaccagtgaccgccttgctcctgccgctggccttgctgctccacgccgccaggccggaagtgcagctggttgaatctggcggaggactggttcaggctggcggatctctgagactgtcttgtgccgccagcggcagaacctttagcatgggctggtttagacaggcccctggcaaagagagagagttcgtcgccgccatcacatactctggcggcagcccttactacgccgactctgtgaagggcagattcaccatcagccgggacaacgccaagaacaccgtgtacctccagatgaacagcctgaagcctgaggacaccgccgtgtactactgcgccgccaatccaacatacggcagcgactggaacgccgagaattggggccagggaacccaagtgacagtgtctagcggtaccggcggaggcggatctggcggcggaggtagcggtggcggaggatctgaattcgacatcgtgatgacacagagccctgatagcctggccgtgtctctgggagagagagccaccattaactgcaaggccagccagagcgtggactacgacggcgacagcttcctgaactggtatcagcagaagcccggccagcctcctaagctgctgatctacgccgccagcaatctggaaagcggcgtgccaagcagattttccggctctggcagcggcaccgatttcaccctgacaatatccagcctccagcctgaggacgtggccgtgtactactgccagcagagcaacgacgaccctctgacctttggacagggcaccaaggtggaaatcaaactcgagatccagaaccctgatcctgccgtgtaccagctgcgggatagcaagagcagcgacaagagcgtgtgtctgttcaccgacttcgacagccagaccaacgtgtcccagagcaaggactccgacgtgtacatcaccgataagtgcgtgctggacatgcggagcatggacttcaagagcaactccgccgtggcctggtccaacaagtccgatttcgcctgcgccaacgccttcaacaacagcattatccccgaggacacattcttcccaagcagcgacgtgccctgcgacgtgaagctggtggaaaagagcttcgagacagacaccaacctgaacttccagaacctgagcgtgatcggcttcagaatcctgctgctgaaagtggccggctttaacctgctgatgaccctgcggctgtggtccagccgcgccaagagaagcggatctggcgtgaagcagaccctgaatttcgacctgctgaagctggctggcgacgtggaatccaacccaggccctactagtaccatggactggatttggcgcatccttttccttgtcggcgctgctaccggcgcccattccgggccccaggtgcagctggttgaatctggcggaggatctgttcaggctggcggctctctgagactgtcttgtggcgcttccggcaacatcagcagcagaaactgcatgggctggttcagacaggcccctggcaaagagagagaaggcgttgccgccatcggacaagtgaccggcagatcctactacgtggacagcgtgaagggcagattcaccatcagcctggacaacgccaagaacaccctgtacctccagatgaacacactgaagcccgaggacaccgccatgtactactgtgctgctgcccctggctgtctgctgtctgcacttagaagcgccgactacagaaactggggccagggaacccaagtgacagtgtctagtggatccggcggcggaggatctggcggaggcggatctgggggcggaggctctttcgaagtccaacttgtggagtctggagggggcctggtgcagcccggcggctctctcagactgtcttgtgcggcaagcggctacaccttcagctcttactggatagaatgggtgaggcaggcacctggaaagggactggagtggattggagagattctgccaggagggggagatacaaattacaatgaaatcttcaaggggcgggccaccttttcagcggataccagcaagaatacagcttacctgcagatgaatagcctccgggcagaagataccgctgtttattattgcacgagacgggtgccaataagactggactattgggggcaagggactcttgtcaccgtcagttcaacgcgtgaggacctgaagaacgtgttcccacctgaggtggccgtgttcgagcctagcaaggccgagatcgcccacacccagaaagccaccctcgtgtgcctggctaccggcttctaccccgaccatgtggaactgtcttggtgggtcaacggcaaagaggtgcacagcggcgtgtgtaccgacccccagccactgaaagaacagcccgccctgaacgacagccggtactgcctgagcagcagactgagagtgtccgccaccttctggcagaacccccggaaccacttcagatgccaggtgcagttctacggcctgagcgagaacgacgagtggacccaggacagagccaagcccgtgacccagatcgtgtctgccgaagcctggggcagagccgattgcggcatcaccagcgccagctaccaccagggcgtgctgagcgccaccatcctgtacgagatcctgctgggcaaggccaccctgtacgccgtgctggtgtctgccctggtgctgatggctatggtcaagcggaaggacagccggggataa

SEQ ID NO: 6320 - DNA, 2712 bp, synthetic construct
  source 1..2712: mol_type = other DNA
atggccttaccagtgaccgccttgctcctgccgctggccttgctgctccacgccgccaggccgcaggtgcagctggttgaatctggcggaggatctgttcaggctggcggctctctgagactgtcttgtggcgcttccggcaacatcagcagcagaaactgcatgggctggttcagacaggcccctggcaaagagagagaaggcgttgccgccatcggacaagtgaccggcagatcctactacgtggacagcgtgaagggcagattcaccatcagcctggacaacgccaagaacaccctgtacctccagatgaacacactgaagcccgaggacaccgccatgtactactgtgctgctgcccctggctgtctgctgtctgcacttagaagcgccgactacagaaactggggccagggaacccaagtgacagtgtctagtggtaccggcggaggcggatctggcggcggaggtagcggtggcggaggatctgaattcgacatcgtgatgacacagagccctgatagcctggccgtgtctctgggagagagagccaccattaactgcaaggccagccagagcgtggactacgacggcgacagcttcctgaactggtatcagcagaagcccggccagcctcctaagctgctgatctacgccgccagcaatctggaaagcggcgtgccaagcagattttccggctctggcagcggcaccgatttcaccctgacaatatccagcctccagcctgaggacgtggccgtgtactactgccagcagagcaacgacgaccctctgacctttggacagggcaccaaggtggaaatcaaactcgaggacctgaagaacgtgttcccacctgaggtggccgtgttcgagcctagcgaggccgagatcagccacacccagaaagccaccctcgtgtgcctggctaccggcttctaccccgaccatgtggaactgtcttggtgggtcaacggcaaagaggtgcacagcggcgtgtgtaccgacccccagccactgaaagaacagcccgccctgaacgacagccggtactgcctgagcagcagactgagagtgtccgccaccttctggcagaacccccggaaccacttcagatgccaggtgcagttctacggcctgagcgagaacgacgagtggacccaggacagagccaagcccgtgacccagatcgtgtctgccgaagcctggggcagagccgattgcggctttaccagcgagagctaccagcagggcgtgctgagcgccaccatcctgtacgagatcctgctgggcaaggccaccctgtacgccgtgctggtgtctgccctggtgctgatggctatggtcaagcggaaggacagccggggaagggccaagcgatctggatctggagcaacaaacttctcactactcaaacaagcaggtgacgtggaggagaatcccgggcctactagtgccaccatggactggatttggcgcatccttttccttgtcggcgctgctaccggcgcccattccgggcccgaagtgcaactggttgaatccggtggcggcctggtgcaagcaggcggatctctcagacttagctgtgccgcctccggcagaaccttcacaatgggatggtttaggcaggctccagggaaagagagagagttcgtcgccgccatctctctgtctcccacactggcctactacgccgactctgtgaaaggccggttcaccatctccagagataatgccaagaacaccgtggtgctgcaaatgaactctctgaaacccgaggatacagccctgtactattgtgccgctgaccggaagtccgtgatgagcatcagacccgattactggggacagggcacacaagtcacagtgtcctctggatccggcggcggaggatctggcggaggcggatctgggggcggaggctctttcgaagtccaacttgtggagtctggagggggcctggtgcagcccggcggctctctcagactgtcttgtgcggcaagcggctacaccttcagctcttactggatagaatgggtgaggcaggcacctggaaagggactggagtggattggagagattctgccaggagggggagatacaaattacaatgaaatcttcaaggggcgggccaccttttcagcggataccagcaagaatacagcttacctgcagatgaatagcctccgggcagaagataccgctgtttattattgcacgagacgggtgccaataagactggactattgggggcaagggactcttgtcaccgtcagttcaacgcgtatccagaaccctgatcctgccgtgtaccagctgcgggatagcaagagcagcgacaagagcgtgtgtctgttcaccgacttcgacagccagaccaacgtgtcccagagcaaggactccgacgtgtacatcaccgataagtgcgtgctggacatgcggagcatggacttcaagagcaactccgccgtggcctggtccaacaagtccgatttcgcctgcgccaacgccttcaacaacagcattatccccgaggacacattcttcccaagccccgagagcagctgcgacgtgaagctggtggaaaagagcttcgagacagacaccaacctgaacttccagaacctgagcgtgatcggcttcagaatcctgctgctgaaagtggccggctttaacctgctgatgaccctgcggctgtggtccagctaa

SEQ ID NO: 6321 - DNA, 2301 bp, synthetic construct
  source 1..2301: mol_type = other DNA
atggccttaccagtgaccgccttgctcctgccgctggccttgctgctccacgccgccaggccgcaggtgcagctggttgaatctggcggaggatctgttcaggctggcggctctctgagactgtcttgtggcgcttccggcaacatcagcagcagaaactgcatgggctggttcagacaggcccctggcaaagagagagaaggcgttgccgccatcggacaagtgaccggcagatcctactacgtggacagcgtgaagggcagattcaccatcagcctggacaacgccaagaacaccctgtacctccagatgaacacactgaagcccgaggacaccgccatgtactactgtgctgctgcccctggctgtctgctgtctgcacttagaagcgccgactacagaaactggggccagggaacccaagtgacagtgtctagtggtaccggcggaggcggatctggcggcggaggtagcggtggcggaggatctgaattcgacatcgtgatgacacagagccctgatagcctggccgtgtctctgggagagagagccaccattaactgcaaggccagccagagcgtggactacgacggcgacagcttcctgaactggtatcagcagaagcccggccagcctcctaagctgctgatctacgccgccagcaatctggaaagcggcgtgccaagcagattttccggctctggcagcggcaccgatttcaccctgacaatatccagcctccagcctgaggacgtggccgtgtactactgccagcagagcaacgacgaccctctgacctttggacagggcaccaaggtggaaatcaaactcgaggacctgaagaacgtgttcccacctgaggtggccgtgttcgagcctagcgaggccgagatcagccacacccagaaagccaccctcgtgtgcctggctaccggcttctaccccgaccatgtggaactgtcttggtgggtcaacggcaaagaggtgcacagcggcgtgtgtaccgacccccagccactgaaagaacagcccgccctgaacgacagccggtactgcctgagcagcagactgagagtgtccgccaccttctggcagaacccccggaaccacttcagatgccaggtgcagttctacggcctgagcgagaacgacgagtggacccaggacagagccaagcccgtgacccagatcgtgtctgccgaagcctggggcagagccgattgcggctttaccagcgagagctaccagcagggcgtgctgagcgccaccatcctgtacgagatcctgctgggcaaggccaccctgtacgccgtgctggtgtctgccctggtgctgatggctatggtcaagcggaaggacagccggggaagggccaagcgatctggatctggagcaacaaacttctcactactcaaacaagcaggtgacgtggaggagaatcccgggcctactagtgccaccatggactggatttggcgcatccttttccttgtcggcgctgctaccggcgcccattccttcgaagtccaacttgtggagtctggagggggcctggtgcagcccggcggctctctcagactgtcttgtgcggcaagcggctacaccttcagctcttactggatagaatgggtgaggcaggcacctggaaagggactggagtggattggagagattctgccaggagggggagatacaaattacaatgaaatcttcaaggggcgggccaccttttcagcggataccagcaagaatacagcttacctgcagatgaatagcctccgggcagaagataccgctgtttattattgcacgagacgggtgccaataagactggactattgggggcaagggactcttgtcaccgtcagttcaacgcgtatccagaaccctgatcctgccgtgtaccagctgcgggatagcaagagcagcgacaagagcgtgtgtctgttcaccgacttcgacagccagaccaacgtgtcccagagcaaggactccgacgtgtacatcaccgataagtgcgtgctggacatgcggagcatggacttcaagagcaactccgccgtggcctggtccaacaagtccgatttcgcctgcgccaacgccttcaacaacagcattatccccgaggacacattcttcccaagccccgagagcagctgcgacgtgaagctggtggaaaagagcttcgagacagacaccaacctgaacttccagaacctgagcgtgatcggcttcagaatcctgctgctgaaagtggccggctttaacctgctgatgaccctgcggctgtggtccagctaa

SEQ ID NO: 6322 - DNA, 2301 bp, synthetic construct
  source 1..2301: mol_type = other DNA
atggccttaccagtgaccgccttgctcctgccgctggccttgctgctccacgccgccaggccgcaagttcagctggtggaaagcggtggtggcgttgtgcaacctggtggaagtctgaggctgagctgtgccgcttctggcctgagctttagcacctacactgtggcctggttcaggcaggctcccggaaagggtcttgaaggcgtggccgccattccttacaccagccagcacatggtgtacacagacagcgtcagaggccggttcaccatcagcagagacaactccaagaatacgctctatctccagatgaactctctgcgcgccgaagatacagccgtgtattactgcgccaccgacagacggcctggcacctctatgctggctatcaacggctacaacagatggggacagggaaccaccgtgaccgtgtcatctggtaccggcggaggcggatctggcggcggaggtagcggtggcggaggatctgaattcgacatcgtgatgacacagagccctgatagcctggccgtgtctctgggagagagagccaccattaactgcaaggccagccagagcgtggactacgacggcgacagcttcctgaactggtatcagcagaagcccggccagcctcctaagctgctgatctacgccgccagcaatctggaaagcggcgtgccaagcagattttccggctctggcagcggcaccgatttcaccctgacaatatccagcctccagcctgaggacgtggccgtgtactactgccagcagagcaacgacgaccctctgacctttggacagggcaccaaggtggaaatcaaactcgaggacctgaagaacgtgttcccacctgaggtggccgtgttcgagcctagcgaggccgagatcagccacacccagaaagccaccctcgtgtgcctggctaccggcttctaccccgaccatgtggaactgtcttggtgggtcaacggcaaagaggtgcacagcggcgtgtgtaccgacccccagccactgaaagaacagcccgccctgaacgacagccggtactgcctgagcagcagactgagagtgtccgccaccttctggcagaacccccggaaccacttcagatgccaggtgcagttctacggcctgagcgagaacgacgagtggacccaggacagagccaagcccgtgacccagatcgtgtctgccgaagcctggggcagagccgattgcggctttaccagcgagagctaccagcagggcgtgctgagcgccaccatcctgtacgagatcctgctgggcaaggccaccctgtacgccgtgctggtgtctgccctggtgctgatggctatggtcaagcggaaggacagccggggaagggccaagcgatctggatctggagcaacaaacttctcactactcaaacaagcaggtgacgtggaggagaatcccgggcctactagtgccaccatggactggatttggcgcatccttttccttgtcggcgctgctaccggcgcccattccttcgaagtccaacttgtggagtctggagggggcctggtgcagcccggcggctctctcagactgtcttgtgcggcaagcggctacaccttcagctcttactggatagaatgggtgaggcaggcacctggaaagggactggagtggattggagagattctgccaggagggggagatacaaattacaatgaaatcttcaaggggcgggccaccttttcagcggataccagcaagaatacagcttacctgcagatgaatagcctccgggcagaagataccgctgtttattattgcacgagacgggtgccaataagactggactattgggggcaagggactcttgtcaccgtcagttcaacgcgtatccagaaccctgatcctgccgtgtaccagctgcgggatagcaagagcagcgacaagagcgtgtgtctgttcaccgacttcgacagccagaccaacgtgtcccagagcaaggactccgacgtgtacatcaccgataagtgcgtgctggacatgcggagcatggacttcaagagcaactccgccgtggcctggtccaacaagtccgatttcgcctgcgccaacgccttcaacaacagcattatccccgaggacacattcttcccaagccccgagagcagctgcgacgtgaagctggtggaaaagagcttcgagacagacaccaacctgaacttccagaacctgagcgtgatcggcttcagaatcctgctgctgaaagtggccggctttaacctgctgatgaccctgcggctgtggtccagctaa

SEQ ID NO: 6323 - DNA, 2298 bp, synthetic construct
  source 1..2298: mol_type = other DNA
atggccttaccagtgaccgccttgctcctgccgctggccttgctgctccacgccgccaggccggacatcgtgatgacacagagccctgatagcctggccgtgtctctgggagagagagccaccattaactgcaaggccagccagagcgtggactacgacggcgacagcttcctgaactggtatcagcagaagcccggccagcctcctaagctgctgatctacgccgccagcaatctggaaagcggcgtgccaagcagattttccggctctggcagcggcaccgatttcaccctgacaatatccagcctccagcctgaggacgtggccgtgtactactgccagcagagcaacgacgaccctctgacctttggacagggcaccaaggtggaaatcaaactcgaggacctgaagaacgtgttcccacctgaggtggccgtgttcgagcctagcgaggccgagatcagccacacccagaaagccaccctcgtgtgcctggctaccggcttctaccccgaccatgtggaactgtcttggtgggtcaacggcaaagaggtgcacagcggcgtgtgtaccgacccccagccactgaaagaacagcccgccctgaacgacagccggtactgcctgagcagcagactgagagtgtccgccaccttctggcagaacccccggaaccacttcagatgccaggtgcagttctacggcctgagcgagaacgacgagtggacccaggacagagccaagcccgtgacccagatcgtgtctgccgaagcctggggcagagccgattgcggctttaccagcgagagctaccagcagggcgtgctgagcgccaccatcctgtacgagatcctgctgggcaaggccaccctgtacgccgtgctggtgtctgccctggtgctgatggctatggtcaagcggaaggacagccggggaagggccaagcgatctggatctggagcaacaaacttctcactactcaaacaagcaggtgacgtggaggagaatcccgggcctactagtaccatggactggatttggcgcatccttttccttgtcggcgctgctaccggcgcccattccgggccccaagttcagctggtggaaagcggtggtggcgttgtgcaacctggtggaagtctgaggctgagctgtgccgcttctggcctgagctttagcacctacactgtggcctggttcaggcaggctcccggaaagggtcttgaaggcgtggccgccattccttacaccagccagcacatggtgtacacagacagcgtcagaggccggttcaccatcagcagagacaactccaagaatacgctctatctccagatgaactctctgcgcgccgaagatacagccgtgtattactgcgccaccgacagacggcctggcacctctatgctggctatcaacggctacaacagatggggacagggaaccaccgtgaccgtgtcatctggatccggcggcggaggatctggcggaggcggatctgggggcggaggctctttcgaagtccaacttgtggagtctggagggggcctggtgcagcccggcggctctctcagactgtcttgtgcggcaagcggctacaccttcagctcttactggatagaatgggtgaggcaggcacctggaaagggactggagtggattggagagattctgccaggagggggagatacaaattacaatgaaatcttcaaggggcgggccaccttttcagcggataccagcaagaatacagcttacctgcagatgaatagcctccgggcagaagataccgctgtttattattgcacgagacgggtgccaataagactggactattgggggcaagggactcttgtcaccgtcagttcaacgcgtatccagaaccctgatcctgccgtgtaccagctgcgggatagcaagagcagcgacaagagcgtgtgtctgttcaccgacttcgacagccagaccaacgtgtcccagagcaaggactccgacgtgtacatcaccgataagtgcgtgctggacatgcggagcatggacttcaagagcaactccgccgtggcctggtccaacaagtccgatttcgcctgcgccaacgccttcaacaacagcattatccccgaggacacattcttcccaagccccgagagcagctgcgacgtgaagctggtggaaaagagcttcgagacagacaccaacctgaacttccagaacctgagcgtgatcggcttcagaatcctgctgctgaaagtggccggctttaacctgctgatgaccctgcggctgtggtccagctaa

SEQ ID NO: 6324 - DNA, 2304 bp, synthetic construct
  source 1..2304: mol_type = other DNA
atggccttaccagtgaccgccttgctcctgccgctggccttgctgctccacgccgccaggccggacatcgtgatgacacagagccctgatagcctggccgtgtctctgggagagagagccaccattaactgcaaggccagccagagcgtggactacgacggcgacagcttcctgaactggtatcagcagaagcccggccagcctcctaagctgctgatctacgccgccagcaatctggaaagcggcgtgccaagcagattttccggctctggcagcggcaccgatttcaccctgacaatatccagcctccagcctgaggacgtggccgtgtactactgccagcagagcaacgacgaccctctgacctttggacagggcaccaaggtggaaatcaaactcgaggacctgaagaacgtgttcccacctgaggtggccgtgttcgagcctagcgaggccgagatcagccacacccagaaagccaccctcgtgtgcctggctaccggcttctaccccgaccatgtggaactgtcttggtgggtcaacggcaaagaggtgcacagcggcgtgtgtaccgacccccagccactgaaagaacagcccgccctgaacgacagccggtactgcctgagcagcagactgagagtgtccgccaccttctggcagaacccccggaaccacttcagatgccaggtgcagttctacggcctgagcgagaacgacgagtggacccaggacagagccaagcccgtgacccagatcgtgtctgccgaagcctggggcagagccgattgcggctttaccagcgagagctaccagcagggcgtgctgagcgccaccatcctgtacgagatcctgctgggcaaggccaccctgtacgccgtgctggtgtctgccctggtgctgatggctatggtcaagcggaaggacagccggggaagggccaagcgatctggatctggagcaacaaacttctcactactcaaacaagcaggtgacgtggaggagaatcccgggcctactagtaccatggactggatttggcgcatccttttccttgtcggcgctgctaccggcgcccattccgggcccgaggtgcagctggttgaatctggcggaggatctgttcaggctggcggctctctgagactgtcttgtgccgccagcggctacacctacagcatcaactgcatgggctggttcagacaggcccctggcaaagagagagaaggcgttgccgccatctctaccggcggaggcagaaccgattaccgggattctgtgaagggcagattcaccatcagccaggacaacgccaagaacaccgtgtacctccagatgaacagcctgaagcctgaggacaccgccatgtactactgtgccggcaagaccacctatcctggctacggatgtggcctgggcagaagcgcctacaattattggggccagggcacccaagtgaccgtgtcatctggatccggcggcggaggatctggcggaggcggatctgggggcggaggctctttcgaagtccaacttgtggagtctggagggggcctggtgcagcccggcggctctctcagactgtcttgtgcggcaagcggctacaccttcagctcttactggatagaatgggtgaggcaggcacctggaaagggactggagtggattggagagattctgccaggagggggagatacaaattacaatgaaatcttcaaggggcgggccaccttttcagcggataccagcaagaatacagcttacctgcagatgaatagcctccgggcagaagataccgctgtttattattgcacgagacgggtgccaataagactggactattgggggcaagggactcttgtcaccgtcagttcaacgcgtatccagaaccctgatcctgccgtgtaccagctgcgggatagcaagagcagcgacaagagcgtgtgtctgttcaccgacttcgacagccagaccaacgtgtcccagagcaaggactccgacgtgtacatcaccgataagtgcgtgctggacatgcggagcatggacttcaagagcaactccgccgtggcctggtccaacaagtccgatttcgcctgcgccaacgccttcaacaacagcattatccccgaggacacattcttcccaagccccgagagcagctgcgacgtgaagctggtggaaaagagcttcgagacagacaccaacctgaacttccagaacctgagcgtgatcggcttcagaatcctgctgctgaaagtggccggctttaacctgctgatgaccctgcggctgtggtccagctaa

SEQ ID NO: 6325 - DNA, 1860 bp, synthetic construct
  source 1..1860: mol_type = other DNA
atggccttaccagtgaccgccttgctcctgccgctggccttgctgctccacgccgccaggccggacatcgtgatgacacagagccctgatagcctggccgtgtctctgggagagagagccaccattaactgcaaggccagccagagcgtggactacgacggcgacagcttcctgaactggtatcagcagaagcccggccagcctcctaagctgctgatctacgccgccagcaatctggaaagcggcgtgccaagcagattttccggctctggcagcggcaccgatttcaccctgacaatatccagcctccagcctgaggacgtggccgtgtactactgccagcagagcaacgacgaccctctgacctttggacagggcaccaaggtggaaatcaaactcgaggacctgaagcacgtgttcccacctgaggtggccgtgttcgagcctagcgacgccgagatctggcacacccagaaagccaccctcgtgtgcctggctaccggcttctaccccgaccatgtggaactgtcttggtgggtcaacggcaaagaggtgcacagcggcgtgtctaccgacccccagccactgaaagaacagcccgccctgaacgacagccggtactgcctgagcagcagactgagagtgtccgccaccttctggcagaacccccggaaccacttcagatgccaggtgcagttctacggcctgagcgagaacgacgagtggacccaggacagagccaagcccgtgacccagatcgtgtctgccgaagcctggggcagagccgattgcggctttaccagcgagagctaccagcagggcgtgctgagcgccaccatcctgtacgagatcctgctgggcaaggccaccctgtacgccgtgctggtgtctgccctggtgctgatggctatggtcaagcggaaggacagccggggaagggccaagcgatctggatctggagcaacaaacttctcactactcaaacaagcaggtgacgtggaggagaatcccgggcctactagtatggactggatttggcgcatccttttccttgtcggcgctgctaccggcgcgcattccttcgaagtccaacttgtggagtctggagggggcctggtgcagcccggcggctctctcagactgtcttgtgcggcaagcggctacaccttcagctcttactggatagaatgggtgaggcaggcacctggaaagggactggagtggattggagagattctgccaggagggggagatacaaattacaatgaaatcttcaaggggcgggccaccttttcagcggataccagcaagaatacagcttacctgcagatgaatagcctccgggcagaagataccgctgtttattattgcacgagacgggtgccaataagactggactattgggggcaagggactcttgtcaccgtcagttcaacgcgtatccagaaccctgatcctgccgtgtaccagctgcgggatagcaagagcagcgacaagagcgtgtgtctgttcaccgacttcgacagccagaccaacgtgtcccagagcaaggactccgacgtgtacatcaccgataagaccgtgctggacatgcggagcatggacttcaagagcaactccgccgtggcctggtccagcaagtccgatttcgcctgcgccaacgccttcaacaacagcattatccccgaggacacattcttcccaagccccgagatggcctgcgacgtgaagctggtggaaaagagcttcgagacagacaccaacctgaacttccagaacctgctcgtgatctggctgagaatcctgctgctgaaagtggccggctttaacctgctgatgaccctgcggctgtggtccagc

SEQ ID NO: 6326 - DNA, 1860 bp, synthetic construct
  source 1..1860: mol_type = other DNA
atggccttaccagtgaccgccttgctcctgccgctggccttgctgctccacgccgccaggccggacatcgtgatgacacagagccctgatagcctggccgtgtctctgggagagagagccaccattaactgcaaggccagccagagcgtggactacgacggcgacagcttcctgaactggtatcagcagaagcccggccagcctcctaagctgctgatctacgccgccagcaatctggaaagcggcgtgccaagcagattttccggctctggcagcggcaccgatttcaccctgacaatatccagcctccagcctgaggacgtggccgtgtactactgccagcagagcaacgacgaccctctgacctttggacagggcaccaaggtggaaatcaaactcgaggacctgaagcacgtgttcccacctgaggtggccgtgttcgagcctagcgacgccgagatctggcacacccagaaagccaccctcgtgtgcctggctaccggcttctaccccgaccatgtggaactgtcttggtgggtcaacggcaaagaggtgcacagcggcgtgtctaccgacccccagccactgaaagaacagcccgccctgaacgacagccggtactgcctgagcagcagactgagagtgtccgccaccttctggcagaacccccggaaccacttcagatgccaggtgcagttctacggcctgagcgagaacgacgagtggacccaggacagagccaagcccgtgacccagatcgtgtctgccgaagcctggggcagagccgattgcggctttaccagcgagagctaccagcagggcgtgctgagcgccaccatcctgtacgagatcctgctgggcaaggccaccctgtacgccgtgctggtgtctgccctggtgctgatggctatggtcaagcggaaggacagccggggaagggccaagcgatctggatctggagcaacaaacttctcactactcaaacaagcaggtgacgtggaggagaatcccgggcctactagtatggactggatttggcgcatccttttccttgtcggcgctgctaccggcgcgcattccttcgaagtccaacttgtggagtctggagggggcctggtgcagcccggcggctctctcagactgtcttgtgcggcaagcggctacaccttcagctcttactggatagaatgggtgaggcaggcacctggaaagggactggagtggattggagagattctgccaggagggggagatacaaattacaatgaaatcttcaaggggcgggccaccttttcagcggataccagcaagaatacagcttacctgcagatgaatagcctccgggcagaagataccgctgtttattattgcacgagacgggtgccaataagactggactattgggggcaagggactcttgtcaccgtcagttcaacgcgtatccagaaccctgatcctgccgtgtaccagctgcgggatagcaagagcagcgacaagagcgtgtgtctgttcaccgacttcgacagccagaccaacgtgtcccagagcaaggactccgacgtgtacatcaccgataagaccgtgctggacatgcggagcatggacttcaagagcaactccgccgtggcctggtccaccaagtccgatttcgcctgcgccaacgccttcaacaacagcattatccccgaggacacattcttcccaagccccgaggtggtgtgcgacgtgaagctggtggaaaagagcttcgagacagacaccaacctgaacttccagaacctggtggtgatcggcgccagaatcctgctgctgaaagtggccggctttaacctgctgatgaccctgcggctgtggtccagc

SEQ ID NO: 6327 - DNA, 1860 bp, synthetic construct
  source 1..1860: mol_type = other DNA
atggccttaccagtgaccgccttgctcctgccgctggccttgctgctccacgccgccaggccggacatcgtgatgacacagagccctgatagcctggccgtgtctctgggagagagagccaccattaactgcaaggccagccagagcgtggactacgacggcgacagcttcctgaactggtatcagcagaagcccggccagcctcctaagctgctgatctacgccgccagcaatctggaaagcggcgtgccaagcagattttccggctctggcagcggcaccgatttcaccctgacaatatccagcctccagcctgaggacgtggccgtgtactactgccagcagagcaacgacgaccctctgacctttggacagggcaccaaggtggaaatcaaactcgaggacctgaagaacgtgttcccacctgaggtggccgtgttcgagcctagcaaggccgagatcagcagaacccagaaagccaccctcgtgtgcctggctaccggcttctaccctcctcatgtggaactgtcttggtgggtcaacggcaaagaggtgcacgacggcgtgtgtaccgacccccagccactgaaagaacagcccgccctgaacgacagccggtactgcctgagcagcagactgagagtgtccgccaccttctggcagaacccccggaaccacttcagatgccaggtgcagttctacggcctgagcgagaacgacgagtggacccaggacagagccaagcccgtgacccagatcgtgtctgccgaagcctggggcagagccgattgcggctttaccagcgagagctaccagcagggcgtgctgagcgccaccatcctgtacgagatcctgctgggcaaggccaccctgtacgccgtgctggtgtctgccctggtgctgatggctatggtcaagcggaaggacagccggggaagggccaagcgatctggatctggagcaacaaacttctcactactcaaacaagcaggtgacgtggaggagaatcccgggcctactagtatggactggatttggcgcatccttttccttgtcggcgctgctaccggcgcgcattccttcgaagtccaacttgtggagtctggagggggcctggtgcagcccggcggctctctcagactgtcttgtgcggcaagcggctacaccttcagctcttactggatagaatgggtgaggcaggcacctggaaagggactggagtggattggagagattctgccaggagggggagatacaaattacaatgaaatcttcaaggggcgggccaccttttcagcggataccagcaagaatacagcttacctgcagatgaatagcctccgggcagaagataccgctgtttattattgcacgagacgggtgccaataagactggactattgggggcaagggactcttgtcaccgtcagttcaacgcgtatccagaaccctgatcctgccgtgtaccagctgcgggatagcaagagcagcgacaagttcgtgtgtctgttcaccgacttcgacagccagatcaacgtgtcccagagcaaggactccgacgtgtacatcaccgataagtgcgtgctggacatgcggagcatggacttcaagagcaactccgccgtggcctggtccaacaagtccgatttcacctgcgccaacgccttcaacaacagcattatccccgaggacacattcttcccaagccccgagagcagctgcgacgtgaagctggtggaaaagagcttcgagacagacaccaacctgaacttccagaacctgagcgtgatcggcttcagaatcctgctgctgaaagtggccggctttaacctgctgatgaccctgcggctgtggtccagc

SEQ ID NO: 6328 - DNA, 2286 bp, synthetic construct
  source 1..2286: mol_type = other DNA
atggccttaccagtgaccgccttgctcctgccgctggccttgctgctccacgccgccaggccggacatcgtgatgacacagagccctgatagcctggccgtgtctctgggagagagagccaccattaactgcaaggccagccagagcgtggactacgacggcgacagcttcctgaactggtatcagcagaagcccggccagcctcctaagctgctgatctacgccgccagcaatctggaaagcggcgtgccaagcagattttccggctctggcagcggcaccgatttcaccctgacaatatccagcctccagcctgaggacgtggccgtgtactactgccagcagagcaacgacgaccctctgacctttggacagggcaccaaggtggaaatcaaactcgaggacctgaagaacgtgttcccacctgaggtggccgtgttcgagcctagcgaggccgagatcagccacacccagaaagccaccctcgtgtgcctggctaccggcttctaccccgaccatgtggaactgtcttggtgggtcaacggcaaagaggtgcacagcggcgtgtgtaccgacccccagccactgaaagaacagcccgccctgaacgacagccggtactgcctgagcagcagactgagagtgtccgccaccttctggcagaacccccggaaccacttcagatgccaggtgcagttctacggcctgagcgagaacgacgagtggacccaggacagagccaagcccgtgacccagatcgtgtctgccgaagcctggggcagagccgattgcggctttaccagcgagagctaccagcagggcgtgctgagcgccaccatcctgtacgagatcctgctgggcaaggccaccctgtacgccgtgctggtgtctgccctggtgctgatggctatggtcaagcggaaggacagccggggaagggccaagcgatctggatctggagcaacaaacttctcactactcaaacaagcaggtgacgtggaggagaatcccgggcctactagtaccatggactggatttggcgcatccttttccttgtcggcgctgctaccggcgcccattccgggccccaggtgcagctccaagaaagcggacccggactggttaagccctctcagaccctgtctctgacctgcacagttagcggagccagcattaccacaggcgagtattattggaattggtttcggcagccaccaggcaaggggcttgagtggatgggtgctattgctgcctctggcagcaccacctactctcccagctttgagagcagaacctccatcagccgggacacctccaaaaaccagttctctctgaagctgtcctccgtgaccgctgctgacaccgccgtctattattgtggccggtctttcggcgtggcagctgtgaccacaggacagaacagaggccagggaacacttgtgaccgtgtcctctggatccggcggcggaggatctggcggaggcggatctgggggcggaggctctttcgaagtccaacttgtggagtctggagggggcctggtgcagcccggcggctctctcagactgtcttgtgcggcaagcggctacaccttcagctcttactggatagaatgggtgaggcaggcacctggaaagggactggagtggattggagagattctgccaggagggggagatacaaattacaatgaaatcttcaaggggcgggccaccttttcagcggataccagcaagaatacagcttacctgcagatgaatagcctccgggcagaagataccgctgtttattattgcacgagacgggtgccaataagactggactattgggggcaagggactcttgtcaccgtcagttcaacgcgtatccagaaccctgatcctgccgtgtaccagctgcgggatagcaagagcagcgacaagagcgtgtgtctgttcaccgacttcgacagccagaccaacgtgtcccagagcaaggactccgacgtgtacatcaccgataagtgcgtgctggacatgcggagcatggacttcaagagcaactccgccgtggcctggtccaacaagtccgatttcgcctgcgccaacgccttcaacaacagcattatccccgaggacacattcttcccaagccccgagagcagctgcgacgtgaagctggtggaaaagagcttcgagacagacaccaacctgaacttccagaacctgagcgtgatcggcttcagaatcctgctgctgaaagtggccggctttaacctgctgatgaccctgcggctgtggtccagc

SEQ ID NO: 6329 - DNA, 2709 bp, synthetic construct
  source 1..2709: mol_type = other DNA
atggccttaccagtgaccgccttgctcctgccgctggccttgctgctccacgccgccaggccgcaggttcagctgcaagagtctggccctggcctggtcaagcctagccaaacactgagcctgacctgtaccgtgtctggcggctctatcaccaccggcgagttctactggaactggttcagacagcctcctggcaaaggactggaatggatgggagccattgccgccagcggcagcacaacatacagccctagcttcgagagccggaccagcatcagcagagacaccagcaagaatcagttcagcctgaagctgagcagcgtgacagccgccgatacagccgtgtattactgcggcagatcctttggagtggccgccgtgacaaccggccagaatagaggacagggcaccctggtcacagtgtctagcggtaccggcggaggcggatctggcggcggaggtagcggtggcggaggatctgaattcgacatcgtgatgacacagagccctgatagcctggccgtgtctctgggagagagagccaccattaactgcaaggccagccagagcgtggactacgacggcgacagcttcctgaactggtatcagcagaagcccggccagcctcctaagctgctgatctacgccgccagcaatctggaaagcggcgtgccaagcagattttccggctctggcagcggcaccgatttcaccctgacaatatccagcctccagcctgaggacgtggccgtgtactactgccagcagagcaacgacgaccctctgacctttggacagggcaccaaggtggaaatcaaactcgagatccagaaccctgatcctgccgtgtaccagctgcgggatagcaagagcagcgacaagagcgtgtgtctgttcaccgacttcgacagccagaccaacgtgtcccagagcaaggactccgacgtgtacatcaccgataagtgcgtgctggacatgcggagcatggacttcaagagcaactccgccgtggcctggtccaacaagtccgatttcgcctgcgccaacgccttcaacaacagcattatccccgaggacacattcttcccaagcagcgacgtgccctgcgacgtgaagctggtggaaaagagcttcgagacagacaccaacctgaacttccagaacctgagcgtgatcggcttcagaatcctgctgctgaaagtggccggctttaacctgctgatgaccctgcggctgtggtccagccgcgccaagagaagcggatctggcgtgaagcagaccctgaatttcgacctgctgaagctggctggcgacgtggaatccaacccaggccctactagtaccatggactggatttggcgcatccttttccttgtcggcgctgctaccggcgcccattccgggcccgaagtgcaactggttgaatccggtggcggcctggtgcaacccggcggatctctcagacttagctgtgccgcctccggcagaaccttcacaatgggatggtacaggcaggctccagggaaagagagagagttcgtcgccgccatctctctgtctcccacactggcctactacgccgactctgtgaaaggccggttcaccatctccagagataatagcaagaacaccgtggtgctgcaaatgaactctctgagagccgaggatacagccctgtactattgtgccgctgaccggaagtccgtgatgagcatcagacccgattactggggacagggcacactggtcacagtgtctagtggatccggcggcggaggatctggcggaggcggatctgggggcggaggctctttcgaagtccaacttgtggagtctggagggggcctggtgcagcccggcggctctctcagactgtcttgtgcggcaagcggctacaccttcagctcttactggatagaatgggtgaggcaggcacctggaaagggactggagtggattggagagattctgccaggagggggagatacaaattacaatgaaatcttcaaggggcgggccaccttttcagcggataccagcaagaatacagcttacctgcagatgaatagcctccgggcagaagataccgctgtttattattgcacgagacgggtgccaataagactggactattgggggcaagggactcttgtcaccgtcagttcaacgcgtgaggacctgaagaacgtgttcccacctgaggtggccgtgttcgagcctagcaaggccgagatcgcccacacccagaaagccaccctcgtgtgcctggctaccggcttctaccccgaccatgtggaactgtcttggtgggtcaacggcaaagaggtgcacagcggcgtgtgtaccgacccccagccactgaaagaacagcccgccctgaacgacagccggtactgcctgagcagcagactgagagtgtccgccaccttctggcagaacccccggaaccacttcagatgccaggtgcagttctacggcctgagcgagaacgacgagtggacccaggacagagccaagcccgtgacccagatcgtgtctgccgaagcctggggcagagccgattgcggcatcaccagcgccagctaccaccagggcgtgctgagcgccaccatcctgtacgagatcctgctgggcaaggccaccctgtacgccgtgctggtgtctgccctggtgctgatggctatggtcaagcggaaggacagccgggga

SEQ ID NO: 6330 - DNA, 2298 bp, synthetic construct
  source 1..2298: mol_type = other DNA
atggccttaccagtgaccgccttgctcctgccgctggccttgctgctccacgccgccaggccgcaggttcagctgcaagagtctggccctggcctggtcaagcctagccaaacactgagcctgacctgtaccgtgtctggcggctctatcaccaccggcgagttctactggaactggttcagacagcctcctggcaaaggactggaatggatgggagccattgccgccagcggcagcacaacatacagccctagcttcgagagccggaccagcatcagcagagacaccagcaagaatcagttcagcctgaagctgagcagcgtgacagccgccgatacagccgtgtattactgcggcagatcctttggagtggccgccgtgacaaccggccagaatagaggacagggcaccctggtcacagtgtctagcggtaccggcggaggcggatctggcggcggaggtagcggtggcggaggatctgaattcgacatcgtgatgacacagagccctgatagcctggccgtgtctctgggagagagagccaccattaactgcaaggccagccagagcgtggactacgacggcgacagcttcctgaactggtatcagcagaagcccggccagcctcctaagctgctgatctacgccgccagcaatctggaaagcggcgtgccaagcagattttccggctctggcagcggcaccgatttcaccctgacaatatccagcctccagcctgaggacgtggccgtgtactactgccagcagagcaacgacgaccctctgacctttggacagggcaccaaggtggaaatcaaactcgagatccagaaccctgatcctgccgtgtaccagctgcgggatagcaagagcagcgacaagagcgtgtgtctgttcaccgacttcgacagccagaccaacgtgtcccagagcaaggactccgacgtgtacatcaccgataagtgcgtgctggacatgcggagcatggacttcaagagcaactccgccgtggcctggtccaacaagtccgatttcgcctgcgccaacgccttcaacaacagcattatccccgaggacacattcttcccaagcagcgacgtgccctgcgacgtgaagctggtggaaaagagcttcgagacagacaccaacctgaacttccagaacctgagcgtgatcggcttcagaatcctgctgctgaaagtggccggctttaacctgctgatgaccctgcggctgtggtccagccgcgccaagagaagcggatctggcgtgaagcagaccctgaatttcgacctgctgaagctggctggcgacgtggaatccaacccaggccctactagtaccatggactggatttggcgcatccttttccttgtcggcgctgctaccggcgcccattccttcgaagtccaacttgtggagtctggagggggcctggtgcagcccggcggctctctcagactgtcttgtgcggcaagcggctacaccttcagctcttactggatagaatgggtgaggcaggcacctggaaagggactggagtggattggagagattctgccaggagggggagatacaaattacaatgaaatcttcaaggggcgggccaccttttcagcggataccagcaagaatacagcttacctgcagatgaatagcctccgggcagaagataccgctgtttattattgcacgagacgggtgccaataagactggactattgggggcaagggactcttgtcaccgtcagttcaacgcgtgaggacctgaagaacgtgttcccacctgaggtggccgtgttcgagcctagcaaggccgagatcgcccacacccagaaagccaccctcgtgtgcctggctaccggcttctaccccgaccatgtggaactgtcttggtgggtcaacggcaaagaggtgcacagcggcgtgtgtaccgacccccagccactgaaagaacagcccgccctgaacgacagccggtactgcctgagcagcagactgagagtgtccgccaccttctggcagaacccccggaaccacttcagatgccaggtgcagttctacggcctgagcgagaacgacgagtggacccaggacagagccaagcccgtgacccagatcgtgtctgccgaagcctggggcagagccgattgcggcatcaccagcgccagctaccaccagggcgtgctgagcgccaccatcctgtacgagatcctgctgggcaaggccaccctgtacgccgtgctggtgtctgccctggtgctgatggctatggtcaagcggaaggacagccgggga

SEQ ID NO: 6331 - DNA, 2697 bp, synthetic construct
  source 1..2697: mol_type = other DNA
atggccttaccagtgaccgccttgctcctgccgctggccttgctgctccacgccgccaggccggaagtgcagctggttgaatctggcggaggactggttcaggctggcggatctctgagactgtcttgtgccgccagcggcagaacctttagcatgggctggtttagacaggcccctggcaaagagagagagttcgtcgccgccatcacatactctggcggcagcccttactacgccgactctgtgaagggcagattcaccatcagccgggacaacgccaagaacaccgtgtacctccagatgaacagcctgaagcctgaggacaccgccgtgtactactgcgccgccaatccaacatacggcagcgactggaacgccgagaattggggccagggaacccaagtgacagtgtctagcggtaccggcggaggcggatctggcggcggaggtagcggtggcggaggatctgaattcgacatcgtgatgacacagagccctgatagcctggccgtgtctctgggagagagagccaccattaactgcaaggccagccagagcgtggactacgacggcgacagcttcctgaactggtatcagcagaagcccggccagcctcctaagctgctgatctacgccgccagcaatctggaaagcggcgtgccaagcagattttccggctctggcagcggcaccgatttcaccctgacaatatccagcctccagcctgaggacgtggccgtgtactactgccagcagagcaacgacgaccctctgacctttggacagggcaccaaggtggaaatcaaactcgaggacctgaagaacgtgttcccacctgaggtggccgtgttcgagcctagcgaggccgagatcagccacacccagaaagccaccctcgtgtgcctggctaccggcttctaccccgaccatgtggaactgtcttggtgggtcaacggcaaagaggtgcacagcggcgtgtgtaccgacccccagccactgaaagaacagcccgccctgaacgacagccggtactgcctgagcagcagactgagagtgtccgccaccttctggcagaacccccggaaccacttcagatgccaggtgcagttctacggcctgagcgagaacgacgagtggacccaggacagagccaagcccgtgacccagatcgtgtctgccgaagcctggggcagagccgattgcggctttaccagcgagagctaccagcagggcgtgctgagcgccaccatcctgtacgagatcctgctgggcaaggccaccctgtacgccgtgctggtgtctgccctggtgctgatggctatggtcaagcggaaggacagccggggaagggccaagcgatctggatctggagcaacaaacttctcactactcaaacaagcaggtgacgtggaggagaatcccgggcctactagtaccatggactggatttggcgcatccttttccttgtcggcgctgctaccggcgcccattccgggccccaggtgcagctccaagaaagcggacccggactggttaagccctctcagaccctgtctctgacctgcacagttagcggagccagcattaccacaggcgagtattattggaattggtttcggcagccaccaggcaaggggcttgagtggatgggtgctattgctgcctctggcagcaccacctactctcccagctttgagagcagaacctccatcagccgggacacctccaaaaaccagttctctctgaagctgtcctccgtgaccgctgctgacaccgccgtctattattgtggccggtctttcggcgtggcagctgtgaccacaggacagaacagaggccagggaacacttgtgaccgtgtcctctggatccggcggcggaggatctggcggaggcggatctgggggcggaggctctttcgaagtccaacttgtggagtctggagggggcctggtgcagcccggcggctctctcagactgtcttgtgcggcaagcggctacaccttcagctcttactggatagaatgggtgaggcaggcacctggaaagggactggagtggattggagagattctgccaggagggggagatacaaattacaatgaaatcttcaaggggcgggccaccttttcagcggataccagcaagaatacagcttacctgcagatgaatagcctccgggcagaagataccgctgtttattattgcacgagacgggtgccaataagactggactattgggggcaagggactcttgtcaccgtcagttcaacgcgtatccagaaccctgatcctgccgtgtaccagctgcgggatagcaagagcagcgacaagagcgtgtgtctgttcaccgacttcgacagccagaccaacgtgtcccagagcaaggactccgacgtgtacatcaccgataagtgcgtgctggacatgcggagcatggacttcaagagcaactccgccgtggcctggtccaacaagtccgatttcgcctgcgccaacgccttcaacaacagcattatccccgaggacacattcttcccaagccccgagagcagctgcgacgtgaagctggtggaaaagagcttcgagacagacaccaacctgaacttccagaacctgagcgtgatcggcttcagaatcctgctgctgaaagtggccggctttaacctgctgatgaccctgcggctgtggtccagc

SEQ ID NO: 6332 - DNA, 2718 bp, synthetic construct
  source 1..2718: mol_type = other DNA
atggccttaccagtgaccgccttgctcctgccgctggccttgctgctccacgccgccaggccggaagtgcagctggttgaatctggcggaggactggttcaggctggcggatctctgagactgtcttgtgccgccagcggcagaacctttagcatgggctggtttagacaggcccctggcaaagagagagagttcgtcgccgccatcacatactctggcggcagcccttactacgccgactctgtgaagggcagattcaccatcagccgggacaacgccaagaacaccgtgtacctccagatgaacagcctgaagcctgaggacaccgccgtgtactactgcgccgccaatccaacatacggcagcgactggaacgccgagaattggggccagggaacccaagtgacagtgtctagcggtaccggcggaggcggatctggcggcggaggtagcggtggcggaggatctgaattcgacatcgtgatgacacagagccctgatagcctggccgtgtctctgggagagagagccaccattaactgcaaggccagccagagcgtggactacgacggcgacagcttcctgaactggtatcagcagaagcccggccagcctcctaagctgctgatctacgccgccagcaatctggaaagcggcgtgccaagcagattttccggctctggcagcggcaccgatttcaccctgacaatatccagcctccagcctgaggacgtggccgtgtactactgccagcagagcaacgacgaccctctgacctttggacagggcaccaaggtggaaatcaaactcgagatccagaaccctgatcctgccgtgtaccagctgcgggatagcaagagcagcgacaagagcgtgtgtctgttcaccgacttcgacagccagaccaacgtgtcccagagcaaggactccgacgtgtacatcaccgataagtgcgtgctggacatgcggagcatggacttcaagagcaactccgccgtggcctggtccaacaagtccgatttcgcctgcgccaacgccttcaacaacagcattatccccgaggacacattcttcccaagcagcgacgtgccctgcgacgtgaagctggtggaaaagagcttcgagacagacaccaacctgaacttccagaacctgagcgtgatcggcttcagaatcctgctgctgaaagtggccggctttaacctgctgatgaccctgcggctgtggtccagccgcgccaagagaagcggatctggcgtgaagcagaccctgaatttcgacctgctgaagctggctggcgacgtggaatccaacccaggccctactagtaccatggactggatttggcgcatccttttccttgtcggcgctgctaccggcgcccattccgggccccaggtgcagctggttgaatctggcggaggactggttcagcctggcggatctctgagactgtcttgtgccgccagcggcaacatcaacagcagaaactgcatgggctggttcagacaggcccctggcaagggaagagaaggcgtggcagctatcggccaagtgaccggcagaacctactacgtggacagcgtgaagggcagattcaccatcagcctggacaacagcaagaacaccctgtacctccagatgaacagcctgagagccgaggacaccgccgtgtactattgtgctgctgcccctggctgtctgctgtctgcacttagaagcgccgactacagaaactggggccagggcacactggtcaccgtttcttctggatccggcggcggaggatctggcggaggcggatctgggggcggaggctctttcgaagtccaacttgtggagtctggagggggcctggtgcagcccggcggctctctcagactgtcttgtgcggcaagcggctacaccttcagctcttactggatagaatgggtgaggcaggcacctggaaagggactggagtggattggagagattctgccaggagggggagatacaaattacaatgaaatcttcaaggggcgggccaccttttcagcggataccagcaagaatacagcttacctgcagatgaatagcctccgggcagaagataccgctgtttattattgcacgagacgggtgccaataagactggactattgggggcaagggactcttgtcaccgtcagttcaacgcgtgaggacctgaagaacgtgttcccacctgaggtggccgtgttcgagcctagcaaggccgagatcgcccacacccagaaagccaccctcgtgtgcctggctaccggcttctaccccgaccatgtggaactgtcttggtgggtcaacggcaaagaggtgcacagcggcgtgtgtaccgacccccagccactgaaagaacagcccgccctgaacgacagccggtactgcctgagcagcagactgagagtgtccgccaccttctggcagaacccccggaaccacttcagatgccaggtgcagttctacggcctgagcgagaacgacgagtggacccaggacagagccaagcccgtgacccagatcgtgtctgccgaagcctggggcagagccgattgcggcatcaccagcgccagctaccaccagggcgtgctgagcgccaccatcctgtacgagatcctgctgggcaaggccaccctgtacgccgtgctggtgtctgccctggtgctgatggctatggtcaagcggaaggacagccgggga

SEQ ID NO: 6333 - DNA, 2706 bp, synthetic construct
  source 1..2706: mol_type = other DNA
atggccttaccagtgaccgccttgctcctgccgctggccttgctgctccacgccgccaggccggaagtgcagctggttgaatctggcggaggactggttcaggctggcggatctctgagactgtcttgtgccgccagcggcagaacctttagcatgggctggtttagacaggcccctggcaaagagagagagttcgtcgccgccatcacatactctggcggcagcccttactacgccgactctgtgaagggcagattcaccatcagccgggacaacgccaagaacaccgtgtacctccagatgaacagcctgaagcctgaggacaccgccgtgtactactgcgccgccaatccaacatacggcagcgactggaacgccgagaattggggccagggaacccaagtgacagtgtctagcggtaccggcggaggcggatctggcggcggaggtagcggtggcggaggatctgaattcgacatcgtgatgacacagagccctgatagcctggccgtgtctctgggagagagagccaccattaactgcaaggccagccagagcgtggactacgacggcgacagcttcctgaactggtatcagcagaagcccggccagcctcctaagctgctgatctacgccgccagcaatctggaaagcggcgtgccaagcagattttccggctctggcagcggcaccgatttcaccctgacaatatccagcctccagcctgaggacgtggccgtgtactactgccagcagagcaacgacgaccctctgacctttggacagggcaccaaggtggaaatcaaactcgaggacctgaagaacgtgttcccacctgaggtggccgtgttcgagcctagcgaggccgagatcagccacacccagaaagccaccctcgtgtgcctggctaccggcttctaccccgaccatgtggaactgtcttggtgggtcaacggcaaagaggtgcacagcggcgtgtgtaccgacccccagccactgaaagaacagcccgccctgaacgacagccggtactgcctgagcagcagactgagagtgtccgccaccttctggcagaacccccggaaccacttcagatgccaggtgcagttctacggcctgagcgagaacgacgagtggacccaggacagagccaagcccgtgacccagatcgtgtctgccgaagcctggggcagagccgattgcggctttaccagcgagagctaccagcagggcgtgctgagcgccaccatcctgtacgagatcctgctgggcaaggccaccctgtacgccgtgctggtgtctgccctggtgctgatggctatggtcaagcggaaggacagccggggaagggccaagcgatctggatctggagcaacaaacttctcactactcaaacaagcaggtgacgtggaggagaatcccgggcctactagtaccatggactggatttggcgcatccttttccttgtcggcgctgctaccggcgcccattccgggccccaggtgcagctggttgaatctggcggaggactggttcagcctggcggatctctgagactgtcttgtgccgccagcggcaacatcaacagcagaaactgcatgggctggttcagacaggcccctggcaagggaagagaaggcgtggcagctatcggccaagtgaccggcagaacctactacgtggacagcgtgaagggcagattcaccatcagcctggacaacagcaagaacaccctgtacctccagatgaacagcctgagagccgaggacaccgccgtgtactattgtgctgctgcccctggctgtctgctgtctgcacttagaagcgccgactacagaaactggggccagggcacactggtcaccgtttcttctggatccggcggcggaggatctggcggaggcggatctgggggcggaggctctttcgaagtccaacttgtggagtctggagggggcctggtgcagcccggcggctctctcagactgtcttgtgcggcaagcggctacaccttcagctcttactggatagaatgggtgaggcaggcacctggaaagggactggagtggattggagagattctgccaggagggggagatacaaattacaatgaaatcttcaaggggcgggccaccttttcagcggataccagcaagaatacagcttacctgcagatgaatagcctccgggcagaagataccgctgtttattattgcacgagacgggtgccaataagactggactattgggggcaagggactcttgtcaccgtcagttcaacgcgtatccagaaccctgatcctgccgtgtaccagctgcgggatagcaagagcagcgacaagagcgtgtgtctgttcaccgacttcgacagccagaccaacgtgtcccagagcaaggactccgacgtgtacatcaccgataagtgcgtgctggacatgcggagcatggacttcaagagcaactccgccgtggcctggtccaacaagtccgatttcgcctgcgccaacgccttcaacaacagcattatccccgaggacacattcttcccaagccccgagagcagctgcgacgtgaagctggtggaaaagagcttcgagacagacaccaacctgaacttccagaacctgagcgtgatcggcttcagaatcctgctgctgaaagtggccggctttaacctgctgatgaccctgcggctgtggtccagc

SEQ ID NO: 6334 - DNA, 2706 bp, synthetic construct
  source 1..2706: mol_type = other DNA
atggccttaccagtgaccgccttgctcctgccgctggccttgctgctccacgccgccaggccggaagtgcaactggttgaatccggtggcggcctggtgcaagcaggcggatctctcagacttagctgtgccgcctccggcagaaccttcacaatgggatggtttaggcaggctccagggaaagagagagagttcgtcgccgccatctctctgtctcccacactggcctactacgccgactctgtgaaaggccggttcaccatctccagagataatgccaagaacaccgtggtgctgcaaatgaactctctgaaacccgaggatacagccctgtactattgtgccgctgaccggaagtccgtgatgagcatcagacccgattactggggacagggcacacaagtcacagtgtcctctggtaccggcggaggcggatctggcggcggaggtagcggtggcggaggatctgaattcgacatcgtgatgacacagagccctgatagcctggccgtgtctctgggagagagagccaccattaactgcaaggccagccagagcgtggactacgacggcgacagcttcctgaactggtatcagcagaagcccggccagcctcctaagctgctgatctacgccgccagcaatctggaaagcggcgtgccaagcagattttccggctctggcagcggcaccgatttcaccctgacaatatccagcctccagcctgaggacgtggccgtgtactactgccagcagagcaacgacgaccctctgacctttggacagggcaccaaggtggaaatcaaactcgaggacctgaagaacgtgttcccacctgaggtggccgtgttcgagcctagcgaggccgagatcagccacacccagaaagccaccctcgtgtgcctggctaccggcttctaccccgaccatgtggaactgtcttggtgggtcaacggcaaagaggtgcacagcggcgtgtgtaccgacccccagccactgaaagaacagcccgccctgaacgacagccggtactgcctgagcagcagactgagagtgtccgccaccttctggcagaacccccggaaccacttcagatgccaggtgcagttctacggcctgagcgagaacgacgagtggacccaggacagagccaagcccgtgacccagatcgtgtctgccgaagcctggggcagagccgattgcggctttaccagcgagagctaccagcagggcgtgctgagcgccaccatcctgtacgagatcctgctgggcaaggccaccctgtacgccgtgctggtgtctgccctggtgctgatggctatggtcaagcggaaggacagccggggaagggccaagcgatctggatctggagcaacaaacttctcactactcaaacaagcaggtgacgtggaggagaatcccgggcctactagtaccatggactggatttggcgcatccttttccttgtcggcgctgctaccggcgcccattccgggccccaggtgcagctggttgaatctggcggaggactggttcagcctggcggatctctgagactgtcttgtgccgccagcggcaacatcaacagcagaaactgcatgggctggttcagacaggcccctggcaagggaagagaaggcgtggcagctatcggccaagtgaccggcagaacctactacgtggacagcgtgaagggcagattcaccatcagcctggacaacagcaagaacaccctgtacctccagatgaacagcctgagagccgaggacaccgccgtgtactattgtgctgctgcccctggctgtctgctgtctgcacttagaagcgccgactacagaaactggggccagggcacactggtcaccgtttcttctggatccggcggcggaggatctggcggaggcggatctgggggcggaggctctttcgaagtccaacttgtggagtctggagggggcctggtgcagcccggcggctctctcagactgtcttgtgcggcaagcggctacaccttcagctcttactggatagaatgggtgaggcaggcacctggaaagggactggagtggattggagagattctgccaggagggggagatacaaattacaatgaaatcttcaaggggcgggccaccttttcagcggataccagcaagaatacagcttacctgcagatgaatagcctccgggcagaagataccgctgtttattattgcacgagacgggtgccaataagactggactattgggggcaagggactcttgtcaccgtcagttcaacgcgtatccagaaccctgatcctgccgtgtaccagctgcgggatagcaagagcagcgacaagagcgtgtgtctgttcaccgacttcgacagccagaccaacgtgtcccagagcaaggactccgacgtgtacatcaccgataagtgcgtgctggacatgcggagcatggacttcaagagcaactccgccgtggcctggtccaacaagtccgatttcgcctgcgccaacgccttcaacaacagcattatccccgaggacacattcttcccaagccccgagagcagctgcgacgtgaagctggtggaaaagagcttcgagacagacaccaacctgaacttccagaacctgagcgtgatcggcttcagaatcctgctgctgaaagtggccggctttaacctgctgatgaccctgcggctgtggtccagc

SEQ ID NO: 6335 - DNA, 2718 bp, synthetic construct
  source 1..2718: mol_type = other DNA
atggccttaccagtgaccgccttgctcctgccgctggccttgctgctccacgccgccaggccgcaggttcagctgcaagagtctggccctggcctggtcaagcctagccaaacactgagcctgacctgtaccgtgtctggcggctctatcaccaccggcgagttctactggaactggttcagacagcctcctggcaaaggactggaatggatgggagccattgccgccagcggcagcacaacatacagccctagcttcgagagccggaccagcatcagcagagacaccagcaagaatcagttcagcctgaagctgagcagcgtgacagccgccgatacagccgtgtattactgcggcagatcctttggagtggccgccgtgacaaccggccagaatagaggacagggcaccctggtcacagtgtctagcggtaccggcggaggcggatctggcggcggaggtagcggtggcggaggatctgaattcgacatcgtgatgacacagagccctgatagcctggccgtgtctctgggagagagagccaccattaactgcaaggccagccagagcgtggactacgacggcgacagcttcctgaactggtatcagcagaagcccggccagcctcctaagctgctgatctacgccgccagcaatctggaaagcggcgtgccaagcagattttccggctctggcagcggcaccgatttcaccctgacaatatccagcctccagcctgaggacgtggccgtgtactactgccagcagagcaacgacgaccctctgacctttggacagggcaccaaggtggaaatcaaactcgaggacctgaagaacgtgttcccacctgaggtggccgtgttcgagcctagcgaggccgagatcagccacacccagaaagccaccctcgtgtgcctggctaccggcttctaccccgaccatgtggaactgtcttggtgggtcaacggcaaagaggtgcacagcggcgtgtgtaccgacccccagccactgaaagaacagcccgccctgaacgacagccggtactgcctgagcagcagactgagagtgtccgccaccttctggcagaacccccggaaccacttcagatgccaggtgcagttctacggcctgagcgagaacgacgagtggacccaggacagagccaagcccgtgacccagatcgtgtctgccgaagcctggggcagagccgattgcggctttaccagcgagagctaccagcagggcgtgctgagcgccaccatcctgtacgagatcctgctgggcaaggccaccctgtacgccgtgctggtgtctgccctggtgctgatggctatggtcaagcggaaggacagccggggaagggccaagcgatctggatctggagcaacaaacttctcactactcaaacaagcaggtgacgtggaggagaatcccgggcctactagtaccatggactggatttggcgcatccttttccttgtcggcgctgctaccggcgcccattccgggccccaggtgcagctggttgaatctggcggaggactggttcagcctggcggatctctgagactgtcttgtgccgccagcggcaacatcaacagcagaaactgcatgggctggttcagacaggcccctggcaagggaagagaaggcgtggcagctatcggccaagtgaccggcagaacctactacgtggacagcgtgaagggcagattcaccatcagcctggacaacagcaagaacaccctgtacctccagatgaacagcctgagagccgaggacaccgccgtgtactattgtgctgctgcccctggctgtctgctgtctgcacttagaagcgccgactacagaaactggggccagggcacactggtcaccgtttcttctggatccggcggcggaggatctggcggaggcggatctgggggcggaggctctttcgaagtccaacttgtggagtctggagggggcctggtgcagcccggcggctctctcagactgtcttgtgcggcaagcggctacaccttcagctcttactggatagaatgggtgaggcaggcacctggaaagggactggagtggattggagagattctgccaggagggggagatacaaattacaatgaaatcttcaaggggcgggccaccttttcagcggataccagcaagaatacagcttacctgcagatgaatagcctccgggcagaagataccgctgtttattattgcacgagacgggtgccaataagactggactattgggggcaagggactcttgtcaccgtcagttcaacgcgtatccagaaccctgatcctgccgtgtaccagctgcgggatagcaagagcagcgacaagagcgtgtgtctgttcaccgacttcgacagccagaccaacgtgtcccagagcaaggactccgacgtgtacatcaccgataagtgcgtgctggacatgcggagcatggacttcaagagcaactccgccgtggcctggtccaacaagtccgatttcgcctgcgccaacgccttcaacaacagcattatccccgaggacacattcttcccaagccccgagagcagctgcgacgtgaagctggtggaaaagagcttcgagacagacaccaacctgaacttccagaacctgagcgtgatcggcttcagaatcctgctgctgaaagtggccggctttaacctgctgatgaccctgcggctgtggtccagc

SEQ ID NO: 6336 - DNA, 1947 bp, synthetic construct
  source 1..1947: mol_type = other DNA
atggccttaccagtgaccgccttgctcctgccgctggccttgctgctccacgccgccaggccggacatccagttgacccagtcccccagctcactcagcgccagtgtgggggaccgggtgaccattacctgtaaagccagtcagagtgtggactatgacggggatagcttcctgaattggtatcagcagaagcctggcaaagccccaaagctgctgatctacgctgcatctaatctggagtcaggcgtgccttccaggttctccggtagtgggtctgggaccgatttcacattgaccatttcatccctccaacccgaggatttcgctacatattactgtcagcagtccaatgaggaccctctcacctttggccagggcaccaaagttgaaattaagagactcgagggacagcctaaggccaatcctaccgtgacactgttccctccaagcagcgaagaactccaggccaacaaggccacacttgtgtgcctgatctccgacttctaccctggggctgtgacagtggcttggaaggccgatggatctcctgtgaaagccggcgtggaaaccaccaagccatccaagcagagcaacaacaaatacgccgccagctcctacctgagcctgacacctgagcagtggaagtcccacagatcctacagctgccaagtgacccacgaaggcagcaccgtggaaaagacagtggcccctacagagtgcagccccatcaagaccgatgtgattacaatggaccccaaggacaactgctccaaggacgccaacgataccctgctgctccagctgaccaacaccagcgcctactacatgtacgagatcctgctgggcaaggccaccctgtacgccgtgctggtgtctgccctggtgctgatggctatggtcaagcggaaggacagccggggacgcgccaagagaagcggatctggcgtgaagcagaccctgaatttcgacctgctgaagctggctggcgacgtggaatccaacccaggccctactagtatggactggatttggcgcatccttttccttgtcggcgctgctaccggcgcgcattccttcgaagtccaacttgtggagtctggagggggcctggtgcagcccggcggctctctcagactgtcttgtgcggcaagcggctacaccttcacctcttactggatagaatgggtgaggcaggcacctggaaagggactggagtggattggagagattctgccaggagggggagatacaaattacaatgaaatcttcaaggggcgggccaccttttcagcggataccagcaagaatacagcttacctgcagatgaatagcctccgggcagaagataccgctgtttattattgcacgagacgggtgccaataagactggactattgggggcaagggactcttgtcaccgtcagttcaacgcgtgcctctacaaagggaccctccgtgtttcctctggctcccagcagcaagtctacaagcggaggaacagccgctctgggctgcctggtcaaggattactttcccgagcctgtgaccgtgtcctggaatagcggagcactgacaagcggcgtgcacacctttccagccgtgctgcaaagcagcggcctgtactctctgagcagcgtggtcacagtgcctagctctagcctgggcacccagacctacatctgcaatgtgaaccacaagcctagcaacaccaaggtggacaagagagtggaacccaagagctgtgaagtgaaaaccgactccaccgaccacgtgaagcccaaagagacagagaacaccaagcagcccagcaagagctgccacaagcccaaggccatcgtgcacaccgagaaagtgaacatgatgagcctgaccgtgctgggcttcagaatcctgctgctgaaagtggccggctttaacctgctgatgaccctgcggctgtggtccagc

SEQ ID NO: 6337 - DNA, 1947 bp, synthetic construct
  source 1..1947: mol_type = other DNA
atggccttaccagtgaccgccttgctcctgccgctggccttgctgctccacgccgccaggccggacatccagttgacccagtcccccagctcactcagcgccagtgtgggggaccgggtgaccattacctgtaaagccagtcagagtgtggactatgagggggatagcttcctgaattggtatcagcagaagcctggcaaagccccaaagctgctgatctacgctgcatctaatctggagtcaggcgtgccttctaggttctccggtagtgggtctgggaccgatttcacattgaccatttcatccctccaacccgaggatttcgctacatattactgtcagcagtccaatgaggaccctctcacctttggccagggcaccaaagttgaaattaagagactcgagggacagcctaaggccaatcctaccgtgacactgttccctccaagcagcgaagaactccaggccaacaaggccacacttgtgtgcctgatctccgacttctaccctggggctgtgacagtggcttggaaggccgatggatctcctgtgaaagccggcgtggaaaccaccaagccatccaagcagagcaacaacaaatacgccgccagctcctacctgagcctgacacctgagcagtggaagtcccacagatcctacagctgccaagtgacccacgaaggcagcaccgtggaaaagacagtggcccctacagagtgcagccccatcaagaccgatgtgattacaatggaccccaaggacaactgctccaaggacgccaacgataccctgctgctccagctgaccaacaccagcgcctactacatgtacgagatcctgctgggcaaggccaccctgtacgccgtgctggtgtctgccctggtgctgatggctatggtcaagcggaaggacagccggggacgcgccaagagaagcggatctggcgtgaagcagaccctgaatttcgacctgctgaagctggctggcgacgtggaatccaacccaggccctactagtatggactggatttggcgcatccttttccttgtcggcgctgctaccggcgcgcattccttcgaagtccaacttgtggagtctggagggggcctggtgcagcccggcggctctctcagactgtcttgtgcggcaagcggctacaccttcacctcttactggatagaatgggtgaggcaggcacctggaaagggactggagtggattggagagattctgccaggagggggagatacaaattacaatgaaatcttcaaggggcgggccaccttttcagcggataccagcaagaatacagcttacctgcagatgaatagcctccgggcagaagataccgctgtttattattgcacgagacgggtgccaataagactggactattgggggcaagggactcttgtcaccgtcagttcaacgcgtgcctctacaaagggaccctccgtgtttcctctggctcccagcagcaagtctacaagcggaggaacagccgctctgggctgcctggtcaaggattactttcccgagcctgtgaccgtgtcctggaatagcggagcactgacaagcggcgtgcacacctttccagccgtgctgcaaagcagcggcctgtactctctgagcagcgtggtcacagtgcctagctctagcctgggcacccagacctacatctgcaatgtgaaccacaagcctagcaacaccaaggtggacaagagagtggaacccaagagctgtgaagtgaaaaccgactccaccgaccacgtgaagcccaaagagacagagaacaccaagcagcccagcaagagctgccacaagcccaaggccatcgtgcacaccgagaaagtgaacatgatgagcctgaccgtgctgggcttcagaatcctgctgctgaaagtggccggctttaacctgctgatgaccctgcggctgtggtccagc

SEQ ID NO: 6338 - DNA, 1947 bp, synthetic construct
  source 1..1947: mol_type = other DNA
atggccttaccagtgaccgccttgctcctgccgctggccttgctgctccacgccgccaggccggacatcgtgatgacacagagccctgatagcctggccgtgtctctgggagagagagccaccattaactgcaaggccagccagagcgtggactacgacggcgacagcttcctgaactggtatcagcagaagcccggccagcctcctaagctgctgatctacgccgccagcaatctggaaagcggcgtgccaagcagattttccggctctggcagcggcaccgatttcaccctgacaatatccagcctccagcctgaggacgtggccgtgtactactgccagcagagcaacgacgaccctctgacctttggacagggcaccaaggtggaaatcaaactcgagggacagcctaaggccaatcctaccgtgacactgttccctccaagcagcgaagaactccaggccaacaaggccacacttgtgtgcctgatctccgacttctaccctggggctgtgacagtggcttggaaggccgatggatctcctgtgaaagccggcgtggaaaccaccaagccatccaagcagagcaacaacaaatacgccgccagctcctacctgagcctgacacctgagcagtggaagtcccacagatcctacagctgccaagtgacccacgaaggcagcaccgtggaaaagacagtggcccctacagagtgcagccccatcaagaccgatgtgattacaatggaccccaaggacaactgctccaaggacgccaacgataccctgctgctccagctgaccaacaccagcgcctactacatgtacgagatcctgctgggcaaggccaccctgtacgccgtgctggtgtctgccctggtgctgatggctatggtcaagcggaaggacagccggggacgcgccaagagaagcggatctggcgtgaagcagaccctgaatttcgacctgctgaagctggctggcgacgtggaatccaacccaggccctactagtatggactggatttggcgcatccttttccttgtcggcgctgctaccggcgcgcattccttcgaacaagttcagctggttcagagcggagccgaagtgaagaaacctggggcctctgtgaaggtgtcctgcaaagccagcggctacacctttaccagctactggatcaactgggtccgacaggcccctggacaaggactggaatggatgggacagatccttccaggcggaggggacaccaactacaacggcaagttcaagggcagagtgaccatcaccgccgacaccagcacaagcaccgcctacatggaactgagcagcctgagaagcgaggacaccgccgtgtattattgcaccagacgggtgcccatccggctggattattggggacagggaaccctggtcaccgtgtctagtacgcgtgcctctacaaagggaccctccgtgtttcctctggctcccagcagcaagtctacaagcggaggaacagccgctctgggctgcctggtcaaggattactttcccgagcctgtgaccgtgtcctggaatagcggagcactgacaagcggcgtgcacacctttccagccgtgctgcaaagcagcggcctgtactctctgagcagcgtggtcacagtgcctagctctagcctgggcacccagacctacatctgcaatgtgaaccacaagcctagcaacaccaaggtggacaagagagtggaacccaagagctgtgaagtgaaaaccgactccaccgaccacgtgaagcccaaagagacagagaacaccaagcagcccagcaagagctgccacaagcccaaggccatcgtgcacaccgagaaagtgaacatgatgagcctgaccgtgctgggcttcagaatcctgctgctgaaagtggccggctttaacctgctgatgaccctgcggctgtggtccagc

SEQ ID NO: 6339 - DNA, 1944 bp, synthetic construct
  source 1..1944: mol_type = other DNA
atggccttaccagtgaccgccttgctcctgccgctggccttgctgctccacgccgccaggccggacatcgtgatgacacagagccctgatagcctggccgtgtctctgggagagagagccaccattaactgcaaggccagccagagcgtggactacgacggcgacagcttcctgaactggtatcagcagaagcccggccagcctcctaagctgctgatctacgccgccagcaatctggaaagcggcgtgccaagcagattttccggctctggcagcggcaccgatttcaccctgacaatatccagcctccagcctgaggacgtggccgtgtactactgccagcagagcaacgacgaccctctgacctttggacagggcaccaaggtggaaatcaaactcgagggacagcctaaggccaatcctaccgtgacactgttccctccaagcagcgaagaactccaggccaacaaggccacacttgtgtgcctgatctccgacttctaccctggggctgtgacagtggcttggaaggccgatggatctcctgtgaaagccggcgtggaaaccaccaagccatccaagcagagcaacaacaaatacgccgccagctcctacctgagcctgacacctgagcagtggaagtcccacagatcctacagctgccaagtgacccacgaaggcagcaccgtggaaaagacagtggcccctacagagtgcagccccatcaagaccgatgtgattacaatggaccccaaggacaactgctccaaggacgccaacgataccctgctgctccagctgaccaacaccagcgcctactacatgtacgagatcctgctgggcaaggccaccctgtacgccgtgctggtgtctgccctggtgctgatggctatggtcaagcggaaggacagccggggacgcgccaagagaagcggatctggcgtgaagcagaccctgaatttcgacctgctgaagctggctggcgacgtggaatccaacccaggccctactagtatggactggatttggcgcatccttttccttgtcggcgctgctaccggcgcgcattccttcgaagtccaacttgtggagtctggagggggcctggtgcagcccggcggctctctcagactgtcttgtgcggcaagcggctacaccttcacctcttactggatagaatgggtgaggcaggcacctggaaagggactggagtggattggagagattctgccaggagggggagatacaaattacaatgaaatcttcaaggggcgggccaccttttcagcggataccagcaagaatacagcttacctgcagatgaatagcctccgggcagaagataccgctgtttattattgcacgagacgggtgccaataagactggactattgggggcaagggactcttgtcaccgtcagttcaacgcgtgcctctacaaagggaccctccgtgtttcctctggctcccagcagcaagtctacaagcggaggaacagccgctctgggctgcctggtcaaggattactttcccgagcctgtgaccgtgtcctggaatagcggagcactgacaagcggcgtgcacacctttccagccgtgctgcaaagcagcggcctgtactctctgagcagcgtggtcacagtgcctagctctagcctgggcacccagacctacatctgcaatgtgaaccacaagcctagcaacaccaaggtggacaagagagtggaacccaagagctgtgaagtgaaaaccgactccaccgaccacgtgaagcccaaagagacagagaacaccaagcagcccagcaagagctgccacaagcccaaggccatcgtgcacaccgagaaagtgaacatgatgagcctgaccgtgctgggcttcagaatcctgctgctgaaagtggccggctttaacctgctgatgaccctgcggctgtggtccagc

SEQ ID NO: 6340 - DNA, 1944 bp, synthetic construct
  source 1..1944: mol_type = other DNA
atggccttaccagtgaccgccttgctcctgccgctggccttgctgctccacgccgccaggccggacatcgtgatgacacagagccctgatagcctggccgtgtctctgggagagagagccaccattaactgcaaggccagccagagcgtggactacgacggcgacagcttcctgaactggtatcagcagaagcccggccagcctcctaagctgctgatctacgccgccagcaatctggaaagcggcgtgccaagcagattttccggctctggcagcggcaccgatttcaccctgacaatatccagcctccagcctgaggacgtggccgtgtactactgccagcagagcaacgacgaccctctgacctttggacagggcaccaaggtggaaatcaaactcgagggacagcctaaggccaatcctaccgtgacactgttccctccaagcagcgaagaactccaggccaacaaggccacacttgtgtgcctgatctccgacttctaccctggggctgtgacagtggcttggaaggccgatggatctcctgtgaaagccggcgtggaaaccaccaagccatccaagcagagcaacaacaaatacgccgccagctcctacctgagcctgacacctgagcagtggaagtcccacagatcctacagctgccaagtgacccacgaaggcagcaccgtggaaaagacagtggcccctacagagtgcagccccatcaagaccgatgtgattacaatggaccccaaggacaactgctccaaggacgccaacgataccctgctgctccagctgaccaacaccagcgcctactacatgtacgagatcctgctgggcaaggccaccctgtacgccgtgctggtgtctgccctggtgctgatggctatggtcaagcggaaggacagccggggacgcgccaagagaagcggatctggcgtgaagcagaccctgaatttcgacctgctgaagctggctggcgacgtggaatccaacccaggccctactagtatggactggatttggcgcatccttttccttgtcggcgctgctaccggcgcgcattccttcgaagtccaacttgtggagtctggagggggcctggtgcagcccggcggctctctcagactgtcttgtgcggcaagcggctacaccttcagctcttactggatagaatgggtgaggcaggcacctggaaagggactggagtggattggagagattctgccaggagggggagatacaaattacaatgaaatcttcaaggggcgggccaccttttcagcggataccagcaagaatacagcttacctgcagatgaatagcctccgggcagaagataccgctgtttattattgcacgagacgggtgccaataagactggactattgggggcaagggactcttgtcaccgtcagttcaacgcgtgcctctacaaagggaccctccgtgtttcctctggctcccagcagcaagtctacaagcggaggaacagccgctctgggctgcctggtcaaggattactttcccgagcctgtgaccgtgtcctggaatagcggagcactgacaagcggcgtgcacacctttccagccgtgctgcaaagcagcggcctgtactctctgagcagcgtggtcacagtgcctagctctagcctgggcacccagacctacatctgcaatgtgaaccacaagcctagcaacaccaaggtggacaagagagtggaacccaagagctgtgaagtgaaaaccgactccaccgaccacgtgaagcccaaagagacagagaacaccaagcagcccagcaagagctgccacaagcccaaggccatcgtgcacaccgagaaagtgaacatgatgagcctgaccgtgctgggcttcagaatcctgctgctgaaagtggccggctttaacctgctgatgaccctgcggctgtggtccagc

SEQ ID NO: 6341 - DNA, 1947 bp, synthetic construct
  source 1..1947: mol_type = other DNA
atggccttaccagtgaccgccttgctcctgccgctggccttgctgctccacgccgccaggccggacatccagttgacccagtcccccagctcactcagcgccagtgtgggggaccgggtgaccattacctgtaaagccagtcagagtgtggactatgacggggatagcttcctgaattggtatcagcagaagcctggcaaagccccaaagctgctgatctacgctgcatctaatctggagtcaggcgtgccttccaggttctccggtagtgggtctgggaccgatttcacattgaccatttcatccctccaacccgaggatttcgctacatattactgtcagcagtccaatgaggaccctctcacctttggccagggcaccaaagttgaaattaagagactcgagggacagcctaaggccaatcctaccgtgacactgttccctccaagcagcgaagaactccaggccaacaaggccacacttgtgtgcctgatctccgacttctaccctggggctgtgacagtggcttggaaggccgatggatctcctgtgaaagccggcgtggaaaccaccaagccatccaagcagagcaacaacaaatacgccgccagctcctacctgagcctgacacctgagcagtggaagtcccacagatcctacagctgccaagtgacccacgaaggcagcaccgtggaaaagacagtggcccctacagagtgcagccccatcaagaccgatgtgattacaatggaccccaaggacaactgctccaaggacgccaacgataccctgctgctccagctgaccaacaccagcgcctactacatgtacgagatcctgctgggcaaggccaccctgtacgccgtgctggtgtctgccctggtgctgatggctatggtcaagcggaaggacagccggggacgcgccaagagaagcggatctggcgtgaagcagaccctgaatttcgacctgctgaagctggctggcgacgtggaatccaacccaggccctactagtatggactggatttggcgcatccttttccttgtcggcgctgctaccggcgcgcattccttcgaagtccaacttgtggagtctggagggggcctggtgcagcccggcggctctctcagactgtcttgtgcggcaagcggctacaccttcacctcttactggatagaatgggtgaggcaggcacctggaaagggactggagtggattggagagattctgccaggagggggagatacaaattacaatgaaatcttcaaggggcgggccaccttttcagcggataccagcaagaatacagcttacctgcagatgaatagcctccgggcagaagataccgctgtttattattgcacgagacgggtgccaataagactggactattgggggcaagggactcttgtcaccgtcagttcaacgcgtgcctctacaaagggaccctccgtgtttcctctggctcccagcagcaagtctacaagcggaggaacagccgctctgggctgcctggtcaaggattactttcccgagcctgtgaccgtgtcctggaatagcggagcactgacaagcggcgtgcacacctttccagccgtgctgcaaagcagcggcctgtactctctgagcagcgtggtcacagtgcctagctctagcctgggcacccagacctacatctgcaatgtgaaccacaagcctagcaacaccaaggtggacaagagagtggaacccaagagctgtgaagtgaaaaccgactccaccgaccacgtgaagcccaaagagacagagaacaccaagcagcccagcaagagctgccacaagcccaaggccatcgtgcacaccgagaaagtgaacatgatgagcctgaccgtgatcggcttcagaatcctgctgctgaaagtggccggctttaacctgctgatgaccctgcggctgtggtccagc

SEQ ID NO: 6342 - DNA, 1947 bp, synthetic construct
  source 1..1947: mol_type = other DNA
atggccttaccagtgaccgccttgctcctgccgctggccttgctgctccacgccgccaggccggacatccagttgacccagtcccccagctcactcagcgccagtgtgggggaccgggtgaccattacctgtaaagccagtcagagtgtggactatgagggggatagcttcctgaattggtatcagcagaagcctggcaaagccccaaagctgctgatctacgctgcatctaatctggagtcaggcgtgccttctaggttctccggtagtgggtctgggaccgatttcacattgaccatttcatccctccaacccgaggatttcgctacatattactgtcagcagtccaatgaggaccctctcacctttggccagggcaccaaagttgaaattaagagactcgagggacagcctaaggccaatcctaccgtgacactgttccctccaagcagcgaagaactccaggccaacaaggccacacttgtgtgcctgatctccgacttctaccctggggctgtgacagtggcttggaaggccgatggatctcctgtgaaagccggcgtggaaaccaccaagccatccaagcagagcaacaacaaatacgccgccagctcctacctgagcctgacacctgagcagtggaagtcccacagatcctacagctgccaagtgacccacgaaggcagcaccgtggaaaagacagtggcccctacagagtgcagccccatcaagaccgatgtgattacaatggaccccaaggacaactgctccaaggacgccaacgataccctgctgctccagctgaccaacaccagcgcctactacatgtacgagatcctgctgggcaaggccaccctgtacgccgtgctggtgtctgccctggtgctgatggctatggtcaagcggaaggacagccggggacgcgccaagagaagcggatctggcgtgaagcagaccctgaatttcgacctgctgaagctggctggcgacgtggaatccaacccaggccctactagtatggactggatttggcgcatccttttccttgtcggcgctgctaccggcgcgcattccttcgaagtccaacttgtggagtctggagggggcctggtgcagcccggcggctctctcagactgtcttgtgcggcaagcggctacaccttcacctcttactggatagaatgggtgaggcaggcacctggaaagggactggagtggattggagagattctgccaggagggggagatacaaattacaatgaaatcttcaaggggcgggccaccttttcagcggataccagcaagaatacagcttacctgcagatgaatagcctccgggcagaagataccgctgtttattattgcacgagacgggtgccaataagactggactattgggggcaagggactcttgtcaccgtcagttcaacgcgtgcctctacaaagggaccctccgtgtttcctctggctcccagcagcaagtctacaagcggaggaacagccgctctgggctgcctggtcaaggattactttcccgagcctgtgaccgtgtcctggaatagcggagcactgacaagcggcgtgcacacctttccagccgtgctgcaaagcagcggcctgtactctctgagcagcgtggtcacagtgcctagctctagcctgggcacccagacctacatctgcaatgtgaaccacaagcctagcaacaccaaggtggacaagagagtggaacccaagagctgtgaagtgaaaaccgactccaccgaccacgtgaagcccaaagagacagagaacaccaagcagcccagcaagagctgccacaagcccaaggccatcgtgcacaccgagaaagtgaacatgatgagcctgaccgtgatcggcttcagaatcctgctgctgaaagtggccggctttaacctgctgatgaccctgcggctgtggtccagc

SEQ ID NO: 6343 - DNA, 1947 bp, synthetic construct
  source 1..1947: mol_type = other DNA
atggccttaccagtgaccgccttgctcctgccgctggccttgctgctccacgccgccaggccggacatcgtgatgacacagagccctgatagcctggccgtgtctctgggagagagagccaccattaactgcaaggccagccagagcgtggactacgacggcgacagcttcctgaactggtatcagcagaagcccggccagcctcctaagctgctgatctacgccgccagcaatctggaaagcggcgtgccaagcagattttccggctctggcagcggcaccgatttcaccctgacaatatccagcctccagcctgaggacgtggccgtgtactactgccagcagagcaacgacgaccctctgacctttggacagggcaccaaggtggaaatcaaactcgagggacagcctaaggccaatcctaccgtgacactgttccctccaagcagcgaagaactccaggccaacaaggccacacttgtgtgcctgatctccgacttctaccctggggctgtgacagtggcttggaaggccgatggatctcctgtgaaagccggcgtggaaaccaccaagccatccaagcagagcaacaacaaatacgccgccagctcctacctgagcctgacacctgagcagtggaagtcccacagatcctacagctgccaagtgacccacgaaggcagcaccgtggaaaagacagtggcccctacagagtgcagccccatcaagaccgatgtgattacaatggaccccaaggacaactgctccaaggacgccaacgataccctgctgctccagctgaccaacaccagcgcctactacatgtacgagatcctgctgggcaaggccaccctgtacgccgtgctggtgtctgccctggtgctgatggctatggtcaagcggaaggacagccggggacgcgccaagagaagcggatctggcgtgaagcagaccctgaatttcgacctgctgaagctggctggcgacgtggaatccaacccaggccctactagtatggactggatttggcgcatccttttccttgtcggcgctgctaccggcgcgcattccttcgaacaagttcagctggttcagagcggagccgaagtgaagaaacctggggcctctgtgaaggtgtcctgcaaagccagcggctacacctttaccagctactggatcaactgggtccgacaggcccctggacaaggactggaatggatgggacagatccttccaggcggaggggacaccaactacaacggcaagttcaagggcagagtgaccatcaccgccgacaccagcacaagcaccgcctacatggaactgagcagcctgagaagcgaggacaccgccgtgtattattgcaccagacgggtgcccatccggctggattattggggacagggaaccctggtcaccgtgtctagtacgcgtgcctctacaaagggaccctccgtgtttcctctggctcccagcagcaagtctacaagcggaggaacagccgctctgggctgcctggtcaaggattactttcccgagcctgtgaccgtgtcctggaatagcggagcactgacaagcggcgtgcacacctttccagccgtgctgcaaagcagcggcctgtactctctgagcagcgtggtcacagtgcctagctctagcctgggcacccagacctacatctgcaatgtgaaccacaagcctagcaacaccaaggtggacaagagagtggaacccaagagctgtgaagtgaaaaccgactccaccgaccacgtgaagcccaaagagacagagaacaccaagcagcccagcaagagctgccacaagcccaaggccatcgtgcacaccgagaaagtgaacatgatgagcctgaccgtgatcggcttcagaatcctgctgctgaaagtggccggctttaacctgctgatgaccctgcggctgtggtccagc

SEQ ID NO: 6344 - DNA, 1944 bp, synthetic construct
  source 1..1944: mol_type = other DNA
atggccttaccagtgaccgccttgctcctgccgctggccttgctgctccacgccgccaggccggacatcgtgatgacacagagccctgatagcctggccgtgtctctgggagagagagccaccattaactgcaaggccagccagagcgtggactacgacggcgacagcttcctgaactggtatcagcagaagcccggccagcctcctaagctgctgatctacgccgccagcaatctggaaagcggcgtgccaagcagattttccggctctggcagcggcaccgatttcaccctgacaatatccagcctccagcctgaggacgtggccgtgtactactgccagcagagcaacgacgaccctctgacctttggacagggcaccaaggtggaaatcaaactcgagggacagcctaaggccaatcctaccgtgacactgttccctccaagcagcgaagaactccaggccaacaaggccacacttgtgtgcctgatctccgacttctaccctggggctgtgacagtggcttggaaggccgatggatctcctgtgaaagccggcgtggaaaccaccaagccatccaagcagagcaacaacaaatacgccgccagctcctacctgagcctgacacctgagcagtggaagtcccacagatcctacagctgccaagtgacccacgaaggcagcaccgtggaaaagacagtggcccctacagagtgcagccccatcaagaccgatgtgattacaatggaccccaaggacaactgctccaaggacgccaacgataccctgctgctccagctgaccaacaccagcgcctactacatgtacgagatcctgctgggcaaggccaccctgtacgccgtgctggtgtctgccctggtgctgatggctatggtcaagcggaaggacagccggggacgcgccaagagaagcggatctggcgtgaagcagaccctgaatttcgacctgctgaagctggctggcgacgtggaatccaacccaggccctactagtatggactggatttggcgcatccttttccttgtcggcgctgctaccggcgcgcattccttcgaagtccaacttgtggagtctggagggggcctggtgcagcccggcggctctctcagactgtcttgtgcggcaagcggctacaccttcacctcttactggatagaatgggtgaggcaggcacctggaaagggactggagtggattggagagattctgccaggagggggagatacaaattacaatgaaatcttcaaggggcgggccaccttttcagcggataccagcaagaatacagcttacctgcagatgaatagcctccgggcagaagataccgctgtttattattgcacgagacgggtgccaataagactggactattgggggcaagggactcttgtcaccgtcagttcaacgcgtgcctctacaaagggaccctccgtgtttcctctggctcccagcagcaagtctacaagcggaggaacagccgctctgggctgcctggtcaaggattactttcccgagcctgtgaccgtgtcctggaatagcggagcactgacaagcggcgtgcacacctttccagccgtgctgcaaagcagcggcctgtactctctgagcagcgtggtcacagtgcctagctctagcctgggcacccagacctacatctgcaatgtgaaccacaagcctagcaacaccaaggtggacaagagagtggaacccaagagctgtgaagtgaaaaccgactccaccgaccacgtgaagcccaaagagacagagaacaccaagcagcccagcaagagctgccacaagcccaaggccatcgtgcacaccgagaaagtgaacatgatgagcctgaccgtgatcggcttcagaatcctgctgctgaaagtggccggctttaacctgctgatgaccctgcggctgtggtccagc

SEQ ID NO: 6345 - DNA, 1944 bp, synthetic construct
  source 1..1944: mol_type = other DNA
atggccttaccagtgaccgccttgctcctgccgctggccttgctgctccacgccgccaggccggacatcgtgatgacacagagccctgatagcctggccgtgtctctgggagagagagccaccattaactgcaaggccagccagagcgtggactacgacggcgacagcttcctgaactggtatcagcagaagcccggccagcctcctaagctgctgatctacgccgccagcaatctggaaagcggcgtgccaagcagattttccggctctggcagcggcaccgatttcaccctgacaatatccagcctccagcctgaggacgtggccgtgtactactgccagcagagcaacgacgaccctctgacctttggacagggcaccaaggtggaaatcaaactcgagggacagcctaaggccaatcctaccgtgacactgttccctccaagcagcgaagaactccaggccaacaaggccacacttgtgtgcctgatctccgacttctaccctggggctgtgacagtggcttggaaggccgatggatctcctgtgaaagccggcgtggaaaccaccaagccatccaagcagagcaacaacaaatacgccgccagctcctacctgagcctgacacctgagcagtggaagtcccacagatcctacagctgccaagtgacccacgaaggcagcaccgtggaaaagacagtggcccctacagagtgcagccccatcaagaccgatgtgattacaatggaccccaaggacaactgctccaaggacgccaacgataccctgctgctccagctgaccaacaccagcgcctactacatgtacgagatcctgctgggcaaggccaccctgtacgccgtgctggtgtctgccctggtgctgatggctatggtcaagcggaaggacagccggggacgcgccaagagaagcggatctggcgtgaagcagaccctgaatttcgacctgctgaagctggctggcgacgtggaatccaacccaggccctactagtatggactggatttggcgcatccttttccttgtcggcgctgctaccggcgcgcattccttcgaagtccaacttgtggagtctggagggggcctggtgcagcccggcggctctctcagactgtcttgtgcggcaagcggctacaccttcagctcttactggatagaatgggtgaggcaggcacctggaaagggactggagtggattggagagattctgccaggagggggagatacaaattacaatgaaatcttcaaggggcgggccaccttttcagcggataccagcaagaatacagcttacctgcagatgaatagcctccgggcagaagataccgctgtttattattgcacgagacgggtgccaataagactggactattgggggcaagggactcttgtcaccgtcagttcaacgcgtgcctctacaaagggaccctccgtgtttcctctggctcccagcagcaagtctacaagcggaggaacagccgctctgggctgcctggtcaaggattactttcccgagcctgtgaccgtgtcctggaatagcggagcactgacaagcggcgtgcacacctttccagccgtgctgcaaagcagcggcctgtactctctgagcagcgtggtcacagtgcctagctctagcctgggcacccagacctacatctgcaatgtgaaccacaagcctagcaacaccaaggtggacaagagagtggaacccaagagctgtgaagtgaaaaccgactccaccgaccacgtgaagcccaaagagacagagaacaccaagcagcccagcaagagctgccacaagcccaaggccatcgtgcacaccgagaaagtgaacatgatgagcctgaccgtgatcggcttcagaatcctgctgctgaaagtggccggctttaacctgctgatgaccctgcggctgtggtccagc

SEQ ID NO: 6346 - DNA, 1922 bp, synthetic construct
  source 1..1922: mol_type = other DNA
atggccttaccagtgaccgccttgctcctgccgctggccttgctgctccacgccgccaggccggacatccagttgacccagtcccccagctcactcagcgccagtgtgggggaccgggtgaccattacctgtaaagccagtcagagtgtggactatgacggggatagcttcctgaattggtatcagcagaagcctggcaaagccccaaagctgctgatctacgctgcatctaatctggagtcaggcgtgccttccaggttctccggtagtgggtctgggaccgatttcacattgaccatttcatccctccaacccgaggatttcgctacatattactgtcagcagtccaatgaggaccctctcacctttggccagggcaccaaagttgaaattaagagactcgagggacagcctaaggccaatcctaccgtgacactgttccctccaagcagcgaagaactccaggccaacaaggccacacttgtgtgcctgatctccgacttctaccctggggctgtgacagtggcttggaaggccgatggatctcctgtgaaagccggcgtggaaaccaccaagccatccaagcagagcaacaacaaatacgccgccagctcctacctgagcctgacacctgagcagtggaagtcccacagatcctacagctgccaagtgacccacgaaggcagcaccgtggaaaagacagtggcccctacagagtgcagccccatcaagaccgatgtgattacaatggaccccaaggacaactgctccaaggacgccaacgataccctgctgctccagctgaccaacaccagcgcctactacatgtacgagatcctgctgggcaaggccaccctgtacgccgtgctggtgtctgccctggtgctgatggctatggtcaagcggaaggacagccggggacgcgccaagagaagcggatctggcgtgaagcagaccctgaatttcgacctgctgaagctggctggcgacgtggaatccaacccaggccctactagtatggactggatttggcgcatccttttccttgtcggcgctgctaccggcgcgcattccttcgaagtccaacttgtggagtctggagggggcctggtgcagcccggcggctctctcagactgtcttgtgcggcaagcggctacaccttcacctcttactggatagaatgggtgaggcaggcacctggaaagggactggagtggattggagagattctgccaggagggggagatacaaattacaatgaaatcttcaaggggcgggccaccttttcagcggataccagcaagaatacagcttacctgcagatgaatagcctccgggcagaagataccgctgtttattattgcacgagacgggtgccaataagactggactattgggggcaagggactcttgtcaccgtcagttcaacgcgtgcctctacaaagggaccctccgtgtttcctctggctcccagcagcaagtctacaagcggaggaacagccgctctgggctgcctggtcaaggattactttcccgagcctgtgaccgtgtcctggaatagcggagcactgacaagcggcgtgcacacctttccagccgtgctgcaaagcagcggcctgtactctctgagcagcgtggtcacagtgcctagctctagcctgggcacccagacctacatctgcaatgtgaaccacaagcctagcaacaccaaggtggacaagagagtggaacccaagagctgtatccccgaggacacattcttcccaagccccgagagcagctgcgacgtgaagctggtggaaaagagcttcgagacagacaccaacctgaacttccagaacctgagcgtgatcggcctgcggatgctgttcgccaaaaccgtggccgtgaacttcctgctgaccgccaagctgttcttcct

SEQ ID NO: 6347 - DNA, 1922 bp, synthetic construct
  source 1..1922: mol_type = other DNA
atggccttaccagtgaccgccttgctcctgccgctggccttgctgctccacgccgccaggccggacatccagttgacccagtcccccagctcactcagcgccagtgtgggggaccgggtgaccattacctgtaaagccagtcagagtgtggactatgagggggatagcttcctgaattggtatcagcagaagcctggcaaagccccaaagctgctgatctacgctgcatctaatctggagtcaggcgtgccttctaggttctccggtagtgggtctgggaccgatttcacattgaccatttcatccctccaacccgaggatttcgctacatattactgtcagcagtccaatgaggaccctctcacctttggccagggcaccaaagttgaaattaagagactcgagggacagcctaaggccaatcctaccgtgacactgttccctccaagcagcgaagaactccaggccaacaaggccacacttgtgtgcctgatctccgacttctaccctggggctgtgacagtggcttggaaggccgatggatctcctgtgaaagccggcgtggaaaccaccaagccatccaagcagagcaacaacaaatacgccgccagctcctacctgagcctgacacctgagcagtggaagtcccacagatcctacagctgccaagtgacccacgaaggcagcaccgtggaaaagacagtggcccctacagagtgcagccccatcaagaccgatgtgattacaatggaccccaaggacaactgctccaaggacgccaacgataccctgctgctccagctgaccaacaccagcgcctactacatgtacgagatcctgctgggcaaggccaccctgtacgccgtgctggtgtctgccctggtgctgatggctatggtcaagcggaaggacagccggggacgcgccaagagaagcggatctggcgtgaagcagaccctgaatttcgacctgctgaagctggctggcgacgtggaatccaacccaggccctactagtatggactggatttggcgcatccttttccttgtcggcgctgctaccggcgcgcattccttcgaagtccaacttgtggagtctggagggggcctggtgcagcccggcggctctctcagactgtcttgtgcggcaagcggctacaccttcacctcttactggatagaatgggtgaggcaggcacctggaaagggactggagtggattggagagattctgccaggagggggagatacaaattacaatgaaatcttcaaggggcgggccaccttttcagcggataccagcaagaatacagcttacctgcagatgaatagcctccgggcagaagataccgctgtttattattgcacgagacgggtgccaataagactggactattgggggcaagggactcttgtcaccgtcagttcaacgcgtgcctctacaaagggaccctccgtgtttcctctggctcccagcagcaagtctacaagcggaggaacagccgctctgggctgcctggtcaaggattactttcccgagcctgtgaccgtgtcctggaatagcggagcactgacaagcggcgtgcacacctttccagccgtgctgcaaagcagcggcctgtactctctgagcagcgtggtcacagtgcctagctctagcctgggcacccagacctacatctgcaatgtgaaccacaagcctagcaacaccaaggtggacaagagagtggaacccaagagctgtatccccgaggacacattcttcccaagccccgagagcagctgcgacgtgaagctggtggaaaagagcttcgagacagacaccaacctgaacttccagaacctgagcgtgatcggcctgcggatgctgttcgccaaaaccgtggccgtgaacttcctgctgaccgccaagctgttcttcct

SEQ ID NO: 6348 - DNA, 1922 bp, synthetic construct
  source 1..1922: mol_type = other DNA
atggccttaccagtgaccgccttgctcctgccgctggccttgctgctccacgccgccaggccggacatcgtgatgacacagagccctgatagcctggccgtgtctctgggagagagagccaccattaactgcaaggccagccagagcgtggactacgacggcgacagcttcctgaactggtatcagcagaagcccggccagcctcctaagctgctgatctacgccgccagcaatctggaaagcggcgtgccaagcagattttccggctctggcagcggcaccgatttcaccctgacaatatccagcctccagcctgaggacgtggccgtgtactactgccagcagagcaacgacgaccctctgacctttggacagggcaccaaggtggaaatcaaactcgagggacagcctaaggccaatcctaccgtgacactgttccctccaagcagcgaagaactccaggccaacaaggccacacttgtgtgcctgatctccgacttctaccctggggctgtgacagtggcttggaaggccgatggatctcctgtgaaagccggcgtggaaaccaccaagccatccaagcagagcaacaacaaatacgccgccagctcctacctgagcctgacacctgagcagtggaagtcccacagatcctacagctgccaagtgacccacgaaggcagcaccgtggaaaagacagtggcccctacagagtgcagccccatcaagaccgatgtgattacaatggaccccaaggacaactgctccaaggacgccaacgataccctgctgctccagctgaccaacaccagcgcctactacatgtacgagatcctgctgggcaaggccaccctgtacgccgtgctggtgtctgccctggtgctgatggctatggtcaagcggaaggacagccggggacgcgccaagagaagcggatctggcgtgaagcagaccctgaatttcgacctgctgaagctggctggcgacgtggaatccaacccaggccctactagtatggactggatttggcgcatccttttccttgtcggcgctgctaccggcgcgcattccttcgaacaagttcagctggttcagagcggagccgaagtgaagaaacctggggcctctgtgaaggtgtcctgcaaagccagcggctacacctttaccagctactggatcaactgggtccgacaggcccctggacaaggactggaatggatgggacagatccttccaggcggaggggacaccaactacaacggcaagttcaagggcagagtgaccatcaccgccgacaccagcacaagcaccgcctacatggaactgagcagcctgagaagcgaggacaccgccgtgtattattgcaccagacgggtgcccatccggctggattattggggacagggaaccctggtcaccgtgtctagtacgcgtgcctctacaaagggaccctccgtgtttcctctggctcccagcagcaagtctacaagcggaggaacagccgctctgggctgcctggtcaaggattactttcccgagcctgtgaccgtgtcctggaatagcggagcactgacaagcggcgtgcacacctttccagccgtgctgcaaagcagcggcctgtactctctgagcagcgtggtcacagtgcctagctctagcctgggcacccagacctacatctgcaatgtgaaccacaagcctagcaacaccaaggtggacaagagagtggaacccaagagctgtatccccgaggacacattcttcccaagccccgagagcagctgcgacgtgaagctggtggaaaagagcttcgagacagacaccaacctgaacttccagaacctgagcgtgatcggcctgcggatgctgttcgccaaaaccgtggccgtgaacttcctgctgaccgccaagctgttcttcct

SEQ ID NO: 6349 - DNA, 1919 bp, synthetic construct
  source 1..1919: mol_type = other DNA
atggccttaccagtgaccgccttgctcctgccgctggccttgctgctccacgccgccaggccggacatcgtgatgacacagagccctgatagcctggccgtgtctctgggagagagagccaccattaactgcaaggccagccagagcgtggactacgacggcgacagcttcctgaactggtatcagcagaagcccggccagcctcctaagctgctgatctacgccgccagcaatctggaaagcggcgtgccaagcagattttccggctctggcagcggcaccgatttcaccctgacaatatccagcctccagcctgaggacgtggccgtgtactactgccagcagagcaacgacgaccctctgacctttggacagggcaccaaggtggaaatcaaactcgagggacagcctaaggccaatcctaccgtgacactgttccctccaagcagcgaagaactccaggccaacaaggccacacttgtgtgcctgatctccgacttctaccctggggctgtgacagtggcttggaaggccgatggatctcctgtgaaagccggcgtggaaaccaccaagccatccaagcagagcaacaacaaatacgccgccagctcctacctgagcctgacacctgagcagtggaagtcccacagatcctacagctgccaagtgacccacgaaggcagcaccgtggaaaagacagtggcccctacagagtgcagccccatcaagaccgatgtgattacaatggaccccaaggacaactgctccaaggacgccaacgataccctgctgctccagctgaccaacaccagcgcctactacatgtacgagatcctgctgggcaaggccaccctgtacgccgtgctggtgtctgccctggtgctgatggctatggtcaagcggaaggacagccggggacgcgccaagagaagcggatctggcgtgaagcagaccctgaatttcgacctgctgaagctggctggcgacgtggaatccaacccaggccctactagtatggactggatttggcgcatccttttccttgtcggcgctgctaccggcgcgcattccttcgaagtccaacttgtggagtctggagggggcctggtgcagcccggcggctctctcagactgtcttgtgcggcaagcggctacaccttcacctcttactggatagaatgggtgaggcaggcacctggaaagggactggagtggattggagagattctgccaggagggggagatacaaattacaatgaaatcttcaaggggcgggccaccttttcagcggataccagcaagaatacagcttacctgcagatgaatagcctccgggcagaagataccgctgtttattattgcacgagacgggtgccaataagactggactattgggggcaagggactcttgtcaccgtcagttcaacgcgtgcctctacaaagggaccctccgtgtttcctctggctcccagcagcaagtctacaagcggaggaacagccgctctgggctgcctggtcaaggattactttcccgagcctgtgaccgtgtcctggaatagcggagcactgacaagcggcgtgcacacctttccagccgtgctgcaaagcagcggcctgtactctctgagcagcgtggtcacagtgcctagctctagcctgggcacccagacctacatctgcaatgtgaaccacaagcctagcaacaccaaggtggacaagagagtggaacccaagagctgtatccccgaggacacattcttcccaagccccgagagcagctgcgacgtgaagctggtggaaaagagcttcgagacagacaccaacctgaacttccagaacctgagcgtgatcggcctgcggatgctgttcgccaaaaccgtggccgtgaacttcctgctgaccgccaagctgttcttcct

SEQ ID NO: 6350 - DNA, 1919 bp, synthetic construct
  source 1..1919: mol_type = other DNA
atggccttaccagtgaccgccttgctcctgccgctggccttgctgctccacgccgccaggccggacatcgtgatgacacagagccctgatagcctggccgtgtctctgggagagagagccaccattaactgcaaggccagccagagcgtggactacgacggcgacagcttcctgaactggtatcagcagaagcccggccagcctcctaagctgctgatctacgccgccagcaatctggaaagcggcgtgccaagcagattttccggctctggcagcggcaccgatttcaccctgacaatatccagcctccagcctgaggacgtggccgtgtactactgccagcagagcaacgacgaccctctgacctttggacagggcaccaaggtggaaatcaaactcgagggacagcctaaggccaatcctaccgtgacactgttccctccaagcagcgaagaactccaggccaacaaggccacacttgtgtgcctgatctccgacttctaccctggggctgtgacagtggcttggaaggccgatggatctcctgtgaaagccggcgtggaaaccaccaagccatccaagcagagcaacaacaaatacgccgccagctcctacctgagcctgacacctgagcagtggaagtcccacagatcctacagctgccaagtgacccacgaaggcagcaccgtggaaaagacagtggcccctacagagtgcagccccatcaagaccgatgtgattacaatggaccccaaggacaactgctccaaggacgccaacgataccctgctgctccagctgaccaacaccagcgcctactacatgtacgagatcctgctgggcaaggccaccctgtacgccgtgctggtgtctgccctggtgctgatggctatggtcaagcggaaggacagccggggacgcgccaagagaagcggatctggcgtgaagcagaccctgaatttcgacctgctgaagctggctggcgacgtggaatccaacccaggccctactagtatggactggatttggcgcatccttttccttgtcggcgctgctaccggcgcgcattccttcgaagtccaacttgtggagtctggagggggcctggtgcagcccggcggctctctcagactgtcttgtgcggcaagcggctacaccttcagctcttactggatagaatgggtgaggcaggcacctggaaagggactggagtggattggagagattctgccaggagggggagatacaaattacaatgaaatcttcaaggggcgggccaccttttcagcggataccagcaagaatacagcttacctgcagatgaatagcctccgggcagaagataccgctgtttattattgcacgagacgggtgccaataagactggactattgggggcaagggactcttgtcaccgtcagttcaacgcgtgcctctacaaagggaccctccgtgtttcctctggctcccagcagcaagtctacaagcggaggaacagccgctctgggctgcctggtcaaggattactttcccgagcctgtgaccgtgtcctggaatagcggagcactgacaagcggcgtgcacacctttccagccgtgctgcaaagcagcggcctgtactctctgagcagcgtggtcacagtgcctagctctagcctgggcacccagacctacatctgcaatgtgaaccacaagcctagcaacaccaaggtggacaagagagtggaacccaagagctgtatccccgaggacacattcttcccaagccccgagagcagctgcgacgtgaagctggtggaaaagagcttcgagacagacaccaacctgaacttccagaacctgagcgtgatcggcctgcggatgctgttcgccaaaaccgtggccgtgaacttcctgctgaccgccaagctgttcttcct

SEQ ID NO: 6351 - DNA, 1948 bp, synthetic construct
  source 1..1948: mol_type = other DNA
atggccttaccagtgaccgccttgctcctgccgctggccttgctgctccacgccgccaggccggacatccagttgacccagtcccccagctcactcagcgccagtgtgggggaccgggtgaccattacctgtaaagccagtcagagtgtggactatgacggggatagcttcctgaattggtatcagcagaagcctggcaaagccccaaagctgctgatctacgctgcatctaatctggagtcaggcgtgccttccaggttctccggtagtgggtctgggaccgatttcacattgaccatttcatccctccaacccgaggatttcgctacatattactgtcagcagtccaatgaggaccctctcacctttggccagggcaccaaagttgaaattaagagactcgagggacagcctaaggccaatcctaccgtgacactgttccctccaagcagcgaagaactccaggccaacaaggccacacttgtgtgcctgatctccgacttctaccctggggctgtgacagtggcttggaaggccgatggatctcctgtgaaagccggcgtggaaaccaccaagccatccaagcagagcaacaacaaatacgccgccagctcctacctgagcctgacacctgagcagtggaagtcccacagatcctacagctgccaagtgacccacgaaggcagcaccgtggaaaagacagtggcccctacagagtgcagccccatcaagaccgatgtgattacaatggaccccaaggacaactgctccaaggacgccaacgataccctgctgctccagctgaccaacaccagcgccaccatcctgtacgagatcctgctgggcaaggccaccctgtacgccgtgctggtgtctgccctggtgctgatggctatggtcaagcggaaggacagccggggaccgcgccaagagaagcggatctggcgtgaagcagaccctgaatttcgacctgctgaagctggctggcgacgtggaatccaacccaggccctactagtatggactggatttggcgcatccttttccttgtcggcgctgctaccggcgcgcattccttcgaagtccaacttgtggagtctggagggggcctggtgcagcccggcggctctctcagactgtcttgtgcggcaagcggctacaccttcacctcttactggatagaatgggtgaggcaggcacctggaaagggactggagtggattggagagattctgccaggagggggagatacaaattacaatgaaatcttcaaggggcgggccaccttttcagcggataccagcaagaatacagcttacctgcagatgaatagcctccgggcagaagataccgctgtttattattgcacgagacgggtgccaataagactggactattgggggcaagggactcttgtcaccgtcagttcaacgcgtgcctctacaaagggaccctccgtgtttcctctggctcccagcagcaagtctacaagcggaggaacagccgctctgggctgcctggtcaaggattactttcccgagcctgtgaccgtgtcctggaatagcggagcactgacaagcggcgtgcacacctttccagccgtgctgcaaagcagcggcctgtactctctgagcagcgtggtcacagtgcctagctctagcctgggcacccagacctacatctgcaatgtgaaccacaagcctagcaacaccaaggtggacaagagagtggaacccaagagctgtgaagtgaaaaccgactccaccgaccacgtgaagcccaaagagacagagaacaccaagcagcccagcaagagctgccacaagcccaaggccatcgtgcacaccgagaaagtgaacatgatgagcctgaccgtgctgggcttcagaatcctgctgctgaaagtggccggctttaacctgctgatgaccctgcggctgtggtccagc

SEQ ID NO: 6352 - DNA, 1948 bp, synthetic construct
  source 1..1948: mol_type = other DNA
atggccttaccagtgaccgccttgctcctgccgctggccttgctgctccacgccgccaggccggacatccagttgacccagtcccccagctcactcagcgccagtgtgggggaccgggtgaccattacctgtaaagccagtcagagtgtggactatgagggggatagcttcctgaattggtatcagcagaagcctggcaaagccccaaagctgctgatctacgctgcatctaatctggagtcaggcgtgccttctaggttctccggtagtgggtctgggaccgatttcacattgaccatttcatccctccaacccgaggatttcgctacatattactgtcagcagtccaatgaggaccctctcacctttggccagggcaccaaagttgaaattaagagactcgagggacagcctaaggccaatcctaccgtgacactgttccctccaagcagcgaagaactccaggccaacaaggccacacttgtgtgcctgatctccgacttctaccctggggctgtgacagtggcttggaaggccgatggatctcctgtgaaagccggcgtggaaaccaccaagccatccaagcagagcaacaacaaatacgccgccagctcctacctgagcctgacacctgagcagtggaagtcccacagatcctacagctgccaagtgacccacgaaggcagcaccgtggaaaagacagtggcccctacagagtgcagccccatcaagaccgatgtgattacaatggaccccaaggacaactgctccaaggacgccaacgataccctgctgctccagctgaccaacaccagcgccaccatcctgtacgagatcctgctgggcaaggccaccctgtacgccgtgctggtgtctgccctggtgctgatggctatggtcaagcggaaggacagccggggaccgcgccaagagaagcggatctggcgtgaagcagaccctgaatttcgacctgctgaagctggctggcgacgtggaatccaacccaggccctactagtatggactggatttggcgcatccttttccttgtcggcgctgctaccggcgcgcattccttcgaagtccaacttgtggagtctggagggggcctggtgcagcccggcggctctctcagactgtcttgtgcggcaagcggctacaccttcacctcttactggatagaatgggtgaggcaggcacctggaaagggactggagtggattggagagattctgccaggagggggagatacaaattacaatgaaatcttcaaggggcgggccaccttttcagcggataccagcaagaatacagcttacctgcagatgaatagcctccgggcagaagataccgctgtttattattgcacgagacgggtgccaataagactggactattgggggcaagggactcttgtcaccgtcagttcaacgcgtgcctctacaaagggaccctccgtgtttcctctggctcccagcagcaagtctacaagcggaggaacagccgctctgggctgcctggtcaaggattactttcccgagcctgtgaccgtgtcctggaatagcggagcactgacaagcggcgtgcacacctttccagccgtgctgcaaagcagcggcctgtactctctgagcagcgtggtcacagtgcctagctctagcctgggcacccagacctacatctgcaatgtgaaccacaagcctagcaacaccaaggtggacaagagagtggaacccaagagctgtgaagtgaaaaccgactccaccgaccacgtgaagcccaaagagacagagaacaccaagcagcccagcaagagctgccacaagcccaaggccatcgtgcacaccgagaaagtgaacatgatgagcctgaccgtgctgggcttcagaatcctgctgctgaaagtggccggctttaacctgctgatgaccctgcggctgtggtccagc

SEQ ID NO: 6353 - DNA, 1948 bp, synthetic construct
  source 1..1948: mol_type = other DNA
atggccttaccagtgaccgccttgctcctgccgctggccttgctgctccacgccgccaggccggacatcgtgatgacacagagccctgatagcctggccgtgtctctgggagagagagccaccattaactgcaaggccagccagagcgtggactacgacggcgacagcttcctgaactggtatcagcagaagcccggccagcctcctaagctgctgatctacgccgccagcaatctggaaagcggcgtgccaagcagattttccggctctggcagcggcaccgatttcaccctgacaatatccagcctccagcctgaggacgtggccgtgtactactgccagcagagcaacgacgaccctctgacctttggacagggcaccaaggtggaaatcaaactcgagggacagcctaaggccaatcctaccgtgacactgttccctccaagcagcgaagaactccaggccaacaaggccacacttgtgtgcctgatctccgacttctaccctggggctgtgacagtggcttggaaggccgatggatctcctgtgaaagccggcgtggaaaccaccaagccatccaagcagagcaacaacaaatacgccgccagctcctacctgagcctgacacctgagcagtggaagtcccacagatcctacagctgccaagtgacccacgaaggcagcaccgtggaaaagacagtggcccctacagagtgcagccccatcaagaccgatgtgattacaatggaccccaaggacaactgctccaaggacgccaacgataccctgctgctccagctgaccaacaccagcgccaccatcctgtacgagatcctgctgggcaaggccaccctgtacgccgtgctggtgtctgccctggtgctgatggctatggtcaagcggaaggacagccggggaccgcgccaagagaagcggatctggcgtgaagcagaccctgaatttcgacctgctgaagctggctggcgacgtggaatccaacccaggccctactagtatggactggatttggcgcatccttttccttgtcggcgctgctaccggcgcgcattccttcgaacaagttcagctggttcagagcggagccgaagtgaagaaacctggggcctctgtgaaggtgtcctgcaaagccagcggctacacctttaccagctactggatcaactgggtccgacaggcccctggacaaggactggaatggatgggacagatccttccaggcggaggggacaccaactacaacggcaagttcaagggcagagtgaccatcaccgccgacaccagcacaagcaccgcctacatggaactgagcagcctgagaagcgaggacaccgccgtgtattattgcaccagacgggtgcccatccggctggattattggggacagggaaccctggtcaccgtgtctagtacgcgtgcctctacaaagggaccctccgtgtttcctctggctcccagcagcaagtctacaagcggaggaacagccgctctgggctgcctggtcaaggattactttcccgagcctgtgaccgtgtcctggaatagcggagcactgacaagcggcgtgcacacctttccagccgtgctgcaaagcagcggcctgtactctctgagcagcgtggtcacagtgcctagctctagcctgggcacccagacctacatctgcaatgtgaaccacaagcctagcaacaccaaggtggacaagagagtggaacccaagagctgtgaagtgaaaaccgactccaccgaccacgtgaagcccaaagagacagagaacaccaagcagcccagcaagagctgccacaagcccaaggccatcgtgcacaccgagaaagtgaacatgatgagcctgaccgtgctgggcttcagaatcctgctgctgaaagtggccggctttaacctgctgatgaccctgcggctgtggtccagc

SEQ ID NO: 6354 - DNA, 1945 bp, synthetic construct
  source 1..1945: mol_type = other DNA
atggccttaccagtgaccgccttgctcctgccgctggccttgctgctccacgccgccaggccggacatcgtgatgacacagagccctgatagcctggccgtgtctctgggagagagagccaccattaactgcaaggccagccagagcgtggactacgacggcgacagcttcctgaactggtatcagcagaagcccggccagcctcctaagctgctgatctacgccgccagcaatctggaaagcggcgtgccaagcagattttccggctctggcagcggcaccgatttcaccctgacaatatccagcctccagcctgaggacgtggccgtgtactactgccagcagagcaacgacgaccctctgacctttggacagggcaccaaggtggaaatcaaactcgagggacagcctaaggccaatcctaccgtgacactgttccctccaagcagcgaagaactccaggccaacaaggccacacttgtgtgcctgatctccgacttctaccctggggctgtgacagtggcttggaaggccgatggatctcctgtgaaagccggcgtggaaaccaccaagccatccaagcagagcaacaacaaatacgccgccagctcctacctgagcctgacacctgagcagtggaagtcccacagatcctacagctgccaagtgacccacgaaggcagcaccgtggaaaagacagtggcccctacagagtgcagccccatcaagaccgatgtgattacaatggaccccaaggacaactgctccaaggacgccaacgataccctgctgctccagctgaccaacaccagcgccaccatcctgtacgagatcctgctgggcaaggccaccctgtacgccgtgctggtgtctgccctggtgctgatggctatggtcaagcggaaggacagccggggaccgcgccaagagaagcggatctggcgtgaagcagaccctgaatttcgacctgctgaagctggctggcgacgtggaatccaacccaggccctactagtatggactggatttggcgcatccttttccttgtcggcgctgctaccggcgcgcattccttcgaagtccaacttgtggagtctggagggggcctggtgcagcccggcggctctctcagactgtcttgtgcggcaagcggctacaccttcacctcttactggatagaatgggtgaggcaggcacctggaaagggactggagtggattggagagattctgccaggagggggagatacaaattacaatgaaatcttcaaggggcgggccaccttttcagcggataccagcaagaatacagcttacctgcagatgaatagcctccgggcagaagataccgctgtttattattgcacgagacgggtgccaataagactggactattgggggcaagggactcttgtcaccgtcagttcaacgcgtgcctctacaaagggaccctccgtgtttcctctggctcccagcagcaagtctacaagcggaggaacagccgctctgggctgcctggtcaaggattactttcccgagcctgtgaccgtgtcctggaatagcggagcactgacaagcggcgtgcacacctttccagccgtgctgcaaagcagcggcctgtactctctgagcagcgtggtcacagtgcctagctctagcctgggcacccagacctacatctgcaatgtgaaccacaagcctagcaacaccaaggtggacaagagagtggaacccaagagctgtgaagtgaaaaccgactccaccgaccacgtgaagcccaaagagacagagaacaccaagcagcccagcaagagctgccacaagcccaaggccatcgtgcacaccgagaaagtgaacatgatgagcctgaccgtgctgggcttcagaatcctgctgctgaaagtggccggctttaacctgctgatgaccctgcggctgtggtccagc

SEQ ID NO: 6355 - DNA, 1945 bp, synthetic construct
  source 1..1945: mol_type = other DNA
atggccttaccagtgaccgccttgctcctgccgctggccttgctgctccacgccgccaggccggacatcgtgatgacacagagccctgatagcctggccgtgtctctgggagagagagccaccattaactgcaaggccagccagagcgtggactacgacggcgacagcttcctgaactggtatcagcagaagcccggccagcctcctaagctgctgatctacgccgccagcaatctggaaagcggcgtgccaagcagattttccggctctggcagcggcaccgatttcaccctgacaatatccagcctccagcctgaggacgtggccgtgtactactgccagcagagcaacgacgaccctctgacctttggacagggcaccaaggtggaaatcaaactcgagggacagcctaaggccaatcctaccgtgacactgttccctccaagcagcgaagaactccaggccaacaaggccacacttgtgtgcctgatctccgacttctaccctggggctgtgacagtggcttggaaggccgatggatctcctgtgaaagccggcgtggaaaccaccaagccatccaagcagagcaacaacaaatacgccgccagctcctacctgagcctgacacctgagcagtggaagtcccacagatcctacagctgccaagtgacccacgaaggcagcaccgtggaaaagacagtggcccctacagagtgcagccccatcaagaccgatgtgattacaatggaccccaaggacaactgctccaaggacgccaacgataccctgctgctccagctgaccaacaccagcgccaccatcctgtacgagatcctgctgggcaaggccaccctgtacgccgtgctggtgtctgccctggtgctgatggctatggtcaagcggaaggacagccggggaccgcgccaagagaagcggatctggcgtgaagcagaccctgaatttcgacctgctgaagctggctggcgacgtggaatccaacccaggccctactagtatggactggatttggcgcatccttttccttgtcggcgctgctaccggcgcgcattccttcgaagtccaacttgtggagtctggagggggcctggtgcagcccggcggctctctcagactgtcttgtgcggcaagcggctacaccttcagctcttactggatagaatgggtgaggcaggcacctggaaagggactggagtggattggagagattctgccaggagggggagatacaaattacaatgaaatcttcaaggggcgggccaccttttcagcggataccagcaagaatacagcttacctgcagatgaatagcctccgggcagaagataccgctgtttattattgcacgagacgggtgccaataagactggactattgggggcaagggactcttgtcaccgtcagttcaacgcgtgcctctacaaagggaccctccgtgtttcctctggctcccagcagcaagtctacaagcggaggaacagccgctctgggctgcctggtcaaggattactttcccgagcctgtgaccgtgtcctggaatagcggagcactgacaagcggcgtgcacacctttccagccgtgctgcaaagcagcggcctgtactctctgagcagcgtggtcacagtgcctagctctagcctgggcacccagacctacatctgcaatgtgaaccacaagcctagcaacaccaaggtggacaagagagtggaacccaagagctgtgaagtgaaaaccgactccaccgaccacgtgaagcccaaagagacagagaacaccaagcagcccagcaagagctgccacaagcccaaggccatcgtgcacaccgagaaagtgaacatgatgagcctgaccgtgctgggcttcagaatcctgctgctgaaagtggccggctttaacctgctgatgaccctgcggctgtggtccagc

SEQ ID NO: 6356 - DNA, 1887 bp, synthetic construct
  source 1..1887: mol_type = other DNA
atggccttaccagtgaccgccttgctcctgccgctggccttgctgctccacgccgccaggccggacatccagttgacccagtcccccagctcactcagcgccagtgtgggggaccgggtgaccattacctgtaaagccagtcagagtgtggactatgacggggatagcttcctgaattggtatcagcagaagcctggcaaagccccaaagctgctgatctacgctgcatctaatctggagtcaggcgtgccttccaggttctccggtagtgggtctgggaccgatttcacattgaccatttcatccctccaacccgaggatttcgctacatattactgtcagcagtccaatgaggaccctctcacctttggccagggcaccaaagttgaaattaagagactcgagggacagcctaaggccaatcctaccgtgacactgttccctccaagcagcgaagaactccaggccaacaaggccacacttgtgtgcctgatctccgacttctaccctggggctgtgacagtggcttggaaggccgatggatctcctgtgaaagccggcgtggaaaccaccaagccatccaagcagagcaacaacaaatacgccgccagctcctacctgagcctgacacctgagcagtggaagtcccacagatcctacagctgccaagtgacccacgaaggcagcaccgtggaaaagacagtggcccctacagagtgcagcggcagagccgattgcggctttaccagcgagagctaccagcagggcgtgctgagcgcctactacatgtacttgttgctgctgctgaagtccgtggtgtacttcgccatcatcacatgctgcctgctgcggagaaccgccttctgctgcaacggcgagaagtctcgcgccaagagaagcggatctggcgtgaagcagaccctgaatttcgacctgctgaagctggctggcgacgtggaatccaacccaggccctactagtatggactggatttggcgcatccttttccttgtcggcgctgctaccggcgcgcattccttcgaagtccaacttgtggagtctggagggggcctggtgcagcccggcggctctctcagactgtcttgtgcggcaagcggctacaccttcacctcttactggatagaatgggtgaggcaggcacctggaaagggactggagtggattggagagattctgccaggagggggagatacaaattacaatgaaatcttcaaggggcgggccaccttttcagcggataccagcaagaatacagcttacctgcagatgaatagcctccgggcagaagataccgctgtttattattgcacgagacgggtgccaataagactggactattgggggcaagggactcttgtcaccgtcagttcaacgcgtgcctctacaaagggaccctccgtgtttcctctggctcccagcagcaagtctacaagcggaggaacagccgctctgggctgcctggtcaaggattactttcccgagcctgtgaccgtgtcctggaatagcggagcactgacaagcggcgtgcacacctttccagccgtgctgcaaagcagcggcctgtactctctgagcagcgtggtcacagtgcctagctctagcctgggcacccagacctacatctgcaatgtgaaccacaagcctagcaacaccaaggtggacaagagagtggaacccaagagctgtatccccgaggacacattcttcccaagccccgagagcagctgcgacgtgaagctggtggaaaagagcttcgagacagacaccaacctgaacttccagaacctgagcgtgatcggcctgcggatgctgttcgccaaaaccgtggccgtgaacttcctgctgaccgccaagctgttcttcctc

SEQ ID NO: 6357 - DNA, 1887 bp, synthetic construct
  source 1..1887: mol_type = other DNA
atggccttaccagtgaccgccttgctcctgccgctggccttgctgctccacgccgccaggccggacatccagttgacccagtcccccagctcactcagcgccagtgtgggggaccgggtgaccattacctgtaaagccagtcagagtgtggactatgagggggatagcttcctgaattggtatcagcagaagcctggcaaagccccaaagctgctgatctacgctgcatctaatctggagtcaggcgtgccttctaggttctccggtagtgggtctgggaccgatttcacattgaccatttcatccctccaacccgaggatttcgctacatattactgtcagcagtccaatgaggaccctctcacctttggccagggcaccaaagttgaaattaagagactcgagggacagcctaaggccaatcctaccgtgacactgttccctccaagcagcgaagaactccaggccaacaaggccacacttgtgtgcctgatctccgacttctaccctggggctgtgacagtggcttggaaggccgatggatctcctgtgaaagccggcgtggaaaccaccaagccatccaagcagagcaacaacaaatacgccgccagctcctacctgagcctgacacctgagcagtggaagtcccacagatcctacagctgccaagtgacccacgaaggcagcaccgtggaaaagacagtggcccctacagagtgcagcggcagagccgattgcggctttaccagcgagagctaccagcagggcgtgctgagcgcctactacatgtacttgttgctgctgctgaagtccgtggtgtacttcgccatcatcacatgctgcctgctgcggagaaccgccttctgctgcaacggcgagaagtctcgcgccaagagaagcggatctggcgtgaagcagaccctgaatttcgacctgctgaagctggctggcgacgtggaatccaacccaggccctactagtatggactggatttggcgcatccttttccttgtcggcgctgctaccggcgcgcattccttcgaagtccaacttgtggagtctggagggggcctggtgcagcccggcggctctctcagactgtcttgtgcggcaagcggctacaccttcacctcttactggatagaatgggtgaggcaggcacctggaaagggactggagtggattggagagattctgccaggagggggagatacaaattacaatgaaatcttcaaggggcgggccaccttttcagcggataccagcaagaatacagcttacctgcagatgaatagcctccgggcagaagataccgctgtttattattgcacgagacgggtgccaataagactggactattgggggcaagggactcttgtcaccgtcagttcaacgcgtgcctctacaaagggaccctccgtgtttcctctggctcccagcagcaagtctacaagcggaggaacagccgctctgggctgcctggtcaaggattactttcccgagcctgtgaccgtgtcctggaatagcggagcactgacaagcggcgtgcacacctttccagccgtgctgcaaagcagcggcctgtactctctgagcagcgtggtcacagtgcctagctctagcctgggcacccagacctacatctgcaatgtgaaccacaagcctagcaacaccaaggtggacaagagagtggaacccaagagctgtatccccgaggacacattcttcccaagccccgagagcagctgcgacgtgaagctggtggaaaagagcttcgagacagacaccaacctgaacttccagaacctgagcgtgatcggcctgcggatgctgttcgccaaaaccgtggccgtgaacttcctgctgaccgccaagctgttcttcctc

SEQ ID NO: 6358 - DNA, 1887 bp, synthetic construct
  source 1..1887: mol_type = other DNA
atggccttaccagtgaccgccttgctcctgccgctggccttgctgctccacgccgccaggccggacatcgtgatgacacagagccctgatagcctggccgtgtctctgggagagagagccaccattaactgcaaggccagccagagcgtggactacgacggcgacagcttcctgaactggtatcagcagaagcccggccagcctcctaagctgctgatctacgccgccagcaatctggaaagcggcgtgccaagcagattttccggctctggcagcggcaccgatttcaccctgacaatatccagcctccagcctgaggacgtggccgtgtactactgccagcagagcaacgacgaccctctgacctttggacagggcaccaaggtggaaatcaaactcgagggacagcctaaggccaatcctaccgtgacactgttccctccaagcagcgaagaactccaggccaacaaggccacacttgtgtgcctgatctccgacttctaccctggggctgtgacagtggcttggaaggccgatggatctcctgtgaaagccggcgtggaaaccaccaagccatccaagcagagcaacaacaaatacgccgccagctcctacctgagcctgacacctgagcagtggaagtcccacagatcctacagctgccaagtgacccacgaaggcagcaccgtggaaaagacagtggcccctacagagtgcagcggcagagccgattgcggctttaccagcgagagctaccagcagggcgtgctgagcgcctactacatgtacttgttgctgctgctgaagtccgtggtgtacttcgccatcatcacatgctgcctgctgcggagaaccgccttctgctgcaacggcgagaagtctcgcgccaagagaagcggatctggcgtgaagcagaccctgaatttcgacctgctgaagctggctggcgacgtggaatccaacccaggccctactagtatggactggatttggcgcatccttttccttgtcggcgctgctaccggcgcgcattccttcgaacaagttcagctggttcagagcggagccgaagtgaagaaacctggggcctctgtgaaggtgtcctgcaaagccagcggctacacctttaccagctactggatcaactgggtccgacaggcccctggacaaggactggaatggatgggacagatccttccaggcggaggggacaccaactacaacggcaagttcaagggcagagtgaccatcaccgccgacaccagcacaagcaccgcctacatggaactgagcagcctgagaagcgaggacaccgccgtgtattattgcaccagacgggtgcccatccggctggattattggggacagggaaccctggtcaccgtgtctagtacgcgtgcctctacaaagggaccctccgtgtttcctctggctcccagcagcaagtctacaagcggaggaacagccgctctgggctgcctggtcaaggattactttcccgagcctgtgaccgtgtcctggaatagcggagcactgacaagcggcgtgcacacctttccagccgtgctgcaaagcagcggcctgtactctctgagcagcgtggtcacagtgcctagctctagcctgggcacccagacctacatctgcaatgtgaaccacaagcctagcaacaccaaggtggacaagagagtggaacccaagagctgtatccccgaggacacattcttcccaagccccgagagcagctgcgacgtgaagctggtggaaaagagcttcgagacagacaccaacctgaacttccagaacctgagcgtgatcggcctgcggatgctgttcgccaaaaccgtggccgtgaacttcctgctgaccgccaagctgttcttcctc

SEQ ID NO: 6359 - DNA, 1884 bp, synthetic construct
  source 1..1884: mol_type = other DNA
atggccttaccagtgaccgccttgctcctgccgctggccttgctgctccacgccgccaggccggacatcgtgatgacacagagccctgatagcctggccgtgtctctgggagagagagccaccattaactgcaaggccagccagagcgtggactacgacggcgacagcttcctgaactggtatcagcagaagcccggccagcctcctaagctgctgatctacgccgccagcaatctggaaagcggcgtgccaagcagattttccggctctggcagcggcaccgatttcaccctgacaatatccagcctccagcctgaggacgtggccgtgtactactgccagcagagcaacgacgaccctctgacctttggacagggcaccaaggtggaaatcaaactcgagggacagcctaaggccaatcctaccgtgacactgttccctccaagcagcgaagaactccaggccaacaaggccacacttgtgtgcctgatctccgacttctaccctggggctgtgacagtggcttggaaggccgatggatctcctgtgaaagccggcgtggaaaccaccaagccatccaagcagagcaacaacaaatacgccgccagctcctacctgagcctgacacctgagcagtggaagtcccacagatcctacagctgccaagtgacccacgaaggcagcaccgtggaaaagacagtggcccctacagagtgcagcggcagagccgattgcggctttaccagcgagagctaccagcagggcgtgctgagcgcctactacatgtacttgttgctgctgctgaagtccgtggtgtacttcgccatcatcacatgctgcctgctgcggagaaccgccttctgctgcaacggcgagaagtctcgcgccaagagaagcggatctggcgtgaagcagaccctgaatttcgacctgctgaagctggctggcgacgtggaatccaacccaggccctactagtatggactggatttggcgcatccttttccttgtcggcgctgctaccggcgcgcattccttcgaagtccaacttgtggagtctggagggggcctggtgcagcccggcggctctctcagactgtcttgtgcggcaagcggctacaccttcacctcttactggatagaatgggtgaggcaggcacctggaaagggactggagtggattggagagattctgccaggagggggagatacaaattacaatgaaatcttcaaggggcgggccaccttttcagcggataccagcaagaatacagcttacctgcagatgaatagcctccgggcagaagataccgctgtttattattgcacgagacgggtgccaataagactggactattgggggcaagggactcttgtcaccgtcagttcaacgcgtgcctctacaaagggaccctccgtgtttcctctggctcccagcagcaagtctacaagcggaggaacagccgctctgggctgcctggtcaaggattactttcccgagcctgtgaccgtgtcctggaatagcggagcactgacaagcggcgtgcacacctttccagccgtgctgcaaagcagcggcctgtactctctgagcagcgtggtcacagtgcctagctctagcctgggcacccagacctacatctgcaatgtgaaccacaagcctagcaacaccaaggtggacaagagagtggaacccaagagctgtatccccgaggacacattcttcccaagccccgagagcagctgcgacgtgaagctggtggaaaagagcttcgagacagacaccaacctgaacttccagaacctgagcgtgatcggcctgcggatgctgttcgccaaaaccgtggccgtgaacttcctgctgaccgccaagctgttcttcctc

SEQ ID NO: 6360 - DNA, 1884 bp, synthetic construct
  source 1..1884: mol_type = other DNA
atggccttaccagtgaccgccttgctcctgccgctggccttgctgctccacgccgccaggccggacatcgtgatgacacagagccctgatagcctggccgtgtctctgggagagagagccaccattaactgcaaggccagccagagcgtggactacgacggcgacagcttcctgaactggtatcagcagaagcccggccagcctcctaagctgctgatctacgccgccagcaatctggaaagcggcgtgccaagcagattttccggctctggcagcggcaccgatttcaccctgacaatatccagcctccagcctgaggacgtggccgtgtactactgccagcagagcaacgacgaccctctgacctttggacagggcaccaaggtggaaatcaaactcgagggacagcctaaggccaatcctaccgtgacactgttccctccaagcagcgaagaactccaggccaacaaggccacacttgtgtgcctgatctccgacttctaccctggggctgtgacagtggcttggaaggccgatggatctcctgtgaaagccggcgtggaaaccaccaagccatccaagcagagcaacaacaaatacgccgccagctcctacctgagcctgacacctgagcagtggaagtcccacagatcctacagctgccaagtgacccacgaaggcagcaccgtggaaaagacagtggcccctacagagtgcagcggcagagccgattgcggctttaccagcgagagctaccagcagggcgtgctgagcgcctactacatgtacttgttgctgctgctgaagtccgtggtgtacttcgccatcatcacatgctgcctgctgcggagaaccgccttctgctgcaacggcgagaagtctcgcgccaagagaagcggatctggcgtgaagcagaccctgaatttcgacctgctgaagctggctggcgacgtggaatccaacccaggccctactagtatggactggatttggcgcatccttttccttgtcggcgctgctaccggcgcgcattccttcgaagtccaacttgtggagtctggagggggcctggtgcagcccggcggctctctcagactgtcttgtgcggcaagcggctacaccttcagctcttactggatagaatgggtgaggcaggcacctggaaagggactggagtggattggagagattctgccaggagggggagatacaaattacaatgaaatcttcaaggggcgggccaccttttcagcggataccagcaagaatacagcttacctgcagatgaatagcctccgggcagaagataccgctgtttattattgcacgagacgggtgccaataagactggactattgggggcaagggactcttgtcaccgtcagttcaacgcgtgcctctacaaagggaccctccgtgtttcctctggctcccagcagcaagtctacaagcggaggaacagccgctctgggctgcctggtcaaggattactttcccgagcctgtgaccgtgtcctggaatagcggagcactgacaagcggcgtgcacacctttccagccgtgctgcaaagcagcggcctgtactctctgagcagcgtggtcacagtgcctagctctagcctgggcacccagacctacatctgcaatgtgaaccacaagcctagcaacaccaaggtggacaagagagtggaacccaagagctgtatccccgaggacacattcttcccaagccccgagagcagctgcgacgtgaagctggtggaaaagagcttcgagacagacaccaacctgaacttccagaacctgagcgtgatcggcctgcggatgctgttcgccaaaaccgtggccgtgaacttcctgctgaccgccaagctgttcttcctc

SEQ ID NO: 6361 - DNA, 1911 bp, synthetic construct
  source 1..1911: mol_type = other DNA
atggccttaccagtgaccgccttgctcctgccgctggccttgctgctccacgccgccaggccggacatccagttgacccagtcccccagctcactcagcgccagtgtgggggaccgggtgaccattacctgtaaagccagtcagagtgtggactatgacggggatagcttcctgaattggtatcagcagaagcctggcaaagccccaaagctgctgatctacgctgcatctaatctggagtcaggcgtgccttccaggttctccggtagtgggtctgggaccgatttcacattgaccatttcatccctccaacccgaggatttcgctacatattactgtcagcagtccaatgaggaccctctcacctttggccagggcaccaaagttgaaattaagagactcgagggacagcctaaggccaatcctaccgtgacactgttccctccaagcagcgaagaactccaggccaacaaggccacacttgtgtgcctgatctccgacttctaccctggggctgtgacagtggcttggaaggccgatggatctcctgtgaaagccggcgtggaaaccaccaagccatccaagcagagcaacaacaaatacgccgccagctcctacctgagcctgacacctgagcagtggaagtcccacagatcctacagctgccaagtgacccacgaaggcagcaccgtggaaaagacagtggcccctacagagtgcagcggcagagccgattgcggctttaccagcgagagctaccagcagggcgtgctgagcgcctactacatgtacttgttgctgctgctgaagtccgtggtgtacttcgccatcatcacatgctgcctgctgcggagaaccgccttctgctgcaacggcgagaagtctcgcgccaagagaagcggatctggcgtgaagcagaccctgaatttcgacctgctgaagctggctggcgacgtggaatccaacccaggccctactagtatggactggatttggcgcatccttttccttgtcggcgctgctaccggcgcgcattccttcgaagtccaacttgtggagtctggagggggcctggtgcagcccggcggctctctcagactgtcttgtgcggcaagcggctacaccttcacctcttactggatagaatgggtgaggcaggcacctggaaagggactggagtggattggagagattctgccaggagggggagatacaaattacaatgaaatcttcaaggggcgggccaccttttcagcggataccagcaagaatacagcttacctgcagatgaatagcctccgggcagaagataccgctgtttattattgcacgagacgggtgccaataagactggactattgggggcaagggactcttgtcaccgtcagttcaacgcgtgcctctacaaagggaccctccgtgtttcctctggctcccagcagcaagtctacaagcggaggaacagccgctctgggctgcctggtcaaggattactttcccgagcctgtgaccgtgtcctggaatagcggagcactgacaagcggcgtgcacacctttccagccgtgctgcaaagcagcggcctgtactctctgagcagcgtggtcacagtgcctagctctagcctgggcacccagacctacatctgcaatgtgaaccacaagcctagcaacaccaaggtggacaagagagtggaacccaagagctgtgaagtgaaaaccgactccaccgaccacgtgaagcccaaagagacagagaacaccaagcagcccagcaagagctgccacaagcccaaggccatcgtgcacaccgagaaagtgaacatgatgagcctgaccgtgctgggcttcagaatcctgctgctgaaagtggccggctttaacctgctgatgaccctgcggctgtggtccagc

SEQ ID NO: 6362 - DNA, 1911 bp, synthetic construct
  source 1..1911: mol_type = other DNA
atggccttaccagtgaccgccttgctcctgccgctggccttgctgctccacgccgccaggccggacatccagttgacccagtcccccagctcactcagcgccagtgtgggggaccgggtgaccattacctgtaaagccagtcagagtgtggactatgagggggatagcttcctgaattggtatcagcagaagcctggcaaagccccaaagctgctgatctacgctgcatctaatctggagtcaggcgtgccttctaggttctccggtagtgggtctgggaccgatttcacattgaccatttcatccctccaacccgaggatttcgctacatattactgtcagcagtccaatgaggaccctctcacctttggccagggcaccaaagttgaaattaagagactcgagggacagcctaaggccaatcctaccgtgacactgttccctccaagcagcgaagaactccaggccaacaaggccacacttgtgtgcctgatctccgacttctaccctggggctgtgacagtggcttggaaggccgatggatctcctgtgaaagccggcgtggaaaccaccaagccatccaagcagagcaacaacaaatacgccgccagctcctacctgagcctgacacctgagcagtggaagtcccacagatcctacagctgccaagtgacccacgaaggcagcaccgtggaaaagacagtggcccctacagagtgcagcggcagagccgattgcggctttaccagcgagagctaccagcagggcgtgctgagcgcctactacatgtacttgttgctgctgctgaagtccgtggtgtacttcgccatcatcacatgctgcctgctgcggagaaccgccttctgctgcaacggcgagaagtctcgcgccaagagaagcggatctggcgtgaagcagaccctgaatttcgacctgctgaagctggctggcgacgtggaatccaacccaggccctactagtatggactggatttggcgcatccttttccttgtcggcgctgctaccggcgcgcattccttcgaagtccaacttgtggagtctggagggggcctggtgcagcccggcggctctctcagactgtcttgtgcggcaagcggctacaccttcacctcttactggatagaatgggtgaggcaggcacctggaaagggactggagtggattggagagattctgccaggagggggagatacaaattacaatgaaatcttcaaggggcgggccaccttttcagcggataccagcaagaatacagcttacctgcagatgaatagcctccgggcagaagataccgctgtttattattgcacgagacgggtgccaataagactggactattgggggcaagggactcttgtcaccgtcagttcaacgcgtgcctctacaaagggaccctccgtgtttcctctggctcccagcagcaagtctacaagcggaggaacagccgctctgggctgcctggtcaaggattactttcccgagcctgtgaccgtgtcctggaatagcggagcactgacaagcggcgtgcacacctttccagccgtgctgcaaagcagcggcctgtactctctgagcagcgtggtcacagtgcctagctctagcctgggcacccagacctacatctgcaatgtgaaccacaagcctagcaacaccaaggtggacaagagagtggaacccaagagctgtgaagtgaaaaccgactccaccgaccacgtgaagcccaaagagacagagaacaccaagcagcccagcaagagctgccacaagcccaaggccatcgtgcacaccgagaaagtgaacatgatgagcctgaccgtgctgggcttcagaatcctgctgctgaaagtggccggctttaacctgctgatgaccctgcggctgtggtccagc

SEQ ID NO: 6363 - DNA, 1911 bp, synthetic construct
  source 1..1911: mol_type = other DNA
atggccttaccagtgaccgccttgctcctgccgctggccttgctgctccacgccgccaggccggacatcgtgatgacacagagccctgatagcctggccgtgtctctgggagagagagccaccattaactgcaaggccagccagagcgtggactacgacggcgacagcttcctgaactggtatcagcagaagcccggccagcctcctaagctgctgatctacgccgccagcaatctggaaagcggcgtgccaagcagattttccggctctggcagcggcaccgatttcaccctgacaatatccagcctccagcctgaggacgtggccgtgtactactgccagcagagcaacgacgaccctctgacctttggacagggcaccaaggtggaaatcaaactcgagggacagcctaaggccaatcctaccgtgacactgttccctccaagcagcgaagaactccaggccaacaaggccacacttgtgtgcctgatctccgacttctaccctggggctgtgacagtggcttggaaggccgatggatctcctgtgaaagccggcgtggaaaccaccaagccatccaagcagagcaacaacaaatacgccgccagctcctacctgagcctgacacctgagcagtggaagtcccacagatcctacagctgccaagtgacccacgaaggcagcaccgtggaaaagacagtggcccctacagagtgcagcggcagagccgattgcggctttaccagcgagagctaccagcagggcgtgctgagcgcctactacatgtacttgttgctgctgctgaagtccgtggtgtacttcgccatcatcacatgctgcctgctgcggagaaccgccttctgctgcaacggcgagaagtctcgcgccaagagaagcggatctggcgtgaagcagaccctgaatttcgacctgctgaagctggctggcgacgtggaatccaacccaggccctactagtatggactggatttggcgcatccttttccttgtcggcgctgctaccggcgcgcattccttcgaacaagttcagctggttcagagcggagccgaagtgaagaaacctggggcctctgtgaaggtgtcctgcaaagccagcggctacacctttaccagctactggatcaactgggtccgacaggcccctggacaaggactggaatggatgggacagatccttccaggcggaggggacaccaactacaacggcaagttcaagggcagagtgaccatcaccgccgacaccagcacaagcaccgcctacatggaactgagcagcctgagaagcgaggacaccgccgtgtattattgcaccagacgggtgcccatccggctggattattggggacagggaaccctggtcaccgtgtctagtacgcgtgcctctacaaagggaccctccgtgtttcctctggctcccagcagcaagtctacaagcggaggaacagccgctctgggctgcctggtcaaggattactttcccgagcctgtgaccgtgtcctggaatagcggagcactgacaagcggcgtgcacacctttccagccgtgctgcaaagcagcggcctgtactctctgagcagcgtggtcacagtgcctagctctagcctgggcacccagacctacatctgcaatgtgaaccacaagcctagcaacaccaaggtggacaagagagtggaacccaagagctgtgaagtgaaaaccgactccaccgaccacgtgaagcccaaagagacagagaacaccaagcagcccagcaagagctgccacaagcccaaggccatcgtgcacaccgagaaagtgaacatgatgagcctgaccgtgctgggcttcagaatcctgctgctgaaagtggccggctttaacctgctgatgaccctgcggctgtggtccagc

SEQ ID NO: 6364 - DNA, 1908 bp, synthetic construct
  source 1..1908: mol_type = other DNA
atggccttaccagtgaccgccttgctcctgccgctggccttgctgctccacgccgccaggccggacatcgtgatgacacagagccctgatagcctggccgtgtctctgggagagagagccaccattaactgcaaggccagccagagcgtggactacgacggcgacagcttcctgaactggtatcagcagaagcccggccagcctcctaagctgctgatctacgccgccagcaatctggaaagcggcgtgccaagcagattttccggctctggcagcggcaccgatttcaccctgacaatatccagcctccagcctgaggacgtggccgtgtactactgccagcagagcaacgacgaccctctgacctttggacagggcaccaaggtggaaatcaaactcgagggacagcctaaggccaatcctaccgtgacactgttccctccaagcagcgaagaactccaggccaacaaggccacacttgtgtgcctgatctccgacttctaccctggggctgtgacagtggcttggaaggccgatggatctcctgtgaaagccggcgtggaaaccaccaagccatccaagcagagcaacaacaaatacgccgccagctcctacctgagcctgacacctgagcagtggaagtcccacagatcctacagctgccaagtgacccacgaaggcagcaccgtggaaaagacagtggcccctacagagtgcagcggcagagccgattgcggctttaccagcgagagctaccagcagggcgtgctgagcgcctactacatgtacttgttgctgctgctgaagtccgtggtgtacttcgccatcatcacatgctgcctgctgcggagaaccgccttctgctgcaacggcgagaagtctcgcgccaagagaagcggatctggcgtgaagcagaccctgaatttcgacctgctgaagctggctggcgacgtggaatccaacccaggccctactagtatggactggatttggcgcatccttttccttgtcggcgctgctaccggcgcgcattccttcgaagtccaacttgtggagtctggagggggcctggtgcagcccggcggctctctcagactgtcttgtgcggcaagcggctacaccttcacctcttactggatagaatgggtgaggcaggcacctggaaagggactggagtggattggagagattctgccaggagggggagatacaaattacaatgaaatcttcaaggggcgggccaccttttcagcggataccagcaagaatacagcttacctgcagatgaatagcctccgggcagaagataccgctgtttattattgcacgagacgggtgccaataagactggactattgggggcaagggactcttgtcaccgtcagttcaacgcgtgcctctacaaagggaccctccgtgtttcctctggctcccagcagcaagtctacaagcggaggaacagccgctctgggctgcctggtcaaggattactttcccgagcctgtgaccgtgtcctggaatagcggagcactgacaagcggcgtgcacacctttccagccgtgctgcaaagcagcggcctgtactctctgagcagcgtggtcacagtgcctagctctagcctgggcacccagacctacatctgcaatgtgaaccacaagcctagcaacaccaaggtggacaagagagtggaacccaagagctgtgaagtgaaaaccgactccaccgaccacgtgaagcccaaagagacagagaacaccaagcagcccagcaagagctgccacaagcccaaggccatcgtgcacaccgagaaagtgaacatgatgagcctgaccgtgctgggcttcagaatcctgctgctgaaagtggccggctttaacctgctgatgaccctgcggctgtggtccagc

SEQ ID NO: 6365 - DNA, 1908 bp, synthetic construct
  source 1..1908: mol_type = other DNA
atggccttaccagtgaccgccttgctcctgccgctggccttgctgctccacgccgccaggccggacatcgtgatgacacagagccctgatagcctggccgtgtctctgggagagagagccaccattaactgcaaggccagccagagcgtggactacgacggcgacagcttcctgaactggtatcagcagaagcccggccagcctcctaagctgctgatctacgccgccagcaatctggaaagcggcgtgccaagcagattttccggctctggcagcggcaccgatttcaccctgacaatatccagcctccagcctgaggacgtggccgtgtactactgccagcagagcaacgacgaccctctgacctttggacagggcaccaaggtggaaatcaaactcgagggacagcctaaggccaatcctaccgtgacactgttccctccaagcagcgaagaactccaggccaacaaggccacacttgtgtgcctgatctccgacttctaccctggggctgtgacagtggcttggaaggccgatggatctcctgtgaaagccggcgtggaaaccaccaagccatccaagcagagcaacaacaaatacgccgccagctcctacctgagcctgacacctgagcagtggaagtcccacagatcctacagctgccaagtgacccacgaaggcagcaccgtggaaaagacagtggcccctacagagtgcagcggcagagccgattgcggctttaccagcgagagctaccagcagggcgtgctgagcgcctactacatgtacttgttgctgctgctgaagtccgtggtgtacttcgccatcatcacatgctgcctgctgcggagaaccgccttctgctgcaacggcgagaagtctcgcgccaagagaagcggatctggcgtgaagcagaccctgaatttcgacctgctgaagctggctggcgacgtggaatccaacccaggccctactagtatggactggatttggcgcatccttttccttgtcggcgctgctaccggcgcgcattccttcgaagtccaacttgtggagtctggagggggcctggtgcagcccggcggctctctcagactgtcttgtgcggcaagcggctacaccttcagctcttactggatagaatgggtgaggcaggcacctggaaagggactggagtggattggagagattctgccaggagggggagatacaaattacaatgaaatcttcaaggggcgggccaccttttcagcggataccagcaagaatacagcttacctgcagatgaatagcctccgggcagaagataccgctgtttattattgcacgagacgggtgccaataagactggactattgggggcaagggactcttgtcaccgtcagttcaacgcgtgcctctacaaagggaccctccgtgtttcctctggctcccagcagcaagtctacaagcggaggaacagccgctctgggctgcctggtcaaggattactttcccgagcctgtgaccgtgtcctggaatagcggagcactgacaagcggcgtgcacacctttccagccgtgctgcaaagcagcggcctgtactctctgagcagcgtggtcacagtgcctagctctagcctgggcacccagacctacatctgcaatgtgaaccacaagcctagcaacaccaaggtggacaagagagtggaacccaagagctgtgaagtgaaaaccgactccaccgaccacgtgaagcccaaagagacagagaacaccaagcagcccagcaagagctgccacaagcccaaggccatcgtgcacaccgagaaagtgaacatgatgagcctgaccgtgctgggcttcagaatcctgctgctgaaagtggccggctttaacctgctgatgaccctgcggctgtggtccagc

SEQ ID NO: 6366 - DNA, 13 bp, synthetic construct
  source 1..13: mol_type = other DNA
ggggggggggggg

SEQ ID NO: 6367 - DNA, 1473 bp, synthetic construct; identical to SEQ ID NO: 4751
  source 1..1473: mol_type = other DNA

SEQ ID NO: 6368 - DNA, 1863 bp, synthetic construct
  source 1..1863: mol_type = other DNA
atggccttaccagtgaccgccttgctcctgccgctggccttgctgctccacgccgccaggccggacatcgtgatgacacagagccctgatagcctggccgtgtctctgggagagagagccaccattaactgcaaggccagccagagcgtggactacgacggcgacagcttcctgaactggtatcagcagaagcccggccagcctcctaagctgctgatctacgccgccagcaatctggaaagcggcgtgccaagcagattttccggctctggcagcggcaccgatttcaccctgacaatatccagcctccagcctgaggacgtggccgtgtactactgccagcagagcaacgacgaccctctgacctttggacagggcaccaaggtggaaatcaaactcgaggacctgaagaacgtgttcccacctgaggtggccgtgttcgagcctagcgaggccgagatcagccacacccagaaagccaccctcgtgtgcctggctaccggcttctaccccgaccatgtggaactgtcttggtgggtcaacggcaaagaggtgcacagcggcgtgtgtaccgacccccagccactgaaagaacagcccgccctgaacgacagccggtactgcctgagcagcagactgagagtgtccgccaccttctggcagaacccccggaaccacttcagatgccaggtgcagttctacggcctgagcgagaacgacgagtggacccaggacagagccaagcccgtgacccagatcgtgtctgccgaagcctggggcagagccgattgcggctttaccagcgagagctaccagcagggcgtgctgagcgccaccatcctgtacgagatcctgctgggcaaggccaccctgtacgccgtgctggtgtctgccctggtgctgatggctatggtcaagcggaaggacagccggggaagggccaagcgatctggatctggagcaacaaacttctcactactcaaacaagcaggtgacgtggaggagaatcccgggcctactagtatggactggatttggcgcatccttttccttgtcggcgctgctaccggcgcgcattccttcgaagtccaacttgtggagtctggagggggcctggtgcagcccggcggctctctcagactgtcttgtgcggcaagcggctacaccttcacctcttactggatagaatgggtgaggcaggcacctggaaagggactggagtggattggagagattctgccaggagggggagatacaaattacaatgaaatcttcaaggggcgggccaccttttcagcggataccagcaagaatacagcttacctgcagatgaatagcctccgggcagaagataccgctgtttattattgcacgagacgggtgccaataagactggactattgggggcaagggactcttgtcaccgtcagttcaacgcgtatccagaaccctgatcctgccgtgtaccagctgcgggatagcaagagcagcgacaagagcgtgtgtctgttcaccgacttcgacagccagaccaacgtgtcccagagcaaggactccgacgtgtacatcaccgataagtgcgtgctggacatgcggagcatggacttcaagagcaactccgccgtggcctggtccaacaagtccgatttcgcctgcgccaacgccttcaacaacagcattatccccgaggacacattcttcccaagccccgagagcagctgcgacgtgaagctggtggaaaagagcttcgagacagacaccaacctgaacttccagaacctgagcgtgatcggcttcagaatcctgctgctgaaagtggccggctttaacctgctgatgaccctgcggctgtggtccagctaa

SEQ ID NO: 6369 - DNA, 1869 bp, synthetic construct
  source 1..1869: mol_type = other DNA
atggccttaccagtgaccgccttgctcctgccgctggccttgctgctccacgccgccaggccggacatccagttgacccagtcccccagctcactcagcgccagtgtgggggaccgggtgaccattacctgtaaagccagtcagagtgtggactatgacggggatagcttcctgaattggtatcagcagaagcctggcaaagccccaaagctgctgatctacgctgcatctaatctggagtcaggcgtgccttccaggttctccggtagtgggtctgggaccgatttcacattgaccatttcatccctccaacccgaggatttcgctacatattactgtcagcagtccaatgaggaccctctcacctttggccagggcaccaaagttgaaattaagagactcgaggacctgaagaacgtgttcccacctgaggtggccgtgttcgagcctagcgaggccgagatcagccacacccagaaagccaccctcgtgtgcctggctaccggcttctaccccgaccatgtggaactgtcttggtgggtcaacggcaaagaggtgcacagcggcgtgtgtaccgacccccagccactgaaagaacagcccgccctgaacgacagccggtactgcctgagcagcagactgagagtgtccgccaccttctggcagaacccccggaaccacttcagatgccaggtgcagttctacggcctgagcgagaacgacgagtggacccaggacagagccaagcccgtgacccagatcgtgtctgccgaagcctggggcagagccgattgcggctttaccagcgagagctaccagcagggcgtgctgagcgccaccatcctgtacttgttgctgctgctgaagtccgtggtgtacttcgccatcatcacatgctgcctgctgcggagaaccgccttctgctgcaacggcgagaagtctagggccaagcgatctggatctggagcaacaaacttctcactactcaaacaagcaggtgacgtggaggagaatcccgggcctactagtatggactggatttggcgcatccttttccttgtcggcgctgctaccggcgcgcattccttcgaagtccaacttgtggagtctggagggggcctggtgcagcccggcggctctctcagactgtcttgtgcggcaagcggctacaccttcacctcttactggatagaatgggtgaggcaggcacctggaaagggactggagtggattggagagattctgccaggagggggagatacaaattacaatgaaatcttcaaggggcgggccaccttttcagcggataccagcaagaatacagcttacctgcagatgaatagcctccgggcagaagataccgctgtttattattgcacgagacgggtgccaataagactggactattgggggcaagggactcttgtcaccgtcagttcaacgcgtatccagaaccctgatcctgccgtgtaccagctgcgggatagcaagagcagcgacaagagcgtgtgtctgttcaccgacttcgacagccagaccaacgtgtcccagagcaaggactccgacgtgtacatcaccgataagtgcgtgctggacatgcggagcatggacttcaagagcaactccgccgtggcctggtccaacaagtccgatttcgcctgcgccaacgccttcaacaacagcattatccccgaggacacattcttcccaagccccgagagcagctgcgacgtgaagctggtggaaaagagcttcgagacagacaccaacctgaacttccagaacctgagcgtgatcggcttcagaatcctgctgctgaaagtggccggctttaacctgctgatgaccctgcggctgtggtccagctaa

SEQ ID NO: 6370 - DNA, 2217 bp, synthetic construct; identical to SEQ ID NO: 4748
  source 1..2217: mol_type = other DNA

SEQ ID NO: 6371 - DNA, 1869 bp, synthetic construct; identical to SEQ ID NO: 4750
  source 1..1869: mol_type = other DNA

SEQ ID NO: 6372 - DNA, 1872 bp, synthetic construct
  source 1..1872: mol_type = other DNA
atggccttaccagtgaccgccttgctcctgccgctggccttgctgctccacgccgccaggccggacatccagttgacccagtcccccagctcactcagcgccagtgtgggggaccgggtgaccattacctgtaaagccagtcagagtgtggactatgagggggatagcttcctgaattggtatcagcagaagcctggcaaagccccaaagctgctgatctacgctgcatctaatctggagtcaggcgtgccttctaggttctccggtagtgggtctgggaccgatttcacattgaccatttcatccctccaacccgaggatttcgctacatattactgtcagcagtccaatgaggaccctctcacctttggccagggcaccaaagttgaaattaagagactcgaggacctgaagaacgtgttcccacctgaggtggccgtgttcgagcctagcgaggccgagatcagccacacccagaaagccaccctcgtgtgcctggctaccggcttctaccccgaccatgtggaactgtcttggtgggtcaacggcaaagaggtgcacagcggcgtgtgtaccgacccccagccactgaaagaacagcccgccctgaacgacagccggtactgcctgagcagcagactgagagtgtccgccaccttctggcagaacccccggaaccacttcagatgccaggtgcagttctacggcctgagcgagaacgacgagtggacccaggacagagccaagcccgtgacccagatcgtgtctgccgaagcctggggcagagccgattgcggctttaccagcgagagctaccagcagggcgtgctgagcgcctactacatgtacttgttgctgctgctgaagtccgtggtgtacttcgccatcatcacatgctgcctgctgcggagaaccgccttctgctgcaacggcgagaagtctagggccaagcgatctggatctggagcaacaaacttctcactactcaaacaagcaggtgacgtggaggagaatcccgggcctactagtatggactggatttggcgcatccttttccttgtcggcgctgctaccggcgcgcattccttcgaacaagttcagctggttcagagcggagccgaagtgaagaaacctggggcctctgtgaaggtgtcctgcaaagccagcggctacacctttaccagctactggatcaactgggtccgacaggcccctggacaaggactggaatggatgggacagatccttccaggcggaggggacaccaactacaacggcaagttcaagggcagagtgaccatcaccgccgacaccagcacaagcaccgcctacatggaactgagcagcctgagaagcgaggacaccgccgtgtattattgcaccagacgggtgcccatccggctggattattggggacagggaaccctggtcaccgtgtctagtacgcgtatccagaaccctgatcctgccgtgtaccagctgcgggatagcaagagcagcgacaagagcgtgtgtctgttcaccgacttcgacagccagaccaacgtgtcccagagcaaggactccgacgtgtacatcaccgataagtgcgtgctggacatgcggagcatggacttcaagagcaactccgccgtggcctggtccaacaagtccgatttcgcctgcgccaacgccttcaacaacagcattatccccgaggacacattcttcccaagccccgagagcagctgcgacgtgaagctggtggaaaagagcttcgagacagacaccaacctgaacttccagaacctgagcgtgatcggcttcagaatcctgctgctgaaagtggccggctttaacctgctgatgaccctgcggctgtggtccagctaa

SEQ ID NO: 6373 - DNA, 2145 bp, synthetic construct
  source 1..2145: mol_type = other DNA
atggccttaccagtgaccgccttgctcctgccgctggccttgctgctccacgccgccaggccggacatccagttgacccagtcccccagctcactcagcgccagtgtgggggaccgggtgaccattacctgtaaagccagtcagagtgtggactatgacggggatagcttcctgaattggtatcagcagaagcctggcaaagccccaaagctgctgatctacgctgcatctaatctggagtcaggcgtgccttccaggttctccggtagtgggtctgggaccgatttcacattgaccatttcatccctccaacccgaggatttcgctacatattactgtcagcagtccaatgaggaccctctcacctttggccagggcaccaaagttgaaattaagagactcgaggacctgaagaacgtgttcccacctgaggtggccgtgttcgagcctagcgaggccgagatcagccacacccagaaagccaccctcgtgtgcctggctaccggcttctaccccgaccatgtggaactgtcttggtgggtcaacggcaaagaggtgcacagcggcgtgtctaccgacccccagccactgaaagaacagcccgccctgaacgacagccggtactgcctgagcagcagactgagagtgtccgccaccttctggcagaacccccggaaccacttcagatgccaggtgcagttctacggcctgagcgagaacgacgagtggacccaggacagagccaagcccgtgacccagatcgtgtctgccgaagcctggggcagagccgattgcggatcccagagcttcggcctgctggaccccaagctgtgctacctgctggatggcatcctgttcatctacggcgtgatcctgaccgccctgttcctgagagtgaagttcagcagaagcgccgacgcccctgcctaccagcagggacagaaccaactgtacaacgagctgaacctgggcagacgggaagagtacgacgtgctggacaagcggagaggcagggaccctgagatgggcggaaagccccggagaaagaacccccaggaaggactgtataacgaactccagaaagacaagatggccgaagcctacagcgagatcggcatgaagggcgagcggagaagaggcaagggccacgatggcctgtaccagggcctgagcaccgccaccaaggacacctatgacgccctgcacatgcaggccctgcctccaagaagggccaagcgatctggatctggagcaacaaacttctcactactcaaacaagcaggtgacgtggaggagaatcccgggcctactagtatggactggatttggcgcatccttttccttgtcggcgctgctaccggcgcgcattccttcgaagtccaacttgtggagtctggagggggcctggtgcagcccggcggctctctcagactgtcttgtgcggcaagcggctacaccttcacctcttactggatagaatgggtgaggcaggcacctggaaagggactggagtggattggagagattctgccaggagggggagatacaaattacaatgaaatcttcaaggggcgggccaccttttcagcggataccagcaagaatacagcttacctgcagatgaatagcctccgggcagaagataccgctgtttattattgcacgagacgggtgccaataagactggactattgggggcaagggactcttgtcaccgtcagttcaacgcgtatccagaaccctgatcctgccgtgtaccagctgcgggatagcaagagcagcgacaagagcgtgtgtctgttcaccgacttcgacagccagaccaacgtgtcccagagcaaggactccgacgtgtacatcaccgataagaccgtgctggacatgcggagcatggacttcaagagcaactccgccgtggcctggtccaacaagtccgatttcgcctgcgccaacgccttcaacaacagcattatccccgaggacacattcttcccaagccccgagagcagctgcggtaccatcactcaaggtttggcagtgtcaaccatctcatcattctttccacctggctaccaagtgtccttctgcctggtcatggtgctgctgttcgccgtggataccggcctgtacttcagcgtcaagtaa

SEQ ID NO: 6374 - DNA, 2133 bp, synthetic construct
  source 1..2133: mol_type = other DNA
atggccttaccagtgaccgccttgctcctgccgctggccttgctgctccacgccgccaggccggacatcgtgatgacccagacccccctgaccctgagcgtgacaatcggacagcctgccagcatctcctgcaagagcagccagagcctgctggacagcgacggcaagacctacctgaactggctgctgcagaggccaggccagagccccgagagactgatctacctggtgtccaagctggactccggcgtgcccgatagattcacaggcagcggctccggcaccgacttcaccctgaagatcagccgggtggaagccgaggacctgggcgtgtactgttgttggcagggcacccacttcccttacaccttcggcggagggaccaaggtggaaatcaagctcgaggacctgaagaacgtgttcccacctgaggtggccgtgttcgagcctagcgaggccgagatcagccacacccagaaagccaccctcgtgtgcctggctaccggcttctaccccgaccatgtggaactgtcttggtgggtcaacggcaaagaggtgcacagcggcgtgtctaccgacccccagccactgaaagaacagcccgccctgaacgacagccggtactgcctgagcagcagactgagagtgtccgccaccttctggcagaacccccggaaccacttcagatgccaggtgcagttctacggcctgagcgagaacgacgagtggacccaggacagagccaagcccgtgacccagatcgtgtctgccgaagcctggggcagagccgattgcggatcccagagcttcggcctgctggaccccaagctgtgctacctgctggatggcatcctgttcatctacggcgtgatcctgaccgccctgttcctgagagtgaagttcagcagaagcgccgacgcccctgcctaccagcagggacagaaccaactgtacaacgagctgaacctgggcagacgggaagagtacgacgtgctggacaagcggagaggcagggaccctgagatgggcggaaagccccggagaaagaacccccaggaaggactgtataacgaactccagaaagacaagatggccgaagcctacagcgagatcggcatgaagggcgagcggagaagaggcaagggccacgatggcctgtaccagggcctgagcaccgccaccaaggacacctatgacgccctgcacatgcaggccctgcctccaagaagggccaagcgatctggatctggagcaacaaacttctcactactcaaacaagcaggtgacgtggaggagaatcccgggcctactagtatggactggatttggcgcatccttttccttgtcggcgctgctaccggcgcgcattccttcgaacaggtgcaactgcagcagcctggcgctgaacttgtgcggccaggcgcctctgtgaagctgagctgtaaagccagcggctacaccttcaccagctactggatgaactgggtcaagcagcgcccaggccagggcctggaatggatcggaatgatcgaccccagcgacagcgagacacactacaaccacatcttcaaggacaaggccaccctgaccgtggacaagtccagcagcacagcctacctgcaactgtccagcctgaccagcgaggacagcgccgtgtactactgcgcccggaacctgtatctgtggggccagggaacaagcgtgaccgtgtctagcacgcgtatccagaaccctgatcctgccgtgtaccagctgcgggatagcaagagcagcgacaagagcgtgtgtctgttcaccgacttcgacagccagaccaacgtgtcccagagcaaggactccgacgtgtacatcaccgataagaccgtgctggacatgcggagcatggacttcaagagcaactccgccgtggcctggtccaacaagtccgatttcgcctgcgccaacgccttcaacaacagcattatccccgaggacacattcttcccaagccccgagagcagctgcggtaccatcactcaaggtttggcagtgtcaaccatctcatcattctttccacctggctaccaagtgtccttctgcctggtcatggtgctgctgttcgccgtggataccggcctgtacttcagcgtctaa

SEQ ID NO: 6375 - DNA, 1470 bp, synthetic construct
  source 1..1470: mol_type = other DNA
atggccttaccagtgaccgccttgctcctgccgctggccttgctgctccacgccgccaggccggacatccagatgacacagagccctagcagcctgtctgccagcgtgggagacagagtgaccatcacatgcaagagcagccagagcctgctggactccgatggcaagacctacctgaactggtatcagcagaagcccggcaaggcccctaagctgctgatctacctggtgtccaagctggatagcggcgtgcccagcagattttctggcagcggcagcggaaccgacttcaccctgacaatatccagcctccagcctgaggacttcgccacctactactgctggcaaggcacccactttccattcaccttcggccagggcaccaaggtggaaatcaaaagactcgagggcggcggaggaagcggaggcggatctggtggcggaggatctttcgaagtgcagctggttgaatcaggcggaggactggttcagcctggcggatctctgagactgtcttgtgccgccagcggctacaccttcaccagctactggatgaactgggtccgacaggcccctggcaaaggactggaatgggtcggaatgatcgaccccagcgacagcgagacacactacaaccacatcttcaaggaccgcttcaccatcagcgccgacaccagcaagaataccgcctacctccagatgaactccctgagagccgaggacaccgccgtgtactactgcgccagaaacctgtatctgttcggccagggaaccctggtcacagtgtcatctacgcgtaccacgacgccagcgccgcgaccaccaacaccggcgcccaccatcgcgtcgcagcccctgtccctgcgcccagaggcgtgccggccagcggcggggggcgcagtgcacacgagggggctggacttcgcctgtgacatctacatctgggcgcccttggccgggacttgtggggtccttctcctgtcactggttatcaccctttactgcaaacggggcagaaagaaactcctgtatatattcaaacaaccatttatgagaccagtacaaactactcaagaggaagatggctgtagctgccgatttccagaagaagaagaaggaggatgtgaactgagagtgaagttcagcaggagcgcagacgcccccgcgtaccagcagggccagaaccagctctataacgagctgaatctaggacgaagagaggagtacgatgttttggacaagagacgtggccgggaccctgagatggggggaaagccgagaaggaagaaccctcaggaaggcctgtacaatgaactgcagaaagataagatggcggaggcctacagtgagattgggatgaaaggcgagcgccggaggggcaaggggcacgatggcctttaccagggtctcagtacagccaccaaggacacctacgacgcccttcacatgcaggccctgccccctcgctga

SEQ ID NO: 6376 - DNA, 1188 bp, synthetic construct
  source 1..1188: mol_type = other DNA
atggccttaccagtgaccgccttgctcctgccgctggccttgctgctccacgccgccaggccggacgccagaagcgaggacagatacagaaaccccaagggcagcgcctgctccagaatctggcaaagccccagattcattgcccggaagaggggcttcaccgtgaagatgcactgctacatgaacagcgccagcggcaacgtttcctggctgtggaagcaagagatggacgagaaccctcagcagctgaagctggaaaagggccgcatggaagagagccagaacgagtctctggccacactgaccatccagggcatcagattcgaggacaacggcatctacttttgccagcagaagtgcaacaacaccagcgaggtgtaccaaggctgtggcaccgagctgagagtgatgggctttagcacactggcccagctgaaacagcggaacaccctgaagacgcgtggaggcagtggtgtcttcacactcgaagatttcgttggggactggcgacagacagccggctacaacctggaccaagtccttgaacagggaggtgtgtccagtttgtttcagaatctcggggtgtccgtaactccgatccaaaggattgtcctgagcggtgaaaatgggctgaagatcgacatccatgtcatcatcccgtatgaaggtctgagcggcgaccaaatgggccagatcgaaaaaatttttaaggtggtgtaccctgtggatgatcatcactttaaggtgatcctgcactatggcacactggtaatcgacggggttacgccgaacatgatcgactatttcggacggccgtatgaaggcatcgccgtgttcgacggcaaaaagatcactgtaacagggaccctgtggaacggcaacaaaattatcgacgagcgcctgatcaaccccgacggctccctgctgttccgagtaaccatcaacggagtgaccggctggcggctgtgcgaacgcattctggcgctcgagggaggcagctggagccaccctcagtttgaaaaagactacaaagacgatgacgataagggatcagattacaaggatgatgatgacaaggggtcagattataaagacgacgatgataaagggagcgactacaaggacgacgatgacaaggcctggtcccatccccagttcgagaaacaccatcaccaccaccatcatcac

SEQ ID NO: 6377 - DNA, 9404 bp, synthetic construct
  source 1..9404: mol_type = other DNA
cccgactggaaagcgggcagtgagcgcaacgcaattaatgtgagttagctcactcattaggcaccccaggctttacactttatgcttccggctcgtatgttgtgtggaattgtgagcggataacaatttcacacaggaaacagctatgaccatgattacgccaagcgcgcaattaaccctcactaaagggaacaaaagctggagctgcaagcttggccattgcatacgttgtatccatatcataatatgtacatttatattggctcatgtccaacattaccgccatgttgacattgattattgactagttattaatagtaatcaattacggggtcattagttcatagcccatatatggagttccgcgttacataacttacggtaaatggcccgcctggctgaccgcccaacgacccccgcccattgacgtcaataatgacgtatgttcccatagtaacgccaatagggactttccattgacgtcaatgggtggagtatttacggtaaactgcccacttggcagtacatcaagtgtatcatatgccaagtacgccccctattgacgtcaatgacggtaaatggcccgcctggcattatgcccagtacatgaccttatgggactttcctacttggcagtacatctacgtattagtcatcgctattaccatggtgatgcggttttggcagtacatcaatgggcgtggatagcggtttgactcacggggatttccaagtctccaccccattgacgtcaatgggagtttgttttggcaccaaaatcaacgggactttccaaaatgtcgtaacaactccgccccattgacgcaaatgggcggtaggcgtgtacggtgggaggtctatataagcagagctcgtttagtgaaccggggtctctctggttagaccagatctgagcctgggagctctctggctaactagggaacccactgcttaagcctcaataaagcttgccttgagtgcttcaagtagtgtgtgcccgtctgttgtgtgactctggtaactagagatccctcagacccttttagtcagtgtggaaaatctctagcagtggcgcccgaacagggacttgaaagcgaaagggaaaccagaggagctctctcgacgcaggactcggcttgctgaagcgcgcacggcaagaggcgaggggcggcgactggtgagtacgccaaaaattttgactagcggaggctagaaggagagagatgggtgcgagagcgtcagtattaagcgggggagaattagatcgcgatgggaaaaaattcggttaaggccagggggaaagaaaaaatataaattaaaacatatagtatgggcaagcagggagctagaacgattcgcagttaatcctggcctgttagaaacatcagaaggctgtagacaaatactgggacagctacaaccatcccttcagacaggatcagaagaacttagatcattatataatacagtagcaaccctctattgtgtgcatcaaaggatagagataaaagacaccaaggaagctttagacaagatagaggaagagcaaaacaaaagtaagaccaccgcacagcaagcggccgctgatcttcagacctggaggaggagatatgagggacaattggagaagtgaattatataaatataaagtagtaaaaattgaaccattaggagtagcacccaccaaggcaaagagaagagtggtgcagagagaaaaaagagcagtgggaataggagctttgttccttgggttcttgggagcagcaggaagcactatgggcgcagcgtcaatgacgctgacggtacaggccagacaattattgtctggtatagtgcagcagcagaacaatttgctgagggctattgaggcgcaacagcatctgttgcaactcacagtctggggcatcaagcagctccaggcaagaatcctggctgtggaaagatacctaaaggatcaacagctcctggggatttggggttgctctggaaaactcatttgcaccactgctgtgccttggaatgctagttggagtaataaatctctggaacagatttggaatcacacgacctggatggagtgggacagagaaattaacaattacacaagcttaatacactccttaattgaagaatcgcaaaaccagcaagaaaagaatgaacaagaattattggaattagataaatgggcaagtttgtggaattggtttaacataacaaattggctgtggtatataaaattattcataatgatagtaggaggcttggtaggtttaagaatagtttttgctgtactttctatagtgaatagagttaggcagggatattcaccattatcgtttcagacccacctcccaaccccgaggggacccgacaggcccgaaggaatagaagaagaaggtggagagagagacagagacagatccattcgattagtgaacggatctcgacggtatcgataagctaattcacaaatggcagtattcatccacaattttaaaagaaaaggggggattggggggtacagtgcaggggaaagaatagtagacataatagcaacagacatacaaactaaagaattacaaaaacaaattacaaaaattcaaaattttcgggtttattacagggacagcagagatccagtttgggaattagcttgatcgattagtccaatttgttaaagacaggatatcagtggtccaggctctagttttgactcaacaatatcaccagctgaagcctatagagtacgagccatagatagaataaaagattttatttagtctccagaaaaaggggggaatgaaagaccccacctgtaggtttggcaagctaggatcaaggttaggaacagagagacagcagaatatgggccaaacaggatatctgtggtaagcagttcctgccccggctcagggccaagaacagttggaacagcagaatatgggccaaacaggatatctgtggtaagcagttcctgccccggctcagggccaagaacagatggtccccagatgcggtcccgccctcagcagtttctagagaaccatcagatgtttccagggtgccccaaggacctgaaatgaccctgtgccttatttgaactaaccaatcagttcgcttctcgcttctgttcgcgcgcttctgctccccgagctcaataaaagagcccacaacccctcactcggcgcgatctagatctcgaatcgaattcgccgctagcaccatggccttaccagtgaccgccttgctcctgccgctggccttgctgctccacgccgccaggccggacatccagttgacccagtcccccagctcactcagcgccagtgtgggggaccgggtgaccattacctgtaaagccagtcagagtgtggactatgagggggatagcttcctgaattggtatcagcagaagcctggcaaagccccaaagctgctgatctacgctgcatctaatctggagtcaggcgtgccttctaggttctccggtagtgggtctgggaccgatttcacattgaccatttcatccctccaacccgaggatttcgctacatattactgtcagcagtccaatgaggaccctctcacctttggccagggcaccaaagttgaaattaagagactcgaggacctgaagaacgtgttcccacctgaggtggccgtgttcgagcctagcgaggccgagatcagccacacccagaaagccaccctcgtgtgcctggctaccggcttctaccccgaccatgtggaactgtcttggtgggtcaacggcaaagaggtgcacagcggcgtgtctaccgacccccagccactgaaagaacagcccgccctgaacgacagccggtactgcctgagcagcagactgagagtgtccgccaccttctggcagaacccccggaaccacttcagatgccaggtgcagttctacggcctgagcgagaacgacgagtggacccaggacagagccaagcccgtgacccagatcgtgtctgccgaagcctggggcagagccgattgcggatcccagagcttcggcctgctggaccccaagctgtgctacctgctggatggcatcctgttcatctacggcgtgatcctgaccgccctgttcctgagagtgaagttcagcagaagcgccgacgcccctgcctaccagcagggacagaaccaactgtacaacgagctgaacctgggcagacgggaagagtacgacgtgctggacaagcggagaggcagggaccctgagatgggcggaaagccccagcggagaaagaacccccaggaaggactgtataacgaactccagaaagacaagatggccgaagcctacagcgagatcggcatgaagggcgagcggagaagaggcaagggccacgatggcctgtaccagggcctgagcaccgccaccaaggacacctatgacgccctgcacatgcaggccctgcctccaagaagggccaagcgatctggatctggagcaacaaacttctcactactcaaacaagcaggtgacgtggaggagaatcccgggcctactagtatggactggatttggcgcatccttttccttgtcggcgctgctaccggcgcgcattccttcgaagtccaacttgtggagtctggagggggcctggtgcagcccggcggctctctcagactgtcttgtgcggcaagcggctacaccttcagctcttactggatagaatgggtgaggcaggcacctggaaagggactggagtggattggagagattctgccaggagggggagatacaaattacaatgaaatcttcaaggggcgggccaccttttcagcggataccagcaagaatacagcttacctgcagatgaatagcctccgggcagaagataccgctgtttattattgcacgagacgggtgccaataagactggactattgggggcaagggactcttgtcaccgtcagttcaacgcgtatccagaaccctgatcctgccgtgtaccagctgcgggatagcaagagcagcgacaagagcgtgtgtctgttcaccgacttcgacagccagaccaacgtgtcccagagcaaggactccgacgtgtacatcaccgataagaccgtgctggacatgcggagcatggacttcaagagcaactccgccgtggcctggtccaacaagtccgatttcgcctgcgccaacgccttcaacaacagcattatccccgaggacacattcttcccaagccccgagagcagctgcggtaccatcactcaaggtttggcagtgtcaaccatctcatcattctttccacctggctaccaagtgtccttctgcctggtcatggtgctgctgttcgccgtggataccggcctgtacttcagcgtcaagaccaacatccggtccagcaccagagactggaaggaccacaagttcaagtggcggaaggaccctcaggacaagtaagtcgactgatccgataatcaacctctggattacaaaatttgtgaaagattgactggtattcttaactatgttgctccttttacgctatgtggatacgctgctttaatgcctttgtatcatgctattgcttcccgtatggctttcattttctcctccttgtataaatcctggttgctgtctctttatgaggagttgtggcccgttgtcaggcaacgtggcgtggtgtgcactgtgtttgctgacgcaacccccactggttggggcattgccaccacctgtcagctcctttccgggactttcgctttccccctccctattgccacggcggaactcatcgccgcctgccttgcccgctgctggacaggggctcggctgttgggcactgacaattccgtggtgttgtcggggaaatcatcgtcctttccttggctgctcgcctgtgttgccacctggattctgcgcgggacgtccttctgctacgtcccttcggccctcaatccagcggaccttccttcccgcggcctgctgccggctctgcggcctcttccgcgtcttcgccttcgccctcagacgagtcggatctccctttgggccgcctccccgcatcggatcaaattcgagctcggtacctttaagaccaatgacttacaaggcagctgtagatcttagccactttttaaaagaaaaggggggactggaagggctaattcactcccaacgaagacaagatctgctttttgcttgtactgggtctctctggttagaccagatctgagcctgggagctctctggctaactagggaacccactgcttaagcctcaataaagcttgccttgagtgcttcaagtagtgtgtgcccgtctgttgtgtgactctggtaactagagatccctcagacccttttagtcagtgtggaaaatctctagcagtagtagttcatgtcatcttattattcagtatttataacttgcaaagaaatgaatatcagagagtgagaggaacttgtttattgcagcttataatggttacaaataaagcaatagcatcacaaatttcacaaataaagcatttttttcactgcattctagttgtggtttgtccaaactcatcaatgtatcttatcatgtctggctctagctatcccgcccctaactccgcccatcccgcccctaactccgcccagttccgcccattctccgccccatggctgactaattttttttatttatgcagaggccgaggccgcctcggcctctgagctattccagaagtagtgaggaggcttttttggaggcctagggacgtacccaattcgccctatagtgagtcgtattacgcgcgctcactggccgtcgttttacaacgtcgtgactgggaaaaccctggcgttacccaacttaatcgccttgcagcacatccccctttcgccagctggcgtaatagcgaagaggcccgcaccgatcgcccttcccaacagttgcgcagcctgaatggcgaatgggacgcgccctgtagcggcgcattaagcgcggcgggtgtggtggttacgcgcagcgtgaccgctacacttgccagcgccctagcgcccgctcctttcgctttcttcccttcctttctcgccacgttcgccggctttccccgtcaagctctaaatcgggggctccctttagggttccgatttagtgctttacggcacctcgaccccaaaaaacttgattagggtgatggttcacgtagtgggccatcgccctgatagacggtttttcgccctttgacgttggagtccacgttctttaatagtggactcttgttccaaactggaacaacactcaaccctatctcggtctattcttttgatttataagggattttgccgatttcggcctattggttaaaaaatgagctgatttaacaaaaatttaacgcgaattttaacaaaatattaacgcttacaatttaggtggcacttttcggggaaatgtgcgcggaacccctatttgtttatttttctaaatacattcaaatatgtatccgctcatgagacaataaccctgataaatgcttcaataatattgaaaaaggaagagtatgagtattcaacatttccgtgtcgcccttattcccttttttgcggcattttgccttcctgtttttgctcacccagaaacgctggtgaaagtaaaagatgctgaagatcagttgggtgcacgagtgggttacatcgaactggatctcaacagcggtaagatccttgagagttttcgccccgaagaacgttttccaatgatgagcacttttaaagttctgctatgtggcgcggtattatcccgtattgacgccgggcaagagcaactcggtcgccgcatacactattctcagaatgacttggttgagtactcaccagtcacagaaaagcatcttacggatggcatgacagtaagagaattatgcagtgctgccataaccatgagtgataacactgcggccaacttacttctgacaacgatcggaggaccgaaggagctaaccgcttttttgcacaacatgggggatcatgtaactcgccttgatcgttgggaaccggagctgaatgaagccataccaaacgacgagcgtgacaccacgatgcctgtagcaatggcaacaacgttgcgcaaactattaactggcgaactacttactctagcttcccggcaacaattaatagactggatggaggcggataaagttgcaggaccacttctgcgctcggcccttccggctggctggtttattgctgataaatctggagccggtgagcgtgggtctcgcggtatcattgcagcactggggccagatggtaagccctcccgtatcgtagttatctacacgacggggagtcaggcaactatggatgaacgaaatagacagatcgctgagataggtgcctcactgattaagcattggtaactgtcagaccaagtttactcatatatactttagattgatttaaaacttcatttttaatttaaaaggatctaggtgaagatcctttttgataatctcatgaccaaaatcccttaacgtgagttttcgttccactgagcgtcagaccccgtagaaaagatcaaaggatcttcttgagatcctttttttctgcgcgtaatctgctgcttgcaaacaaaaaaaccaccgctaccagcggtggtttgtttgccggatcaagagctaccaactctttttccgaaggtaactggcttcagcagagcgcagataccaaatactgttcttctagtgtagccgtagttaggccaccacttcaagaactctgtagcaccgcctacatacctcgctctgctaatcctgttaccagtggctgctgccagtggcgataagtcgtgtcttaccgggttggactcaagacgatagttaccggataaggcgcagcggtcgggctgaacggggggttcgtgcacacagcccagcttggagcgaacgacctacaccgaactgagatacctacagcgtgagctatgagaaagcgccacgcttcccgaagggagaaaggcggacaggtatccggtaagcggcagggtcggaacaggagagcgcacgagggagcttccagggggaaacgcctggtatctttatagtcctgtcgggtttcgccacctctgacttgagcgtcgatttttgtgatgctcgtcaggggggcggagcctatggaaaaacgccagcaacgcggcctttttacggttcctggccttttgctggccttttgctcacatgttctttcctgcgttatcccctgattctgtggataaccgtattaccgcctttgagtgagctgataccgctcgccgcagccgaacgaccgagcgcagcgagtcagtgagcgaggaagcggaagagcgcccaatacgcaaaccgcctctccccgcgcgttggccgattcattaatgcagctggcacgacaggttt

SEQ ID NO: 6378 - DNA, 1863 bp, synthetic construct; identical to SEQ ID NO: 4740
  source 1..1863: mol_type = other DNA

SEQ ID NO: 6379 - DNA, 1875 bp, synthetic construct; identical to SEQ ID NO: 5557
  source 1..1875: mol_type = other DNA

SEQ ID NO: 6380 - DNA, 2388 bp, synthetic construct
  source 1..2388: mol_type = other DNA
atggccttaccagtgaccgccttgctcctgccgctggccttgctgctccacgccgccaggccggacatccagttgacccagtcccccagctcactcagcgccagtgtgggggaccgggtgaccattacctgtaaagccagtcagagtgtggactatgacggggatagcttcctgaattggtatcagcagaagcctggcaaagccccaaagctgctgatctacgctgcatctaatctggagtcaggcgtgccttccaggttctccggtagtgggtctgggaccgatttcacattgaccatttcatccctccaacccgaggatttcgctacatattactgtcagcagtccaatgaggaccctctcacctttggccagggcaccaaagttgaaattaagagaggacagcctaaggccaatcctaccgtgacactgttccctccaagcagcgaagaactccaggccaacaaggccacacttgtgtgcctgatctccgacttctaccctggggctgtgacagtggcttggaaggccgatggatctcctgtgaaagccggcgtggaaaccaccaagccatccaagcagagcaacaacaaatacgccgccagctcctacctgagcctgacacctgagcagtggaagtcccacagatcctacagctgccaagtgacccacgaaggcagcaccgtggaaaagacagtggcccctacagagtgcagcggatcccagagcttcggcctgctggaccccaagctgtgctacctgctggatggcatcctgttcatctacggcgtgatcctgaccgccctgttcctgagagtgaagttcagcagaagcgccgacgcccctgcctaccagcagggacagaaccaactgtacaacgagctgaacctgggcagacgggaagagtacgacgtgctggacaagcggagaggcagggaccctgagatgggcggaaagccccggagaaagaacccccaggaaggactgtataacgaactccagaaagacaagatggccgaagcctacagcgagatcggcatgaagggcgagcggagaagaggcaagggccacgatggcctgtaccagggcctgagcaccgccaccaaggacacctatgacgccctgcacatgcaggccctgcctccaagaagggccaagcgatctggatctggagcaacaaacttctcactactcaaacaagcaggtgacgtggaggagaatcccgggcctactagtatggactggatttggcgcatccttttccttgtcggcgctgctaccggcgcgcattccttcgaagtccaacttgtggagtctggagggggcctggtgcagcccggcggctctctcagactgtcttgtgcggcaagcggctacaccttcacctcttactggatagaatgggtgaggcaggcacctggaaagggactggagtggattggagagattctgccaggagggggagatacaaattacaatgaaatcttcaaggggcgggccaccttttcagcggataccagcaagaatacagcttacctgcagatgaatagcctccgggcagaagataccgctgtttattattgcacgagacgggtgccaataagactggactattgggggcaagggactcttgtcaccgtcagttcagcctctacaaagggaccctccgtgtttcctctggctcccagcagcaagtctacaagcggaggaacagccgctctgggctgcctggtcaaggattactttcccgagcctgtgaccgtgtcctggaatagcggagcactgacaagcggcgtgcacacctttccagccgtgctgcaaagcagcggcctgtactctctgagcagcgtggtcacagtgcctagctctagcctgggcacccagacctacatctgcaatgtgaaccacaagcctagcaacaccaaggtggacaagagagtggaacccaagagctgtggtacccagagttttgggttgttggaccctaaattgtgctatctgttggacggaatcctgttcatttacggagtgatcctgaccgcattgttcctgcgggttaagttttccagatccgcagacgcacccgcttaccaacaagggcagaaccaactctacaatgaacttaatttggggcggagggaagagtacgacgttctggacaaaaggaggggacgagatcccgagatgggcggaaagcctcgaaggaagaatccgcaagaggggctttataacgaactccagaaagataaaatggcagaagcctatagtgagattgggatgaagggagaaaggaggaggggtaaaggtcacgatgggttgtaccaaggattgagcacagccactaaagatacctatgatgcgctccacatgcaggccctgccgccaaga

SEQ ID NO: 6381 - DNA, 2445 bp, synthetic construct; identical to SEQ ID NO: 4716
  source 1..2445: mol_type = other DNA

SEQ ID NO: 6382 - DNA, 2169 bp, synthetic construct
  source 1..2169: mol_type = other DNA
atggccttaccagtgaccgccttgctcctgccgctggccttgctgctccacgccgccaggccggacatccagttgacccagtcccccagctcactcagcgccagtgtgggggaccgggtgaccattacctgtaaagccagtcagagtgtggactatgacggggatagcttcctgaattggtatcagcagaagcctggcaaagccccaaagctgctgatctacgctgcatctaatctggagtcaggcgtgccttccaggttctccggtagtgggtctgggaccgatttcacattgaccatttcatccctccaacccgaggatttcgctacatattactgtcagcagtccaatgaggaccctctcacctttggccagggcaccaaagttgaaattaagagactcgagggacagcctaaggccaatcctaccgtgacactgttccctccaagcagcgaagaactccaggccaacaaggccacacttgtgtgcctgatctccgacttctaccctggggctgtgacagtggcttggaaggccgatggatctcctgtgaaagccggcgtggaaaccaccaagccatccaagcagagcaacaacaaatacgccgccagctcctacctgagcctgacacctgagcagtggaagtcccacagatcctacagctgccaagtgacccacgaaggcagcaccgtggaaaagacagtggcccctacagagtgcagcggatcccagagcttcggcctgctggaccccaagctgtgctacctgctggatggcatcctgttcatctacggcgtgatcctgaccgccctgttcctgagagtgaagttcagcagaagcgccgacgcccctgcctaccagcagggacagaaccaactgtacaacgagctgaacctgggcagacgggaagagtacgacgtgctggacaagcggagaggcagggaccctgagatgggcggaaagccccggagaaagaacccccaggaaggactgtataacgaactccagaaagacaagatggccgaagcctacagcgagatcggcatgaagggcgagcggagaagaggcaagggccacgatggcctgtaccagggcctgagcaccgccaccaaggacacctatgacgccctgcacatgcaggccctgcctccaagaagggccaagcgatctggatctggagcaacaaacttctcactactcaaacaagcaggtgacgtggaggagaatcccgggcctactagtatggactggatttggcgcatccttttccttgtcggcgctgctaccggcgcgcattccttcgaagtccaacttgtggagtctggagggggcctggtgcagcccggcggctctctcagactgtcttgtgcggcaagcggctacaccttcacctcttactggatagaatgggtgaggcaggcacctggaaagggactggagtggattggagagattctgccaggagggggagatacaaattacaatgaaatcttcaaggggcgggccaccttttcagcggataccagcaagaatacagcttacctgcagatgaatagcctccgggcagaagataccgctgtttattattgcacgagacgggtgccaataagactggactattgggggcaagggactcttgtcaccgtcagttcaacgcgtgcctctacaaagggaccctccgtgtttcctctggctcccagcagcaagtctacaagcggaggaacagccgctctgggctgcctggtcaaggattactttcccgagcctgtgaccgtgtcctggaatagcggagcactgacaagcggcgtgcacacctttccagccgtgctgcaaagcagcggcctgtactctctgagcagcgtggtcacagtgcctagctctagcctgggcacccagacctacatctgcaatgtgaaccacaagcctagcaacaccaaggtggacaagagagtggaacccaagagctgtggtaccatcactcaaggtttggcagtgtcaaccatctcatcattctttccacctggctaccaagtgtccttctgcctggtcatggtgctgctgttcgccgtggataccggcctgtacttcagcgtcaagaccaacatccggtccagcaccagagactggaaggaccacaagttcaagtggcggaaggacccccaggacaag

SEQ ID NO: 6383 - DNA, 2214 bp, synthetic construct
  source 1..2214: mol_type = other DNA
atggccttaccagtgaccgccttgctcctgccgctggccttgctgctccacgccgccaggccggacatccagttgacccagtcccccagctcactcagcgccagtgtgggggaccgggtgaccattacctgtaaagccagtcagagtgtggactatgacggggatagcttcctgaattggtatcagcagaagcctggcaaagccccaaagctgctgatctacgctgcatctaatctggagtcaggcgtgccttccaggttctccggtagtgggtctgggaccgatttcacattgaccatttcatccctccaacccgaggatttcgctacatattactgtcagcagtccaatgaggaccctctcacctttggccagggcaccaaagttgaaattaagagactcgaggacctgaagaacgtgttcccacctgaggtggccgtgttcgagcctagcgaggccgagatcagccacacccagaaagccaccctcgtgtgcctggctaccggcttctaccccgaccatgtggaactgtcttggtgggtcaacggcaaagaggtgcacagcggcgtgtctaccgacccccagccactgaaagaacagcccgccctgaacgacagccggtactgcctgagcagcagactgagagtgtccgccaccttctggcagaacccccggaaccacttcagatgccaggtgcagttctacggcctgagcgagaacgacgagtggacccaggacagagccaagcccgtgacccagatcgtgtctgccgaagcctggggcagagccgattgcggatcccagagcttcggcctgctggaccccaagctgtgctacctgctggatggcatcctgttcatctacggcgtgatcctgaccgccctgttcctgagagtgaagttcagcagaagcgccgacgcccctgcctaccagcagggacagaaccaactgtacaacgagctgaacctgggcagacgggaagagtacgacgtgctggacaagcggagaggcagggaccctgagatgggcggaaagccccggagaaagaacccccaggaaggactgtataacgaactccagaaagacaagatggccgaagcctacagcgagatcggcatgaagggcgagcggagaagaggcaagggccacgatggcctgtaccagggcctgagcaccgccaccaaggacacctatgacgccctgcacatgcaggccctgcctccaagaagggccaagcgatctggatctggagcaacaaacttctcactactcaaacaagcaggtgacgtggaggagaatcccgggcctactagtatggactggatttggcgcatccttttccttgtcggcgctgctaccggcgcgcattccttcgaagtccaacttgtggagtctggagggggcctggtgcagcccggcggctctctcagactgtcttgtgcggcaagcggctacaccttcacctcttactggatagaatgggtgaggcaggcacctggaaagggactggagtggattggagagattctgccaggagggggagatacaaattacaatgaaatcttcaaggggcgggccaccttttcagcggataccagcaagaatacagcttacctgcagatgaatagcctccgggcagaagataccgctgtttattattgcacgagacgggtgccaataagactggactattgggggcaagggactcttgtcaccgtcagttcaacgcgtatccagaaccctgatcctgccgtgtaccagctgcgggatagcaagagcagcgacaagagcgtgtgtctgttcaccgacttcgacagccagaccaacgtgtcccagagcaaggactccgacgtgtacatcaccgataagaccgtgctggacatgcggagcatggacttcaagagcaactccgccgtggcctggtccaacaagtccgatttcgcctgcgccaacgccttcaacaacagcattatccccgaggacacattcttcccaagccccgagagcagctgcggtaccatcactcaaggtttggcagtgtcaaccatctcatcattctttccacctggctaccaagtgtccttctgcctggtcatggtgctgctgttcgccgtggataccggcctgtacttcagcgtcaagaccaacatccggtccagcaccagagactggaaggaccacaagttcaagtggcggaaggacccccaggacaag

SEQ ID NO: 6384 - DNA, 2139 bp, synthetic construct
  source 1..2139: mol_type = other DNA
atggccttaccagtgaccgccttgctcctgccgctggccttgctgctccacgccgccaggccggacatccagttgacccagtcccccagctcactcagcgccagtgtgggggaccgggtgaccattacctgtaaagccagtcagagtgtggactatgacggggatagcttcctgaattggtatcagcagaagcctggcaaagccccaaagctgctgatctacgctgcatctaatctggagtcaggcgtgccttccaggttctccggtagtgggtctgggaccgatttcacattgaccatttcatccctccaacccgaggatttcgctacatattactgtcagcagtccaatgaggaccctctcacctttggccagggcaccaaagttgaaattaagagactcgaggacctgaagaacgtgttcccacctgaggtggccgtgttcgagcctagcgaggccgagatcagccacacccagaaagccaccctcgtgtgcctggctaccggcttctaccccgaccatgtggaactgtcttggtgggtcaacggcaaagaggtgcacagcggcgtgtctaccgacccccagccactgaaagaacagcccgccctgaacgacagccggtactgcctgagcagcagactgagagtgtccgccaccttctggcagaacccccggaaccacttcagatgccaggtgcagttctacggcctgagcgagaacgacgagtggacccaggacagagccaagcccgtgacccagatcgtgtctgccgaagcctggggcagagccgattgcggatcccagagcttcggcctgctggaccccaagctgtgctacctgctggatggcatcctgttcatctacggcgtgatcctgaccgccctgttcctgagagtgaagttcagcagaagcgccgacgcccctgcctaccagcagggacagaaccaactgtacaacgagctgaacctgggcagacgggaagagtacgacgtgctggacaagcggagaggcagggaccctgagatgggcggaaagccccggagaaagaacccccaggaaggactgtataacgaactccagaaagacaagatggccgaagcctacagcgagatcggcatgaagggcgagcggagaagaggcaagggccacgatggcctgtaccagggcctgagcaccgccaccaaggacacctatgacgccctgcacatgcaggccctgcctccaagaagggccaagcgatctggatctggagcaacaaacttctcactactcaaacaagcaggtgacgtggaggagaatcccgggcctactagtatggactggatttggcgcatccttttccttgtcggcgctgctaccggcgcgcattccttcgaagtccaacttgtggagtctggagggggcctggtgcagcccggcggctctctcagactgtcttgtgcggcaagcggctacaccttcacctcttactggatagaatgggtgaggcaggcacctggaaagggactggagtggattggagagattctgccaggagggggagatacaaattacaatgaaatcttcaaggggcgggccaccttttcagcggataccagcaagaatacagcttacctgcagatgaatagcctccgggcagaagataccgctgtttattattgcacgagacgggtgccaataagactggactattgggggcaagggactcttgtcaccgtcagttcaacgcgtatccagaaccctgatcctgccgtgtaccagctgcgggatagcaagagcagcgacaagagcgtgtgtctgttcaccgacttcgacagccagaccaacgtgtcccagagcaaggactccgacgtgtacatcaccgataagaccgtgctggacatgcggagcatggacttcaagagcaactccgccgtggcctggtccaacaagtccgatttcgcctgcgccaacgccttcaacaacagcattatccccgaggacacattcttcccaagccccgagagcagctgcggtaccatcactcaaggtttggcagtgtcaaccatctcatcattctttccacctggctaccaagtgtccttctgcctggtcatggtgctgctgttcgccgtggataccggcctgtacttcagcgtc

SEQ ID NO: 6385 - DNA, 2142 bp, synthetic construct
  source 1..2142: mol_type = other DNA
atggccttaccagtgaccgccttgctcctgccgctggccttgctgctccacgccgccaggccggacatccagttgacccagtcccccagctcactcagcgccagtgtgggggaccgggtgaccattacctgtaaagccagtcagagtgtggactatgacggggatagcttcctgaattggtatcagcagaagcctggcaaagccccaaagctgctgatctacgctgcatctaatctggagtcaggcgtgccttccaggttctccggtagtgggtctgggaccgatttcacattgaccatttcatccctccaacccgaggatttcgctacatattactgtcagcagtccaatgaggaccctctcacctttggccagggcaccaaagttgaaattaagagactcgaggacctgaagaacgtgttcccacctgaggtggccgtgttcgagcctagcgaggccgagatcagccacacccagaaagccaccctcgtgtgcctggctaccggcttctaccccgaccatgtggaactgtcttggtgggtcaacggcaaagaggtgcacagcggcgtgtctaccgacccccagccactgaaagaacagcccgccctgaacgacagccggtactgcctgagcagcagactgagagtgtccgccaccttctggcagaacccccggaaccacttcagatgccaggtgcagttctacggcctgagcgagaacgacgagtggacccaggacagagccaagcccgtgacccagatcgtgtctgccgaagcctggggcagagccgattgcggatcccagagcttcggcctgctggaccccaagctgtgctacctgctggatggcatcctgttcatctacggcgtgatcctgaccgccctgttcctgagagtgaagttcagcagaagcgccgacgcccctgcctaccagcagggacagaaccaactgtacaacgagctgaacctgggcagacgggaagagtacgacgtgctggacaagcggagaggcagggaccctgagatgggcggaaagccccggagaaagaacccccaggaaggactgtataacgaactccagaaagacaagatggccgaagcctacagcgagatcggcatgaagggcgagcggagaagaggcaagggccacgatggcctgtaccagggcctgagcaccgccaccaaggacacctatgacgccctgcacatgcaggccctgcctccaagaagggccaagcgatctggatctggagcaacaaacttctcactactcaaacaagcaggtgacgtggaggagaatcccgggcctactagtatggactggatttggcgcatccttttccttgtcggcgctgctaccggcgcgcattccttcgaagtccaacttgtggagtctggagggggcctggtgcagcccggcggctctctcagactgtcttgtgcggcaagcggctacaccttcacctcttactggatagaatgggtgaggcaggcacctggaaagggactggagtggattggagagattctgccaggagggggagatacaaattacaatgaaatcttcaaggggcgggccaccttttcagcggataccagcaagaatacagcttacctgcagatgaatagcctccgggcagaagataccgctgtttattattgcacgagacgggtgccaataagactggactattgggggcaagggactcttgtcaccgtcagttcaacgcgtatccagaaccctgatcctgccgtgtaccagctgcgggatagcaagagcagcgacaagagcgtgtgtctgttcaccgacttcgacagccagaccaacgtgtcccagagcaaggactccgacgtgtacatcaccgataagaccgtgctggacatgcggagcatggacttcaagagcaactccgccgtggcctggtccaacaagtccgatttcgcctgcgccaacgccttcaacaacagcattatccccgaggacacattcttcccaagccccgagagcagctgcggtaccatcactcaaggtttggcagtgtcaaccatctcatcattctttccacctggctaccaagtgtccttctgcctggtcatggtgctgctgttcgccgtggataccggcctgtacttcagcgtcaag

SEQ ID NO: 6386 - DNA, 1866 bp, synthetic construct; identical to SEQ ID NO: 5585
  source 1..1866: mol_type = other DNA

SEQ ID NO: 6387 - DNA, 1887 bp, synthetic construct; identical to SEQ ID NO: 5586
  source 1..1887: mol_type = other DNA

SEQ ID NO: 6388 - DNA, 1887 bp, synthetic construct; identical to SEQ ID NO: 5587
  source 1..1887: mol_type = other DNA

SEQ ID NO: 6389 - DNA, 1887 bp, synthetic construct; identical to SEQ ID NO: 5588
  source 1..1887: mol_type = other DNA

SEQ ID NO: 6390 - DNA, 1887 bp, synthetic construct; identical to SEQ ID NO: 5589
  source 1..1887: mol_type = other DNA

SEQ ID NO: 6391 - DNA, 1869 bp, synthetic construct; identical to SEQ ID NO: 5590
  source 1..1869: mol_type = other DNA

SEQ ID NO: 6392 - DNA, 2703 bp, synthetic construct; identical to SEQ ID NO: 5684
  source 1..2703: mol_type = other DNA

SEQ ID NO: 6393 - DNA, 2703 bp, synthetic construct; identical to SEQ ID NO: 5685
  source 1..2703: mol_type = other DNA

SEQ ID NO: 6394 - DNA, 2694 bp, synthetic construct; identical to SEQ ID NO: 5686
  source 1..2694: mol_type = other DNA

SEQ ID NO: 6395 - DNA, 2280 bp, synthetic construct; identical to SEQ ID NO: 5688
  source 1..2280: mol_type = other DNA

SEQ ID NO: 6396 - DNA, 2298 bp, synthetic construct; identical to SEQ ID NO: 5689
  source 1..2298: mol_type = other DNA

SEQ ID NO: 6397 - DNA, 2301 bp, synthetic construct; identical to SEQ ID NO: 5690
  source 1..2301: mol_type = other DNA

SEQ ID NO: 6398 - DNA, 2724 bp, synthetic construct; identical to SEQ ID NO: 5691
  source 1..2724: mol_type = other DNA

SEQ ID NO: 6399 - DNA, 2715 bp, synthetic construct; identical to SEQ ID NO: 5692
  source 1..2715: mol_type = other DNA

SEQ ID NO: 6400 - DNA, 2304 bp, synthetic construct; identical to SEQ ID NO: 5693
  source 1..2304: mol_type = other DNA

SEQ ID NO: 6401 - DNA, 2289 bp, synthetic construct; identical to SEQ ID NO: 5700
  source 1..2289: mol_type = other DNA

SEQ ID NO: 6402 - DNA, 2712 bp, synthetic construct; identical to SEQ ID NO: 5701
  source 1..2712: mol_type = other DNA

SEQ ID NO: 6403 - DNA, 2301 bp, synthetic construct; identical to SEQ ID NO: 5702
  source 1..2301: mol_type = other DNA

SEQ ID NO: 6404 - DNA, 2700 bp, synthetic construct; identical to SEQ ID NO: 5703
  source 1..2700: mol_type = other DNA

SEQ ID NO: 6405 - DNA, 2721 bp, synthetic construct; identical to SEQ ID NO: 5704
  source 1..2721: mol_type = other DNA

SEQ ID NO: 6406 - DNA, 2709 bp, synthetic construct; identical to SEQ ID NO: 5705
  source 1..2709: mol_type = other DNA

SEQ ID NO: 6407 - DNA, 2709 bp, synthetic construct; identical to SEQ ID NO: 5706
  source 1..2709: mol_type = other DNA

SEQ ID NO: 6408 - DNA, 2721 bp, synthetic construct; identical to SEQ ID NO: 5707
  source 1..2721: mol_type = other DNA

SEQ ID NO: 6409 - DNA, 1863 bp, synthetic construct; identical to SEQ ID NO: 4737
  source 1..1863: mol_type = other DNA

SEQ ID NO: 6410 - DNA, 1875 bp, synthetic construct; identical to SEQ ID NO: 5714
  source 1..1875: mol_type = other DNA

SEQ ID NO: 6411 - DNA, 2388 bp, synthetic construct
  source 1..2388: mol_type = other DNA
atggccttaccagtgaccgccttgctcctgccgctggccttgctgctccacgccgccaggccggacatccagttgacccagtcccccagctcactcagcgccagtgtgggggaccgggtgaccattacctgtaaagccagtcagagtgtggactatgagggggatagcttcctgaattggtatcagcagaagcctggcaaagccccaaagctgctgatctacgctgcatctaatctggagtcaggcgtgccttctaggttctccggtagtgggtctgggaccgatttcacattgaccatttcatccctccaacccgaggatttcgctacatattactgtcagcagtccaatgaggaccctctcacctttggccagggcaccaaagttgaaattaagagaggacagcctaaggccaatcctaccgtgacactgttccctccaagcagcgaagaactccaggccaacaaggccacacttgtgtgcctgatctccgacttctaccctggggctgtgacagtggcttggaaggccgatggatctcctgtgaaagccggcgtggaaaccaccaagccatccaagcagagcaacaacaaatacgccgccagctcctacctgagcctgacacctgagcagtggaagtcccacagatcctacagctgccaagtgacccacgaaggcagcaccgtggaaaagacagtggcccctacagagtgcagcggatcccagagcttcggcctgctggaccccaagctgtgctacctgctggatggcatcctgttcatctacggcgtgatcctgaccgccctgttcctgagagtgaagttcagcagaagcgccgacgcccctgcctaccagcagggacagaaccaactgtacaacgagctgaacctgggcagacgggaagagtacgacgtgctggacaagcggagaggcagggaccctgagatgggcggaaagccccggagaaagaacccccaggaaggactgtataacgaactccagaaagacaagatggccgaagcctacagcgagatcggcatgaagggcgagcggagaagaggcaagggccacgatggcctgtaccagggcctgagcaccgccaccaaggacacctatgacgccctgcacatgcaggccctgcctccaagaagggccaagcgatctggatctggagcaacaaacttctcactactcaaacaagcaggtgacgtggaggagaatcccgggcctactagtatggactggatttggcgcatccttttccttgtcggcgctgctaccggcgcgcattccttcgaagtccaacttgtggagtctggagggggcctggtgcagcccggcggctctctcagactgtcttgtgcggcaagcggctacaccttcacctcttactggatagaatgggtgaggcaggcacctggaaagggactggagtggattggagagattctgccaggagggggagatacaaattacaatgaaatcttcaaggggcgggccaccttttcagcggataccagcaagaatacagcttacctgcagatgaatagcctccgggcagaagataccgctgtttattattgcacgagacgggtgccaataagactggactattgggggcaagggactcttgtcaccgtcagttcagcctctacaaagggaccctccgtgtttcctctggctcccagcagcaagtctacaagcggaggaacagccgctctgggctgcctggtcaaggattactttcccgagcctgtgaccgtgtcctggaatagcggagcactgacaagcggcgtgcacacctttccagccgtgctgcaaagcagcggcctgtactctctgagcagcgtggtcacagtgcctagctctagcctgggcacccagacctacatctgcaatgtgaaccacaagcctagcaacaccaaggtggacaagagagtggaacccaagagctgtggtacccagagttttgggttgttggaccctaaattgtgctatctgttggacggaatcctgttcatttacggagtgatcctgaccgcattgttcctgcgggttaagttttccagatccgcagacgcacccgcttaccaacaagggcagaaccaactctacaatgaacttaatttggggcggagggaagagtacgacgttctggacaaaaggaggggacgagatcccgagatgggcggaaagcctcgaaggaagaatccgcaagaggggctttataacgaactccagaaagataaaatggcagaagcctatagtgagattgggatgaagggagaaaggaggaggggtaaaggtcacgatgggttgtaccaaggattgagcacagccactaaagatacctatgatgcgctccacatgcaggccctgccgccaaga

SEQ ID NO: 6412 - DNA, 2445 bp, synthetic construct; identical to SEQ ID NO: 4713
  source 1..2445: mol_type = other DNA

SEQ ID NO: 6413 - DNA, 2169 bp, synthetic construct
  source 1..2169: mol_type = other DNA
atggccttaccagtgaccgccttgctcctgccgctggccttgctgctccacgccgccaggccggacatccagttgacccagtcccccagctcactcagcgccagtgtgggggaccgggtgaccattacctgtaaagccagtcagagtgtggactatgagggggatagcttcctgaattggtatcagcagaagcctggcaaagccccaaagctgctgatctacgctgcatctaatctggagtcaggcgtgccttctaggttctccggtagtgggtctgggaccgatttcacattgaccatttcatccctccaacccgaggatttcgctacatattactgtcagcagtccaatgaggaccctctcacctttggccagggcaccaaagttgaaattaagagactcgagggacagcctaaggccaatcctaccgtgacactgttccctccaagcagcgaagaactccaggccaacaaggccacacttgtgtgcctgatctccgacttctaccctggggctgtgacagtggcttggaaggccgatggatctcctgtgaaagccggcgtggaaaccaccaagccatccaagcagagcaacaacaaatacgccgccagctcctacctgagcctgacacctgagcagtggaagtcccacagatcctacagctgccaagtgacccacgaaggcagcaccgtggaaaagacagtggcccctacagagtgcagcggatcccagagcttcggcctgctggaccccaagctgtgctacctgctggatggcatcctgttcatctacggcgtgatcctgaccgccctgttcctgagagtgaagttcagcagaagcgccgacgcccctgcctaccagcagggacagaaccaactgtacaacgagctgaacctgggcagacgggaagagtacgacgtgctggacaagcggagaggcagggaccctgagatgggcggaaagccccggagaaagaacccccaggaaggactgtataacgaactccagaaagacaagatggccgaagcctacagcgagatcggcatgaagggcgagcggagaagaggcaagggccacgatggcctgtaccagggcctgagcaccgccaccaaggacacctatgacgccctgcacatgcaggccctgcctccaagaagggccaagcgatctggatctggagcaacaaacttctcactactcaaacaagcaggtgacgtggaggagaatcccgggcctactagtatggactggatttggcgcatccttttccttgtcggcgctgctaccggcgcgcattccttcgaagtccaacttgtggagtctggagggggcctggtgcagcccggcggctctctcagactgtcttgtgcggcaagcggctacaccttcacctcttactggatagaatgggtgaggcaggcacctggaaagggactggagtggattggagagattctgccaggagggggagatacaaattacaatgaaatcttcaaggggcgggccaccttttcagcggataccagcaagaatacagcttacctgcagatgaatagcctccgggcagaagataccgctgtttattattgcacgagacgggtgccaataagactggactattgggggcaagggactcttgtcaccgtcagttcaacgcgtgcctctacaaagggaccctccgtgtttcctctggctcccagcagcaagtctacaagcggaggaacagccgctctgggctgcctggtcaaggattactttcccgagcctgtgaccgtgtcctggaatagcggagcactgacaagcggcgtgcacacctttccagccgtgctgcaaagcagcggcctgtactctctgagcagcgtggtcacagtgcctagctctagcctgggcacccagacctacatctgcaatgtgaaccacaagcctagcaacaccaaggtggacaagagagtggaacccaagagctgtggtaccatcactcaaggtttggcagtgtcaaccatctcatcattctttccacctggctaccaagtgtccttctgcctggtcatggtgctgctgttcgccgtggataccggcctgtacttcagcgtcaagaccaacatccggtccagcaccagagactggaaggaccacaagttcaagtggcggaaggacccccaggacaag

SEQ ID NO: 6414 - DNA, 2214 bp, synthetic construct
  source 1..2214: mol_type = other DNA
atggccttaccagtgaccgccttgctcctgccgctggccttgctgctccacgccgccaggccggacatccagttgacccagtcccccagctcactcagcgccagtgtgggggaccgggtgaccattacctgtaaagccagtcagagtgtggactatgagggggatagcttcctgaattggtatcagcagaagcctggcaaagccccaaagctgctgatctacgctgcatctaatctggagtcaggcgtgccttctaggttctccggtagtgggtctgggaccgatttcacattgaccatttcatccctccaacccgaggatttcgctacatattactgtcagcagtccaatgaggaccctctcacctttggccagggcaccaaagttgaaattaagagactcgaggacctgaagaacgtgttcccacctgaggtggccgtgttcgagcctagcgaggccgagatcagccacacccagaaagccaccctcgtgtgcctggctaccggcttctaccccgaccatgtggaactgtcttggtgggtcaacggcaaagaggtgcacagcggcgtgtctaccgacccccagccactgaaagaacagcccgccctgaacgacagccggtactgcctgagcagcagactgagagtgtccgccaccttctggcagaacccccggaaccacttcagatgccaggtgcagttctacggcctgagcgagaacgacgagtggacccaggacagagccaagcccgtgacccagatcgtgtctgccgaagcctggggcagagccgattgcggatcccagagcttcggcctgctggaccccaagctgtgctacctgctggatggcatcctgttcatctacggcgtgatcctgaccgccctgttcctgagagtgaagttcagcagaagcgccgacgcccctgcctaccagcagggacagaaccaactgtacaacgagctgaacctgggcagacgggaagagtacgacgtgctggacaagcggagaggcagggaccctgagatgggcggaaagccccggagaaagaacccccaggaaggactgtataacgaactccagaaagacaagatggccgaagcctacagcgagatcggcatgaagggcgagcggagaagaggcaagggccacgatggcctgtaccagggcctgagcaccgccaccaaggacacctatgacgccctgcacatgcaggccctgcctccaagaagggccaagcgatctggatctggagcaacaaacttctcactactcaaacaagcaggtgacgtggaggagaatcccgggcctactagtatggactggatttggcgcatccttttccttgtcggcgctgctaccggcgcgcattccttcgaagtccaacttgtggagtctggagggggcctggtgcagcccggcggctctctcagactgtcttgtgcggcaagcggctacaccttcacctcttactggatagaatgggtgaggcaggcacctggaaagggactggagtggattggagagattctgccaggagggggagatacaaattacaatgaaatcttcaaggggcgggccaccttttcagcggataccagcaagaatacagcttacctgcagatgaatagcctccgggcagaagataccgctgtttattattgcacgagacgggtgccaataagactggactattgggggcaagggactcttgtcaccgtcagttcaacgcgtatccagaaccctgatcctgccgtgtaccagctgcgggatagcaagagcagcgacaagagcgtgtgtctgttcaccgacttcgacagccagaccaacgtgtcccagagcaaggactccgacgtgtacatcaccgataagaccgtgctggacatgcggagcatggacttcaagagcaactccgccgtggcctggtccaacaagtccgatttcgcctgcgccaacgccttcaacaacagcattatccccgaggacacattcttcccaagccccgagagcagctgcggtaccatcactcaaggtttggcagtgtcaaccatctcatcattctttccacctggctaccaagtgtccttctgcctggtcatggtgctgctgttcgccgtggataccggcctgtacttcagcgtcaagaccaacatccggtccagcaccagagactggaaggaccacaagttcaagtggcggaaggacccccaggacaag

SEQ ID NO: 6415 - DNA, 2139 bp, synthetic construct
  source 1..2139: mol_type = other DNA
atggccttaccagtgaccgccttgctcctgccgctggccttgctgctccacgccgccaggccggacatccagttgacccagtcccccagctcactcagcgccagtgtgggggaccgggtgaccattacctgtaaagccagtcagagtgtggactatgagggggatagcttcctgaattggtatcagcagaagcctggcaaagccccaaagctgctgatctacgctgcatctaatctggagtcaggcgtgccttctaggttctccggtagtgggtctgggaccgatttcacattgaccatttcatccctccaacccgaggatttcgctacatattactgtcagcagtccaatgaggaccctctcacctttggccagggcaccaaagttgaaattaagagactcgaggacctgaagaacgtgttcccacctgaggtggccgtgttcgagcctagcgaggccgagatcagccacacccagaaagccaccctcgtgtgcctggctaccggcttctaccccgaccatgtggaactgtcttggtgggtcaacggcaaagaggtgcacagcggcgtgtctaccgacccccagccactgaaagaacagcccgccctgaacgacagccggtactgcctgagcagcagactgagagtgtccgccaccttctggcagaacccccggaaccacttcagatgccaggtgcagttctacggcctgagcgagaacgacgagtggacccaggacagagccaagcccgtgacccagatcgtgtctgccgaagcctggggcagagccgattgcggatcccagagcttcggcctgctggaccccaagctgtgctacctgctggatggcatcctgttcatctacggcgtgatcctgaccgccctgttcctgagagtgaagttcagcagaagcgccgacgcccctgcctaccagcagggacagaaccaactgtacaacgagctgaacctgggcagacgggaagagtacgacgtgctggacaagcggagaggcagggaccctgagatgggcggaaagccccggagaaagaacccccaggaaggactgtataacgaactccagaaagacaagatggccgaagcctacagcgagatcggcatgaagggcgagcggagaagaggcaagggccacgatggcctgtaccagggcctgagcaccgccaccaaggacacctatgacgccctgcacatgcaggccctgcctccaagaagggccaagcgatctggatctggagcaacaaacttctcactactcaaacaagcaggtgacgtggaggagaatcccgggcctactagtatggactggatttggcgcatccttttccttgtcggcgctgctaccggcgcgcattccttcgaagtccaacttgtggagtctggagggggcctggtgcagcccggcggctctctcagactgtcttgtgcggcaagcggctacaccttcacctcttactggatagaatgggtgaggcaggcacctggaaagggactggagtggattggagagattctgccaggagggggagatacaaattacaatgaaatcttcaaggggcgggccaccttttcagcggataccagcaagaatacagcttacctgcagatgaatagcctccgggcagaagataccgctgtttattattgcacgagacgggtgccaataagactggactattgggggcaagggactcttgtcaccgtcagttcaacgcgtatccagaaccctgatcctgccgtgtaccagctgcgggatagcaagagcagcgacaagagcgtgtgtctgttcaccgacttcgacagccagaccaacgtgtcccagagcaaggactccgacgtgtacatcaccgataagaccgtgctggacatgcggagcatggacttcaagagcaactccgccgtggcctggtccaacaagtccgatttcgcctgcgccaacgccttcaacaacagcattatccccgaggacacattcttcccaagccccgagagcagctgcggtaccatcactcaaggtttggcagtgtcaaccatctcatcattctttccacctggctaccaagtgtccttctgcctggtcatggtgctgctgttcgccgtggataccggcctgtacttcagcgtc

SEQ ID NO: 6416 - DNA, 2142 bp, synthetic construct
  source 1..2142: mol_type = other DNA
atggccttaccagtgaccgccttgctcctgccgctggccttgctgctccacgccgccaggccggacatccagttgacccagtcccccagctcactcagcgccagtgtgggggaccgggtgaccattacctgtaaagccagtcagagtgtggactatgagggggatagcttcctgaattggtatcagcagaagcctggcaaagccccaaagctgctgatctacgctgcatctaatctggagtcaggcgtgccttctaggttctccggtagtgggtctgggaccgatttcacattgaccatttcatccctccaacccgaggatttcgctacatattactgtcagcagtccaatgaggaccctctcacctttggccagggcaccaaagttgaaattaagagactcgaggacctgaagaacgtgttcccacctgaggtggccgtgttcgagcctagcgaggccgagatcagccacacccagaaagccaccctcgtgtgcctggctaccggcttctaccccgaccatgtggaactgtcttggtgggtcaacggcaaagaggtgcacagcggcgtgtctaccgacccccagccactgaaagaacagcccgccctgaacgacagccggtactgcctgagcagcagactgagagtgtccgccaccttctggcagaacccccggaaccacttcagatgccaggtgcagttctacggcctgagcgagaacgacgagtggacccaggacagagccaagcccgtgacccagatcgtgtctgccgaagcctggggcagagccgattgcggatcccagagcttcggcctgctggaccccaagctgtgctacctgctggatggcatcctgttcatctacggcgtgatcctgaccgccctgttcctgagagtgaagttcagcagaagcgccgacgcccctgcctaccagcagggacagaaccaactgtacaacgagctgaacctgggcagacgggaagagtacgacgtgctggacaagcggagaggcagggaccctgagatgggcggaaagccccggagaaagaacccccaggaaggactgtataacgaactccagaaagacaagatggccgaagcctacagcgagatcggcatgaagggcgagcggagaagaggcaagggccacgatggcctgtaccagggcctgagcaccgccaccaaggacacctatgacgccctgcacatgcaggccctgcctccaagaagggccaagcgatctggatctggagcaacaaacttctcactactcaaacaagcaggtgacgtggaggagaatcccgggcctactagtatggactggatttggcgcatccttttccttgtcggcgctgctaccggcgcgcattccttcgaagtccaacttgtggagtctggagggggcctggtgcagcccggcggctctctcagactgtcttgtgcggcaagcggctacaccttcacctcttactggatagaatgggtgaggcaggcacctggaaagggactggagtggattggagagattctgccaggagggggagatacaaattacaatgaaatcttcaaggggcgggccaccttttcagcggataccagcaagaatacagcttacctgcagatgaatagcctccgggcagaagataccgctgtttattattgcacgagacgggtgccaataagactggactattgggggcaagggactcttgtcaccgtcagttcaacgcgtatccagaaccctgatcctgccgtgtaccagctgcgggatagcaagagcagcgacaagagcgtgtgtctgttcaccgacttcgacagccagaccaacgtgtcccagagcaaggactccgacgtgtacatcaccgataagaccgtgctggacatgcggagcatggacttcaagagcaactccgccgtggcctggtccaacaagtccgatttcgcctgcgccaacgccttcaacaacagcattatccccgaggacacattcttcccaagccccgagagcagctgcggtaccatcactcaaggtttggcagtgtcaaccatctcatcattctttccacctggctaccaagtgtccttctgcctggtcatggtgctgctgttcgccgtggataccggcctgtacttcagcgtcaag

SEQ ID NO: 6417 - DNA, 1887 bp, synthetic construct; identical to SEQ ID NO: 5743
  source 1..1887: mol_type = other DNA

SEQ ID NO: 6418 - DNA, 1887 bp, synthetic construct; identical to SEQ ID NO: 5744
  source 1..1887: mol_type = other DNA

SEQ ID NO: 6419 - DNA, 1887 bp, synthetic construct; identical to SEQ ID NO: 5745
  source 1..1887: mol_type = other DNA

SEQ ID NO: 6420 - DNA, 1887 bp, synthetic construct; identical to SEQ ID NO: 5746
  source 1..1887: mol_type = other DNA

SEQ ID NO: 6421 - DNA, 1869 bp, synthetic construct; identical to SEQ ID NO: 5747
  source 1..1869: mol_type = other DNA

SEQ ID NO: 6422 - DNA, 1956 bp, synthetic construct; identical to SEQ ID NO: 5748
  source 1..1956: mol_type = other DNA

SEQ ID NO: 6423 - DNA, 2703 bp, synthetic construct; identical to SEQ ID NO: 5841
  source 1..2703: mol_type = other DNA

SEQ ID NO: 6424 - DNA, 2703 bp, synthetic construct; identical to SEQ ID NO: 5842
  source 1..2703: mol_type = other DNA

SEQ ID NO: 6425 - DNA, 2694 bp, synthetic construct; identical to SEQ ID NO: 5843
  source 1..2694: mol_type = other DNA

SEQ ID NO: 6426 - DNA, 2307 bp, synthetic construct; identical to SEQ ID NO: 5844
  source 1..2307: mol_type = other DNA

SEQ ID NO: 6427 - DNA, 2280 bp, synthetic construct; identical to SEQ ID NO: 5845
  source 1..2280: mol_type = other DNA

SEQ ID NO: 6428 - DNA, 2298 bp, synthetic construct; identical to SEQ ID NO: 5846
  source 1..2298: mol_type = other DNA

SEQ ID NO: 6429 - DNA, 2301 bp, synthetic construct; identical to SEQ ID NO: 5847
  source 1..2301: mol_type = other DNA

SEQ ID NO: 6430 - DNA, 2724 bp, synthetic construct; identical to SEQ ID NO: 5848
  source 1..2724: mol_type = other DNA

SEQ ID NO: 6431 - DNA, 2715 bp, synthetic construct; identical to SEQ ID NO: 5849
  source 1..2715: mol_type = other DNA

SEQ ID NO: 6432 - DNA, 2304 bp, synthetic construct; identical to SEQ ID NO: 5850
  source 1..2304: mol_type = other DNA

SEQ ID NO: 6433 - DNA, 2289 bp, synthetic construct; identical to SEQ ID NO: 5857
  source 1..2289: mol_type = other DNA

SEQ ID NO: 6434 - DNA, 2712 bp, synthetic construct; identical to SEQ ID NO: 5858
  source 1..2712: mol_type = other DNA

SEQ ID NO: 6435 - DNA, 2301 bp, synthetic construct; identical to SEQ ID NO: 5859
  source 1..2301: mol_type = other DNA

SEQ ID NO: 6436 - DNA, 2700 bp, synthetic construct; identical to SEQ ID NO: 5860
  source 1..2700: mol_type = other DNA

SEQ ID NO: 6437 - DNA, 2721 bp, synthetic construct; identical to SEQ ID NO: 5861
  source 1..2721: mol_type = other DNA

SEQ ID NO: 6438 - DNA, 2709 bp, synthetic construct; identical to SEQ ID NO: 5862
  source 1..2709: mol_type = other DNA

SEQ ID NO: 6439 - DNA, 2709 bp, synthetic construct; identical to SEQ ID NO: 5863
  source 1..2709: mol_type = other DNA

SEQ ID NO: 6440 - DNA, 2721 bp, synthetic construct; identical to SEQ ID NO: 5864
  source 1..2721: mol_type = other DNA

SEQ ID NO: 6441 - DNA, 2289 bp, synthetic construct; identical to SEQ ID NO: 5857
  source 1..2289: mol_type = other DNA

SEQ ID NO: 6442 - DNA, 2712 bp, synthetic construct; identical to SEQ ID NO: 5858
  source 1..2712: mol_type = other DNA

SEQ ID NO: 6443 - DNA, 2301 bp, synthetic construct; identical to SEQ ID NO: 5859
  source 1..2301: mol_type = other DNA

SEQ ID NO: 6444 - DNA, 2700 bp, synthetic construct; identical to SEQ ID NO: 5860
  source 1..2700: mol_type = other DNA

SEQ ID NO: 6445 - DNA, 2721 bp, synthetic construct; identical to SEQ ID NO: 5861
  source 1..2721: mol_type = other DNA

SEQ ID NO: 6446 - DNA, 2709 bp, synthetic construct; identical to SEQ ID NO: 5862
  source 1..2709: mol_type = other DNA

SEQ ID NO: 6447 - DNA, 2709 bp, synthetic construct; identical to SEQ ID NO: 5863
  source 1..2709: mol_type = other DNA

SEQ ID NO: 6448 - DNA, 2721 bp, synthetic construct; identical to SEQ ID NO: 5864
  source 1..2721: mol_type = other DNA

SEQ ID NO: 6449 - DNA, 2388 bp, synthetic construct
  source 1..2388: mol_type = other DNA
atggccttaccagtgaccgccttgctcctgccgctggccttgctgctccacgccgccaggccggacatcgtgatgacacagagccctgatagcctggccgtgtctctgggagagagagccaccattaactgcaaggccagccagagcgtggactacgacggcgacagcttcctgaactggtatcagcagaagcccggccagcctcctaagctgctgatctacgccgccagcaatctggaaagcggcgtgccaagcagattttccggctctggcagcggcaccgatttcaccctgacaatatccagcctccagcctgaggacgtggccgtgtactactgccagcagagcaacgacgaccctctgacctttggacagggcaccaaggtggaaatcaaaggacagcctaaggccaatcctaccgtgacactgttccctccaagcagcgaagaactccaggccaacaaggccacacttgtgtgcctgatctccgacttctaccctggggctgtgacagtggcttggaaggccgatggatctcctgtgaaagccggcgtggaaaccaccaagccatccaagcagagcaacaacaaatacgccgccagctcctacctgagcctgacacctgagcagtggaagtcccacagatcctacagctgccaagtgacccacgaaggcagcaccgtggaaaagacagtggcccctacagagtgcagcggatcccagagcttcggcctgctggaccccaagctgtgctacctgctggatggcatcctgttcatctacggcgtgatcctgaccgccctgttcctgagagtgaagttcagcagaagcgccgacgcccctgcctaccagcagggacagaaccaactgtacaacgagctgaacctgggcagacgggaagagtacgacgtgctggacaagcggagaggcagggaccctgagatgggcggaaagccccggagaaagaacccccaggaaggactgtataacgaactccagaaagacaagatggccgaagcctacagcgagatcggcatgaagggcgagcggagaagaggcaagggccacgatggcctgtaccagggcctgagcaccgccaccaaggacacctatgacgccctgcacatgcaggccctgcctccaagaagggccaagcgatctggatctggagcaacaaacttctcactactcaaacaagcaggtgacgtggaggagaatcccgggcctactagtatggactggatttggcgcatccttttccttgtcggcgctgctaccggcgcgcattccttcgaacaagttcagctggttcagagcggagccgaagtgaagaaacctggggcctctgtgaaggtgtcctgcaaagccagcggctacacctttaccagctactggatcaactgggtccgacaggcccctggacaaggactggaatggatgggacagatccttccaggcggaggggacaccaactacaacggcaagttcaagggcagagtgaccatcaccgccgacaccagcacaagcaccgcctacatggaactgagcagcctgagaagcgaggacaccgccgtgtattattgcaccagacgggtgcccatccggctggattattggggacagggaaccctggtcaccgtgtctagtgcctctacaaagggaccctccgtgtttcctctggctcccagcagcaagtctacaagcggaggaacagccgctctgggctgcctggtcaaggattactttcccgagcctgtgaccgtgtcctggaatagcggagcactgacaagcggcgtgcacacctttccagccgtgctgcaaagcagcggcctgtactctctgagcagcgtggtcacagtgcctagctctagcctgggcacccagacctacatctgcaatgtgaaccacaagcctagcaacaccaaggtggacaagagagtggaacccaagagctgtggtacccagagttttgggttgttggaccctaaattgtgctatctgttggacggaatcctgttcatttacggagtgatcctgaccgcattgttcctgcgggttaagttttccagatccgcagacgcacccgcttaccaacaagggcagaaccaactctacaatgaacttaatttggggcggagggaagagtacgacgttctggacaaaaggaggggacgagatcccgagatgggcggaaagcctcgaaggaagaatccgcaagaggggctttataacgaactccagaaagataaaatggcagaagcctatagtgagattgggatgaagggagaaaggaggaggggtaaaggtcacgatgggttgtaccaaggattgagcacagccactaaagatacctatgatgcgctccacatgcaggccctgccgccaaga

SEQ ID NO: 6450 - DNA, 2445 bp, synthetic construct
  source 1..2445: mol_type = other DNA
atggccttaccagtgaccgccttgctcctgccgctggccttgctgctccacgccgccaggccggacatcgtgatgacacagagccctgatagcctggccgtgtctctgggagagagagccaccattaactgcaaggccagccagagcgtggactacgacggcgacagcttcctgaactggtatcagcagaagcccggccagcctcctaagctgctgatctacgccgccagcaatctggaaagcggcgtgccaagcagattttccggctctggcagcggcaccgatttcaccctgacaatatccagcctccagcctgaggacgtggccgtgtactactgccagcagagcaacgacgaccctctgacctttggacagggcaccaaggtggaaatcaaactcgaggacctgaagaacgtgttcccacctgaggtggccgtgttcgagcctagcgaggccgagatcagccacacccagaaagccaccctcgtgtgcctggctaccggcttctaccccgaccatgtggaactgtcttggtgggtcaacggcaaagaggtgcacagcggcgtgtctaccgacccccagccactgaaagaacagcccgccctgaacgacagccggtactgcctgagcagcagactgagagtgtccgccaccttctggcagaacccccggaaccacttcagatgccaggtgcagttctacggcctgagcgagaacgacgagtggacccaggacagagccaagcccgtgacccagatcgtgtctgccgaagcctggggcagagccgattgcggatcccagagcttcggcctgctggaccccaagctgtgctacctgctggatggcatcctgttcatctacggcgtgatcctgaccgccctgttcctgagagtgaagttcagcagaagcgccgacgcccctgcctaccagcagggacagaaccaactgtacaacgagctgaacctgggcagacgggaagagtacgacgtgctggacaagcggagaggcagggaccctgagatgggcggaaagccccggagaaagaacccccaggaaggactgtataacgaactccagaaagacaagatggccgaagcctacagcgagatcggcatgaagggcgagcggagaagaggcaagggccacgatggcctgtaccagggcctgagcaccgccaccaaggacacctatgacgccctgcacatgcaggccctgcctccaagaagggccaagcgatctggatctggagcaacaaacttctcactactcaaacaagcaggtgacgtggaggagaatcccgggcctactagtatggactggatttggcgcatccttttccttgtcggcgctgctaccggcgcgcattccttcgaacaagttcagctggttcagagcggagccgaagtgaagaaacctggggcctctgtgaaggtgtcctgcaaagccagcggctacacctttaccagctactggatcaactgggtccgacaggcccctggacaaggactggaatggatgggacagatccttccaggcggaggggacaccaactacaacggcaagttcaagggcagagtgaccatcaccgccgacaccagcacaagcaccgcctacatggaactgagcagcctgagaagcgaggacaccgccgtgtattattgcaccagacgggtgcccatccggctggattattggggacagggaaccctggtcaccgtgtctagtacgcgtatccagaaccctgatcctgccgtgtaccagctgcgggatagcaagagcagcgacaagagcgtgtgtctgttcaccgacttcgacagccagaccaacgtgtcccagagcaaggactccgacgtgtacatcaccgataagaccgtgctggacatgcggagcatggacttcaagagcaactccgccgtggcctggtccaacaagtccgatttcgcctgcgccaacgccttcaacaacagcattatccccgaggacacattcttcccaagccccgagagcagctgcggtacccagagttttgggttgttggaccctaaattgtgctatctgttggacggaatcctgttcatttacggagtgatcctgaccgcattgttcctgcgggttaagttttccagatccgcagacgcacccgcttaccaacaagggcagaaccaactctacaatgaacttaatttggggcggagggaagagtacgacgttctggacaaaaggaggggacgagatcccgagatgggcggaaagcctcgaaggaagaatccgcaagaggggctttataacgaactccagaaagataaaatggcagaagcctatagtgagattgggatgaagggagaaaggaggaggggtaaaggtcacgatgggttgtaccaaggattgagcacagccactaaagatacctatgatgcgctccacatgcaggccctgccgccaaga

SEQ ID NO: 6451 - DNA, 1887 bp, synthetic construct; identical to SEQ ID NO: 5900
  source 1..1887: mol_type = other DNA

SEQ ID NO: 6452 - DNA, 1887 bp, synthetic construct; identical to SEQ ID NO: 5901
  source 1..1887: mol_type = other DNA

SEQ ID NO: 6453 - DNA, 1887 bp, synthetic construct; identical to SEQ ID NO: 5902
  source 1..1887: mol_type = other DNA

SEQ ID NO: 6454 - DNA, 1887 bp, synthetic construct; identical to SEQ ID NO: 5903
  source 1..1887: mol_type = other DNA

SEQ ID NO: 6455 - DNA, 1869 bp, synthetic construct; identical to SEQ ID NO: 5904
  source 1..1869: mol_type = other DNA

SEQ ID NO: 6456 - DNA, 2703 bp, synthetic construct; identical to SEQ ID NO: 5998
  source 1..2703: mol_type = other DNA

SEQ ID NO: 6457 - DNA, 2703 bp, synthetic construct; identical to SEQ ID NO: 5999
  source 1..2703: mol_type = other DNA

SEQ ID NO: 6458 - DNA, 2694 bp, synthetic construct; identical to SEQ ID NO: 6000
  source 1..2694: mol_type = other DNA

SEQ ID NO: 6459 - DNA, 2307 bp, synthetic construct; identical to SEQ ID NO: 6001
  source 1..2307: mol_type = other DNA

SEQ ID NO: 6460 - DNA, 2280 bp, synthetic construct; identical to SEQ ID NO: 6002
  source 1..2280: mol_type = other DNA

SEQ ID NO: 6461 - DNA, 2298 bp, synthetic construct; identical to SEQ ID NO: 6003
  source 1..2298: mol_type = other DNA

SEQ ID NO: 6462 - DNA, 2301 bp, synthetic construct; identical to SEQ ID NO: 6004
  source 1..2301: mol_type = other DNA

SEQ ID NO: 6463 - DNA, 2724 bp, synthetic construct; identical to SEQ ID NO: 6005
  source 1..2724: mol_type = other DNA

SEQ ID NO: 6464 - DNA, 2715 bp, synthetic construct; identical to SEQ ID NO: 6006
  source 1..2715: mol_type = other DNA

SEQ ID NO: 6465 - DNA, 2304 bp, synthetic construct; identical to SEQ ID NO: 6007
  source 1..2304: mol_type = other DNA

SEQ ID NO: 6466 - DNA, 2703 bp, synthetic construct; identical to SEQ ID NO: 5998
  source 1..2703: mol_type = other DNA

SEQ ID NO: 6467 - DNA, 2703 bp, synthetic construct; identical to SEQ ID NO: 5999
  source 1..2703: mol_type = other DNA

SEQ ID NO: 6468 - DNA, 2694 bp, synthetic construct; identical to SEQ ID NO: 6000
  source 1..2694: mol_type = other DNA

SEQ ID NO: 6469 - DNA, 2280 bp, synthetic construct; identical to SEQ ID NO: 6002
  source 1..2280: mol_type = other DNA

SEQ ID NO: 6470 - DNA, 2298 bp, synthetic construct; identical to SEQ ID NO: 6003
  source 1..2298: mol_type = other DNA

SEQ ID NO: 6471 - DNA, 2301 bp, synthetic construct; identical to SEQ ID NO: 6004
  source 1..2301: mol_type = other DNA

SEQ ID NO: 6472 - DNA, 2724 bp, synthetic construct; identical to SEQ ID NO: 6005
  source 1..2724: mol_type = other DNA

SEQ ID NO: 6473 - DNA, 2715 bp, synthetic construct; identical to SEQ ID NO: 6006
  source 1..2715: mol_type = other DNA

SEQ ID NO: 6474 - DNA, 2304 bp, synthetic construct; identical to SEQ ID NO: 6007
  source 1..2304: mol_type = other DNA

SEQ ID NO: 6475 - DNA, 2703 bp, synthetic construct; identical to SEQ ID NO: 5998
  source 1..2703: mol_type = other DNA

SEQ ID NO: 6476 - DNA, 2703 bp, synthetic construct; identical to SEQ ID NO: 5999
  source 1..2703: mol_type = other DNA

SEQ ID NO: 6477 - DNA, 2694 bp, synthetic construct; identical to SEQ ID NO: 6000
  source 1..2694: mol_type = other DNA

SEQ ID NO: 6478 - DNA, 2280 bp, synthetic construct; identical to SEQ ID NO: 6002
  source 1..2280: mol_type = other DNA

SEQ ID NO: 6479 - DNA, 2298 bp, synthetic construct; identical to SEQ ID NO: 6003
  source 1..2298: mol_type = other DNA

SEQ ID NO: 6480 - DNA, 2301 bp, synthetic construct; identical to SEQ ID NO: 6004
  source 1..2301: mol_type = other DNA

SEQ ID NO: 6481 - DNA, 2724 bp, synthetic construct; identical to SEQ ID NO: 6005
  source 1..2724: mol_type = other DNA

SEQ ID NO: 6482 - DNA, 2715 bp, synthetic construct; identical to SEQ ID NO: 6006
  source 1..2715: mol_type = other DNA

SEQ ID NO: 6483 - DNA, 2304 bp, synthetic construct; identical to SEQ ID NO: 6007
  source 1..2304: mol_type = other DNA

SEQ ID NO: 6484 - DNA, 2385 bp, synthetic construct
  source 1..2385: mol_type = other DNA
atggccttaccagtgaccgccttgctcctgccgctggccttgctgctccacgccgccaggccggacatcgtgatgacacagagccctgatagcctggccgtgtctctgggagagagagccaccattaactgcaaggccagccagagcgtggactacgacggcgacagcttcctgaactggtatcagcagaagcccggccagcctcctaagctgctgatctacgccgccagcaatctggaaagcggcgtgccaagcagattttccggctctggcagcggcaccgatttcaccctgacaatatccagcctccagcctgaggacgtggccgtgtactactgccagcagagcaacgacgaccctctgacctttggacagggcaccaaggtggaaatcaaaggacagcctaaggccaatcctaccgtgacactgttccctccaagcagcgaagaactccaggccaacaaggccacacttgtgtgcctgatctccgacttctaccctggggctgtgacagtggcttggaaggccgatggatctcctgtgaaagccggcgtggaaaccaccaagccatccaagcagagcaacaacaaatacgccgccagctcctacctgagcctgacacctgagcagtggaagtcccacagatcctacagctgccaagtgacccacgaaggcagcaccgtggaaaagacagtggcccctacagagtgcagcggatcccagagcttcggcctgctggaccccaagctgtgctacctgctggatggcatcctgttcatctacggcgtgatcctgaccgccctgttcctgagagtgaagttcagcagaagcgccgacgcccctgcctaccagcagggacagaaccaactgtacaacgagctgaacctgggcagacgggaagagtacgacgtgctggacaagcggagaggcagggaccctgagatgggcggaaagccccggagaaagaacccccaggaaggactgtataacgaactccagaaagacaagatggccgaagcctacagcgagatcggcatgaagggcgagcggagaagaggcaagggccacgatggcctgtaccagggcctgagcaccgccaccaaggacacctatgacgccctgcacatgcaggccctgcctccaagaagggccaagcgatctggatctggagcaacaaacttctcactactcaaacaagcaggtgacgtggaggagaatcccgggcctactagtatggactggatttggcgcatccttttccttgtcggcgctgctaccggcgcgcattccttcgaagtccaacttgtggagtctggagggggcctggtgcagcccggcggctctctcagactgtcttgtgcggcaagcggctacaccttcacctcttactggatagaatgggtgaggcaggcacctggaaagggactggagtggattggagagattctgccaggagggggagatacaaattacaatgaaatcttcaaggggcgggccaccttttcagcggataccagcaagaatacagcttacctgcagatgaatagcctccgggcagaagataccgctgtttattattgcacgagacgggtgccaataagactggactattgggggcaagggactcttgtcaccgtcagttcagcctctacaaagggaccctccgtgtttcctctggctcccagcagcaagtctacaagcggaggaacagccgctctgggctgcctggtcaaggattactttcccgagcctgtgaccgtgtcctggaatagcggagcactgacaagcggcgtgcacacctttccagccgtgctgcaaagcagcggcctgtactctctgagcagcgtggtcacagtgcctagctctagcctgggcacccagacctacatctgcaatgtgaaccacaagcctagcaacaccaaggtggacaagagagtggaacccaagagctgtggtacccagagttttgggttgttggaccctaaattgtgctatctgttggacggaatcctgttcatttacggagtgatcctgaccgcattgttcctgcgggttaagttttccagatccgcagacgcacccgcttaccaacaagggcagaaccaactctacaatgaacttaatttggggcggagggaagagtacgacgttctggacaaaaggaggggacgagatcccgagatgggcggaaagcctcgaaggaagaatccgcaagaggggctttataacgaactccagaaagataaaatggcagaagcctatagtgagattgggatgaagggagaaaggaggaggggtaaaggtcacgatgggttgtaccaaggattgagcacagccactaaagatacctatgatgcgctccacatgcaggccctgccgccaaga

SEQ ID NO: 6485 - DNA, 2442 bp, synthetic construct; identical to SEQ ID NO: 4718
  source 1..2442: mol_type = other DNA

SEQ ID NO: 6486 - DNA, 2166 bp, synthetic construct
  source 1..2166: mol_type = other DNA
atggccttaccagtgaccgccttgctcctgccgctggccttgctgctccacgccgccaggccggacatcgtgatgacacagagccctgatagcctggccgtgtctctgggagagagagccaccattaactgcaaggccagccagagcgtggactacgacggcgacagcttcctgaactggtatcagcagaagcccggccagcctcctaagctgctgatctacgccgccagcaatctggaaagcggcgtgccaagcagattttccggctctggcagcggcaccgatttcaccctgacaatatccagcctccagcctgaggacgtggccgtgtactactgccagcagagcaacgacgaccctctgacctttggacagggcaccaaggtggaaatcaaactcgagggacagcctaaggccaatcctaccgtgacactgttccctccaagcagcgaagaactccaggccaacaaggccacacttgtgtgcctgatctccgacttctaccctggggctgtgacagtggcttggaaggccgatggatctcctgtgaaagccggcgtggaaaccaccaagccatccaagcagagcaacaacaaatacgccgccagctcctacctgagcctgacacctgagcagtggaagtcccacagatcctacagctgccaagtgacccacgaaggcagcaccgtggaaaagacagtggcccctacagagtgcagcggatcccagagcttcggcctgctggaccccaagctgtgctacctgctggatggcatcctgttcatctacggcgtgatcctgaccgccctgttcctgagagtgaagttcagcagaagcgccgacgcccctgcctaccagcagggacagaaccaactgtacaacgagctgaacctgggcagacgggaagagtacgacgtgctggacaagcggagaggcagggaccctgagatgggcggaaagccccggagaaagaacccccaggaaggactgtataacgaactccagaaagacaagatggccgaagcctacagcgagatcggcatgaagggcgagcggagaagaggcaagggccacgatggcctgtaccagggcctgagcaccgccaccaaggacacctatgacgccctgcacatgcaggccctgcctccaagaagggccaagcgatctggatctggagcaacaaacttctcactactcaaacaagcaggtgacgtggaggagaatcccgggcctactagtatggactggatttggcgcatccttttccttgtcggcgctgctaccggcgcgcattccttcgaagtccaacttgtggagtctggagggggcctggtgcagcccggcggctctctcagactgtcttgtgcggcaagcggctacaccttcacctcttactggatagaatgggtgaggcaggcacctggaaagggactggagtggattggagagattctgccaggagggggagatacaaattacaatgaaatcttcaaggggcgggccaccttttcagcggataccagcaagaatacagcttacctgcagatgaatagcctccgggcagaagataccgctgtttattattgcacgagacgggtgccaataagactggactattgggggcaagggactcttgtcaccgtcagttcaacgcgtgcctctacaaagggaccctccgtgtttcctctggctcccagcagcaagtctacaagcggaggaacagccgctctgggctgcctggtcaaggattactttcccgagcctgtgaccgtgtcctggaatagcggagcactgacaagcggcgtgcacacctttccagccgtgctgcaaagcagcggcctgtactctctgagcagcgtggtcacagtgcctagctctagcctgggcacccagacctacatctgcaatgtgaaccacaagcctagcaacaccaaggtggacaagagagtggaacccaagagctgtggtaccatcactcaaggtttggcagtgtcaaccatctcatcattctttccacctggctaccaagtgtccttctgcctggtcatggtgctgctgttcgccgtggataccggcctgtacttcagcgtcaagaccaacatccggtccagcaccagagactggaaggaccacaagttcaagtggcggaaggacccccaggacaag

SEQ ID NO: 6487 - DNA, 2211 bp, synthetic construct
  source 1..2211: mol_type = other DNA
atggccttaccagtgaccgccttgctcctgccgctggccttgctgctccacgccgccaggccggacatcgtgatgacacagagccctgatagcctggccgtgtctctgggagagagagccaccattaactgcaaggccagccagagcgtggactacgacggcgacagcttcctgaactggtatcagcagaagcccggccagcctcctaagctgctgatctacgccgccagcaatctggaaagcggcgtgccaagcagattttccggctctggcagcggcaccgatttcaccctgacaatatccagcctccagcctgaggacgtggccgtgtactactgccagcagagcaacgacgaccctctgacctttggacagggcaccaaggtggaaatcaaactcgaggacctgaagaacgtgttcccacctgaggtggccgtgttcgagcctagcgaggccgagatcagccacacccagaaagccaccctcgtgtgcctggctaccggcttctaccccgaccatgtggaactgtcttggtgggtcaacggcaaagaggtgcacagcggcgtgtctaccgacccccagccactgaaagaacagcccgccctgaacgacagccggtactgcctgagcagcagactgagagtgtccgccaccttctggcagaacccccggaaccacttcagatgccaggtgcagttctacggcctgagcgagaacgacgagtggacccaggacagagccaagcccgtgacccagatcgtgtctgccgaagcctggggcagagccgattgcggatcccagagcttcggcctgctggaccccaagctgtgctacctgctggatggcatcctgttcatctacggcgtgatcctgaccgccctgttcctgagagtgaagttcagcagaagcgccgacgcccctgcctaccagcagggacagaaccaactgtacaacgagctgaacctgggcagacgggaagagtacgacgtgctggacaagcggagaggcagggaccctgagatgggcggaaagccccggagaaagaacccccaggaaggactgtataacgaactccagaaagacaagatggccgaagcctacagcgagatcggcatgaagggcgagcggagaagaggcaagggccacgatggcctgtaccagggcctgagcaccgccaccaaggacacctatgacgccctgcacatgcaggccctgcctccaagaagggccaagcgatctggatctggagcaacaaacttctcactactcaaacaagcaggtgacgtggaggagaatcccgggcctactagtatggactggatttggcgcatccttttccttgtcggcgctgctaccggcgcgcattccttcgaagtccaacttgtggagtctggagggggcctggtgcagcccggcggctctctcagactgtcttgtgcggcaagcggctacaccttcacctcttactggatagaatgggtgaggcaggcacctggaaagggactggagtggattggagagattctgccaggagggggagatacaaattacaatgaaatcttcaaggggcgggccaccttttcagcggataccagcaagaatacagcttacctgcagatgaatagcctccgggcagaagataccgctgtttattattgcacgagacgggtgccaataagactggactattgggggcaagggactcttgtcaccgtcagttcaacgcgtatccagaaccctgatcctgccgtgtaccagctgcgggatagcaagagcagcgacaagagcgtgtgtctgttcaccgacttcgacagccagaccaacgtgtcccagagcaaggactccgacgtgtacatcaccgataagaccgtgctggacatgcggagcatggacttcaagagcaactccgccgtggcctggtccaacaagtccgatttcgcctgcgccaacgccttcaacaacagcattatccccgaggacacattcttcccaagccccgagagcagctgcggtaccatcactcaaggtttggcagtgtcaaccatctcatcattctttccacctggctaccaagtgtccttctgcctggtcatggtgctgctgttcgccgtggataccggcctgtacttcagcgtcaagaccaacatccggtccagcaccagagactggaaggaccacaagttcaagtggcggaaggacccccaggacaag

SEQ ID NO: 6488 - DNA, 2136 bp, synthetic construct
  source 1..2136: mol_type = other DNA
atggccttaccagtgaccgccttgctcctgccgctggccttgctgctccacgccgccaggccggacatcgtgatgacacagagccctgatagcctggccgtgtctctgggagagagagccaccattaactgcaaggccagccagagcgtggactacgacggcgacagcttcctgaactggtatcagcagaagcccggccagcctcctaagctgctgatctacgccgccagcaatctggaaagcggcgtgccaagcagattttccggctctggcagcggcaccgatttcaccctgacaatatccagcctccagcctgaggacgtggccgtgtactactgccagcagagcaacgacgaccctctgacctttggacagggcaccaaggtggaaatcaaactcgaggacctgaagaacgtgttcccacctgaggtggccgtgttcgagcctagcgaggccgagatcagccacacccagaaagccaccctcgtgtgcctggctaccggcttctaccccgaccatgtggaactgtcttggtgggtcaacggcaaagaggtgcacagcggcgtgtctaccgacccccagccactgaaagaacagcccgccctgaacgacagccggtactgcctgagcagcagactgagagtgtccgccaccttctggcagaacccccggaaccacttcagatgccaggtgcagttctacggcctgagcgagaacgacgagtggacccaggacagagccaagcccgtgacccagatcgtgtctgccgaagcctggggcagagccgattgcggatcccagagcttcggcctgctggaccccaagctgtgctacctgctggatggcatcctgttcatctacggcgtgatcctgaccgccctgttcctgagagtgaagttcagcagaagcgccgacgcccctgcctaccagcagggacagaaccaactgtacaacgagctgaacctgggcagacgggaagagtacgacgtgctggacaagcggagaggcagggaccctgagatgggcggaaagccccggagaaagaacccccaggaaggactgtataacgaactccagaaagacaagatggccgaagcctacagcgagatcggcatgaagggcgagcggagaagaggcaagggccacgatggcctgtaccagggcctgagcaccgccaccaaggacacctatgacgccctgcacatgcaggccctgcctccaagaagggccaagcgatctggatctggagcaacaaacttctcactactcaaacaagcaggtgacgtggaggagaatcccgggcctactagtatggactggatttggcgcatccttttccttgtcggcgctgctaccggcgcgcattccttcgaagtccaacttgtggagtctggagggggcctggtgcagcccggcggctctctcagactgtcttgtgcggcaagcggctacaccttcacctcttactggatagaatgggtgaggcaggcacctggaaagggactggagtggattggagagattctgccaggagggggagatacaaattacaatgaaatcttcaaggggcgggccaccttttcagcggataccagcaagaatacagcttacctgcagatgaatagcctccgggcagaagataccgctgtttattattgcacgagacgggtgccaataagactggactattgggggcaagggactcttgtcaccgtcagttcaacgcgtatccagaaccctgatcctgccgtgtaccagctgcgggatagcaagagcagcgacaagagcgtgtgtctgttcaccgacttcgacagccagaccaacgtgtcccagagcaaggactccgacgtgtacatcaccgataagaccgtgctggacatgcggagcatggacttcaagagcaactccgccgtggcctggtccaacaagtccgatttcgcctgcgccaacgccttcaacaacagcattatccccgaggacacattcttcccaagccccgagagcagctgcggtaccatcactcaaggtttggcagtgtcaaccatctcatcattctttccacctggctaccaagtgtccttctgcctggtcatggtgctgctgttcgccgtggataccggcctgtacttcagcgtc

SEQ ID NO: 6489 - DNA, 2139 bp, synthetic construct
  source 1..2139: mol_type = other DNA
atggccttaccagtgaccgccttgctcctgccgctggccttgctgctccacgccgccaggccggacatcgtgatgacacagagccctgatagcctggccgtgtctctgggagagagagccaccattaactgcaaggccagccagagcgtggactacgacggcgacagcttcctgaactggtatcagcagaagcccggccagcctcctaagctgctgatctacgccgccagcaatctggaaagcggcgtgccaagcagattttccggctctggcagcggcaccgatttcaccctgacaatatccagcctccagcctgaggacgtggccgtgtactactgccagcagagcaacgacgaccctctgacctttggacagggcaccaaggtggaaatcaaactcgaggacctgaagaacgtgttcccacctgaggtggccgtgttcgagcctagcgaggccgagatcagccacacccagaaagccaccctcgtgtgcctggctaccggcttctaccccgaccatgtggaactgtcttggtgggtcaacggcaaagaggtgcacagcggcgtgtctaccgacccccagccactgaaagaacagcccgccctgaacgacagccggtactgcctgagcagcagactgagagtgtccgccaccttctggcagaacccccggaaccacttcagatgccaggtgcagttctacggcctgagcgagaacgacgagtggacccaggacagagccaagcccgtgacccagatcgtgtctgccgaagcctggggcagagccgattgcggatcccagagcttcggcctgctggaccccaagctgtgctacctgctggatggcatcctgttcatctacggcgtgatcctgaccgccctgttcctgagagtgaagttcagcagaagcgccgacgcccctgcctaccagcagggacagaaccaactgtacaacgagctgaacctgggcagacgggaagagtacgacgtgctggacaagcggagaggcagggaccctgagatgggcggaaagccccggagaaagaacccccaggaaggactgtataacgaactccagaaagacaagatggccgaagcctacagcgagatcggcatgaagggcgagcggagaagaggcaagggccacgatggcctgtaccagggcctgagcaccgccaccaaggacacctatgacgccctgcacatgcaggccctgcctccaagaagggccaagcgatctggatctggagcaacaaacttctcactactcaaacaagcaggtgacgtggaggagaatcccgggcctactagtatggactggatttggcgcatccttttccttgtcggcgctgctaccggcgcgcattccttcgaagtccaacttgtggagtctggagggggcctggtgcagcccggcggctctctcagactgtcttgtgcggcaagcggctacaccttcacctcttactggatagaatgggtgaggcaggcacctggaaagggactggagtggattggagagattctgccaggagggggagatacaaattacaatgaaatcttcaaggggcgggccaccttttcagcggataccagcaagaatacagcttacctgcagatgaatagcctccgggcagaagataccgctgtttattattgcacgagacgggtgccaataagactggactattgggggcaagggactcttgtcaccgtcagttcaacgcgtatccagaaccctgatcctgccgtgtaccagctgcgggatagcaagagcagcgacaagagcgtgtgtctgttcaccgacttcgacagccagaccaacgtgtcccagagcaaggactccgacgtgtacatcaccgataagaccgtgctggacatgcggagcatggacttcaagagcaactccgccgtggcctggtccaacaagtccgatttcgcctgcgccaacgccttcaacaacagcattatccccgaggacacattcttcccaagccccgagagcagctgcggtaccatcactcaaggtttggcagtgtcaaccatctcatcattctttccacctggctaccaagtgtccttctgcctggtcatggtgctgctgttcgccgtggataccggcctgtacttcagcgtcaag

SEQ ID NO: 6490 - DNA, 1884 bp, synthetic construct; identical to SEQ ID NO: 6057
  source 1..1884: mol_type = other DNA

SEQ ID NO: 6491 - DNA, 1884 bp, synthetic construct; identical to SEQ ID NO: 6058
  source 1..1884: mol_type = other DNA

SEQ ID NO: 6492 - DNA, 1884 bp, synthetic construct; identical to SEQ ID NO: 6059
  source 1..1884: mol_type = other DNA

SEQ ID NO: 6493 - DNA, 1884 bp, synthetic construct; identical to SEQ ID NO: 6060
  source 1..1884: mol_type = other DNA

SEQ ID NO: 6494 - DNA, 1866 bp, synthetic construct; identical to SEQ ID NO: 6061
  source 1..1866: mol_type = other DNA

SEQ ID NO: 6495 - DNA, 2700 bp, synthetic construct; identical to SEQ ID NO: 6155
  source 1..2700: mol_type = other DNA

SEQ ID NO: 6496 - DNA, 2700 bp, synthetic construct; identical to SEQ ID NO: 6156
  source 1..2700: mol_type = other DNA

SEQ ID NO: 6497 - DNA, 2691 bp, synthetic construct; identical to SEQ ID NO: 6157
  source 1..2691: mol_type = other DNA

SEQ ID NO: 6498 - DNA, 2304 bp, synthetic construct; identical to SEQ ID NO: 6158
  source 1..2304: mol_type = other DNA

SEQ ID NO: 6499 - DNA, 2277 bp, synthetic construct; identical to SEQ ID NO: 6159
  source 1..2277: mol_type = other DNA

SEQ ID NO: 6500 - DNA, 2295 bp, synthetic construct; identical to SEQ ID NO: 6160
  source 1..2295: mol_type = other DNA

SEQ ID NO: 6501 - DNA, 2298 bp, synthetic construct; identical to SEQ ID NO: 6161
  source 1..2298: mol_type = other DNA

SEQ ID NO: 6502 - DNA, 2721 bp, synthetic construct; identical to SEQ ID NO: 6162
  source 1..2721: mol_type = other DNA

SEQ ID NO: 6503 - DNA, 2712 bp, synthetic construct; identical to SEQ ID NO: 6163
  source 1..2712: mol_type = other DNA

SEQ ID NO: 6504 - DNA, 2301 bp, synthetic construct; identical to SEQ ID NO: 6164
  source 1..2301: mol_type = other DNA

SEQ ID NO: 6505 - DNA, 2301 bp, synthetic construct; identical to SEQ ID NO: 6165
  source 1..2301: mol_type = other DNA

SEQ ID NO: 6506 - DNA, 2286 bp, synthetic construct; identical to SEQ ID NO: 6171
  source 1..2286: mol_type = other DNA

SEQ ID NO: 6507 - DNA, 2709 bp, synthetic construct; identical to SEQ ID NO: 6172
  source 1..2709: mol_type = other DNA

SEQ ID NO: 6508 - DNA, 2298 bp, synthetic construct; identical to SEQ ID NO: 6173
  source 1..2298: mol_type = other DNA

SEQ ID NO: 6509 - DNA, 2697 bp, synthetic construct; identical to SEQ ID NO: 6174
  source 1..2697: mol_type = other DNA

SEQ ID NO: 6510 - DNA, 2718 bp, synthetic construct; identical to SEQ ID NO: 6175
  source 1..2718: mol_type = other DNA

SEQ ID NO: 6511 - DNA, 2706 bp, synthetic construct; identical to SEQ ID NO: 6176
  source 1..2706: mol_type = other DNA

SEQ ID NO: 6512 - DNA, 2706 bp, synthetic construct; identical to SEQ ID NO: 6177
  source 1..2706: mol_type = other DNA

SEQ ID NO: 6513 - DNA, 2718 bp, synthetic construct; identical to SEQ ID NO: 6178
  source 1..2718: mol_type = other DNA

SEQ ID NO: 6514 - DNA, 1872 bp, synthetic construct; identical to SEQ ID NO: 6182
  source 1..1872: mol_type = other DNA

SEQ ID NO: 6515 - DNA, 1860 bp, synthetic construct; identical to SEQ ID NO: 6183
  source 1..1860: mol_type = other DNA

SEQ ID NO: 6516 - DNA, 1860 bp, synthetic construct; identical to SEQ ID NO: 4743
  source 1..1860: mol_type = other DNA

SEQ ID NO: 6517 - DNA, 1872 bp, synthetic construct; identical to SEQ ID NO: 6185
  source 1..1872: mol_type = other DNA

SEQ ID NO: 6518 - DNA, 2442 bp, synthetic construct; identical to SEQ ID NO: 4719
  source 1..2442: mol_type = other DNA

SEQ ID NO: 6519 - DNA, 2166 bp, synthetic construct
  source 1..2166: mol_type = other DNA
atggccttaccagtgaccgccttgctcctgccgctggccttgctgctccacgccgccaggccggacatcgtgatgacacagagccctgatagcctggccgtgtctctgggagagagagccaccattaactgcaaggccagccagagcgtggactacgacggcgacagcttcctgaactggtatcagcagaagcccggccagcctcctaagctgctgatctacgccgccagcaatctggaaagcggcgtgccaagcagattttccggctctggcagcggcaccgatttcaccctgacaatatccagcctccagcctgaggacgtggccgtgtactactgccagcagagcaacgacgaccctctgacctttggacagggcaccaaggtggaaatcaaactcgagggacagcctaaggccaatcctaccgtgacactgttccctccaagcagcgaagaactccaggccaacaaggccacacttgtgtgcctgatctccgacttctaccctggggctgtgacagtggcttggaaggccgatggatctcctgtgaaagccggcgtggaaaccaccaagccatccaagcagagcaacaacaaatacgccgccagctcctacctgagcctgacacctgagcagtggaagtcccacagatcctacagctgccaagtgacccacgaaggcagcaccgtggaaaagacagtggcccctacagagtgcagcggatcccagagcttcggcctgctggaccccaagctgtgctacctgctggatggcatcctgttcatctacggcgtgatcctgaccgccctgttcctgagagtgaagttcagcagaagcgccgacgcccctgcctaccagcagggacagaaccaactgtacaacgagctgaacctgggcagacgggaagagtacgacgtgctggacaagcggagaggcagggaccctgagatgggcggaaagccccggagaaagaacccccaggaaggactgtataacgaactccagaaagacaagatggccgaagcctacagcgagatcggcatgaagggcgagcggagaagaggcaagggccacgatggcctgtaccagggcctgagcaccgccaccaaggacacctatgacgccctgcacatgcaggccctgcctccaagaagggccaagcgatctggatctggagcaacaaacttctcactactcaaacaagcaggtgacgtggaggagaatcccgggcctactagtatggactggatttggcgcatccttttccttgtcggcgctgctaccggcgcgcattccttcgaagtccaacttgtggagtctggagggggcctggtgcagcccggcggctctctcagactgtcttgtgcggcaagcggctacaccttcagctcttactggatagaatgggtgaggcaggcacctggaaagggactggagtggattggagagattctgccaggagggggagatacaaattacaatgaaatcttcaaggggcgggccaccttttcagcggataccagcaagaatacagcttacctgcagatgaatagcctccgggcagaagataccgctgtttattattgcacgagacgggtgccaataagactggactattgggggcaagggactcttgtcaccgtcagttcaacgcgtgcctctacaaagggaccctccgtgtttcctctggctcccagcagcaagtctacaagcggaggaacagccgctctgggctgcctggtcaaggattactttcccgagcctgtgaccgtgtcctggaatagcggagcactgacaagcggcgtgcacacctttccagccgtgctgcaaagcagcggcctgtactctctgagcagcgtggtcacagtgcctagctctagcctgggcacccagacctacatctgcaatgtgaaccacaagcctagcaacaccaaggtggacaagagagtggaacccaagagctgtggtaccatcactcaaggtttggcagtgtcaaccatctcatcattctttccacctggctaccaagtgtccttctgcctggtcatggtgctgctgttcgccgtggataccggcctgtacttcagcgtcaagaccaacatccggtccagcaccagagactggaaggaccacaagttcaagtggcggaaggacccccaggacaag

SEQ ID NO: 6520 - DNA, 2211 bp, synthetic construct
  source 1..2211: mol_type = other DNA
atggccttaccagtgaccgccttgctcctgccgctggccttgctgctccacgccgccaggccggacatcgtgatgacacagagccctgatagcctggccgtgtctctgggagagagagccaccattaactgcaaggccagccagagcgtggactacgacggcgacagcttcctgaactggtatcagcagaagcccggccagcctcctaagctgctgatctacgccgccagcaatctggaaagcggcgtgccaagcagattttccggctctggcagcggcaccgatttcaccctgacaatatccagcctccagcctgaggacgtggccgtgtactactgccagcagagcaacgacgaccctctgacctttggacagggcaccaaggtggaaatcaaactcgaggacctgaagaacgtgttcccacctgaggtggccgtgttcgagcctagcgaggccgagatcagccacacccagaaagccaccctcgtgtgcctggctaccggcttctaccccgaccatgtggaactgtcttggtgggtcaacggcaaagaggtgcacagcggcgtgtctaccgacccccagccactgaaagaacagcccgccctgaacgacagccggtactgcctgagcagcagactgagagtgtccgccaccttctggcagaacccccggaaccacttcagatgccaggtgcagttctacggcctgagcgagaacgacgagtggacccaggacagagccaagcccgtgacccagatcgtgtctgccgaagcctggggcagagccgattgcggatcccagagcttcggcctgctggaccccaagctgtgctacctgctggatggcatcctgttcatctacggcgtgatcctgaccgccctgttcctgagagtgaagttcagcagaagcgccgacgcccctgcctaccagcagggacagaaccaactgtacaacgagctgaacctgggcagacgggaagagtacgacgtgctggacaagcggagaggcagggaccctgagatgggcggaaagccccggagaaagaacccccaggaaggactgtataacgaactccagaaagacaagatggccgaagcctacagcgagatcggcatgaagggcgagcggagaagaggcaagggccacgatggcctgtaccagggcctgagcaccgccaccaaggacacctatgacgccctgcacatgcaggccctgcctccaagaagggccaagcgatctggatctggagcaacaaacttctcactactcaaacaagcaggtgacgtggaggagaatcccgggcctactagtatggactggatttggcgcatccttttccttgtcggcgctgctaccggcgcgcattccttcgaagtccaacttgtggagtctggagggggcctggtgcagcccggcggctctctcagactgtcttgtgcggcaagcggctacaccttcagctcttactggatagaatgggtgaggcaggcacctggaaagggactggagtggattggagagattctgccaggagggggagatacaaattacaatgaaatcttcaaggggcgggccaccttttcagcggataccagcaagaatacagcttacctgcagatgaatagcctccgggcagaagataccgctgtttattattgcacgagacgggtgccaataagactggactattgggggcaagggactcttgtcaccgtcagttcaacgcgtatccagaaccctgatcctgccgtgtaccagctgcgggatagcaagagcagcgacaagagcgtgtgtctgttcaccgacttcgacagccagaccaacgtgtcccagagcaaggactccgacgtgtacatcaccgataagaccgtgctggacatgcggagcatggacttcaagagcaactccgccgtggcctggtccaacaagtccgatttcgcctgcgccaacgccttcaacaacagcattatccccgaggacacattcttcccaagccccgagagcagctgcggtaccatcactcaaggtttggcagtgtcaaccatctcatcattctttccacctggctaccaagtgtccttctgcctggtcatggtgctgctgttcgccgtggataccggcctgtacttcagcgtcaagaccaacatccggtccagcaccagagactggaaggaccacaagttcaagtggcggaaggacccccaggacaag

SEQ ID NO: 6521 - DNA, 2136 bp, synthetic construct
  source 1..2136: mol_type = other DNA
atggccttaccagtgaccgccttgctcctgccgctggccttgctgctccacgccgccaggccggacatcgtgatgacacagagccctgatagcctggccgtgtctctgggagagagagccaccattaactgcaaggccagccagagcgtggactacgacggcgacagcttcctgaactggtatcagcagaagcccggccagcctcctaagctgctgatctacgccgccagcaatctggaaagcggcgtgccaagcagattttccggctctggcagcggcaccgatttcaccctgacaatatccagcctccagcctgaggacgtggccgtgtactactgccagcagagcaacgacgaccctctgacctttggacagggcaccaaggtggaaatcaaactcgaggacctgaagaacgtgttcccacctgaggtggccgtgttcgagcctagcgaggccgagatcagccacacccagaaagccaccctcgtgtgcctggctaccggcttctaccccgaccatgtggaactgtcttggtgggtcaacggcaaagaggtgcacagcggcgtgtctaccgacccccagccactgaaagaacagcccgccctgaacgacagccggtactgcctgagcagcagactgagagtgtccgccaccttctggcagaacccccggaaccacttcagatgccaggtgcagttctacggcctgagcgagaacgacgagtggacccaggacagagccaagcccgtgacccagatcgtgtctgccgaagcctggggcagagccgattgcggatcccagagcttcggcctgctggaccccaagctgtgctacctgctggatggcatcctgttcatctacggcgtgatcctgaccgccctgttcctgagagtgaagttcagcagaagcgccgacgcccctgcctaccagcagggacagaaccaactgtacaacgagctgaacctgggcagacgggaagagtacgacgtgctggacaagcggagaggcagggaccctgagatgggcggaaagccccggagaaagaacccccaggaaggactgtataacgaactccagaaagacaagatggccgaagcctacagcgagatcggcatgaagggcgagcggagaagaggcaagggccacgatggcctgtaccagggcctgagcaccgccaccaaggacacctatgacgccctgcacatgcaggccctgcctccaagaagggccaagcgatctggatctggagcaacaaacttctcactactcaaacaagcaggtgacgtggaggagaatcccgggcctactagtatggactggatttggcgcatccttttccttgtcggcgctgctaccggcgcgcattccttcgaagtccaacttgtggagtctggagggggcctggtgcagcccggcggctctctcagactgtcttgtgcggcaagcggctacaccttcagctcttactggatagaatgggtgaggcaggcacctggaaagggactggagtggattggagagattctgccaggagggggagatacaaattacaatgaaatcttcaaggggcgggccaccttttcagcggataccagcaagaatacagcttacctgcagatgaatagcctccgggcagaagataccgctgtttattattgcacgagacgggtgccaataagactggactattgggggcaagggactcttgtcaccgtcagttcaacgcgtatccagaaccctgatcctgccgtgtaccagctgcgggatagcaagagcagcgacaagagcgtgtgtctgttcaccgacttcgacagccagaccaacgtgtcccagagcaaggactccgacgtgtacatcaccgataagaccgtgctggacatgcggagcatggacttcaagagcaactccgccgtggcctggtccaacaagtccgatttcgcctgcgccaacgccttcaacaacagcattatccccgaggacacattcttcccaagccccgagagcagctgcggtaccatcactcaaggtttggcagtgtcaaccatctcatcattctttccacctggctaccaagtgtccttctgcctggtcatggtgctgctgttcgccgtggataccggcctgtacttcagcgtc

SEQ ID NO: 6522 - DNA, 2139 bp, synthetic construct
  source 1..2139: mol_type = other DNA
atggccttaccagtgaccgccttgctcctgccgctggccttgctgctccacgccgccaggccggacatcgtgatgacacagagccctgatagcctggccgtgtctctgggagagagagccaccattaactgcaaggccagccagagcgtggactacgacggcgacagcttcctgaactggtatcagcagaagcccggccagcctcctaagctgctgatctacgccgccagcaatctggaaagcggcgtgccaagcagattttccggctctggcagcggcaccgatttcaccctgacaatatccagcctccagcctgaggacgtggccgtgtactactgccagcagagcaacgacgaccctctgacctttggacagggcaccaaggtggaaatcaaactcgaggacctgaagaacgtgttcccacctgaggtggccgtgttcgagcctagcgaggccgagatcagccacacccagaaagccaccctcgtgtgcctggctaccggcttctaccccgaccatgtggaactgtcttggtgggtcaacggcaaagaggtgcacagcggcgtgtctaccgacccccagccactgaaagaacagcccgccctgaacgacagccggtactgcctgagcagcagactgagagtgtccgccaccttctggcagaacccccggaaccacttcagatgccaggtgcagttctacggcctgagcgagaacgacgagtggacccaggacagagccaagcccgtgacccagatcgtgtctgccgaagcctggggcagagccgattgcggatcccagagcttcggcctgctggaccccaagctgtgctacctgctggatggcatcctgttcatctacggcgtgatcctgaccgccctgttcctgagagtgaagttcagcagaagcgccgacgcccctgcctaccagcagggacagaaccaactgtacaacgagctgaacctgggcagacgggaagagtacgacgtgctggacaagcggagaggcagggaccctgagatgggcggaaagccccggagaaagaacccccaggaaggactgtataacgaactccagaaagacaagatggccgaagcctacagcgagatcggcatgaagggcgagcggagaagaggcaagggccacgatggcctgtaccagggcctgagcaccgccaccaaggacacctatgacgccctgcacatgcaggccctgcctccaagaagggccaagcgatctggatctggagcaacaaacttctcactactcaaacaagcaggtgacgtggaggagaatcccgggcctactagtatggactggatttggcgcatccttttccttgtcggcgctgctaccggcgcgcattccttcgaagtccaacttgtggagtctggagggggcctggtgcagcccggcggctctctcagactgtcttgtgcggcaagcggctacaccttcagctcttactggatagaatgggtgaggcaggcacctggaaagggactggagtggattggagagattctgccaggagggggagatacaaattacaatgaaatcttcaaggggcgggccaccttttcagcggataccagcaagaatacagcttacctgcagatgaatagcctccgggcagaagataccgctgtttattattgcacgagacgggtgccaataagactggactattgggggcaagggactcttgtcaccgtcagttcaacgcgtatccagaaccctgatcctgccgtgtaccagctgcgggatagcaagagcagcgacaagagcgtgtgtctgttcaccgacttcgacagccagaccaacgtgtcccagagcaaggactccgacgtgtacatcaccgataagaccgtgctggacatgcggagcatggacttcaagagcaactccgccgtggcctggtccaacaagtccgatttcgcctgcgccaacgccttcaacaacagcattatccccgaggacacattcttcccaagccccgagagcagctgcggtaccatcactcaaggtttggcagtgtcaaccatctcatcattctttccacctggctaccaagtgtccttctgcctggtcatggtgctgctgttcgccgtggataccggcctgtacttcagcgtcaag

SEQ ID NO: 6523 - DNA, 1884 bp, synthetic construct; identical to SEQ ID NO: 6214
  source 1..1884: mol_type = other DNA

SEQ ID NO: 6524 - DNA, 1884 bp, synthetic construct; identical to SEQ ID NO: 6215
  source 1..1884: mol_type = other DNA

SEQ ID NO: 6525 - DNA, 1884 bp, synthetic construct; identical to SEQ ID NO: 6216
  source 1..1884: mol_type = other DNA

SEQ ID NO: 6526 - DNA, 1884 bp, synthetic construct; identical to SEQ ID NO: 6217
  source 1..1884: mol_type = other DNA

SEQ ID NO: 6527 - DNA, 1866 bp, synthetic construct; identical to SEQ ID NO: 6218
  source 1..1866: mol_type = other DNA

SEQ ID NO: 6528 - DNA, 2700 bp, synthetic construct; identical to SEQ ID NO: 6312
  source 1..2700: mol_type = other DNA

SEQ ID NO: 6529 - DNA, 2700 bp, synthetic construct; identical to SEQ ID NO: 6313
  source 1..2700: mol_type = other DNA

SEQ ID NO: 6530 - DNA, 2691 bp, synthetic construct; identical to SEQ ID NO: 6314
  source 1..2691: mol_type = other DNA

SEQ ID NO: 6531 - DNA, 2304 bp, synthetic construct; identical to SEQ ID NO: 6315
  source 1..2304: mol_type = other DNA

SEQ ID NO: 6532 - DNA, 2277 bp, synthetic construct; identical to SEQ ID NO: 6316
  source 1..2277: mol_type = other DNA

SEQ ID NO: 6533 - DNA, 2295 bp, synthetic construct; identical to SEQ ID NO: 6317
  source 1..2295: mol_type = other DNA

SEQ ID NO: 6534 - DNA, 2298 bp, synthetic construct; identical to SEQ ID NO: 6318
  source 1..2298: mol_type = other DNA

SEQ ID NO: 6535 - DNA, 2286 bp, synthetic construct; identical to SEQ ID NO: 6328
  source 1..2286: mol_type = other DNA

SEQ ID NO: 6536 - DNA, 2298 bp, synthetic construct; identical to SEQ ID NO: 6330
  source 1..2298: mol_type = other DNA

SEQ ID NO: 6537 - DNA, 2697 bp, synthetic construct; identical to SEQ ID NO: 6331
  source 1..2697: mol_type = other DNA

SEQ ID NO: 6538 - DNA, 1866 bp, synthetic construct
  source 1..1866: mol_type = other DNA
atggccttaccagtgaccgccttgctcctgccgctggccttgctgctccacgccgccaggccggacatccagatgacacagagccctagcagcctgtctgccagcgtgggagacagagtgaccatcacctgtagagccagccaggacatcaacacagccgtggcttggtatcagcagaagcctggcaaggcccctaagctgctgatctacagcgcctacttcctgtacagcggcgtgcccagcagattcagcggaagcagaagcggcaccgacttcaccctgacaatatccagcctccagcctgaggacttcgccacctactactgccagcagtacagcagatacagccccgtgacctttggacagggcaccaaggtggaaatcaagagactcgaggacctgaagaacgtgttcccacctgaggtggccgtgttcgagcctagcgaggccgagatcagccacacccagaaagccaccctcgtgtgcctggctaccggcttctaccccgaccatgtggaactgtcttggtgggtcaacggcaaagaggtgcacagcggcgtgtgtaccgacccccagccactgaaagaacagcccgccctgaacgacagccggtactgcctgagcagcagactgagagtgtccgccaccttctggcagaacccccggaaccacttcagatgccaggtgcagttctacggcctgagcgagaacgacgagtggacccaggacagagccaagcccgtgacccagatcgtgtctgccgaagcctggggcagagccgattgcggctttaccagcgagagctaccagcagggcgtgctgagcgccaccatcctgtacgagatcctgctgggcaaggccaccctgtacgccgtgctggtgtctgccctggtgctgatggctatggtcaagcggaaggacagccggggaagggccaagcgatctggatctggagcaacaaacttctcactactcaaacaagcaggtgacgtggaggagaatcccgggcctactagtatggactggatttggcgcatccttttccttgtcggcgctgctaccggcgcgcattccttcgaagttcagctggttgaaagtggtggcggcctggttcaacctggcggatctctgagactgagctgtgccgccagcggcttcaatgtgtacgcctctggaatgcactgggtccgacaggcccctggcaaaggacttgagtgggtcgccaaaatctaccccgacagcgactacacctattacgccgacagcgtgaagggcagattcaccatcagcgccgacaccagcaagaacaccgcctacctccagatgaactccctgagagccgaggacaccgccgtgtactactgtagcagagacagcagcttctactacgtgtacgctatggactactggggccagggcacactggtcacagtctcttctacgcgtatccagaaccctgatcctgccgtgtaccagctgcgggatagcaagagcagcgacaagagcgtgtgtctgttcaccgacttcgacagccagaccaacgtgtcccagagcaaggactccgacgtgtacatcaccgataagtgcgtgctggacatgcggagcatggacttcaagagcaactccgccgtggcctggtccaacaagtccgatttcgcctgcgccaacgccttcaacaacagcattatccccgaggacacattcttcccaagccccgagagcagctgcgacgtgaagctggtggaaaagagcttcgagacagacaccaacctgaacttccagaacctgagcgtgatcggcttcagaatcctgctgctgaaagtggccggctttaacctgctgatgaccctgcggctgtggtccagc

SEQ ID NO: 6539 - DNA, 1878 bp, synthetic construct
  source 1..1878: mol_type = other DNA
atggccttaccagtgaccgccttgctcctgccgctggccttgctgctccacgccgccaggccggacatccagatgacacagagccctagcagcctgtctgccagcgtgggagacagagtgaccatcacctgtagagccagccaggacatcaacacagccgtggcttggtatcagcagaagcctggcaaggcccctaagctgctgatctacagcgcctacttcctgtacagcggcgtgcccagcagattcagcggaagcagaagcggcaccgacttcaccctgacaatatccagcctccagcctgaggacttcgccacctactactgccagcagtacagcagatacagccccgtgacctttggacagggcaccaaggtggaaatcaagagactcgagatccagaaccctgatcctgccgtgtaccagctgcgggatagcaagagcagcgacaagagcgtgtgtctgttcaccgacttcgacagccagaccaacgtgtcccagagcaaggactccgacgtgtacatcaccgataagtgcgtgctggacatgcggagcatggacttcaagagcaactccgccgtggcctggtccaacaagtccgatttcgcctgcgccaacgccttcaacaacagcattatccccgaggacacattcttcccaagccccgagagcagctgcgacgtgaagctggtggaaaagagcttcgagacagacaccaacctgaacttccagaacctgagcgtgatcggcttcagaatcctgctgctgaaagtggccggctttaacctgctgatgaccctgcggctgtggtccagccgcgccaagagaagcggatctggcgtgaagcagaccctgaatttcgacctgctgaagctggctggcgacgtggaatccaacccaggccctactagtatggactggatttggcgcatccttttccttgtcggcgctgctaccggcgcgcattccttcgaagttcagctggttgaaagtggtggcggcctggttcaacctggcggatctctgagactgagctgtgccgccagcggcttcaatgtgtacgcctctggaatgcactgggtccgacaggcccctggcaaaggacttgagtgggtcgccaaaatctaccccgacagcgactacacctattacgccgacagcgtgaagggcagattcaccatcagcgccgacaccagcaagaacaccgcctacctccagatgaactccctgagagccgaggacaccgccgtgtactactgtagcagagacagcagcttctactacgtgtacgctatggactactggggccagggcacactggtcacagtctcttctacgcgtgaggacctgaagaacgtgttcccacctgaggtggccgtgttcgagcctagcgaggccgagatcagccacacccagaaagccaccctcgtgtgcctggctaccggcttctaccccgaccatgtggaactgtcttggtgggtcaacggcaaagaggtgcacagcggcgtgtgtaccgacccccagccactgaaagaacagcccgccctgaacgacagccggtactgcctgagcagcagactgagagtgtccgccaccttctggcagaacccccggaaccacttcagatgccaggtgcagttctacggcctgagcgagaacgacgagtggacccaggacagagccaagcccgtgacccagatcgtgtctgccgaagcctggggcagagccgattgcggctttaccagcgagagctaccagcagggcgtgctgagcgccaccatcctgtacgagatcctgctgggcaaggccaccctgtacgccgtgctggtgtctgccctggtgctgatggctatggtcaagcggaaggacagccgggga

SEQ ID NO: 6540 - DNA, 2448 bp, synthetic construct
  source 1..2448: mol_type = other DNA
atggccttaccagtgaccgccttgctcctgccgctggccttgctgctccacgccgccaggccggacatccagatgacacagagccctagcagcctgtctgccagcgtgggagacagagtgaccatcacctgtagagccagccaggacatcaacacagccgtggcttggtatcagcagaagcctggcaaggcccctaagctgctgatctacagcgcctacttcctgtacagcggcgtgcccagcagattcagcggaagcagaagcggcaccgacttcaccctgacaatatccagcctccagcctgaggacttcgccacctactactgccagcagtacagcagatacagccccgtgacctttggacagggcaccaaggtggaaatcaagagactcgaggacctgaagaacgtgttcccacctgaggtggccgtgttcgagcctagcgaggccgagatcagccacacccagaaagccaccctcgtgtgcctggctaccggcttctaccccgaccatgtggaactgtcttggtgggtcaacggcaaagaggtgcacagcggcgtgtctaccgacccccagccactgaaagaacagcccgccctgaacgacagccggtactgcctgagcagcagactgagagtgtccgccaccttctggcagaacccccggaaccacttcagatgccaggtgcagttctacggcctgagcgagaacgacgagtggacccaggacagagccaagcccgtgacccagatcgtgtctgccgaagcctggggcagagccgattgcggatcccagagcttcggcctgctggaccccaagctgtgctacctgctggatggcatcctgttcatctacggcgtgatcctgaccgccctgttcctgagagtgaagttcagcagaagcgccgacgcccctgcctaccagcagggacagaaccaactgtacaacgagctgaacctgggcagacgggaagagtacgacgtgctggacaagcggagaggcagggaccctgagatgggcggaaagccccggagaaagaacccccaggaaggactgtataacgaactccagaaagacaagatggccgaagcctacagcgagatcggcatgaagggcgagcggagaagaggcaagggccacgatggcctgtaccagggcctgagcaccgccaccaaggacacctatgacgccctgcacatgcaggccctgcctccaagaagggccaagcgatctggatctggagcaacaaacttctcactactcaaacaagcaggtgacgtggaggagaatcccgggcctactagtatggactggatttggcgcatccttttccttgtcggcgctgctaccggcgcgcattccttcgaagttcagctggttgaaagtggtggcggcctggttcaacctggcggatctctgagactgagctgtgccgccagcggcttcaatgtgtacgcctctggaatgcactgggtccgacaggcccctggcaaaggacttgagtgggtcgccaaaatctaccccgacagcgactacacctattacgccgacagcgtgaagggcagattcaccatcagcgccgacaccagcaagaacaccgcctacctccagatgaactccctgagagccgaggacaccgccgtgtactactgtagcagagacagcagcttctactacgtgtacgctatggactactggggccagggcacactggtcacagtctcttctacgcgtatccagaaccctgatcctgccgtgtaccagctgcgggatagcaagagcagcgacaagagcgtgtgtctgttcaccgacttcgacagccagaccaacgtgtcccagagcaaggactccgacgtgtacatcaccgataagaccgtgctggacatgcggagcatggacttcaagagcaactccgccgtggcctggtccaacaagtccgatttcgcctgcgccaacgccttcaacaacagcattatccccgaggacacattcttcccaagccccgagagcagctgcggtacccagagttttgggttgttggaccctaaattgtgctatctgttggacggaatcctgttcatttacggagtgatcctgaccgcattgttcctgcgggttaagttttccagatccgcagacgcacccgcttaccaacaagggcagaaccaactctacaatgaacttaatttggggcggagggaagagtacgacgttctggacaaaaggaggggacgagatcccgagatgggcggaaagcctcgaaggaagaatccgcaagaggggctttataacgaactccagaaagataaaatggcagaagcctatagtgagattgggatgaagggagaaaggaggaggggtaaaggtcacgatgggttgtaccaaggattgagcacagccactaaagatacctatgatgcgctccacatgcaggccctgccgccaaga

SEQ ID NO: 6541 - DNA, 2217 bp, synthetic construct
  source 1..2217: mol_type = other DNA
atggccttaccagtgaccgccttgctcctgccgctggccttgctgctccacgccgccaggccggacatccagatgacacagagccctagcagcctgtctgccagcgtgggagacagagtgaccatcacctgtagagccagccaggacatcaacacagccgtggcttggtatcagcagaagcctggcaaggcccctaagctgctgatctacagcgcctacttcctgtacagcggcgtgcccagcagattcagcggaagcagaagcggcaccgacttcaccctgacaatatccagcctccagcctgaggacttcgccacctactactgccagcagtacagcagatacagccccgtgacctttggacagggcaccaaggtggaaatcaagagactcgaggacctgaagaacgtgttcccacctgaggtggccgtgttcgagcctagcgaggccgagatcagccacacccagaaagccaccctcgtgtgcctggctaccggcttctaccccgaccatgtggaactgtcttggtgggtcaacggcaaagaggtgcacagcggcgtgtctaccgacccccagccactgaaagaacagcccgccctgaacgacagccggtactgcctgagcagcagactgagagtgtccgccaccttctggcagaacccccggaaccacttcagatgccaggtgcagttctacggcctgagcgagaacgacgagtggacccaggacagagccaagcccgtgacccagatcgtgtctgccgaagcctggggcagagccgattgcggatcccagagcttcggcctgctggaccccaagctgtgctacctgctggatggcatcctgttcatctacggcgtgatcctgaccgccctgttcctgagagtgaagttcagcagaagcgccgacgcccctgcctaccagcagggacagaaccaactgtacaacgagctgaacctgggcagacgggaagagtacgacgtgctggacaagcggagaggcagggaccctgagatgggcggaaagccccggagaaagaacccccaggaaggactgtataacgaactccagaaagacaagatggccgaagcctacagcgagatcggcatgaagggcgagcggagaagaggcaagggccacgatggcctgtaccagggcctgagcaccgccaccaaggacacctatgacgccctgcacatgcaggccctgcctccaagaagggccaagcgatctggatctggagcaacaaacttctcactactcaaacaagcaggtgacgtggaggagaatcccgggcctactagtatggactggatttggcgcatccttttccttgtcggcgctgctaccggcgcgcattccttcgaagttcagctggttgaaagtggtggcggcctggttcaacctggcggatctctgagactgagctgtgccgccagcggcttcaatgtgtacgcctctggaatgcactgggtccgacaggcccctggcaaaggacttgagtgggtcgccaaaatctaccccgacagcgactacacctattacgccgacagcgtgaagggcagattcaccatcagcgccgacaccagcaagaacaccgcctacctccagatgaactccctgagagccgaggacaccgccgtgtactactgtagcagagacagcagcttctactacgtgtacgctatggactactggggccagggcacactggtcacagtctcttctacgcgtatccagaaccctgatcctgccgtgtaccagctgcgggatagcaagagcagcgacaagagcgtgtgtctgttcaccgacttcgacagccagaccaacgtgtcccagagcaaggactccgacgtgtacatcaccgataagaccgtgctggacatgcggagcatggacttcaagagcaactccgccgtggcctggtccaacaagtccgatttcgcctgcgccaacgccttcaacaacagcattatccccgaggacacattcttcccaagccccgagagcagctgcggtaccatcactcaaggtttggcagtgtcaaccatctcatcattctttccacctggctaccaagtgtccttctgcctggtcatggtgctgctgttcgccgtggataccggcctgtacttcagcgtcaagaccaacatccggtccagcaccagagactggaaggaccacaagttcaagtggcggaaggacccccaggacaag

SEQ ID NO: 6542 - DNA, 1902 bp, synthetic construct
  source 1..1902: mol_type = other DNA
atggccttaccagtgaccgccttgctcctgccgctggccttgctgctccacgccgccaggccggacatccagatgacacagagcccctctagcctgtctgccagcgtgggagacagagtgaccatcacctgtagagccagccagagcatcagaaactacctgaactggtatcagcaaaagcccggcaaggcccctgagctgctgattcatgctgcaagcagcctccagagcggcgtgccaagcagattttctggcagcggcagcggaaccgacttcaccctgacaatatctagcctccagcctgaggacttcgccagctactactgccagcagagctacagcgcccctcctatcacctttggacagggcaccagactggaaatcaagctcgaggacctgaagaacgtgttcccacctgaggtggccgtgttcgagcctagcgaggccgagatcagccacacccagaaagccaccctcgtgtgcctggctaccggcttctaccccgaccatgtggaactgtcttggtgggtcaacggcaaagaggtgcacagcggcgtgtgtaccgacccccagccactgaaagaacagcccgccctgaacgacagccggtactgcctgagcagcagactgagagtgtccgccaccttctggcagaacccccggaaccacttcagatgccaggtgcagttctacggcctgagcgagaacgacgagtggacccaggacagagccaagcccgtgacccagatcgtgtctgccgaagcctggggcagagccgattgcggctttaccagcgagagctaccagcagggcgtgctgagcgccaccatcctgtacgagatcctgctgggcaaggccaccctgtacgccgtgctggtgtctgccctggtgctgatggctatggtcaagcggaaggacagccggggaagggccaagcgatctggatctggagcaacaaacttctcactactcaaacaagcaggtgacgtggaggagaatcccgggcctactagtatggactggatttggcgcatccttttccttgtcggcgctgctaccggcgcgcattccttcgaacaggttcagctccagcagtctggacctggcctggtcaagcctagccagacactgtctctgacctgtgccatcagcggcgatagcgtgtcctctaatagagccgcctggaactggatcagacagagccctagcagaggactccagtggctgggcagaacctactaccgcagcaagtggtacaacgactacgccgtgtctctgcggagccggatcaccatcaatcccgtgaccagcaagaaccaggtggccctgcacatgaacagcgtgacccctgaagataccgccgtgtactactgtgccagagccggaattgtggtggtgcccggacctgagacattctactactacgaccacggcctggacgtgtggggccagggaacaacagtgactgtctcttctacgcgtatccagaaccctgatcctgccgtgtaccagctgcgggatagcaagagcagcgacaagagcgtgtgtctgttcaccgacttcgacagccagaccaacgtgtcccagagcaaggactccgacgtgtacatcaccgataagtgcgtgctggacatgcggagcatggacttcaagagcaactccgccgtggcctggtccaacaagtccgatttcgcctgcgccaacgccttcaacaacagcattatccccgaggacacattcttcccaagccccgagagcagctgcgacgtgaagctggtggaaaagagcttcgagacagacaccaacctgaacttccagaacctgagcgtgatcggcttcagaatcctgctgctgaaagtggccggctttaacctgctgatgaccctgcggctgtggtccagc

SEQ ID NO: 6543 - DNA, 1914 bp, synthetic construct
  source 1..1914: mol_type = other DNA
atggccttaccagtgaccgccttgctcctgccgctggccttgctgctccacgccgccaggccggacatccagatgacacagagcccctctagcctgtctgccagcgtgggagacagagtgaccatcacctgtagagccagccagagcatcagaaactacctgaactggtatcagcaaaagcccggcaaggcccctgagctgctgattcatgctgcaagcagcctccagagcggcgtgccaagcagattttctggcagcggcagcggaaccgacttcaccctgacaatatctagcctccagcctgaggacttcgccagctactactgccagcagagctacagcgcccctcctatcacctttggacagggcaccagactggaaatcaagctcgagatccagaaccctgatcctgccgtgtaccagctgcgggatagcaagagcagcgacaagagcgtgtgtctgttcaccgacttcgacagccagaccaacgtgtcccagagcaaggactccgacgtgtacatcaccgataagtgcgtgctggacatgcggagcatggacttcaagagcaactccgccgtggcctggtccaacaagtccgatttcgcctgcgccaacgccttcaacaacagcattatccccgaggacacattcttcccaagccccgagagcagctgcgacgtgaagctggtggaaaagagcttcgagacagacaccaacctgaacttccagaacctgagcgtgatcggcttcagaatcctgctgctgaaagtggccggctttaacctgctgatgaccctgcggctgtggtccagccgcgccaagagaagcggatctggcgtgaagcagaccctgaatttcgacctgctgaagctggctggcgacgtggaatccaacccaggccctactagtatggactggatttggcgcatccttttccttgtcggcgctgctaccggcgcgcattccttcgaacaggttcagctccagcagtctggacctggcctggtcaagcctagccagacactgtctctgacctgtgccatcagcggcgatagcgtgtcctctaatagagccgcctggaactggatcagacagagccctagcagaggactccagtggctgggcagaacctactaccgcagcaagtggtacaacgactacgccgtgtctctgcggagccggatcaccatcaatcccgtgaccagcaagaaccaggtggccctgcacatgaacagcgtgacccctgaagataccgccgtgtactactgtgccagagccggaattgtggtggtgcccggacctgagacattctactactacgaccacggcctggacgtgtggggccagggaacaacagtgactgtctcttctacgcgtgaggacctgaagaacgtgttcccacctgaggtggccgtgttcgagcctagcgaggccgagatcagccacacccagaaagccaccctcgtgtgcctggctaccggcttctaccccgaccatgtggaactgtcttggtgggtcaacggcaaagaggtgcacagcggcgtgtgtaccgacccccagccactgaaagaacagcccgccctgaacgacagccggtactgcctgagcagcagactgagagtgtccgccaccttctggcagaacccccggaaccacttcagatgccaggtgcagttctacggcctgagcgagaacgacgagtggacccaggacagagccaagcccgtgacccagatcgtgtctgccgaagcctggggcagagccgattgcggctttaccagcgagagctaccagcagggcgtgctgagcgccaccatcctgtacgagatcctgctgggcaaggccaccctgtacgccgtgctggtgtctgccctggtgctgatggctatggtcaagcggaaggacagccgggga

SEQ ID NO: 6544 - DNA, 2253 bp, synthetic construct
  source 1..2253: mol_type = other DNA
atggccttaccagtgaccgccttgctcctgccgctggccttgctgctccacgccgccaggccggacatccagatgacacagagcccctctagcctgtctgccagcgtgggagacagagtgaccatcacctgtagagccagccagagcatcagaaactacctgaactggtatcagcaaaagcccggcaaggcccctgagctgctgattcatgctgcaagcagcctccagagcggcgtgccaagcagattttctggcagcggcagcggaaccgacttcaccctgacaatatctagcctccagcctgaggacttcgccagctactactgccagcagagctacagcgcccctcctatcacctttggacagggcaccagactggaaatcaagctcgaggacctgaagaacgtgttcccacctgaggtggccgtgttcgagcctagcgaggccgagatcagccacacccagaaagccaccctcgtgtgcctggctaccggcttctaccccgaccatgtggaactgtcttggtgggtcaacggcaaagaggtgcacagcggcgtgtctaccgacccccagccactgaaagaacagcccgccctgaacgacagccggtactgcctgagcagcagactgagagtgtccgccaccttctggcagaacccccggaaccacttcagatgccaggtgcagttctacggcctgagcgagaacgacgagtggacccaggacagagccaagcccgtgacccagatcgtgtctgccgaagcctggggcagagccgattgcggatcccagagcttcggcctgctggaccccaagctgtgctacctgctggatggcatcctgttcatctacggcgtgatcctgaccgccctgttcctgagagtgaagttcagcagaagcgccgacgcccctgcctaccagcagggacagaaccaactgtacaacgagctgaacctgggcagacgggaagagtacgacgtgctggacaagcggagaggcagggaccctgagatgggcggaaagccccggagaaagaacccccaggaaggactgtataacgaactccagaaagacaagatggccgaagcctacagcgagatcggcatgaagggcgagcggagaagaggcaagggccacgatggcctgtaccagggcctgagcaccgccaccaaggacacctatgacgccctgcacatgcaggccctgcctccaagaagggccaagcgatctggatctggagcaacaaacttctcactactcaaacaagcaggtgacgtggaggagaatcccgggcctactagtatggactggatttggcgcatccttttccttgtcggcgctgctaccggcgcgcattccttcgaacaggttcagctccagcagtctggacctggcctggtcaagcctagccagacactgtctctgacctgtgccatcagcggcgatagcgtgtcctctaatagagccgcctggaactggatcagacagagccctagcagaggactccagtggctgggcagaacctactaccgcagcaagtggtacaacgactacgccgtgtctctgcggagccggatcaccatcaatcccgtgaccagcaagaaccaggtggccctgcacatgaacagcgtgacccctgaagataccgccgtgtactactgtgccagagccggaattgtggtggtgcccggacctgagacattctactactacgaccacggcctggacgtgtggggccagggaacaacagtgactgtctcttctacgcgtatccagaaccctgatcctgccgtgtaccagctgcgggatagcaagagcagcgacaagagcgtgtgtctgttcaccgacttcgacagccagaccaacgtgtcccagagcaaggactccgacgtgtacatcaccgataagaccgtgctggacatgcggagcatggacttcaagagcaactccgccgtggcctggtccaacaagtccgatttcgcctgcgccaacgccttcaacaacagcattatccccgaggacacattcttcccaagccccgagagcagctgcggtaccatcactcaaggtttggcagtgtcaaccatctcatcattctttccacctggctaccaagtgtccttctgcctggtcatggtgctgctgttcgccgtggataccggcctgtacttcagcgtcaagaccaacatccggtccagcaccagagactggaaggaccacaagttcaagtggcggaaggacccccaggacaag

SEQ ID NO: 6545 - DNA, 2178 bp, synthetic construct
  source 1..2178: mol_type = other DNA
atggccttaccagtgaccgccttgctcctgccgctggccttgctgctccacgccgccaggccggacatccagatgacacagagcccctctagcctgtctgccagcgtgggagacagagtgaccatcacctgtagagccagccagagcatcagaaactacctgaactggtatcagcaaaagcccggcaaggcccctgagctgctgattcatgctgcaagcagcctccagagcggcgtgccaagcagattttctggcagcggcagcggaaccgacttcaccctgacaatatctagcctccagcctgaggacttcgccagctactactgccagcagagctacagcgcccctcctatcacctttggacagggcaccagactggaaatcaagctcgaggacctgaagaacgtgttcccacctgaggtggccgtgttcgagcctagcgaggccgagatcagccacacccagaaagccaccctcgtgtgcctggctaccggcttctaccccgaccatgtggaactgtcttggtgggtcaacggcaaagaggtgcacagcggcgtgtctaccgacccccagccactgaaagaacagcccgccctgaacgacagccggtactgcctgagcagcagactgagagtgtccgccaccttctggcagaacccccggaaccacttcagatgccaggtgcagttctacggcctgagcgagaacgacgagtggacccaggacagagccaagcccgtgacccagatcgtgtctgccgaagcctggggcagagccgattgcggatcccagagcttcggcctgctggaccccaagctgtgctacctgctggatggcatcctgttcatctacggcgtgatcctgaccgccctgttcctgagagtgaagttcagcagaagcgccgacgcccctgcctaccagcagggacagaaccaactgtacaacgagctgaacctgggcagacgggaagagtacgacgtgctggacaagcggagaggcagggaccctgagatgggcggaaagccccggagaaagaacccccaggaaggactgtataacgaactccagaaagacaagatggccgaagcctacagcgagatcggcatgaagggcgagcggagaagaggcaagggccacgatggcctgtaccagggcctgagcaccgccaccaaggacacctatgacgccctgcacatgcaggccctgcctccaagaagggccaagcgatctggatctggagcaacaaacttctcactactcaaacaagcaggtgacgtggaggagaatcccgggcctactagtatggactggatttggcgcatccttttccttgtcggcgctgctaccggcgcgcattccttcgaacaggttcagctccagcagtctggacctggcctggtcaagcctagccagacactgtctctgacctgtgccatcagcggcgatagcgtgtcctctaatagagccgcctggaactggatcagacagagccctagcagaggactccagtggctgggcagaacctactaccgcagcaagtggtacaacgactacgccgtgtctctgcggagccggatcaccatcaatcccgtgaccagcaagaaccaggtggccctgcacatgaacagcgtgacccctgaagataccgccgtgtactactgtgccagagccggaattgtggtggtgcccggacctgagacattctactactacgaccacggcctggacgtgtggggccagggaacaacagtgactgtctcttctacgcgtatccagaaccctgatcctgccgtgtaccagctgcgggatagcaagagcagcgacaagagcgtgtgtctgttcaccgacttcgacagccagaccaacgtgtcccagagcaaggactccgacgtgtacatcaccgataagaccgtgctggacatgcggagcatggacttcaagagcaactccgccgtggcctggtccaacaagtccgatttcgcctgcgccaacgccttcaacaacagcattatccccgaggacacattcttcccaagccccgagagcagctgcggtaccatcactcaaggtttggcagtgtcaaccatctcatcattctttccacctggctaccaagtgtccttctgcctggtcatggtgctgctgttcgccgtggataccggcctgtacttcagcgtc

SEQ ID NO: 6546 - DNA, 1905 bp, synthetic construct
  source 1..1905: mol_type = other DNA
atggccttaccagtgaccgccttgctcctgccgctggccttgctgctccacgccgccaggccggacatccagatgacacagagcccctctagcctgtctgccagcgtgggagacagagtgaccatcacctgtagagccagccagagcatcagaaactacctgaactggtatcagcaaaagcccggcaaggcccctgagctgctgattcatgctgcaagcagcctccagagcggcgtgccaagcagattttctggcagcggcagcggaaccgacttcaccctgacaatatctagcctccagcctgaggacttcgccagctactactgccagcagagctacagcgcccctcctatcacctttggacagggcaccagactggaaatcaagctcgaggacctgaagaacgtgttcccacctgaggtggccgtgttcgagcctagcgaggccgagatcagccacacccagaaagccaccctcgtgtgcctggctaccggcttctaccccgaccatgtggaactgtcttggtgggtcaacggcaaagaggtgcacagcggcgtgtgtaccgacccccagccactgaaagaacagcccgccctgaacgacagccggtactgcctgagcagcagactgagagtgtccgccaccttctggcagaacccccggaaccacttcagatgccaggtgcagttctacggcctgagcgagaacgacgagtggacccaggacagagccaagcccgtgacccagatcgtgtctgccgaagcctggggcagagccgattgcggctttaccagcgagagctaccagcagggcgtgctgagcgcctactacatgtacttgttgctgctgctgaagtccgtggtgtacttcgccatcatcacatgctgcctgctgcggagaaccgccttctgctgcaacggcgagaagtctagggccaagcgatctggatctggagcaacaaacttctcactactcaaacaagcaggtgacgtggaggagaatcccgggcctactagtatggactggatttggcgcatccttttccttgtcggcgctgctaccggcgcgcattccttcgaacaggttcagctccagcagtctggacctggcctggtcaagcctagccagacactgtctctgacctgtgccatcagcggcgatagcgtgtcctctaatagagccgcctggaactggatcagacagagccctagcagaggactccagtggctgggcagaacctactaccgcagcaagtggtacaacgactacgccgtgtctctgcggagccggatcaccatcaatcccgtgaccagcaagaaccaggtggccctgcacatgaacagcgtgacccctgaagataccgccgtgtactactgtgccagagccggaattgtggtggtgcccggacctgagacattctactactacgaccacggcctggacgtgtggggccagggaacaacagtgactgtctcttctacgcgtatccagaaccctgatcctgccgtgtaccagctgcgggatagcaagagcagcgacaagagcgtgtgtctgttcaccgacttcgacagccagaccaacgtgtcccagagcaaggactccgacgtgtacatcaccgataagtgcgtgctggacatgcggagcatggacttcaagagcaactccgccgtggcctggtccaacaagtccgatttcgcctgcgccaacgccttcaacaacagcattatccccgaggacacattcttcccaagccccgagagcagctgcgacgtgaagctggtggaaaagagcttcgagacagacaccaacctgaacttccagaacctgagcgtgatcggcttcagaatcctgctgctgaaagtggccggctttaacctgctgatgaccctgcggctgtggtccagc

SEQ ID NO: 6547 - DNA, 1926 bp, synthetic construct
  source 1..1926: mol_type = other DNA
atggccttaccagtgaccgccttgctcctgccgctggccttgctgctccacgccgccaggccggacatccagatgacacagagcccctctagcctgtctgccagcgtgggagacagagtgaccatcacctgtagagccagccagagcatcagaaactacctgaactggtatcagcaaaagcccggcaaggcccctgagctgctgattcatgctgcaagcagcctccagagcggcgtgccaagcagattttctggcagcggcagcggaaccgacttcaccctgacaatatctagcctccagcctgaggacttcgccagctactactgccagcagagctacagcgcccctcctatcacctttggacagggcaccagactggaaatcaagctcgaggacaagcagctggacgccgacgtgtcccccaagcctaccatcttcctgccctctatcgccgagacaaagctccagaaggccggcacctacctgtgcctgctggaaaagttcttcccagatgtgattaagatccactggcaggaaaagaagtccaacaccatcctgggcagccaggaaggcaacaccatgaagaccaacgacacctacatgaagttcagctggctgaccgtgcccgagaagtccctggacaaagaacacagatgcatcgtgcggcacgaaaacaacaagaacggcgtggaccaggaaatcatcttcccacccatcaagaccgatgtgattacaatggaccccaaggacaactgctccaaggacgccaacgataccctgctgctccagctgaccaacaccagcgcctactacatgtacgagatcctgctgggcaaggccaccctgtacgccgtgctggtgtctgccctggtgctgatggctatggtcaagcggaaggacagccggggaagggccaagcgatctggatctggagcaacaaacttctcactactcaaacaagcaggtgacgtggaggagaatcccgggcctactagtatggactggatttggcgcatccttttccttgtcggcgctgctaccggcgcgcattccttcgaacaggttcagctccagcagtctggacctggcctggtcaagcctagccagacactgtctctgacctgtgccatcagcggcgatagcgtgtcctctaatagagccgcctggaactggatcagacagagccctagcagaggactccagtggctgggcagaacctactaccgcagcaagtggtacaacgactacgccgtgtctctgcggagccggatcaccatcaatcccgtgaccagcaagaaccaggtggccctgcacatgaacagcgtgacccctgaagataccgccgtgtactactgtgccagagccggaattgtggtggtgcccggacctgagacattctactactacgaccacggcctggacgtgtggggccagggaacaacagtgactgtctcttctacgcgtagccagcctcacaccaagcccagcgtgttcgtgatgaagaacggcaccaacgtggcctgcctcgtgaaagagttctaccccaaggacatcaggatcaacctggtgtccagcaagaagatcaccgagttcgaccccgccatcgtgatctcccccagcggcaagtacaacgccgtgaagctggggaagtatgaggacagcaacagcgtgacctgctccgtgcagcacgacaacaagaccgtgcacagcaccgactttgaagtgaaaaccgactccaccgaccacgtgaagcccaaagagacagagaacaccaagcagcccagcaagagctgccacaagcccaaggccatcgtgcacaccgagaaagtgaacatgatgagcctgaccgtgatcggcttcagaatcctgctgctgaaagtggccggctttaacctgctgatgaccctgcggctgtggtccagctaa

SEQ ID NO: 6548 - DNA, 1926 bp, synthetic construct
  source 1..1926: mol_type = other DNA
atggccttaccagtgaccgccttgctcctgccgctggccttgctgctccacgccgccaggccggacatccagatgacacagagcccctctagcctgtctgccagcgtgggagacagagtgaccatcacctgtagagccagccagagcatcagaaactacctgaactggtatcagcaaaagcccggcaaggcccctgagctgctgattcatgctgcaagcagcctccagagcggcgtgccaagcagattttctggcagcggcagcggaaccgacttcaccctgacaatatctagcctccagcctgaggacttcgccagctactactgccagcagagctacagcgcccctcctatcacctttggacagggcaccagactggaaatcaagctcgaggacaagcagctggacgccgacgtgtcccccaagcctaccatcttcctgccctctatcgccgagacaaagctccagaaggccggcacctacctgtgcctgctggaaaagttcttcccagatgtgattaagatccactggcaggaaaagaagtccaacaccatcctgggcagccaggaaggcaacaccatgaagaccaacgacacctacatgaagttcagctggctgaccgtgcccgagaagtccctggacaaagaacacagatgcatcgtgcggcacgaaaacaacaagaacggcgtggaccaggaaatcatcttcccacccatcaagaccgatgtgattacaatggaccccaaggacaactgctccaaggacgccaacgataccctgctgctccagctgaccaacaccagcgccaccatcctgtacgagatcctgctgggcaaggccaccctgtacgccgtgctggtgtctgccctggtgctgatggctatggtcaagcggaaggacagccggggaagggccaagcgatctggatctggagcaacaaacttctcactactcaaacaagcaggtgacgtggaggagaatcccgggcctactagtatggactggatttggcgcatccttttccttgtcggcgctgctaccggcgcgcattccttcgaacaggttcagctccagcagtctggacctggcctggtcaagcctagccagacactgtctctgacctgtgccatcagcggcgatagcgtgtcctctaatagagccgcctggaactggatcagacagagccctagcagaggactccagtggctgggcagaacctactaccgcagcaagtggtacaacgactacgccgtgtctctgcggagccggatcaccatcaatcccgtgaccagcaagaaccaggtggccctgcacatgaacagcgtgacccctgaagataccgccgtgtactactgtgccagagccggaattgtggtggtgcccggacctgagacattctactactacgaccacggcctggacgtgtggggccagggaacaacagtgactgtctcttctacgcgtagccagcctcacaccaagcccagcgtgttcgtgatgaagaacggcaccaacgtggcctgcctcgtgaaagagttctaccccaaggacatcaggatcaacctggtgtccagcaagaagatcaccgagttcgaccccgccatcgtgatctcccccagcggcaagtacaacgccgtgaagctggggaagtatgaggacagcaacagcgtgacctgctccgtgcagcacgacaacaagaccgtgcacagcaccgactttgaagtgaaaaccgactccaccgaccacgtgaagcccaaagagacagagaacaccaagcagcccagcaagagctgccacaagcccaaggccatcgtgcacaccgagaaagtgaacatgatgagcctgaccgtgatcggcttcagaatcctgctgctgaaagtggccggctttaacctgctgatgaccctgcggctgtggtccagctaa

SEQ ID NO: 6549 - DNA, 1926 bp, synthetic construct
  source 1..1926: mol_type = other DNA
atggccttaccagtgaccgccttgctcctgccgctggccttgctgctccacgccgccaggccggacatccagatgacacagagcccctctagcctgtctgccagcgtgggagacagagtgaccatcacctgtagagccagccagagcatcagaaactacctgaactggtatcagcaaaagcccggcaaggcccctgagctgctgattcatgctgcaagcagcctccagagcggcgtgccaagcagattttctggcagcggcagcggaaccgacttcaccctgacaatatctagcctccagcctgaggacttcgccagctactactgccagcagagctacagcgcccctcctatcacctttggacagggcaccagactggaaatcaagctcgaggacaagcagctggacgccgacgtgtcccccaagcctaccatcttcctgccctctatcgccgagacaaagctccagaaggccggcacctacctgtgcctgctggaaaagttcttcccagatgtgattaagatccactggcaggaaaagaagtccaacaccatcctgggcagccaggaaggcaacaccatgaagaccaacgacacctacatgaagttcagctggctgaccgtgcccgagaagtccctggacaaagaacacagatgcatcgtgcggcacgaaaacaacaagaacggcgtggaccaggaaatcatcttcccacccatcaagaccgatgtgattacaatggaccccaaggacaactgctccaaggacgccaacgataccctgctgctccagctgaccaacaccagcgccaccatcctgtacgagatcctgctgggcaaggccaccctgtacgccgtgctggtgtctgccctggtgctgatggctatggtcaagcggaaggacagccggggaagggccaagcgatctggatctggagcaacaaacttctcactactcaaacaagcaggtgacgtggaggagaatcccgggcctactagtatggactggatttggcgcatccttttccttgtcggcgctgctaccggcgcgcattccttcgaacaggttcagctccagcagtctggacctggcctggtcaagcctagccagacactgtctctgacctgtgccatcagcggcgatagcgtgtcctctaatagagccgcctggaactggatcagacagagccctagcagaggactccagtggctgggcagaacctactaccgcagcaagtggtacaacgactacgccgtgtctctgcggagccggatcaccatcaatcccgtgaccagcaagaaccaggtggccctgcacatgaacagcgtgacccctgaagataccgccgtgtactactgtgccagagccggaattgtggtggtgcccggacctgagacattctactactacgaccacggcctggacgtgtggggccagggaacaacagtgactgtctcttctacgcgtagccagcctcacaccaagcccagcgtgttcgtgatgaagaacggcaccaacgtggcctgcctcgtgaaagagttctaccccaaggacatcaggatcaacctggtgtccagcaagaagatcaccgagttcgaccccgccatcgtgatctcccccagcggcaagtacaacgccgtgaagctggggaagtacgaggacagcaacagcgtgacctgctccgtgcagcacgacaacaagaccgtgcacagcaccgactttgaagtgaaaaccgactccaccgaccacgtgaagcccaaagagacagagaacaccaagcagcccagcaagagctgccacaagcccaaggccatcgtgcacaccgagaaagtgaacatgatgagcctgaccgtgctgggcttcagaatcctgctgctgaaagtggccggctttaacctgctgatgaccctgcggctgtggtccagctaa

SEQ ID NO: 6550 - DNA, 1908 bp, synthetic construct
  source 1..1908: mol_type = other DNA
atggccttaccagtgaccgccttgctcctgccgctggccttgctgctccacgccgccaggccggacatccagatgacacagagcccctctagcctgtctgccagcgtgggagacagagtgaccatcacctgtagagccagccagagcatcagaaactacctgaactggtatcagcaaaagcccggcaaggcccctgagctgctgattcatgctgcaagcagcctccagagcggcgtgccaagcagattttctggcagcggcagcggaaccgacttcaccctgacaatatctagcctccagcctgaggacttcgccagctactactgccagcagagctacagcgcccctcctatcacctttggacagggcaccagactggaaatcaagctcgaggacctgaagaacgtgttcccacctgaggtggccgtgttcgagcctagcgaggccgagatcagccacacccagaaagccaccctcgtgtgcctggctaccggcttctaccccgaccatgtggaactgtcttggtgggtcaacggcaaagaggtgcacagcggcgtgtgtaccgacccccagccactgaaagaacagcccgccctgaacgacagccggtactgcctgagcagcagactgagagtgtccgccaccttctggcagaacccccggaaccacttcagatgccaggtgcagttctacggcctgagcgagaacgacgagtggacccaggacagagccaagcccgtgacccagatcgtgtctgccgaagcctggggcagagccgattgcggctttaccagcgagagctaccagcagggcgtgctgagcgccaccatcctgtacttgttgctgctgctgaagtccgtggtgtacttcgccatcatcacatgctgcctgctgcggagaaccgccttctgctgcaacggcgagaagtctagggccaagcgatctggatctggagcaacaaacttctcactactcaaacaagcaggtgacgtggaggagaatcccgggcctactagtatggactggatttggcgcatccttttccttgtcggcgctgctaccggcgcgcattccttcgaacaggttcagctccagcagtctggacctggcctggtcaagcctagccagacactgtctctgacctgtgccatcagcggcgatagcgtgtcctctaatagagccgcctggaactggatcagacagagccctagcagaggactccagtggctgggcagaacctactaccgcagcaagtggtacaacgactacgccgtgtctctgcggagccggatcaccatcaatcccgtgaccagcaagaaccaggtggccctgcacatgaacagcgtgacccctgaagataccgccgtgtactactgtgccagagccggaattgtggtggtgcccggacctgagacattctactactacgaccacggcctggacgtgtggggccagggaacaacagtgactgtctcttctacgcgtatccagaaccctgatcctgccgtgtaccagctgcgggatagcaagagcagcgacaagagcgtgtgtctgttcaccgacttcgacagccagaccaacgtgtcccagagcaaggactccgacgtgtacatcaccgataagtgcgtgctggacatgcggagcatggacttcaagagcaactccgccgtggcctggtccaacaagtccgatttcgcctgcgccaacgccttcaacaacagcattatccccgaggacacattcttcccaagccccgagagcagctgcgacgtgaagctggtggaaaagagcttcgagacagacaccaacctgaacttccagaacctgagcgtgatcggcctgcggatgctgttcgccaaaaccgtggccgtgaacttcctgctgaccgccaagctgttcttcctctaa

SEQ ID NO: 6551 - DNA, 1995 bp, synthetic construct
  source 1..1995: mol_type = other DNA
atggccttaccagtgaccgccttgctcctgccgctggccttgctgctccacgccgccaggccggacatccagatgacacagagcccctctagcctgtctgccagcgtgggagacagagtgaccatcacctgtagagccagccagagcatcagaaactacctgaactggtatcagcaaaagcccggcaaggcccctgagctgctgattcatgctgcaagcagcctccagagcggcgtgccaagcagattttctggcagcggcagcggaaccgacttcaccctgacaatatctagcctccagcctgaggacttcgccagctactactgccagcagagctacagcgcccctcctatcacctttggacagggcaccagactggaaatcaagctcgaggacctgaagaacgtgttcccacctgaggtggccgtgttcgagcctagcgaggccgagatcagccacacccagaaagccaccctcgtgtgcctggctaccggcttctaccccgaccatgtggaactgtcttggtgggtcaacggcaaagaggtgcacagcggcgtgtctaccgacccccagccactgaaagaacagcccgccctgaacgacagccggtactgcctgagcagcagactgagagtgtccgccaccttctggcagaacccccggaaccacttcagatgccaggtgcagttctacggcctgagcgagaacgacgagtggacccaggacagagccaagcccgtgacccagatcgtgtctgccgaagcctggggcagagccgattgcggatcctccaaggacgccaacgataccctgctgctccagctgaccaacaccagcgcctactacatgtacttgttgctgctgctgaagtccgtggtgtacttcgccatcatcacatgctgcctgctgcggagaaccgccttctgctgcaacggcgagaagtctagggccaagcgatctggatctggagcaacaaacttctcactactcaaacaagcaggtgacgtggaggagaatcccgggcctactagtatggactggatttggcgcatccttttccttgtcggcgctgctaccggcgcgcattccttcgaacaggttcagctccagcagtctggacctggcctggtcaagcctagccagacactgtctctgacctgtgccatcagcggcgatagcgtgtcctctaatagagccgcctggaactggatcagacagagccctagcagaggactccagtggctgggcagaacctactaccgcagcaagtggtacaacgactacgccgtgtctctgcggagccggatcaccatcaatcccgtgaccagcaagaaccaggtggccctgcacatgaacagcgtgacccctgaagataccgccgtgtactactgtgccagagccggaattgtggtggtgcccggacctgagacattctactactacgaccacggcctggacgtgtggggccagggaacaacagtgactgtctcttctacgcgtatccagaaccctgatcctgccgtgtaccagctgcgggatagcaagagcagcgacaagagcgtgtgtctgttcaccgacttcgacagccagaccaacgtgtcccagagcaaggactccgacgtgtacatcaccgataagaccgtgctggacatgcggagcatggacttcaagagcaactccgccgtggcctggtccaacaagtccgatttcgcctgcgccaacgccttcaacaacagcattatccccgaggacacattcttcccaagccccgagagcagctgcggtaccgaagtgaaaaccgactccaccgaccacgtgaagcccaaagagacagagaacaccaagcagcccagcaagagctgccacaagcccaaggccatcgtgcacaccgagaaagtgaacatgatgagcctgaccgtgctgggcctgcggatgctgttcgccaaaaccgtggccgtgaacttcctgctgaccgccaagctgttcttcctctaa

SEQ ID NO: 6552 - DNA, 1950 bp, synthetic construct
  source 1..1950: mol_type = other DNA
atggccttaccagtgaccgccttgctcctgccgctggccttgctgctccacgccgccaggccggacatccagatgacacagagccctagcagcctgtctgccagcgtgggagacagagtgaccatcacatgcaaggccagcgaccacatcaacaactggctggcctggtatcagcagaagcctggacaggcccctaagctgctgatctacggcgctaccacactggaaacaggcgtgcccagcagattttctggcagcggctctggcaccgactacaccctgacaatatccagcctccagcctgaggacttcgccacctactactgtcagcagagctggaacaccccttggacattcggccagggcaccaagctggaaatcaagagactcgagggacagcctaaggccaatcctaccgtgacactgttccctccaagcagcgaagaactccaggccaacaaggccacacttgtgtgcctgatctccgacttctaccctggggctgtgacagtggcttggaaggccgatggatctcctgtgaaagccggcgtggaaaccaccaagccatccaagcagagcaacaacaaatacgccgccagctcctacctgagcctgacacctgagcagtggaagtcccacagatcctacagctgccaagtgacccacgaaggcagcaccgtggaaaagacagtggcccctacagagtgcagccccatcaagaccgatgtgattacaatggaccccaaggacaactgctccaaggacgccaacgataccctgctgctccagctgaccaacaccagcgcctactacatgtacgagatcctgctgggcaaggccaccctgtacgccgtgctggtgtctgccctggtgctgatggctatggtcaagcggaaggacagccggggacgcgccaagagaagcggatctggcgtgaagcagaccctgaatttcgacctgctgaagctggctggcgacgtggaatccaacccaggccctactagtatggactggatttggcgcatccttttccttgtcggcgctgctaccggcgcgcattccttcgaacaagttcagcttcaacagcctggcgctgagctggtcaaacctggcgcttctgtgaagatgagctgcaaagccagcggctacaccttcagcagctactggatcaactggatgaagcagaaacccggccagggactcgaatggatcggccaaatctatcccggcgacggcgacaccaactacaacggcaagttcaagggcagagccacactgaccgccgatacctctagcagcacagcctacatgcagctgagcagcctgaccagcgaagatagcgccgtgtacttctgtgcccggtccatcacaacagtcgtgggctgcgctatggactattggggccagggaacaagcgtgaccgtgtctagtacgcgtgcctctacaaagggaccctccgtgtttcctctggctcccagcagcaagtctacaagcggaggaacagccgctctgggctgcctggtcaaggattactttcccgagcctgtgaccgtgtcctggaatagcggagcactgacaagcggcgtgcacacctttccagccgtgctgcaaagcagcggcctgtactctctgagcagcgtggtcacagtgcctagctctagcctgggcacccagacctacatctgcaatgtgaaccacaagcctagcaacaccaaggtggacaagagagtggaacccaagagctgtgaagtgaaaaccgactccaccgaccacgtgaagcccaaagagacagagaacaccaagcagcccagcaagagctgccacaagcccaaggccatcgtgcacaccgagaaagtgaacatgatgagcctgaccgtgctgggcttcagaatcctgctgctgaaagtggccggctttaacctgctgatgaccctgcggctgtggtccagc

SEQ ID NO: 6553 - DNA, 1947 bp, synthetic construct
  source 1..1947: mol_type = other DNA
atggccttaccagtgaccgccttgctcctgccgctggccttgctgctccacgccgccaggccggagatcgtgctgacacagagccctgccaccctgtctctgagccctggcgaaagagccaccctgagctgtagagccagccagagcgtgtccagctacctggcctggtatcagcagaagcccggccaggctccccggctgctgatctacgatgccagcaatagagccaccggcatccccgccagattttccggctctggcagcggcaccgacttcaccctgaccatcagctccctggaacccgaggacttcgccgtgtactactgccagcagcggagcaactggcccatcacattcggccagggcacccggctggaaatcaaactcgagggacagcctaaggccaatcctaccgtgacactgttccctccaagcagcgaagaactccaggccaacaaggccacacttgtgtgcctgatctccgacttctaccctggggctgtgacagtggcttggaaggccgatggatctcctgtgaaagccggcgtggaaaccaccaagccatccaagcagagcaacaacaaatacgccgccagctcctacctgagcctgacacctgagcagtggaagtcccacagatcctacagctgccaagtgacccacgaaggcagcaccgtggaaaagacagtggcccctacagagtgcagccccatcaagaccgatgtgattacaatggaccccaaggacaactgctccaaggacgccaacgataccctgctgctccagctgaccaacaccagcgcctactacatgtacgagatcctgctgggcaaggccaccctgtacgccgtgctggtgtctgccctggtgctgatggctatggtcaagcggaaggacagccggggacgcgccaagagaagcggatctggcgtgaagcagaccctgaatttcgacctgctgaagctggctggcgacgtggaatccaacccaggccctactagtatggactggatttggcgcatccttttccttgtcggcgctgctaccggcgcgcattccttcgaagtgcagctggtggaatcaggcggcggactggtgcagcctggcagaagcctgagactgagctgtgccgccagcggcttcaccttcaacgactacgccatgcactgggtgcgccaggcccctggaaaaggactggaatgggtgtccacaatcagctggaacagcggcagcatcggctacgccgatagcgtgaagggccggttcaccatcagccgggacaacgccaagaagtccctgtacctccagatgaacagcctgcgggccgaggacacagccctgtactattgcgccaaggacatccagtacggcaactactactacggcatggacgtgtggggccagggaaccaccgtgaccgtgtcatctacgcgtgcctctacaaagggaccctccgtgtttcctctggctcccagcagcaagtctacaagcggaggaacagccgctctgggctgcctggtcaaggattactttcccgagcctgtgaccgtgtcctggaatagcggagcactgacaagcggcgtgcacacctttccagccgtgctgcaaagcagcggcctgtactctctgagcagcgtggtcacagtgcctagctctagcctgggcacccagacctacatctgcaatgtgaaccacaagcctagcaacaccaaggtggacaagagagtggaacccaagagctgtgaagtgaaaaccgactccaccgaccacgtgaagcccaaagagacagagaacaccaagcagcccagcaagagctgccacaagcccaaggccatcgtgcacaccgagaaagtgaacatgatgagcctgaccgtgctgggcttcagaatcctgctgctgaaagtggccggctttaacctgctgatgaccctgcggctgtggtccagc

SEQ ID NO: 6554 - DNA, 1956 bp, synthetic construct
  source 1..1956: mol_type = other DNA
atggccttaccagtgaccgccttgctcctgccgctggccttgctgctccacgccgccaggccgatccagatgacccagagccccagcagcctgtctgccagcgtgggcgacagagtgaccatcacctgtcggagcagccagagcatcgtgcactccgtgggcaacaccttcctggaatggtatcagcagaagcccggcaaggcccccaagctgctgatctacaaggtgtccaacagattcagcggcgtgcccagcaggtttagcggctctggcagcggcaccgacttcaccctgaccatctctagcctccagcccgaggacttcgccacctactactgttttcaaggcagccagttcccctacaccttcggccagggaacaaaggtggaaatcaagcggctcgagggacagcctaaggccaatcctaccgtgacactgttccctccaagcagcgaagaactccaggccaacaaggccacacttgtgtgcctgatctccgacttctaccctggggctgtgacagtggcttggaaggccgatggatctcctgtgaaagccggcgtggaaaccaccaagccatccaagcagagcaacaacaaatacgccgccagctcctacctgagcctgacacctgagcagtggaagtcccacagatcctacagctgccaagtgacccacgaaggcagcaccgtggaaaagacagtggcccctacagagtgcagccccatcaagaccgatgtgattacaatggaccccaaggacaactgctccaaggacgccaacgataccctgctgctccagctgaccaacaccagcgcctactacatgtacgagatcctgctgggcaaggccaccctgtacgccgtgctggtgtctgccctggtgctgatggctatggtcaagcggaaggacagccggggacgcgccaagagaagcggatctggcgtgaagcagaccctgaatttcgacctgctgaagctggctggcgacgtggaatccaacccaggccctactagtatggactggatttggcgcatccttttccttgtcggcgctgctaccggcgcgcattccttcgaagtgcaactggtggaaagcggaggcggcctggtgcagcctggcggatctctgagactgagctgtgccgccagcggctacgagttcagccggtcctggatgaactgggtgcgccaggcccctggcaagggactggaatgggtgggaagaatctaccccggcgacggcgacaccaactacagcggcaagttcaagggccggttcaccatcagcgccgacaccagcaagaacaccgcctacctccagatgaacagcctgcgggccgaggataccgccgtgtactactgtgccagagatggcagctcctgggactggtacttcgacgtgtggggacagggaacccttgtgaccgtgtccagcacgcgtgcctctacaaagggaccctccgtgtttcctctggctcccagcagcaagtctacaagcggaggaacagccgctctgggctgcctggtcaaggattactttcccgagcctgtgaccgtgtcctggaatagcggagcactgacaagcggcgtgcacacctttccagccgtgctgcaaagcagcggcctgtactctctgagcagcgtggtcacagtgcctagctctagcctgggcacccagacctacatctgcaatgtgaaccacaagcctagcaacaccaaggtggacaagagagtggaacccaagagctgtgaagtgaaaaccgactccaccgaccacgtgaagcccaaagagacagagaacaccaagcagcccagcaagagctgccacaagcccaaggccatcgtgcacaccgagaaagtgaacatgatgagcctgaccgtgctgggcttcagaatcctgctgctgaaagtggccggctttaacctgctgatgaccctgcggctgtggtccagc

SEQ ID NO: 6555 - DNA, 1968 bp, synthetic construct
  source 1..1968: mol_type = other DNA
atggccttaccagtgaccgccttgctcctgccgctggccttgctgctccacgccgccaggccggaactgcaaagcgtgctgacacagcctcctagcgcctctggaacacctggacagagagtgacaatcagctgctccggcagctccagcaacatcggcagcaactacgtgaactggtatcagcagctgcctggcacagcccctaaactgctgatctacggcgactaccagaggccaagcggcgtgccagatagattcagcggcagcaagtctggcacaagcgccagcctggctatctctggactgagaagcgaggacgaggccgactactactgtgccaccagagatgatagcctgagcggcagcgtggtgtttggcacaggcacaaagctgacagtgctgggcctcgagggacagcctaaggccaatcctaccgtgacactgttccctccaagcagcgaagaactccaggccaacaaggccacacttgtgtgcctgatctccgacttctaccctggggctgtgacagtggcttggaaggccgatggatctcctgtgaaagccggcgtggaaaccaccaagccatccaagcagagcaacaacaaatacgccgccagctcctacctgagcctgacacctgagcagtggaagtcccacagatcctacagctgccaagtgacccacgaaggcagcaccgtggaaaagacagtggcccctacagagtgcagccccatcaagaccgatgtgattacaatggaccccaaggacaactgctccaaggacgccaacgataccctgctgctccagctgaccaacaccagcgcctactacatgtacgagatcctgctgggcaaggccaccctgtacgccgtgctggtgtctgccctggtgctgatggctatggtcaagcggaaggacagccggggacgcgccaagagaagcggatctggcgtgaagcagaccctgaatttcgacctgctgaagctggctggcgacgtggaatccaacccaggccctactagtatggactggatttggcgcatccttttccttgtcggcgctgctaccggcgcgcattccttcgaagttcagctggttcagagcggagccgaagtgaagaagcctggcgagagcctgaagattagctgcaaaggcagcggctacggcttcaccagctattggatcggctgggtccgacagatgcctggcaaaggactggaatggatgggcatcattcaccccgacgacagcgacaccaagtacagccctagcttccagggccaagtgaccatcagcgccgacaagagcatcagcacagcctacctccagtggtcctctctgaaggccagcgataccgccatgtactactgcgccagcagctacctgagaggactgtggggcggctacttcgatttttggggccagggcacactggtcaccgttagttctacgcgtgcctctacaaagggaccctccgtgtttcctctggctcccagcagcaagtctacaagcggaggaacagccgctctgggctgcctggtcaaggattactttcccgagcctgtgaccgtgtcctggaatagcggagcactgacaagcggcgtgcacacctttccagccgtgctgcaaagcagcggcctgtactctctgagcagcgtggtcacagtgcctagctctagcctgggcacccagacctacatctgcaatgtgaaccacaagcctagcaacaccaaggtggacaagagagtggaacccaagagctgtgaagtgaaaaccgactccaccgaccacgtgaagcccaaagagacagagaacaccaagcagcccagcaagagctgccacaagcccaaggccatcgtgcacaccgagaaagtgaacatgatgagcctgaccgtgctgggcttcagaatcctgctgctgaaagtggccggctttaacctgctgatgaccctgcggctgtggtccagc

SEQ ID NO: 6556 - DNA, 1968 bp, synthetic construct
  source 1..1968: mol_type = other DNA
atggccttaccagtgaccgccttgctcctgccgctggccttgctgctccacgccgccaggccggagatcgtgctgacacagtctcccgccacactgtcactgtctccaggcgaaagagccacactgagctgtagcgtgtccagcagcatcagcagcagcaacctgcactggtatcagcagaagcctggacaggcccctcggctgctgatctacgccacatctaatctggcctctggcatccccgccagattttctggctctggaagcggcaccgacttcaccctgaccataagcagcctggaacctgaggacttcgccgtgtactactgccagcagtggtccagctatccccacacatttggcggaggcaccaaggtggaaatcaagagactcgagggacagcctaaggccaatcctaccgtgacactgttccctccaagcagcgaagaactccaggccaacaaggccacacttgtgtgcctgatctccgacttctaccctggggctgtgacagtggcttggaaggccgatggatctcctgtgaaagccggcgtggaaaccaccaagccatccaagcagagcaacaacaaatacgccgccagctcctacctgagcctgacacctgagcagtggaagtcccacagatcctacagctgccaagtgacccacgaaggcagcaccgtggaaaagacagtggcccctacagagtgcagccccatcaagaccgatgtgattacaatggaccccaaggacaactgctccaaggacgccaacgataccctgctgctccagctgaccaacaccagcgcctactacatgtacgagatcctgctgggcaaggccaccctgtacgccgtgctggtgtctgccctggtgctgatggctatggtcaagcggaaggacagccggggacgcgccaagagaagcggatctggcgtgaagcagaccctgaatttcgacctgctgaagctggctggcgacgtggaatccaacccaggccctactagtatggactggatttggcgcatccttttccttgtcggcgctgctaccggcgcgcattccttcgaacaggttcagctggttcagagcggagccgaagtgaagaaacctggggcctctgtgaaggtgtcctgcaaggcttccggctacacctttaccaactacctgatcgagtgggtccgacaggctccaggacaaggactggaatggatgggcctgattaaccctggcagcggcggcaccaactacaacgagaagttcaagggcagagtgaccatgaccaccgacaccagcacaagcaccgcctacatggaactgcggagcctgagaagcgacgacaccgccgtgtattattgcgccagaagaagccctctcggctcttggatctactacgcctatgacggcgtggcctattggggccagggaacactggttacagtgtcctctacgcgtgcctctacaaagggaccctccgtgtttcctctggctcccagcagcaagtctacaagcggaggaacagccgctctgggctgcctggtcaaggattactttcccgagcctgtgaccgtgtcctggaatagcggagcactgacaagcggcgtgcacacctttccagccgtgctgcaaagcagcggcctgtactctctgagcagcgtggtcacagtgcctagctctagcctgggcacccagacctacatctgcaatgtgaaccacaagcctagcaacaccaaggtggacaagagagtggaacccaagagctgtgaagtgaaaaccgactccaccgaccacgtgaagcccaaagagacagagaacaccaagcagcccagcaagagctgccacaagcccaaggccatcgtgcacaccgagaaagtgaacatgatgagcctgaccgtgctgggcttcagaatcctgctgctgaaagtggccggctttaacctgctgatgaccctgcggctgtggtccagc

SEQ ID NO: 6557 - DNA, 1932 bp, synthetic construct
  source 1..1932: mol_type = other DNA
atggccttaccagtgaccgccttgctcctgccgctggccttgctgctccacgccgccaggccgcagatcgtgctgacacagagccccgccatcatgtctgttagccctggcgagaaagtgaccatgacctgtagcgccagcagcagcgtgaactacatgcactggttccagcagaagcccggcacaagccctaagctgtgggtgtacagcaccagcaatctggcctctggcgtgccagccagattttctggctctggcagcggcaccagctacagcctgacaatcagcagcatggaagccgaggatgccgccacctactattgtcagcagcggagcatctacccaccttggacatttggcggaggcaccaagctggaaatcaaactcgagggacagcctaaggccaatcctaccgtgacactgttccctccaagcagcgaagaactccaggccaacaaggccacacttgtgtgcctgatctccgacttctaccctggggctgtgacagtggcttggaaggccgatggatctcctgtgaaagccggcgtggaaaccaccaagccatccaagcagagcaacaacaaatacgccgccagctcctacctgagcctgacacctgagcagtggaagtcccacagatcctacagctgccaagtgacccacgaaggcagcaccgtggaaaagacagtggcccctacagagtgcagccccatcaagaccgatgtgattacaatggaccccaaggacaactgctccaaggacgccaacgataccctgctgctccagctgaccaacaccagcgcctactacatgtacgagatcctgctgggcaaggccaccctgtacgccgtgctggtgtctgccctggtgctgatggctatggtcaagcggaaggacagccggggacgcgccaagagaagcggatctggcgtgaagcagaccctgaatttcgacctgctgaagctggctggcgacgtggaatccaacccaggccctactagtatggactggatttggcgcatccttttccttgtcggcgctgctaccggcgcgcattccttcgaagttcagctccagcagagcggccctgagcttgtgaaacctggcgcttccgtgaagatcagctgcaaggccagcggctacagcttcaccggctacaccatgaactgggtcaagcagtcccacggcaagaacctggaatggatcggcctgattaacccctacaacggcggcacctcctacaaccagaagttcaaggccaaggccacactgaccgtggacaagagcagcagcacagcctacatgcagctgaagtccctgaccagcgaggacagcgccgtgtactactgcgccagagattacggctacgtgctggactattggggccagggcacaagcgtgacagtgtctagtacgcgtgcctctacaaagggaccctccgtgtttcctctggctcccagcagcaagtctacaagcggaggaacagccgctctgggctgcctggtcaaggattactttcccgagcctgtgaccgtgtcctggaatagcggagcactgacaagcggcgtgcacacctttccagccgtgctgcaaagcagcggcctgtactctctgagcagcgtggtcacagtgcctagctctagcctgggcacccagacctacatctgcaatgtgaaccacaagcctagcaacaccaaggtggacaagagagtggaacccaagagctgtgaagtgaaaaccgactccaccgaccacgtgaagcccaaagagacagagaacaccaagcagcccagcaagagctgccacaagcccaaggccatcgtgcacaccgagaaagtgaacatgatgagcctgaccgtgctgggcttcagaatcctgctgctgaaagtggccggctttaacctgctgatgaccctgcggctgtggtccagc

SEQ ID NO: 6558 - DNA, 1935 bp, synthetic construct
  source 1..1935: mol_type = other DNA
atggccttaccagtgaccgccttgctcctgccgctggccttgctgctccacgccgccaggccggacatccagatgacacagagccctagcagcctgtctgccagcgtgggagacagagtgaccatcacatgcaaggccagccagagcgtgtccaacgacgtgacctggtatcagcagaagcctggacaggcccctaagctgctgatctacagcgccagcaacagatacagcggagtgcccgccagattttccggctctggctacggcaccgagttcacctttaccatcagcagcgtgcagagcgaggacttcgccgtgtacttctgccagcaagactacagcagcttcggccagggcaccaagctggaaatcaagagactcgagggacagcctaaggccaatcctaccgtgacactgttccctccaagcagcgaagaactccaggccaacaaggccacacttgtgtgcctgatctccgacttctaccctggggctgtgacagtggcttggaaggccgatggatctcctgtgaaagccggcgtggaaaccaccaagccatccaagcagagcaacaacaaatacgccgccagctcctacctgagcctgacacctgagcagtggaagtcccacagatcctacagctgccaagtgacccacgaaggcagcaccgtggaaaagacagtggcccctacagagtgcagccccatcaagaccgatgtgattacaatggaccccaaggacaactgctccaaggacgccaacgataccctgctgctccagctgaccaacaccagcgcctactacatgtacgagatcctgctgggcaaggccaccctgtacgccgtgctggtgtctgccctggtgctgatggctatggtcaagcggaaggacagccggggacgcgccaagagaagcggatctggcgtgaagcagaccctgaatttcgacctgctgaagctggctggcgacgtggaatccaacccaggccctactagtatggactggatttggcgcatccttttccttgtcggcgctgctaccggcgcgcattccttcgaacaggtgcagctggtggaatctggacctggcgtggtgcagcctggcagaagcctgagaatcagctgtgccgtgtccggcttcagcgtgaccaactacggcgtgcactgggtgcgccagccacctggaaaaggactggaatggctgggcgtgatctgggctggcggcatcaccaactacaacagcgccttcatgtcccggctgaccatctccaaggacaacagcaagaacaccgtgtacctccagatgaacagcctgcgggccgaggacaccgccatgtactactgtgcttccagaggcggccactacggctacgccctggattattggggccagggaaccctcgtgaccgtgtcctctacgcgtgcctctacaaagggaccctccgtgtttcctctggctcccagcagcaagtctacaagcggaggaacagccgctctgggctgcctggtcaaggattactttcccgagcctgtgaccgtgtcctggaatagcggagcactgacaagcggcgtgcacacctttccagccgtgctgcaaagcagcggcctgtactctctgagcagcgtggtcacagtgcctagctctagcctgggcacccagacctacatctgcaatgtgaaccacaagcctagcaacaccaaggtggacaagagagtggaacccaagagctgtgaagtgaaaaccgactccaccgaccacgtgaagcccaaagagacagagaacaccaagcagcccagcaagagctgccacaagcccaaggccatcgtgcacaccgagaaagtgaacatgatgagcctgaccgtgctgggcttcagaatcctgctgctgaaagtggccggctttaacctgctgatgaccctgcggctgtggtccagc

SEQ ID NO: 6559 - DNA, 1947 bp, synthetic construct
  source 1..1947: mol_type = other DNA
atggccttaccagtgaccgccttgctcctgccgctggccttgctgctccacgccgccaggccggagaacgtgctgacacagagccctgccatcatgagtgcctctccaggcgagaaagtgaccatgacctgtagagccagcagcagcgtgtccagcagctacctgcactggtatcagcagaagtccggcgcaagccccaaagtgtggatctacagcaccagcaatctggcctctggcgtgccaggcagattttctggctctggcagcggcacaagctacagcctgacaatcagctccgtggaagccgaagatgccgccacctactactgccagcagtacagcggctaccccatcacatttggagccggcaccaaggtggaagtgaagagactcgagggacagcctaaggccaatcctaccgtgacactgttccctccaagcagcgaagaactccaggccaacaaggccacacttgtgtgcctgatctccgacttctaccctggggctgtgacagtggcttggaaggccgatggatctcctgtgaaagccggcgtggaaaccaccaagccatccaagcagagcaacaacaaatacgccgccagctcctacctgagcctgacacctgagcagtggaagtcccacagatcctacagctgccaagtgacccacgaaggcagcaccgtggaaaagacagtggcccctacagagtgcagccccatcaagaccgatgtgattacaatggaccccaaggacaactgctccaaggacgccaacgataccctgctgctccagctgaccaacaccagcgcctactacatgtacgagatcctgctgggcaaggccaccctgtacgccgtgctggtgtctgccctggtgctgatggctatggtcaagcggaaggacagccggggacgcgccaagagaagcggatctggcgtgaagcagaccctgaatttcgacctgctgaagctggctggcgacgtggaatccaacccaggccctactagtatggactggatttggcgcatccttttccttgtcggcgctgctaccggcgcgcattccttcgaacaggttcagctcaaagaatctggccccgtgctggtggccccaagccagacactgtctatcacctgtaccgtgtccggcttcagcctggcctcctacaacatccactgggtccgacagcctccaggcaaaggactggaatggctgggagtgatttgggctggcggcagcaccaactacaacagcgcactgatgagccggctgagcatcagcaaggacaacagcaagagccaggtgttcctccagatgaactccctccagaccgacgacaccgccatgtactactgcgccaagagaagcgacgactacagttggttcgcctactggggccagggcacactggttactgtgtctgcttctacgcgtgcctctacaaagggaccctccgtgtttcctctggctcccagcagcaagtctacaagcggaggaacagccgctctgggctgcctggtcaaggattactttcccgagcctgtgaccgtgtcctggaatagcggagcactgacaagcggcgtgcacacctttccagccgtgctgcaaagcagcggcctgtactctctgagcagcgtggtcacagtgcctagctctagcctgggcacccagacctacatctgcaatgtgaaccacaagcctagcaacaccaaggtggacaagagagtggaacccaagagctgtgaagtgaaaaccgactccaccgaccacgtgaagcccaaagagacagagaacaccaagcagcccagcaagagctgccacaagcccaaggccatcgtgcacaccgagaaagtgaacatgatgagcctgaccgtgctgggcttcagaatcctgctgctgaaagtggccggctttaacctgctgatgaccctgcggctgtggtccagc

SEQ ID NO: 6560 - DNA, 1959 bp, synthetic construct
  source 1..1959: mol_type = other DNA
atggccttaccagtgaccgccttgctcctgccgctggccttgctgctccacgccgccaggccggagatcgtgctgacacagtctcccgccacactgtcactgtctccaggcgaaagagccacactgagctgtagagccagccagagcgtgtcctcttacctggcctggtatcagcagaagcctggacaggctccccggctgctgatctacgatgccagcaatagagccacaggcatccccgccagattttctggctctggcagcggcaccgatttcaccctgaccataagcagcctggaacctgaggacttcgccgtgtactactgccagcagagaagcaactggcctcctacattcggccagggcaccaaggtggaaatcaaactcgagggacagcctaaggccaatcctaccgtgacactgttccctccaagcagcgaagaactccaggccaacaaggccacacttgtgtgcctgatctccgacttctaccctggggctgtgacagtggcttggaaggccgatggatctcctgtgaaagccggcgtggaaaccaccaagccatccaagcagagcaacaacaaatacgccgccagctcctacctgagcctgacacctgagcagtggaagtcccacagatcctacagctgccaagtgacccacgaaggcagcaccgtggaaaagacagtggcccctacagagtgcagccccatcaagaccgatgtgattacaatggaccccaaggacaactgctccaaggacgccaacgataccctgctgctccagctgaccaacaccagcgcctactacatgtacgagatcctgctgggcaaggccaccctgtacgccgtgctggtgtctgccctggtgctgatggctatggtcaagcggaaggacagccggggacgcgccaagagaagcggatctggcgtgaagcagaccctgaatttcgacctgctgaagctggctggcgacgtggaatccaacccaggccctactagtatggactggatttggcgcatccttttccttgtcggcgctgctaccggcgcgcattccttcgaacaactccagctgcaagagtctggccccggactggtcaagcctagcgaaacactgagcctgacctgtaccgtgtctggcggcagcatcagcagcagctcttattggtggggctggaccagacagcctcctggcagaggactggaatggatcggcaccatgtactacagcggcaacatctactacaaccccagcctccagagccgggccaccatctctgtggacaccagcaagaaccagttcagcctgaagctgagcagcgtgacagccgccgataccgccgtgtattattgcgccagacatgtgggctacagctacggcagacggttctggtacttcgacctgtggggcagaggcaccctggtcacagtttcttctacgcgtgcctctacaaagggaccctccgtgtttcctctggctcccagcagcaagtctacaagcggaggaacagccgctctgggctgcctggtcaaggattactttcccgagcctgtgaccgtgtcctggaatagcggagcactgacaagcggcgtgcacacctttccagccgtgctgcaaagcagcggcctgtactctctgagcagcgtggtcacagtgcctagctctagcctgggcacccagacctacatctgcaatgtgaaccacaagcctagcaacaccaaggtggacaagagagtggaacccaagagctgtgaagtgaaaaccgactccaccgaccacgtgaagcccaaagagacagagaacaccaagcagcccagcaagagctgccacaagcccaaggccatcgtgcacaccgagaaagtgaacatgatgagcctgaccgtgctgggcttcagaatcctgctgctgaaagtggccggctttaacctgctgatgaccctgcggctgtggtccagc

SEQ ID NO: 6561 - DNA, 1947 bp, synthetic construct
  source 1..1947: mol_type = other DNA
atggccttaccagtgaccgccttgctcctgccgctggccttgctgctccacgccgccaggccggacatccagatgacacagagccctagcagcctgtctgccagcgtgggagacagagtgaccatcacatgcaaggccagcgaccacatcaacaactggctggcctggtatcagcagaagcctggcaaggcccctaagctgctgatctacggcgctaccacactggaaacaggcgtgcccagcagattttctggcagcggctctggcaccgacttcaccctgacaatatccagcctccagcctgaggacttcgccacctactactgtcagcagagctggaacaccccttggacattcggccagggcaccaaggtggaaatcaagagactcgagggacagcctaaggccaatcctaccgtgacactgttccctccaagcagcgaagaactccaggccaacaaggccacacttgtgtgcctgatctccgacttctaccctggggctgtgacagtggcttggaaggccgatggatctcctgtgaaagccggcgtggaaaccaccaagccatccaagcagagcaacaacaaatacgccgccagctcctacctgagcctgacacctgagcagtggaagtcccacagatcctacagctgccaagtgacccacgaaggcagcaccgtggaaaagacagtggcccctacagagtgcagccccatcaagaccgatgtgattacaatggaccccaaggacaactgctccaaggacgccaacgataccctgctgctccagctgaccaacaccagcgcctactacatgtacgagatcctgctgggcaaggccaccctgtacgccgtgctggtgtctgccctggtgctgatggctatggtcaagcggaaggacagccggggacgcgccaagagaagcggatctggcgtgaagcagaccctgaatttcgacctgctgaagctggctggcgacgtggaatccaacccaggccctactagtatggactggatttggcgcatccttttccttgtcggcgctgctaccggcgcgcattccttcgaagttcagctggttgaatctggcggcggactggttcaacctggcggatctctgagactgagctgtgccgcctctggctacacctttagcagctactgggtcaactgggttcgacaggcccctggcaaaggactggaatgggtcgcccaaatctatcccggcgacggcgacaccaactacaacggcaagttcaagggcagattcaccatcagccgggacaacagcaagaacaccctgtacctccagatgaactccctgagagccgaggacaccgccgtgtactattgtgccagatccatcaccaccgtcgtgggctgcgctatggattattggggccagggaaccctggtcaccgtgtcctctacgcgtgcctctacaaagggaccctccgtgtttcctctggctcccagcagcaagtctacaagcggaggaacagccgctctgggctgcctggtcaaggattactttcccgagcctgtgaccgtgtcctggaatagcggagcactgacaagcggcgtgcacacctttccagccgtgctgcaaagcagcggcctgtactctctgagcagcgtggtcacagtgcctagctctagcctgggcacccagacctacatctgcaatgtgaaccacaagcctagcaacaccaaggtggacaagagagtggaacccaagagctgtgaagtgaaaaccgactccaccgaccacgtgaagcccaaagagacagagaacaccaagcagcccagcaagagctgccacaagcccaaggccatcgtgcacaccgagaaagtgaacatgatgagcctgaccgtgctgggcttcagaatcctgctgctgaaagtggccggctttaacctgctgatgaccctgcggctgtggtccagc

SEQ ID NO: 6562 - DNA, 1947 bp, synthetic construct
  source 1..1947: mol_type = other DNA
atggccttaccagtgaccgccttgctcctgccgctggccttgctgctccacgccgccaggccggacatccagatgacacagagccctagcagcctgtctgccagcgtgggagacagagtgaccatcacatgcaaggccagcgaccacatcaacaactggctggcctggtatcagcagaagcctggcaaggcccctaagctgctgatctacggcgctaccacactggaaacaggcgtgcccagcagattttctggcagcggctctggcaccgacttcaccctgacaatatccagcctccagcctgaggacttcgccacctactactgtcagcagagctggaacaccccttggacattcggccagggcaccaaggtggaaatcaagagactcgagggacagcctaaggccaatcctaccgtgacactgttccctccaagcagcgaagaactccaggccaacaaggccacacttgtgtgcctgatctccgacttctaccctggggctgtgacagtggcttggaaggccgatggatctcctgtgaaagccggcgtggaaaccaccaagccatccaagcagagcaacaacaaatacgccgccagctcctacctgagcctgacacctgagcagtggaagtcccacagatcctacagctgccaagtgacccacgaaggcagcaccgtggaaaagacagtggcccctacagagtgcagccccatcaagaccgatgtgattacaatggaccccaaggacaactgctccaaggacgccaacgataccctgctgctccagctgaccaacaccagcgcctactacatgtacgagatcctgctgggcaaggccaccctgtacgccgtgctggtgtctgccctggtgctgatggctatggtcaagcggaaggacagccggggacgcgccaagagaagcggatctggcgtgaagcagaccctgaatttcgacctgctgaagctggctggcgacgtggaatccaacccaggccctactagtatggactggatttggcgcatccttttccttgtcggcgctgctaccggcgcgcattccttcgaagttcagctggttgaatctggcggcggactggttcaacctggcggatctctgagactgagctgtgccgcctctggctacgcctttagcaactactgggtcaactgggttcgacaggcccctggcaaaggactggaatgggtcgcccaaatctatcccggcgacggcgacaccaactacaacggcaagttcaagggcagattcaccatcagccgggacaacagcaagaacaccctgtacctccagatgaactccctgagagccgaggacaccgccgtgtactattgtgccagatccatcaccaccgtcgtgggctgcgctatggattattggggccagggaaccctggtcaccgtgtcctctacgcgtgcctctacaaagggaccctccgtgtttcctctggctcccagcagcaagtctacaagcggaggaacagccgctctgggctgcctggtcaaggattactttcccgagcctgtgaccgtgtcctggaatagcggagcactgacaagcggcgtgcacacctttccagccgtgctgcaaagcagcggcctgtactctctgagcagcgtggtcacagtgcctagctctagcctgggcacccagacctacatctgcaatgtgaaccacaagcctagcaacaccaaggtggacaagagagtggaacccaagagctgtgaagtgaaaaccgactccaccgaccacgtgaagcccaaagagacagagaacaccaagcagcccagcaagagctgccacaagcccaaggccatcgtgcacaccgagaaagtgaacatgatgagcctgaccgtgctgggcttcagaatcctgctgctgaaagtggccggctttaacctgctgatgaccctgcggctgtggtccagc

SEQ ID NO: 6563 - DNA, 1938 bp, synthetic construct
  source 1..1938: mol_type = other DNA
atggccttaccagtgaccgccttgctcctgccgctggccttgctgctccacgccgccaggccggacatccagatgacacagagccctagcagcctgtctgccagcgtgggagacagagtgaccatcacatgcaagagcagccagagcctgctggactccgatggcaagacctacctgaactggtatcagcagaagcccggcaaggcccctaagctgctgatctacctggtgtccaagctggatagcggcgtgcccagcagattttctggcagcggcagcggaaccgacttcaccctgacaatatccagcctccagcctgaggacttcgccacctactactgcttccaaggcacccactttccattcaccttcggccagggcaccaaggtggaaatcaaaagactcgagggacagcctaaggccaatcctaccgtgacactgttccctccaagcagcgaagaactccaggccaacaaggccacacttgtgtgcctgatctccgacttctaccctggggctgtgacagtggcttggaaggccgatggatctcctgtgaaagccggcgtggaaaccaccaagccatccaagcagagcaacaacaaatacgccgccagctcctacctgagcctgacacctgagcagtggaagtcccacagatcctacagctgccaagtgacccacgaaggcagcaccgtggaaaagacagtggcccctacagagtgcagccccatcaagaccgatgtgattacaatggaccccaaggacaactgctccaaggacgccaacgataccctgctgctccagctgaccaacaccagcgcctactacatgtacgagatcctgctgggcaaggccaccctgtacgccgtgctggtgtctgccctggtgctgatggctatggtcaagcggaaggacagccggggacgcgccaagagaagcggatctggcgtgaagcagaccctgaatttcgacctgctgaagctggctggcgacgtggaatccaacccaggccctactagtatggactggatttggcgcatccttttccttgtcggcgctgctaccggcgcgcattccttcgaagtgcagctggttgaatcaggcggaggactggttcagcctggcggatctctgagactgtcttgtgccgccagcggctacaccttcaccagctactggatgaactgggtccgacaggcccctggcaaaggactggaatgggtcggaatgatcgaccccagcgacagcgagacacactacaaccacatcttcaaggaccgcttcaccatcagcgccgacaccagcaagaataccgcctacctccagatgaactccctgagagccgaggacaccgccgtgtactactgcgccagaaacctgtatctgttcggccagggaaccctggtcacagtgtcatctacgcgtgcctctacaaagggaccctccgtgtttcctctggctcccagcagcaagtctacaagcggaggaacagccgctctgggctgcctggtcaaggattactttcccgagcctgtgaccgtgtcctggaatagcggagcactgacaagcggcgtgcacacctttccagccgtgctgcaaagcagcggcctgtactctctgagcagcgtggtcacagtgcctagctctagcctgggcacccagacctacatctgcaatgtgaaccacaagcctagcaacaccaaggtggacaagagagtggaacccaagagctgtgaagtgaaaaccgactccaccgaccacgtgaagcccaaagagacagagaacaccaagcagcccagcaagagctgccacaagcccaaggccatcgtgcacaccgagaaagtgaacatgatgagcctgaccgtgctgggcttcagaatcctgctgctgaaagtggccggctttaacctgctgatgaccctgcggctgtggtccagc

SEQ ID NO: 6564 - DNA, 1938 bp, synthetic construct
  source 1..1938: mol_type = other DNA
atggccttaccagtgaccgccttgctcctgccgctggccttgctgctccacgccgccaggccggacatccagatgacacagagccctagcagcctgtctgccagcgtgggagacagagtgaccatcacatgcaagagcagccagagcctgctggactccgatggcaagacctacctgaactggtatcagcagaagcccggcaaggcccctaagctgctgatctacctggtgtccaagctggatagcggcgtgcccagcagattttctggcagcggcagcggaaccgacttcaccctgacaatatccagcctccagcctgaggacttcgccacctactactgcttccaaggcacccactttccattcaccttcggccagggcaccaaggtggaaatcaaaagactcgagggacagcctaaggccaatcctaccgtgacactgttccctccaagcagcgaagaactccaggccaacaaggccacacttgtgtgcctgatctccgacttctaccctggggctgtgacagtggcttggaaggccgatggatctcctgtgaaagccggcgtggaaaccaccaagccatccaagcagagcaacaacaaatacgccgccagctcctacctgagcctgacacctgagcagtggaagtcccacagatcctacagctgccaagtgacccacgaaggcagcaccgtggaaaagacagtggcccctacagagtgcagccccatcaagaccgatgtgattacaatggaccccaaggacaactgctccaaggacgccaacgataccctgctgctccagctgaccaacaccagcgcctactacatgtacgagatcctgctgggcaaggccaccctgtacgccgtgctggtgtctgccctggtgctgatggctatggtcaagcggaaggacagccggggacgcgccaagagaagcggatctggcgtgaagcagaccctgaatttcgacctgctgaagctggctggcgacgtggaatccaacccaggccctactagtatggactggatttggcgcatccttttccttgtcggcgctgctaccggcgcgcattccttcgaagtgcagctggttgaatcaggcggaggactggttcagcctggcggatctctgagactgtcttgtgccgccagcggctacaccttcagcagctactggatgaactgggtccgacaggcccctggcaaaggactggaatgggtcggaatgatcgaccccagcgacagcgagacacactacaaccacatcttcaaggaccgcttcaccatcagcgccgacaccagcaagaataccgcctacctccagatgaactccctgagagccgaggacaccgccgtgtactactgcgccagaaacctgtatctgtggggccagggaaccctggtcacagtgtcatctacgcgtgcctctacaaagggaccctccgtgtttcctctggctcccagcagcaagtctacaagcggaggaacagccgctctgggctgcctggtcaaggattactttcccgagcctgtgaccgtgtcctggaatagcggagcactgacaagcggcgtgcacacctttccagccgtgctgcaaagcagcggcctgtactctctgagcagcgtggtcacagtgcctagctctagcctgggcacccagacctacatctgcaatgtgaaccacaagcctagcaacaccaaggtggacaagagagtggaacccaagagctgtgaagtgaaaaccgactccaccgaccacgtgaagcccaaagagacagagaacaccaagcagcccagcaagagctgccacaagcccaaggccatcgtgcacaccgagaaagtgaacatgatgagcctgaccgtgctgggcttcagaatcctgctgctgaaagtggccggctttaacctgctgatgaccctgcggctgtggtccagc

SEQ ID NO: 6565 - DNA, 1938 bp, synthetic construct
  source 1..1938: mol_type = other DNA
atggccttaccagtgaccgccttgctcctgccgctggccttgctgctccacgccgccaggccggacatccagatgacacagagccctagcagcctgtctgccagcgtgggagacagagtgaccatcacatgcaagagcagccagagcctgctggactccgatggcaagacctacctgaactggtatcagcagaagcccggcaaggcccctaagctgctgatctacctggtgtccaagctggatagcggcgtgcccagcagattttctggcagcggcagcggaaccgacttcaccctgacaatatccagcctccagcctgaggacttcgccacctactactgctggcaaggcacccactttccattcaccttcggccagggcaccaaggtggaaatcaaaagactcgagggacagcctaaggccaatcctaccgtgacactgttccctccaagcagcgaagaactccaggccaacaaggccacacttgtgtgcctgatctccgacttctaccctggggctgtgacagtggcttggaaggccgatggatctcctgtgaaagccggcgtggaaaccaccaagccatccaagcagagcaacaacaaatacgccgccagctcctacctgagcctgacacctgagcagtggaagtcccacagatcctacagctgccaagtgacccacgaaggcagcaccgtggaaaagacagtggcccctacagagtgcagccccatcaagaccgatgtgattacaatggaccccaaggacaactgctccaaggacgccaacgataccctgctgctccagctgaccaacaccagcgcctactacatgtacgagatcctgctgggcaaggccaccctgtacgccgtgctggtgtctgccctggtgctgatggctatggtcaagcggaaggacagccggggacgcgccaagagaagcggatctggcgtgaagcagaccctgaatttcgacctgctgaagctggctggcgacgtggaatccaacccaggccctactagtatggactggatttggcgcatccttttccttgtcggcgctgctaccggcgcgcattccttcgaagtgcagctggttgaatcaggcggaggactggttcagcctggcggatctctgagactgtcttgtgccgccagcggctacaccttcaccagctactggatgaactgggtccgacaggcccctggcaaaggactggaatgggtcggaatgatcgaccccagcgacagcgagacacactacaaccacatcttcaaggaccgcttcaccatcagcgccgacaccagcaagaataccgcctacctccagatgaactccctgagagccgaggacaccgccgtgtactactgcgccagaaacctgtatctgttcggccagggaaccctggtcacagtgtcatctacgcgtgcctctacaaagggaccctccgtgtttcctctggctcccagcagcaagtctacaagcggaggaacagccgctctgggctgcctggtcaaggattactttcccgagcctgtgaccgtgtcctggaatagcggagcactgacaagcggcgtgcacacctttccagccgtgctgcaaagcagcggcctgtactctctgagcagcgtggtcacagtgcctagctctagcctgggcacccagacctacatctgcaatgtgaaccacaagcctagcaacaccaaggtggacaagagagtggaacccaagagctgtgaagtgaaaaccgactccaccgaccacgtgaagcccaaagagacagagaacaccaagcagcccagcaagagctgccacaagcccaaggccatcgtgcacaccgagaaagtgaacatgatgagcctgaccgtgctgggcttcagaatcctgctgctgaaagtggccggctttaacctgctgatgaccctgcggctgtggtccagc

SEQ ID NO: 6566 - DNA, 1938 bp, synthetic construct
  source 1..1938: mol_type = other DNA
atggccttaccagtgaccgccttgctcctgccgctggccttgctgctccacgccgccaggccggacatccagatgacacagagccctagcagcctgtctgccagcgtgggagacagagtgaccatcacatgcaagagcagccagagcctgctggactccgatggcaagacctacctgaactggtatcagcagaagcccggcaaggcccctaagctgctgatctacctggtgtccaagctggatagcggcgtgcccagcagattttctggcagcggcagcggaaccgacttcaccctgacaatatccagcctccagcctgaggacttcgccacctactactgctggcaaggcacccactttccattcaccttcggccagggcaccaaggtggaaatcaaaagactcgagggacagcctaaggccaatcctaccgtgacactgttccctccaagcagcgaagaactccaggccaacaaggccacacttgtgtgcctgatctccgacttctaccctggggctgtgacagtggcttggaaggccgatggatctcctgtgaaagccggcgtggaaaccaccaagccatccaagcagagcaacaacaaatacgccgccagctcctacctgagcctgacacctgagcagtggaagtcccacagatcctacagctgccaagtgacccacgaaggcagcaccgtggaaaagacagtggcccctacagagtgcagccccatcaagaccgatgtgattacaatggaccccaaggacaactgctccaaggacgccaacgataccctgctgctccagctgaccaacaccagcgcctactacatgtacgagatcctgctgggcaaggccaccctgtacgccgtgctggtgtctgccctggtgctgatggctatggtcaagcggaaggacagccggggacgcgccaagagaagcggatctggcgtgaagcagaccctgaatttcgacctgctgaagctggctggcgacgtggaatccaacccaggccctactagtatggactggatttggcgcatccttttccttgtcggcgctgctaccggcgcgcattccttcgaagtgcagctggttgaatcaggcggaggactggttcagcctggcggatctctgagactgtcttgtgccgccagcggctacaccttcagcagctactggatgaactgggtccgacaggcccctggcaaaggactggaatgggtcggaatgatcgaccccagcgacagcgagacacactacaaccacatcttcaaggaccgcttcaccatcagcgccgacaccagcaagaataccgcctacctccagatgaactccctgagagccgaggacaccgccgtgtactactgcgccagaaacctgtatctgtggggccagggaaccctggtcacagtgtcatctacgcgtgcctctacaaagggaccctccgtgtttcctctggctcccagcagcaagtctacaagcggaggaacagccgctctgggctgcctggtcaaggattactttcccgagcctgtgaccgtgtcctggaatagcggagcactgacaagcggcgtgcacacctttccagccgtgctgcaaagcagcggcctgtactctctgagcagcgtggtcacagtgcctagctctagcctgggcacccagacctacatctgcaatgtgaaccacaagcctagcaacaccaaggtggacaagagagtggaacccaagagctgtgaagtgaaaaccgactccaccgaccacgtgaagcccaaagagacagagaacaccaagcagcccagcaagagctgccacaagcccaaggccatcgtgcacaccgagaaagtgaacatgatgagcctgaccgtgctgggcttcagaatcctgctgctgaaagtggccggctttaacctgctgatgaccctgcggctgtggtccagc

SEQ ID NO: 6567 - DNA, 1938 bp, synthetic construct
  source 1..1938: mol_type = other DNA
atggccttaccagtgaccgccttgctcctgccgctggccttgctgctccacgccgccaggccggacatccagatgacacagagccctagcagcctgtctgccagcgtgggagacagagtgaccatcacatgcaagagcagccagagcctgctggactccgatggcaagacctacctgaactggtatcagcagaagcccggcaaggcccctaagctgctgatctacctggtgtccaagctggatagcggcgtgcccagcagattttctggcagcggcagcggaaccgacttcaccctgacaatatccagcctccagcctgaggacttcgccacctactactgcttccaaggcacccactttccatacaccttcggccagggcaccaaggtggaaatcaaaagactcgagggacagcctaaggccaatcctaccgtgacactgttccctccaagcagcgaagaactccaggccaacaaggccacacttgtgtgcctgatctccgacttctaccctggggctgtgacagtggcttggaaggccgatggatctcctgtgaaagccggcgtggaaaccaccaagccatccaagcagagcaacaacaaatacgccgccagctcctacctgagcctgacacctgagcagtggaagtcccacagatcctacagctgccaagtgacccacgaaggcagcaccgtggaaaagacagtggcccctacagagtgcagccccatcaagaccgatgtgattacaatggaccccaaggacaactgctccaaggacgccaacgataccctgctgctccagctgaccaacaccagcgcctactacatgtacgagatcctgctgggcaaggccaccctgtacgccgtgctggtgtctgccctggtgctgatggctatggtcaagcggaaggacagccggggacgcgccaagagaagcggatctggcgtgaagcagaccctgaatttcgacctgctgaagctggctggcgacgtggaatccaacccaggccctactagtatggactggatttggcgcatccttttccttgtcggcgctgctaccggcgcgcattccttcgaagtgcagctggttgaatcaggcggaggactggttcagcctggcggatctctgagactgtcttgtgccgccagcggctacaccttcaccagctactggatgaactgggtccgacaggcccctggcaaaggactggaatgggtcggaatgatcgaccccagcgacagcgagacacactacaaccacatcttcaaggaccgcttcaccatcagcgccgacaccagcaagaataccgcctacctccagatgaactccctgagagccgaggacaccgccgtgtactactgcgccagaaacctgtatctgttcggccagggaaccctggtcacagtgtcatctacgcgtgcctctacaaagggaccctccgtgtttcctctggctcccagcagcaagtctacaagcggaggaacagccgctctgggctgcctggtcaaggattactttcccgagcctgtgaccgtgtcctggaatagcggagcactgacaagcggcgtgcacacctttccagccgtgctgcaaagcagcggcctgtactctctgagcagcgtggtcacagtgcctagctctagcctgggcacccagacctacatctgcaatgtgaaccacaagcctagcaacaccaaggtggacaagagagtggaacccaagagctgtgaagtgaaaaccgactccaccgaccacgtgaagcccaaagagacagagaacaccaagcagcccagcaagagctgccacaagcccaaggccatcgtgcacaccgagaaagtgaacatgatgagcctgaccgtgctgggcttcagaatcctgctgctgaaagtggccggctttaacctgctgatgaccctgcggctgtggtccagc

SEQ ID NO: 6568 - DNA, 1938 bp, synthetic construct
  source 1..1938: mol_type = other DNA
atggccttaccagtgaccgccttgctcctgccgctggccttgctgctccacgccgccaggccggacatccagatgacacagagccctagcagcctgtctgccagcgtgggagacagagtgaccatcacatgcaagagcagccagagcctgctggactccgatggcaagacctacctgaactggtatcagcagaagcccggcaaggcccctaagctgctgatctacctggtgtccaagctggatagcggcgtgcccagcagattttctggcagcggcagcggaaccgacttcaccctgacaatatccagcctccagcctgaggacttcgccacctactactgcttccaaggcacccactttccatacaccttcggccagggcaccaaggtggaaatcaaaagactcgagggacagcctaaggccaatcctaccgtgacactgttccctccaagcagcgaagaactccaggccaacaaggccacacttgtgtgcctgatctccgacttctaccctggggctgtgacagtggcttggaaggccgatggatctcctgtgaaagccggcgtggaaaccaccaagccatccaagcagagcaacaacaaatacgccgccagctcctacctgagcctgacacctgagcagtggaagtcccacagatcctacagctgccaagtgacccacgaaggcagcaccgtggaaaagacagtggcccctacagagtgcagccccatcaagaccgatgtgattacaatggaccccaaggacaactgctccaaggacgccaacgataccctgctgctccagctgaccaacaccagcgcctactacatgtacgagatcctgctgggcaaggccaccctgtacgccgtgctggtgtctgccctggtgctgatggctatggtcaagcggaaggacagccggggacgcgccaagagaagcggatctggcgtgaagcagaccctgaatttcgacctgctgaagctggctggcgacgtggaatccaacccaggccctactagtatggactggatttggcgcatccttttccttgtcggcgctgctaccggcgcgcattccttcgaagtgcagctggttgaatcaggcggaggactggttcagcctggcggatctctgagactgtcttgtgccgccagcggctacaccttcaccaactactggatgaactgggtccgacaggcccctggcaaaggactggaatgggtcggaatgatcgaccccagcgacagcgagacacactacaaccacatcttcaaggaccgcttcaccatcagcgccgacaccagcaagaataccgcctacctccagatgaactccctgagagccgaggacaccgccgtgtactactgcgccagaaacctgtatctgtggggccagggaaccctggtcacagtgtcatctacgcgtgcctctacaaagggaccctccgtgtttcctctggctcccagcagcaagtctacaagcggaggaacagccgctctgggctgcctggtcaaggattactttcccgagcctgtgaccgtgtcctggaatagcggagcactgacaagcggcgtgcacacctttccagccgtgctgcaaagcagcggcctgtactctctgagcagcgtggtcacagtgcctagctctagcctgggcacccagacctacatctgcaatgtgaaccacaagcctagcaacaccaaggtggacaagagagtggaacccaagagctgtgaagtgaaaaccgactccaccgaccacgtgaagcccaaagagacagagaacaccaagcagcccagcaagagctgccacaagcccaaggccatcgtgcacaccgagaaagtgaacatgatgagcctgaccgtgctgggcttcagaatcctgctgctgaaagtggccggctttaacctgctgatgaccctgcggctgtggtccagc

SEQ ID NO: 6569 - DNA, 1938 bp, synthetic construct
  source 1..1938: mol_type = other DNA
atggccttaccagtgaccgccttgctcctgccgctggccttgctgctccacgccgccaggccggacatccagatgacacagagccctagcagcctgtctgccagcgtgggagacagagtgaccatcacatgcaagagcagccagagcctgctggactccgatggcaagacctacctgaactggtatcagcagaagcccggcaaggcccctaagctgctgatctacctggtgtccaagctggatagcggcgtgcccagcagattttctggcagcggcagcggaaccgacttcaccctgacaatatccagcctccagcctgaggacttcgccacctactactgcttccaaggcacccactttccattcaccttcggccagggcaccaaggtggaaatcaaaagactcgagggacagcctaaggccaatcctaccgtgacactgttccctccaagcagcgaagaactccaggccaacaaggccacacttgtgtgcctgatctccgacttctaccctggggctgtgacagtggcttggaaggccgatggatctcctgtgaaagccggcgtggaaaccaccaagccatccaagcagagcaacaacaaatacgccgccagctcctacctgagcctgacacctgagcagtggaagtcccacagatcctacagctgccaagtgacccacgaaggcagcaccgtggaaaagacagtggcccctacagagtgcagccccatcaagaccgatgtgattacaatggaccccaaggacaactgctccaaggacgccaacgataccctgctgctccagctgaccaacaccagcgcctactacatgtacgagatcctgctgggcaaggccaccctgtacgccgtgctggtgtctgccctggtgctgatggctatggtcaagcggaaggacagccggggacgcgccaagagaagcggatctggcgtgaagcagaccctgaatttcgacctgctgaagctggctggcgacgtggaatccaacccaggccctactagtatggactggatttggcgcatccttttccttgtcggcgctgctaccggcgcgcattccttcgaagtgcagctggttgaatcaggcggaggactggttcagcctggcggatctctgagactgtcttgtgccgccagcggctacaccttcaccaactactggatgaactgggtccgacaggcccctggcaaaggactggaatgggtcggaatgatcgaccccagcgacagcgagacacactacaaccacatcttcaaggaccgcttcaccatcagcgccgacaccagcaagaataccgcctacctccagatgaactccctgagagccgaggacaccgccgtgtactactgcgccagaaacctgtatctgtggggccagggaaccctggtcacagtgtcatctacgcgtgcctctacaaagggaccctccgtgtttcctctggctcccagcagcaagtctacaagcggaggaacagccgctctgggctgcctggtcaaggattactttcccgagcctgtgaccgtgtcctggaatagcggagcactgacaagcggcgtgcacacctttccagccgtgctgcaaagcagcggcctgtactctctgagcagcgtggtcacagtgcctagctctagcctgggcacccagacctacatctgcaatgtgaaccacaagcctagcaacaccaaggtggacaagagagtggaacccaagagctgtgaagtgaaaaccgactccaccgaccacgtgaagcccaaagagacagagaacaccaagcagcccagcaagagctgccacaagcccaaggccatcgtgcacaccgagaaagtgaacatgatgagcctgaccgtgctgggcttcagaatcctgctgctgaaagtggccggctttaacctgctgatgaccctgcggctgtggtccagc

SEQ ID NO: 6570 - DNA, 1947 bp, synthetic construct; identical to SEQ ID NO: 6336
  source 1..1947: mol_type = other DNA

SEQ ID NO: 6571 - DNA, 1947 bp, synthetic construct; identical to SEQ ID NO: 6337
  source 1..1947: mol_type = other DNA

SEQ ID NO: 6572 - DNA, 1947 bp, synthetic construct; identical to SEQ ID NO: 6338
  source 1..1947: mol_type = other DNA

SEQ ID NO: 6573 - DNA, 1944 bp, synthetic construct; identical to SEQ ID NO: 6339
  source 1..1944: mol_type = other DNA

SEQ ID NO: 6574 - DNA, 1944 bp, synthetic construct; identical to SEQ ID NO: 6340
  source 1..1944: mol_type = other DNA

SEQ ID NO: 6575 - DNA, 1938 bp, synthetic construct
  source 1..1938: mol_type = other DNA
atggccttaccagtgaccgccttgctcctgccgctggccttgctgctccacgccgccaggccggacgtggtcatgacacagagcccttctagcctgtctgccagcgtgggcgacagagtgaccatcacctgtatggcctccgaggacatctacatccggctggcctggtatcagcagaagcctggaaacgcccctaagctgctgatctacgccgccacctctctggaaacaggcgtgccaagcagattttccggcagcggctctggcaccgatttcaccctgacaatatccagcctccagcctgaggacttcgccacctactactgccagcagtattggagcagcccctggacatttggcggaggcaccaaggtggaaatcaaactcgagggacagcctaaggccaatcctaccgtgacactgttccctccaagcagcgaagaactccaggccaacaaggccacacttgtgtgcctgatctccgacttctaccctggggctgtgacagtggcttggaaggccgatggatctcctgtgaaagccggcgtggaaaccaccaagccatccaagcagagcaacaacaaatacgccgccagctcctacctgagcctgacacctgagcagtggaagtcccacagatcctacagctgccaagtgacccacgaaggcagcaccgtggaaaagacagtggcccctacagagtgcagccccatcaagaccgatgtgattacaatggaccccaaggacaactgctccaaggacgccaacgataccctgctgctccagctgaccaacaccagcgcctactacatgtacgagatcctgctgggcaaggccaccctgtacgccgtgctggtgtctgccctggtgctgatggctatggtcaagcggaaggacagccggggacgcgccaagagaagcggatctggcgtgaagcagaccctgaatttcgacctgctgaagctggctggcgacgtggaatccaacccaggccctactagtatggactggatttggcgcatccttttccttgtcggcgctgctaccggcgcgcattccttcgaacaggttcagctgcaagagtctggccccggactggtcaagcctagccaaacactgagcctgacctgtaccgtgtccggctacagcatcaccagcgactacacctggaactggatcagacagcctcctggcaacggactggaatggatcggctacatcacctacagcggcagcaccagctacaaccccagcctgaaaagccgggtgctgatctccgtggacaccagcaagaatcaggtgtccctgaagctgagcagcgtgacagccgctgataccgccgtgtactactgtgccagactggggagaagatacacaatggactactggggccagggcaccaccgtgacagtttcttctacgcgtgcctctacaaagggaccctccgtgtttcctctggctcccagcagcaagtctacaagcggaggaacagccgctctgggctgcctggtcaaggattactttcccgagcctgtgaccgtgtcctggaatagcggagcactgacaagcggcgtgcacacctttccagccgtgctgcaaagcagcggcctgtactctctgagcagcgtggtcacagtgcctagctctagcctgggcacccagacctacatctgcaatgtgaaccacaagcctagcaacaccaaggtggacaagagagtggaacccaagagctgtgaagtgaaaaccgactccaccgaccacgtgaagcccaaagagacagagaacaccaagcagcccagcaagagctgccacaagcccaaggccatcgtgcacaccgagaaagtgaacatgatgagcctgaccgtgctgggcttcagaatcctgctgctgaaagtggccggctttaacctgctgatgaccctgcggctgtggtccagc

SEQ ID NO: 6576 - DNA, 1956 bp, synthetic construct
  source 1..1956: mol_type = other DNA
atggccttaccagtgaccgccttgctcctgccgctggccttgctgctccacgccgccaggccggacatcgtgatgacacagagccctgatagcctggccgtgtctctgggagagagagccaccatcaactgcaagagcagccagagcctgctgaacagcggcaaccagaagaactacctggcctggtatcagcagaagcccggccagcctcctaagctgctgatctactggggcagcaccagatccacaggcgtgcccgatagattttctggctctggcagcggcaccgacttcaccctgacaatttctagcctgcaagccgaggacgtggccgtgtactactgccagaacgactacacataccccttcaccttcggccagggcaccaagctggaaatcaaactcgagggacagcctaaggccaatcctaccgtgacactgttccctccaagcagcgaagaactccaggccaacaaggccacacttgtgtgcctgatctccgacttctaccctggggctgtgacagtggcttggaaggccgatggatctcctgtgaaagccggcgtggaaaccaccaagccatccaagcagagcaacaacaaatacgccgccagctcctacctgagcctgacacctgagcagtggaagtcccacagatcctacagctgccaagtgacccacgaaggcagcaccgtggaaaagacagtggcccctacagagtgcagccccatcaagaccgatgtgattacaatggaccccaaggacaactgctccaaggacgccaacgataccctgctgctccagctgaccaacaccagcgcctactacatgtacgagatcctgctgggcaaggccaccctgtacgccgtgctggtgtctgccctggtgctgatggctatggtcaagcggaaggacagccggggacgcgccaagagaagcggatctggcgtgaagcagaccctgaatttcgacctgctgaagctggctggcgacgtggaatccaacccaggccctactagtatggactggatttggcgcatccttttccttgtcggcgctgctaccggcgcgcattccttcgaacaagttcagctggttcagagcggagccgaagtgaagaaacctggggcctctgtgaaggtgtcctgcaaggcttccggctataccttcaccagcttttggctgaactgggtccgacaggcccctggacaaggactggaatggatgggcaacatctaccccagcaccagctacaccgtgtacaaccagaaattcaaggaccgcgtgaccatgaccagggacaccagcacaagcacagtgtacatggaactgagcagcctgcggagcgaggataccgccgtgtattattgcgccagaacctggcggggcaacagcttcgattattggggccagggaaccaccgtgaccgtgtcatctacgcgtgcctctacaaagggaccctccgtgtttcctctggctcccagcagcaagtctacaagcggaggaacagccgctctgggctgcctggtcaaggattactttcccgagcctgtgaccgtgtcctggaatagcggagcactgacaagcggcgtgcacacctttccagccgtgctgcaaagcagcggcctgtactctctgagcagcgtggtcacagtgcctagctctagcctgggcacccagacctacatctgcaatgtgaaccacaagcctagcaacaccaaggtggacaagagagtggaacccaagagctgtgaagtgaaaaccgactccaccgaccacgtgaagcccaaagagacagagaacaccaagcagcccagcaagagctgccacaagcccaaggccatcgtgcacaccgagaaagtgaacatgatgagcctgaccgtgctgggcttcagaatcctgctgctgaaagtggccggctttaacctgctgatgaccctgcggctgtggtccagc

SEQ ID NO: 6577 - DNA, 1956 bp, synthetic construct
  source 1..1956: mol_type = other DNA
atggccttaccagtgaccgccttgctcctgccgctggccttgctgctccacgccgccaggccggacatcgtgatgacacagagccctgatagcctggccgtgtctctgggagagagagccaccatcaactgcaagagcagccagagcctgctgaacagcggcaacaacaagaactacgtgacatggtatcagcagaagcccggccagcctcctaagctgctgatctactggggcagcaccagatccacaggcgtgcccgatagattttctggctctggcagcggcaccgacttcaccctgacaatttctagcctgcaagccgaggacgtggccgtgtactactgccagaacgactacacataccccttcaccttcggccagggcaccaagctggaaatcaaactcgagggacagcctaaggccaatcctaccgtgacactgttccctccaagcagcgaagaactccaggccaacaaggccacacttgtgtgcctgatctccgacttctaccctggggctgtgacagtggcttggaaggccgatggatctcctgtgaaagccggcgtggaaaccaccaagccatccaagcagagcaacaacaaatacgccgccagctcctacctgagcctgacacctgagcagtggaagtcccacagatcctacagctgccaagtgacccacgaaggcagcaccgtggaaaagacagtggcccctacagagtgcagccccatcaagaccgatgtgattacaatggaccccaaggacaactgctccaaggacgccaacgataccctgctgctccagctgaccaacaccagcgcctactacatgtacgagatcctgctgggcaaggccaccctgtacgccgtgctggtgtctgccctggtgctgatggctatggtcaagcggaaggacagccggggacgcgccaagagaagcggatctggcgtgaagcagaccctgaatttcgacctgctgaagctggctggcgacgtggaatccaacccaggccctactagtatggactggatttggcgcatccttttccttgtcggcgctgctaccggcgcgcattccttcgaacaagttcagctggttcagagcggagccgaagtgaagaaacctggggcctctgtgaaggtgtcctgcaaggcttccggctataccttcaccagcttttggctgaactgggtccgacaggcccctggacaaggactggaatggatgggcaacatctaccccagcgacagctacaccgtgtacaaccagaaattcaaggaccgcgtgaccatgaccagggacaccagcacaagcacagtgtacatggaactgagcagcctgcggagcgaggataccgccgtgtattattgcgccagaacctggcggggcaacagcttcgattattggggccagggaaccaccgtgaccgtgtcatctacgcgtgcctctacaaagggaccctccgtgtttcctctggctcccagcagcaagtctacaagcggaggaacagccgctctgggctgcctggtcaaggattactttcccgagcctgtgaccgtgtcctggaatagcggagcactgacaagcggcgtgcacacctttccagccgtgctgcaaagcagcggcctgtactctctgagcagcgtggtcacagtgcctagctctagcctgggcacccagacctacatctgcaatgtgaaccacaagcctagcaacaccaaggtggacaagagagtggaacccaagagctgtgaagtgaaaaccgactccaccgaccacgtgaagcccaaagagacagagaacaccaagcagcccagcaagagctgccacaagcccaaggccatcgtgcacaccgagaaagtgaacatgatgagcctgaccgtgctgggcttcagaatcctgctgctgaaagtggccggctttaacctgctgatgaccctgcggctgtggtccagc

SEQ ID NO: 6578 - DNA, 1932 bp, synthetic construct
  source 1..1932: mol_type = other DNA
atggccttaccagtgaccgccttgctcctgccgctggccttgctgctccacgccgccaggccgcagatcgtgctgacacagagccctgccatcatgtccgcttctcccggcgagaaagtgaccatgacatgtagcgccagcagcagcgtgtccttcatgcactggtatcagcagaagtccggcacaagccccaagcggtggatctacgataccagcacactggcctctggcgtgccagccagatttggcggatctggcagcggcacatcttacagcctgaccatcagcagcatggaagccgaagatgccgccacctactactgccagcagtggtccagcaatcccctgacatttggagccggcaccaagctggaactgaagagactcgagggacagcctaaggccaatcctaccgtgacactgttccctccaagcagcgaagaactccaggccaacaaggccacacttgtgtgcctgatctccgacttctaccctggggctgtgacagtggcttggaaggccgatggatctcctgtgaaagccggcgtggaaaccaccaagccatccaagcagagcaacaacaaatacgccgccagctcctacctgagcctgacacctgagcagtggaagtcccacagatcctacagctgccaagtgacccacgaaggcagcaccgtggaaaagacagtggcccctacagagtgcagccccatcaagaccgatgtgattacaatggaccccaaggacaactgctccaaggacgccaacgataccctgctgctccagctgaccaacaccagcgcctactacatgtacgagatcctgctgggcaaggccaccctgtacgccgtgctggtgtctgccctggtgctgatggctatggtcaagcggaaggacagccggggacgcgccaagagaagcggatctggcgtgaagcagaccctgaatttcgacctgctgaagctggctggcgacgtggaatccaacccaggccctactagtatggactggatttggcgcatccttttccttgtcggcgctgctaccggcgcgcattccttcgaacaagttcagctgcaacagagcggccctgagctggttaagcctggcgcttctgtgcggatctcttgcaaggccagcggctacaccttcaccagctactacatccactgggtcaagcagcggcctggacagggactcgaatggatcggctggatctaccccggcaacctgaacaccaagtacaacgagaagttcaagggcaaagccacactgaccgccgacaagagcagcagcacagcctacatgcagctgagcagcctgacaagcgaggacagcgccgtgtacttctgcgccagatacgactggtacttcgacgtgtggggagccggaaccaccgtgacagtttcttctacgcgtgcctctacaaagggaccctccgtgtttcctctggctcccagcagcaagtctacaagcggaggaacagccgctctgggctgcctggtcaaggattactttcccgagcctgtgaccgtgtcctggaatagcggagcactgacaagcggcgtgcacacctttccagccgtgctgcaaagcagcggcctgtactctctgagcagcgtggtcacagtgcctagctctagcctgggcacccagacctacatctgcaatgtgaaccacaagcctagcaacaccaaggtggacaagagagtggaacccaagagctgtgaagtgaaaaccgactccaccgaccacgtgaagcccaaagagacagagaacaccaagcagcccagcaagagctgccacaagcccaaggccatcgtgcacaccgagaaagtgaacatgatgagcctgaccgtgctgggcttcagaatcctgctgctgaaagtggccggctttaacctgctgatgaccctgcggctgtggtccagc

SEQ ID NO: 6579 - DNA, 1950 bp, synthetic construct
  source 1..1950: mol_type = other DNA
atggccttaccagtgaccgccttgctcctgccgctggccttgctgctccacgccgccaggccggacatccagatgacacagagccctagcagcctgtctgccagcgtgggagacagagtgaccatcacctgtagagccagccaggacgtgaacacagccgtggcttggtatcagcagaagcctggcaaggcccctaagctgctgatctacagcgcctacttcctgtacagcggcgtgcccagcagattcagcggaagcagaagcggcaccgacttcaccctgacaatatccagcctccagcctgaggacttcgccacctactactgccagcagtacagcagatacagccccgtgacctttggacagggcaccaaggtggaaatcaagagactcgagggacagcctaaggccaatcctaccgtgacactgttccctccaagcagcgaagaactccaggccaacaaggccacacttgtgtgcctgatctccgacttctaccctggggctgtgacagtggcttggaaggccgatggatctcctgtgaaagccggcgtggaaaccaccaagccatccaagcagagcaacaacaaatacgccgccagctcctacctgagcctgacacctgagcagtggaagtcccacagatcctacagctgccaagtgacccacgaaggcagcaccgtggaaaagacagtggcccctacagagtgcagccccatcaagaccgatgtgattacaatggaccccaaggacaactgctccaaggacgccaacgataccctgctgctccagctgaccaacaccagcgcctactacatgtacgagatcctgctgggcaaggccaccctgtacgccgtgctggtgtctgccctggtgctgatggctatggtcaagcggaaggacagccggggacgcgccaagagaagcggatctggcgtgaagcagaccctgaatttcgacctgctgaagctggctggcgacgtggaatccaacccaggccctactagtatggactggatttggcgcatccttttccttgtcggcgctgctaccggcgcgcattccttcgaagttcagctggttgaaagtggtggcggcctggttcaacctggcggatctctgagactgagctgtgccgccagcggcttcaatgtgtacgcctctggaatgcactgggtccgacaggcccctggcaaaggacttgagtgggtcgccaaaatctaccccgacagcgactacacctattacgccgacagcgtgaagggcagattcaccatcagcgccgacaccagcaagaacaccgcctacctccagatgaactccctgagagccgaggacaccgccgtgtactactgtagcagagacagcagcttctactacgtgtacgctatggactactggggccagggcacactggtcacagtctcttctacgcgtgcctctacaaagggaccctccgtgtttcctctggctcccagcagcaagtctacaagcggaggaacagccgctctgggctgcctggtcaaggattactttcccgagcctgtgaccgtgtcctggaatagcggagcactgacaagcggcgtgcacacctttccagccgtgctgcaaagcagcggcctgtactctctgagcagcgtggtcacagtgcctagctctagcctgggcacccagacctacatctgcaatgtgaaccacaagcctagcaacaccaaggtggacaagagagtggaacccaagagctgtgaagtgaaaaccgactccaccgaccacgtgaagcccaaagagacagagaacaccaagcagcccagcaagagctgccacaagcccaaggccatcgtgcacaccgagaaagtgaacatgatgagcctgaccgtgctgggcttcagaatcctgctgctgaaagtggccggctttaacctgctgatgaccctgcggctgtggtccagc

SEQ ID NO: 6580 - DNA, 1986 bp, synthetic construct
  source 1..1986: mol_type = other DNA
atggccttaccagtgaccgccttgctcctgccgctggccttgctgctccacgccgccaggccggacatccagatgacacagagcccctctagcctgtctgccagcgtgggagacagagtgaccatcacctgtagagccagccagagcatcagaaactacctgaactggtatcagcaaaagcccggcaaggcccctgagctgctgattcatgctgcaagcagcctccagagcggcgtgccaagcagattttctggcagcggcagcggaaccgacttcaccctgacaatatctagcctccagcctgaggacttcgccagctactactgccagcagagctacagcgcccctcctatcacctttggacagggcaccagactggaaatcaagctcgagggacagcctaaggccaatcctaccgtgacactgttccctccaagcagcgaagaactccaggccaacaaggccacacttgtgtgcctgatctccgacttctaccctggggctgtgacagtggcttggaaggccgatggatctcctgtgaaagccggcgtggaaaccaccaagccatccaagcagagcaacaacaaatacgccgccagctcctacctgagcctgacacctgagcagtggaagtcccacagatcctacagctgccaagtgacccacgaaggcagcaccgtggaaaagacagtggcccctacagagtgcagccccatcaagaccgatgtgattacaatggaccccaaggacaactgctccaaggacgccaacgataccctgctgctccagctgaccaacaccagcgcctactacatgtacgagatcctgctgggcaaggccaccctgtacgccgtgctggtgtctgccctggtgctgatggctatggtcaagcggaaggacagccggggacgcgccaagagaagcggatctggcgtgaagcagaccctgaatttcgacctgctgaagctggctggcgacgtggaatccaacccaggccctactagtatggactggatttggcgcatccttttccttgtcggcgctgctaccggcgcgcattccttcgaacaggttcagctccagcagtctggacctggcctggtcaagcctagccagacactgtctctgacctgtgccatcagcggcgatagcgtgtcctctaatagagccgcctggaactggatcagacagagccctagcagaggactccagtggctgggcagaacctactaccgcagcaagtggtacaacgactacgccgtgtctctgcggagccggatcaccatcaatcccgtgaccagcaagaaccaggtggccctgcacatgaacagcgtgacccctgaagataccgccgtgtactactgtgccagagccggaattgtggtggtgcccggacctgagacattctactactacgaccacggcctggacgtgtggggccagggaacaacagtgactgtctcttctacgcgtgcctctacaaagggaccctccgtgtttcctctggctcccagcagcaagtctacaagcggaggaacagccgctctgggctgcctggtcaaggattactttcccgagcctgtgaccgtgtcctggaatagcggagcactgacaagcggcgtgcacacctttccagccgtgctgcaaagcagcggcctgtactctctgagcagcgtggtcacagtgcctagctctagcctgggcacccagacctacatctgcaatgtgaaccacaagcctagcaacaccaaggtggacaagagagtggaacccaagagctgtgaagtgaaaaccgactccaccgaccacgtgaagcccaaagagacagagaacaccaagcagcccagcaagagctgccacaagcccaaggccatcgtgcacaccgagaaagtgaacatgatgagcctgaccgtgctgggcttcagaatcctgctgctgaaagtggccggctttaacctgctgatgaccctgcggctgtggtccagc

SEQ ID NO: 6581 - DNA, 1917 bp, synthetic construct
  source 1..1917: mol_type = other DNA
atggccttaccagtgaccgccttgctcctgccgctggccttgctgctccacgccgccaggccggacatccagctgacacagagccctagcacactgagcgccagcatgggcgacagagtgaccatcacatgtagcgcctctagcagcgtgcggttcatccactggtatcagcagaagcctggcaaggcccctaagcggctgatctacgataccagcaaactggcctctggcgtgcccagcagattttctggctctggcagcggcaccgacttcaccctgacaatatctagcctccagcctgaggacttcgccacctactactgtcagcagtggggcagcagccctttcacctttggacagggcaccaaggtggaaatcaagctcgagggacagcctaaggccaatcctaccgtgacactgttccctccaagcagcgaagaactccaggccaacaaggccacacttgtgtgcctgatctccgacttctaccctggggctgtgacagtggcttggaaggccgatggatctcctgtgaaagccggcgtggaaaccaccaagccatccaagcagagcaacaacaaatacgccgccagctcctacctgagcctgacacctgagcagtggaagtcccacagatcctacagctgccaagtgacccacgaaggcagcaccgtggaaaagacagtggcccctacagagtgcagccccatcaagaccgatgtgattacaatggaccccaaggacaactgctccaaggacgccaacgataccctgctgctccagctgaccaacaccagcgcctactacatgtacgagatcctgctgggcaaggccaccctgtacgccgtgctggtgtctgccctggtgctgatggctatggtcaagcggaaggacagccggggacgcgccaagagaagcggatctggcgtgaagcagaccctgaatttcgacctgctgaagctggctggcgacgtggaatccaacccaggccctactagtatggactggatttggcgcatccttttccttgtcggcgctgctaccggcgcgcattccttcgaagtgcagctggttgagtacggtggcggactggttcaacctggcggtagcctgagactgtcttgtgccgccagcggcttcaacatcaaggactactatatccactgggtccgacaggccccaggcaaaggacttgaatgggttgcctggatcgaccccgagaacggcgataccgagttcgtgcccaagtttcagggcagagccaccatgagcgccgacacctctaagaacacagcctacctccagatgaacagcctgagagccgaggacaccgccgtgtactactgtaaaaccggcggcttttggggccagggcacactggtcacagtcagctctacgcgtgcctctacaaagggaccctccgtgtttcctctggctcccagcagcaagtctacaagcggaggaacagccgctctgggctgcctggtcaaggattactttcccgagcctgtgaccgtgtcctggaatagcggagcactgacaagcggcgtgcacacctttccagccgtgctgcaaagcagcggcctgtactctctgagcagcgtggtcacagtgcctagctctagcctgggcacccagacctacatctgcaatgtgaaccacaagcctagcaacaccaaggtggacaagagagtggaacccaagagctgtgaagtgaaaaccgactccaccgaccacgtgaagcccaaagagacagagaacaccaagcagcccagcaagagctgccacaagcccaaggccatcgtgcacaccgagaaagtgaacatgatgagcctgaccgtgctgggcttcagaatcctgctgctgaaagtggccggctttaacctgctgatgaccctgcggctgtggtccagctaa

SEQ ID NO: 6582 - DNA, 1950 bp, synthetic construct; identical to SEQ ID NO: 6552
  source 1..1950: mol_type = other DNA

SEQ ID NO: 6583 - DNA, 1947 bp, synthetic construct; identical to SEQ ID NO: 6553
  source 1..1947: mol_type = other DNA

SEQ ID NO: 6584 - DNA, 1956 bp, synthetic construct; identical to SEQ ID NO: 6554
  source 1..1956: mol_type = other DNA

SEQ ID NO: 6585 - DNA, 1968 bp, synthetic construct; identical to SEQ ID NO: 6555
  source 1..1968: mol_type = other DNA

SEQ ID NO: 6586 - DNA, 1932 bp, synthetic construct; identical to SEQ ID NO: 6557
  source 1..1932: mol_type = other DNA

SEQ ID NO: 6587 - DNA, 1947 bp, synthetic construct; identical to SEQ ID NO: 6559
  source 1..1947: mol_type = other DNA

SEQ ID NO: 6588 - DNA, 1947 bp, synthetic construct; identical to SEQ ID NO: 6561
  source 1..1947: mol_type = other DNA

SEQ ID NO: 6589 - DNA, 1938 bp, synthetic construct; identical to SEQ ID NO: 6563
  source 1..1938: mol_type = other DNA

SEQ ID NO: 6590 - DNA, 1938 bp, synthetic construct; identical to SEQ ID NO: 6564
  source 1..1938: mol_type = other DNA

SEQ ID NO: 6591 - DNA, 1938 bp, synthetic construct; identical to SEQ ID NO: 6565
  source 1..1938: mol_type = other DNA

SEQ ID NO: 6592 - DNA, 1938 bp, synthetic construct; identical to SEQ ID NO: 6566
  source 1..1938: mol_type = other DNA

SEQ ID NO: 6593 - DNA, 1938 bp, synthetic construct; identical to SEQ ID NO: 6567
  source 1..1938: mol_type = other DNA

SEQ ID NO: 6594 - DNA, 1938 bp, synthetic construct; identical to SEQ ID NO: 6568
  source 1..1938: mol_type = other DNA

SEQ ID NO: 6595 - DNA, 1938 bp, synthetic construct; identical to SEQ ID NO: 6569
  source 1..1938: mol_type = other DNA

SEQ ID NO: 6596 - DNA, 1947 bp, synthetic construct; identical to SEQ ID NO: 6336
  source 1..1947: mol_type = other DNA

SEQ ID NO: 6597 - DNA, 1947 bp, synthetic construct; identical to SEQ ID NO: 6337
  source 1..1947: mol_type = other DNA

SEQ ID NO: 6598 - DNA, 1947 bp, synthetic construct; identical to SEQ ID NO: 6338
  source 1..1947: mol_type = other DNA

SEQ ID NO: 6599 - DNA, 1944 bp, synthetic construct; identical to SEQ ID NO: 6339
  source 1..1944: mol_type = other DNA

SEQ ID NO: 6600 - DNA, 1944 bp, synthetic construct; identical to SEQ ID NO: 6340
  source 1..1944: mol_type = other DNA

SEQ ID NO: 6601 - protein, 7 aa, synthetic construct
KLGDKFA

SEQ ID NO: 6602 - protein, 6 aa, synthetic construct
KLGDKY

SEQ ID NO: 6603 - protein, 6 aa, synthetic construct
KLGDKY

SEQ ID NO: 6604 - protein, 6 aa, synthetic construct
KLGNKY

SEQ ID NO: 6605 - protein, 8 aa, synthetic construct
SGSIASNY

SEQ ID NO: 6606 - protein, 8 aa, synthetic construct
SGSIASNY

SEQ ID NO: 6607 - protein, 8 aa, synthetic construct
SGSIASNY

SEQ ID NO: 6608 - protein, 8 aa, synthetic construct
SGSIANNY

SEQ ID NO: 6609 - protein, 6 aa, synthetic construct
QSVSND

SEQ ID NO: 6610 - protein, 6 aa, synthetic construct
QSVSND

SEQ ID NO: 6611 - protein, 7 aa, synthetic construct
SSVSSSY

SEQ ID NO: 6612 - protein, 7 aa, synthetic construct
SSVSSSY

SEQ ID NO: 6613 - protein, 12 aa, synthetic construct
QSLLNSGNQKNY

SEQ ID NO: 6614 - protein, 12 aa, synthetic construct
QSLLNSGNNKNY

SEQ ID NO: 6615 - protein, 6 aa, synthetic construct
DHINNW

SEQ ID NO: 6616 - protein, 6 aa, synthetic construct
DHINNW

SEQ ID NO: 6617 - protein, 6 aa, synthetic construct
DHINNW

SEQ ID NO: 6618 - protein, 6 aa, synthetic construct
DHINNW

SEQ ID NO: 6619 - protein, 5 aa, synthetic construct
SSVSF

SEQ ID NO: 6620 - protein, 11 aa, synthetic construct
KSLLHSNGITY

SEQ ID NO: 6621 - protein, 10 aa, synthetic construct
QSVSISGINL

SEQ ID NO: 6622 - protein, 11 aa, synthetic construct
KSLLHSNGITY

SEQ ID NO: 6623 - protein, 10 aa, synthetic construct
QSVSISGINL

SEQ ID NO: 6624 - protein, 6 aa, synthetic construct
QSVSSY

SEQ ID NO: 6625 - protein, 6 aa, synthetic construct
QDVRNI

SEQ ID NO: 6626 - protein, 10 aa, synthetic construct
QSVSFAGTSL

SEQ ID NO: 6627 - protein, 6 aa, synthetic construct
QDVNTA

SEQ ID NO: 6628 - protein, 6 aa, synthetic construct
QDINTA

SEQ ID NO: 6629 - protein, 6 aa, synthetic construct
QDVSTA

SEQ ID NO: 6630 - protein, 6 aa, synthetic construct
DLIHNW

SEQ ID NO: 6631 - protein, 6 aa, synthetic construct
QSVSSY

SEQ ID NO: 6632 - protein, 6 aa, synthetic construct
QSVSSY

SEQ ID NO: 6633 - protein, 6 aa, synthetic construct
QSVSND

SEQ ID NO: 6634 - protein, 6 aa, synthetic construct
QSISSY

SEQ ID NO: 6635 - protein, 6 aa, synthetic construct
ENIYSF

SEQ ID NO: 6636 - protein, 11 aa, synthetic construct
QSIVHSNGNTY

SEQ ID NO: 6637 - protein, 9 aa, synthetic construct
SSDVGGYNY

SEQ ID NO: 6638 - protein, 7 aa, synthetic construct
QSVSSSY

SEQ ID NO: 6639 - protein, 6 aa, synthetic construct
QSVSSY

SEQ ID NO: 6640 - protein, 6 aa, synthetic construct
QSVSSY

SEQ ID NO: 6641 - protein, 7 aa, synthetic construct
QSVSSSY

SEQ ID NO: 6642 - protein, 6 aa, synthetic construct
QSISSY

SEQ ID NO: 6643 - protein, 6 aa, synthetic construct
EDIYDN

SEQ ID NO: 6644 - protein, 6 aa, synthetic construct
EDIYNN

SEQ ID NO: 6645 - protein, 12 aa, synthetic construct
QSLLYSSNSKNY

SEQ ID NO: 6646 - protein, 12 aa, synthetic construct
QSLLYSGNQKNY

SEQ ID NO: 6647 - protein, 5 aa, synthetic construct
SSVNY

SEQ ID NO: 6648 - protein, 5 aa, synthetic construct
SSVNY

SEQ ID NO: 6649 - protein, 5 aa, synthetic construct
SSVNY

SEQ ID NO: 6650 - protein, 5 aa, synthetic construct
SSVSY

SEQ ID NO: 6651 - protein, 6 aa, synthetic construct
SSISSS

SEQ ID NO: 6652 - protein, 7 aa, synthetic construct
SSSVSSS

SEQ ID NO: 6653 - protein, 10 aa, synthetic construct
QSVDYDGDSF

SEQ ID NO: 6654 - protein, 10 aa, synthetic construct
QSVDYDGDSF

SEQ ID NO: 6655 - protein, 10 aa, synthetic construct
QSVDYEGDSF

SEQ ID NO: 6656 - protein, 10 aa, synthetic construct
QSVDYEGDSF

SEQ ID NO: 6657 - protein, 10 aa, synthetic construct
QSVDYEGDSF

SEQ ID NO: 6658 - protein, 10 aa, synthetic construct
QSVDYEGDSF

SEQ ID NO: 6659 - protein, 10 aa, synthetic construct
QSVDYDGDSF

SEQ ID NO: 6660 - protein, 10 aa, synthetic construct
QSVDYDGDSF

SEQ ID NO: 6661 - protein, 10 aa, synthetic construct
QSVDYDGDSF

SEQ ID NO: 6662 - protein, 11 aa, synthetic construct
QSLLDSDGKTY

SEQ ID NO: 6663 - protein, 11 aa, synthetic construct
QSLLDSDGKTY

SEQ ID NO: 6664 - protein, 11 aa, synthetic construct
QSLLDSDGKTY

SEQ ID NO: 6665 - protein, 11 aa, synthetic construct
QSLLDSDGKTY

SEQ ID NO: 6666 - protein, 11 aa, synthetic construct
QSLLDSDGKTY

SEQ ID NO: 6667 - protein, 11 aa, synthetic construct
QSLLDSDGKTY

SEQ ID NO: 6668 - protein, 11 aa, synthetic construct
QSLLDSDGKTY

SEQ ID NO: 6669 - protein, 10 aa, synthetic construct
QSVDYDGDSF

SEQ ID NO: 6670 - protein, 11 aa, synthetic construct
QSLLDSDGKTY

SEQ ID NO: 6671 - protein, 10 aa, synthetic construct
QSVDYEGDSF

SEQ ID NO: 6672 - protein, 10 aa, synthetic construct
QSVDYDGDSF

SEQ ID NO: 6673 - protein, 10 aa, synthetic construct
QSVDYEGDSF

SEQ ID NO: 6674 - protein, 11 aa, synthetic construct
QSIVHHDGNTY

SEQ ID NO: 6675 - protein, 11 aa, synthetic construct
QSIVHSDGNTY

SEQ ID NO: 6676 - protein, 10 aa, synthetic construct
ESVDSYGKTF

SEQ ID NO: 6677 - protein, 6 aa, synthetic construct
QNVGSH

SEQ ID NO: 6678 - protein, 6 aa, synthetic construct
QNVGSH

SEQ ID NO: 6679 - protein, 6 aa, synthetic construct
QNVGTH

SEQ ID NO: 6680 - protein, 6 aa, synthetic construct
QNVGSN

SEQ ID NO: 6681 - protein, 6 aa, synthetic construct
NIGSQS

SEQ ID NO: 6682 - protein, 6 aa, synthetic construct
NIGSKG

SEQ ID NO: 6683 - protein, 6 aa, synthetic construct
QSIRNY

SEQ ID NO: 6684 - protein, 6 aa, synthetic construct
QSIRNY

SEQ ID NO: 6685 - protein, 6 aa, synthetic construct
QNIRNY

SEQ ID NO: 6686 - protein, 6 aa, synthetic construct
QSISSY

SEQ ID NO: 6687 - protein, 10 aa, synthetic construct
QSVDYSGDSF

SEQ ID NO: 6688 - protein, 10 aa, synthetic construct
QSVDYSGDSF

SEQ ID NO: 6689 - protein, 10 aa, synthetic construct
QSVDYAGDSF

SEQ ID NO: 6690 - protein, 10 aa, synthetic construct
QSVDYAGDSF

SEQ ID NO: 6691 - protein, 10 aa, synthetic construct
QSVDYAGDSY

SEQ ID NO: 6692 - protein, 10 aa, synthetic construct
QSVDYDGDSY

SEQ ID NO: 6693 - protein, 10 aa, synthetic construct
QSVDYAGDSY

SEQ ID NO: 6694 - protein, 10 aa, synthetic construct
QSVDYEGDSF

SEQ ID NO: 6695 - protein, 10 aa, synthetic construct
QSVDYDGDSY

SEQ ID NO: 6696 - protein, 10 aa, synthetic construct
QSVDYDGDSY

SEQ ID NO: 6697 - protein, 10 aa, synthetic construct
QSVDYDGDSY

SEQ ID NO: 6698 - protein, 5 aa, synthetic construct
SSVNY

SEQ ID NO: 6699 - protein, 5 aa, synthetic construct
SSVNY

SEQ ID NO: 6700 - protein, 5 aa, synthetic construct
SSVNY

SEQ ID NO: 6701 - protein, 5 aa, synthetic construct
SSVSY

SEQ ID NO: 6702 - protein, 5 aa, synthetic construct
SSVSY

SEQ ID NO: 6703 - protein, 5 aa, synthetic construct
SSVSY

SEQ ID NO: 6704 - protein, 5 aa, synthetic construct
SSVSY

SEQ ID NO: 6705 - protein, 5 aa, synthetic construct
SSVNY

SEQ ID NO: 6706 - protein, 5 aa, synthetic construct
SSVNY

SEQ ID NO: 6707 - protein, 6 aa, synthetic construct
QSVSSN

SEQ ID NO: 6708 - protein, 6 aa, synthetic construct
QSVNSN

SEQ ID NO: 6709 - protein, 8 aa, synthetic construct
QSVYKNNY

SEQ ID NO: 6710 - protein, 8 aa, synthetic construct
QSVYNNNY

SEQ ID NO: 6711 - protein, 8 aa, synthetic construct
QSVYKNNY

SEQ ID NO: 6712 - protein, 8 aa, synthetic construct
QSVYKNNY

SEQ ID NO: 6713 - protein, 8 aa, synthetic construct
QSVYNNNY

SEQ ID NO: 6714 - protein, 6 aa, synthetic construct
ESVYTY

SEQ ID NO: 6715 - protein, 6 aa, synthetic construct
ESVYTY

SEQ ID NO: 6716 - protein, 6 aa, synthetic construct
ESVYSY

SEQ ID NO: 6717 - protein, 6 aa, synthetic construct
ENIYSY

SEQ ID NO: 6718 - protein, 6 aa, synthetic construct
ESVYTY

SEQ ID NO: 6719 - protein, 6 aa, synthetic construct
ESVYTY

SEQ ID NO: 6720 - protein, 6 aa, synthetic construct
ESVYTY

SEQ ID NO: 6721 - protein, 6 aa, synthetic construct
SLRSYY

SEQ ID NO: 6722 - protein, 6 aa, synthetic construct
SLRSYY

SEQ ID NO: 6723 - protein, 6 aa, synthetic construct
SLRSYY

SEQ ID NO: 6724 - protein, 6 aa, synthetic construct
SLRSYY

SEQ ID NO: 6725 - protein, 9 aa, synthetic construct
LLDSDGRTY

SEQ ID NO: 6726 - protein, 9 aa, synthetic construct
LLDSDGKTY

SEQ ID NO: 6727 - protein, 8 aa, synthetic construct
GFTFSSYA

SEQ ID NO: 6728 - protein, 8 aa, synthetic construct
GFTFSSYA

SEQ ID NO: 6729 - protein, 8 aa, synthetic construct
GFTFSSYA

SEQ ID NO: 6730 - protein, 8 aa, synthetic construct
GFTFSSYA

SEQ ID NO: 6731 - protein, 8 aa, synthetic construct
GFTFSSYA

SEQ ID NO: 6732 - protein, 8 aa, synthetic construct
GFTFSSYA

SEQ ID NO: 6733 - protein, 8 aa, synthetic construct
GFTFSSYA

SEQ ID NO: 6734 - protein, 8 aa, synthetic construct
GFTFSSYA

SEQ ID NO: 6735 - protein, 8 aa, synthetic construct
GFSVTNYG

SEQ ID NO: 6736 - protein, 8 aa, synthetic construct
GFSVTNYG

SEQ ID NO: 6737 - protein, 8 aa, synthetic construct
GFSLASYN

SEQ ID NO: 6738 - protein, 8 aa, synthetic construct
GFSLASYN

SEQ ID NO: 6739 - protein, 8 aa, synthetic construct
GYTFTSFW

SEQ ID NO: 6740 - protein, 8 aa, synthetic construct
GYTFTSFW

SEQ ID NO: 6741 - protein, 8 aa, synthetic construct
GYTFSSYW

SEQ ID NO: 6742 - protein, 8 aa, synthetic construct
GYAFSSSW

SEQ ID NO: 6743 - protein, 8 aa, synthetic construct
GYTFSSYW

SEQ ID NO: 6744 - protein, 8 aa, synthetic construct
GYAFSNYW

SEQ ID NO: 6745 - protein, 11 aa, synthetic construct
GYTFTSYYIHW

SEQ ID NO: 6746 - protein, 8 aa, synthetic construct
GFSFSNYG

SEQ ID NO: 6747 - protein, 8 aa, synthetic construct
GFTFSKYA

SEQ ID NO: 6748 - protein, 8 aa, synthetic construct
GFTFSKYA

SEQ ID NO: 6749 - protein, 8 aa, synthetic construct
GFSFSNYG

SEQ ID NO: 6750 - protein, 10 aa, synthetic construct
GGSISSSSYW

SEQ ID NO: 6751 - protein, 8 aa, synthetic construct
GFSLTRFG

SEQ ID NO: 6752 - protein, 8 aa, synthetic construct
GYTFTGYF

SEQ ID NO: 6753 - protein, 8 aa, synthetic construct
GFNVYASG

SEQ ID NO: 6754 - protein, 8 aa, synthetic construct
GFNVYASG

SEQ ID NO: 6755 - protein, 8 aa, synthetic construct
GFNIDYYG

SEQ ID NO: 6756 - protein, 8 aa, synthetic construct
GYSITNDY

SEQ ID NO: 6757 - protein, 8 aa, synthetic construct
GGTFSTYA

SEQ ID NO: 6758 - protein, 8 aa, synthetic construct
GGTFSSYA

SEQ ID NO: 6759 - protein, 8 aa, synthetic construct
GYTFTNYG

SEQ ID NO: 6760 - protein, 8 aa, synthetic construct
GFTFSSYA

SEQ ID NO: 6761 - protein, 8 aa, synthetic construct
GIDFNSNY

SEQ ID NO: 6762 - protein, 8 aa, synthetic construct
GYTFTSYH

SEQ ID NO: 6763 - protein, 8 aa, synthetic construct
GGSFSGYY

SEQ ID NO: 6764 - protein, 8 aa, synthetic construct
GYSFTSYG

SEQ ID NO: 6765 - protein, 8 aa, synthetic construct
GFTFSSYS

SEQ ID NO: 6766 - protein, 8 aa, synthetic construct
GGSFSGYY

SEQ ID NO: 6767 - protein, 8 aa, synthetic construct
GYSFTSYG

SEQ ID NO: 6768 - protein, 9 aa, synthetic construct
GFTFSSYAM

SEQ ID NO: 6769 - protein, 10 aa, synthetic construct
GFSLTTYGMG

SEQ ID NO: 6770 - protein, 10 aa, synthetic construct
GFSLSTYGMG

SEQ ID NO: 6771 - protein, 8 aa, synthetic construct
GYTFTDHA

SEQ ID NO: 6772 - protein, 8 aa, synthetic construct
GYTFTDHA

SEQ ID NO: 6773 - protein, 8 aa, synthetic construct
GYSFTGYT

SEQ ID NO: 6774 - protein, 8 aa, synthetic construct
GFSFTGYT

SEQ ID NO: 6775 - protein, 8 aa, synthetic construct
GFSFTGYT

SEQ ID NO: 6776 - protein, 8 aa, synthetic construct
GYTFTNYL

SEQ ID NO: 6777 - protein, 8 aa, synthetic construct
GYAFTNYL

SEQ ID NO: 6778 - protein, 8 aa, synthetic construct
GYTFSSYW

SEQ ID NO: 6779 - protein, 8 aa, synthetic construct
GYTFTSYW

SEQ ID NO: 6780 - protein, 8 aa, synthetic construct
GYTFTSYW

SEQ ID NO: 6781 - protein, 8 aa, synthetic construct
GYTFTSYW

SEQ ID NO: 6782 - protein, 8 aa, synthetic construct
GYTFTSYW

SEQ ID NO: 6783 - protein, 8 aa, synthetic construct
GYTFTSYW

SEQ ID NO: 6784 - protein, 8 aa, synthetic construct
GYTFTSYW

SEQ ID NO: 6785 - protein, 8 aa, synthetic construct
GYTFTSYW

SEQ ID NO: 6786 - protein, 8 aa, synthetic construct
GYTFSSYW

SEQ ID NO: 6787 - protein, 8 aa, synthetic construct
GYTFTSYW

SEQ ID NO: 6788 - protein, 8 aa, synthetic construct
GYTFSSYW

SEQ ID NO: 6789 - protein, 8 aa, synthetic construct
GYTFTSYW

SEQ ID NO: 6790 - protein, 8 aa, synthetic construct
GYTFSSYW

SEQ ID NO: 6791 - protein, 8 aa, synthetic construct
GYTFTSYW

SEQ ID NO: 6792 - protein, 8 aa, synthetic construct
GYTFTNYW

SEQ ID NO: 6793 - protein, 8 aa, synthetic construct
GYTFTNYW

SEQ ID NO: 6794 - protein, 8 aa, synthetic construct
GYTFSSYW

SEQ ID NO: 6795 - protein, 8 aa, synthetic construct
GYTFTSYW

SEQ ID NO: 6796 - protein, 8 aa, synthetic construct
GYTFSSYW

SEQ ID NO: 6797 - protein, 8 aa, synthetic construct
GYTFTSYW

SEQ ID NO: 6798 - protein, 8 aa, synthetic construct
GYTFSSYW

SEQ ID NO: 6799 - protein, 8 aa, synthetic construct
GGSFSSYG

SEQ ID NO: 6800 - protein, 8 aa, synthetic construct
GYTFTSYG

SEQ ID NO: 6801 - protein, 9 aa, synthetic construct
GYSITSDYA

SEQ ID NO: 6802 - protein, 8 aa, synthetic construct
GFTFSGFW

SEQ ID NO: 6803 - protein, 8 aa, synthetic construct
GFTFSGFW

SEQ ID NO: 6804 - protein, 8 aa, synthetic construct
GFTFSGFW

SEQ ID NO: 6805 - protein, 8 aa, synthetic construct
GFTFSGFW

SEQ ID NO: 6806 - protein, 10 aa, synthetic construct
GGSISSNSYF

SEQ ID NO: 6807 - protein, 10 aa, synthetic construct
GGSISSNSYY

SEQ ID NO: 6808 - protein, 10 aa, synthetic construct
GDSVSSNRAA

SEQ ID NO: 6809 - protein, 10 aa, synthetic construct
GDSVSSNSAA

SEQ ID NO: 6810 - protein, 10 aa, synthetic construct
GDSVSSNSAA

SEQ ID NO: 6811 - protein, 10 aa, synthetic construct
GDSVSSNSAA

SEQ ID NO: 6812 - protein, 10 aa, synthetic construct
GDSVSSNSAA

SEQ ID NO: 6813 - protein, 10 aa, synthetic construct
GDSVSSNSAA

SEQ ID NO: 6814 - protein, 10 aa, synthetic construct
GDSVSSNSAA

SEQ ID NO: 6815 - protein, 10 aa, synthetic construct
GDSVSSNSAA

SEQ ID NO: 6816 - protein, 8 aa, synthetic construct
GYTFSSYW

SEQ ID NO: 6817 - protein, 11 aa, synthetic construct
GFTFSSYWIEW

SEQ ID NO: 6818 - protein, 8 aa, synthetic construct
GYTFTSYW

SEQ ID NO: 6819 - protein, 8 aa, synthetic construct
GYTFSSYW

SEQ ID NO: 6820 - protein, 8 aa, synthetic construct
GFTFTSYW

SEQ ID NO: 6821 - protein, 8 aa, synthetic construct
GYSFTGYT

SEQ ID NO: 6822 - protein, 8 aa, synthetic construct
GYSFTGYT

SEQ ID NO: 6823 - protein, 8 aa, synthetic construct
GYSFTGYT

SEQ ID NO: 6824 - protein, 8 aa, synthetic construct
GYSFTGYT

SEQ ID NO: 6825 - protein, 8 aa, synthetic construct
GYSFTGYT

SEQ ID NO: 6826 - protein, 8 aa, synthetic construct
GYSFTGYT

SEQ ID NO: 6827 - protein, 8 aa, synthetic construct
GYSFTGYT

SEQ ID NO: 6828 - protein, 8 aa, synthetic construct
GYSFTGYT

SEQ ID NO: 6829 - protein, 8 aa, synthetic construct
GYSFTGYT

SEQ ID NO: 6830 - protein, 10 aa, synthetic construct
GDSVSRNSAV

SEQ ID NO: 6831 - protein, 10 aa, synthetic construct
GDSVSRNSAV

SEQ ID NO: 6832 - protein, 8 aa, synthetic construct
GIDLSSYA

SEQ ID NO: 6833 - protein, 8 aa, synthetic construct
GIDLSAYA

SEQ ID NO: 6834 - protein, 8 aa, synthetic construct
GIDLSSYA

SEQ ID NO: 6835 - protein, 8 aa, synthetic construct
GIDLSAYA

SEQ ID NO: 6836 - protein, 8 aa, synthetic construct
GIDLSSYA

SEQ ID NO: 6837 - protein, 5 aa, synthetic construct
GFNIK

SEQ ID NO: 6838 - protein, 5 aa, synthetic construct
GFNIK

SEQ ID NO: 6839 - protein, 5 aa, synthetic construct
GFNIK

SEQ ID NO: 6840 - protein, 5 aa, synthetic construct
GFNIK

SEQ ID NO: 6841 - protein, 7 aa, synthetic construct
GFTFSSY

SEQ ID NO: 6842 - protein, 7 aa, synthetic construct
GFTFSSY

SEQ ID NO: 6843 - protein, 7 aa, synthetic construct
GFTFSSY

SEQ ID NO: 6844 - protein, 7 aa, synthetic construct
GFTFSSY

SEQ ID NO: 6845 - protein, 7 aa, synthetic construct
GFTFSNY

SEQ ID NO: 6846 - protein, 7 aa, synthetic construct
GFTFSSY

SEQ ID NO: 6847 - protein, 7 aa, synthetic construct
GFTFSRY

SEQ ID NO: 6848 - protein, 7 aa, synthetic construct
GFTFSSY

SEQ ID NO: 6849 - protein, 7 aa, synthetic construct
GFTFSNY

SEQ ID NO: 6850 - protein, 5 aa, synthetic construct
GRTFT

SEQ ID NO: 6851 - protein, 5 aa, synthetic construct
GRTFT

SEQ ID NO: 6852 - protein, 5 aa, synthetic construct
GRTFT

SEQ ID NO: 6853 - protein, 5 aa, synthetic construct
GRTFT

SEQ ID NO: 6854 - protein, 5 aa, synthetic construct
GRTFT

SEQ ID NO: 6855 - protein, 5 aa, synthetic construct
GRTFT

SEQ ID NO: 6856 - protein, 5 aa, synthetic construct
GRTFS

SEQ ID NO: 6857 - protein, 5 aa, synthetic construct
GRTFS

SEQ ID NO: 6858 - protein, 5 aa, synthetic construct
GRTFS

SEQ ID NO: 6859 - protein, 5 aa, synthetic construct
GRTFS

SEQ ID NO: 6860 - protein, 5 aa, synthetic construct
GRTFS

SEQ ID NO: 6861 - protein, 5 aa, synthetic construct
GRTFS

SEQ ID NO: 6862 - protein, 5 aa, synthetic construct
GRTFT

SEQ ID NO: 6863 - protein, 5 aa, synthetic construct
GRTFT

SEQ ID NO: 6864 - protein, 10 aa, synthetic construct
GGSITTGEFY

SEQ ID NO: 6865 - protein, 8 aa, synthetic construct
GNINSRSC

SEQ ID NO: 6866 - protein, 8 aa, synthetic construct
GSINSRSC

SEQ ID NO: 6867 - protein, 8 aa, synthetic construct
GNINSRSC

SEQ ID NO: 6868 - protein, 8 aa, synthetic construct
GNISSRNC

SEQ ID NO: 6869 - protein, 8 aa, synthetic construct
GNISSRNC

SEQ ID NO: 6870 - protein, 8 aa, synthetic construct
GSINSRNC

SEQ ID NO: 6871 - protein, 8 aa, synthetic construct
GNINSRTC

SEQ ID NO: 6872 - protein, 8 aa, synthetic construct
GNINSRNC

SEQ ID NO: 6873 - protein, 8 aa, synthetic construct
GYTYGINC

SEQ ID NO: 6874 - protein, 8 aa, synthetic construct
GYTYGINC

SEQ ID NO: 6875 - protein, 8 aa, synthetic construct
GYTYGINC

SEQ ID NO: 6876 - protein, 8 aa, synthetic construct
GYTYGINC

SEQ ID NO: 6877 - protein, 8 aa, synthetic construct
GYTYSINC

SEQ ID NO: 6878 - protein, 8 aa, synthetic construct
GLSFSTYT

SEQ ID NO: 6879 - protein, 8 aa, synthetic construct
GLSFSTYT

SEQ ID NO: 6880 - protein, 8 aa, synthetic construct
GLSFSTYT

SEQ ID NO: 6881 - protein, 10 aa, synthetic construct
GLSFSTYTVA

SEQ ID NO: 6882 - protein, 10 aa, synthetic construct
GLSFSTYTVA

SEQ ID NO: 6883 - protein, 10 aa, synthetic construct
GLSFSTYTVA

SEQ ID NO: 6884 - protein, 8 aa, synthetic construct
GYGVSTMA

SEQ ID NO: 6885 - protein, 8 aa, synthetic construct
GYGVSTMA

SEQ ID NO: 6886 - protein, 8 aa, synthetic construct
GYGVSTMA

SEQ ID NO: 6887 - protein, 8 aa, synthetic construct
GYGVSTMG

SEQ ID NO: 6888 - protein, 8 aa, synthetic construct
GYGVSTMG

SEQ ID NO: 6889 - protein, 8 aa, synthetic construct
GYGVSTMG

SEQ ID NO: 6890 - protein, 8 aa, synthetic construct
GYGVSTMA

SEQ ID NO: 6891 - protein, 8 aa, synthetic construct
GFASDYYI

SEQ ID NO: 6892 - protein, 8 aa, synthetic construct
GFASDYYI

SEQ ID NO: 6893 - protein, 8 aa, synthetic construct
GFASDYYI

SEQ ID NO: 6894 - protein, 8 aa, synthetic construct
GFASDYYI

SEQ ID NO: 6895 - protein, 8 aa, synthetic construct
GRAVSSLF

SEQ ID NO: 6896 - protein, 8 aa, synthetic construct
GRTFSSLF

SEQ ID NO: 6897 - protein, 8 aa, synthetic construct
GRAVSSLF

SEQ ID NO: 6898 - protein, 8 aa, synthetic construct
GRTFSSLF

SEQ ID NO: 6899 - protein, 8 aa, synthetic construct
GRAFSSLF

SEQ ID NO: 6900 - protein, 5 aa, synthetic construct
GRTFS

SEQ ID NO: 6901 - protein, 5 aa, synthetic construct
GRTFT

SEQ ID NO: 6902 - protein, 5 aa, synthetic construct
GRTFT

SEQ ID NO: 6903 - protein, 5 aa, synthetic construct
GRTFT

SEQ ID NO: 6904 - protein, 5 aa, synthetic construct
GRTFT

SEQ ID NO: 6905 - protein, 5 aa, synthetic construct
GRTFT

SEQ ID NO: 6906 - protein, 5 aa, synthetic construct
GRTFT

SEQ ID NO: 6907 - protein, 5 aa, synthetic construct
GRTFS

SEQ ID NO: 6908 - protein, 5 aa, synthetic construct
GRTFT

SEQ ID NO: 6909 - protein, 8 aa, synthetic construct
EHTFSSHV

SEQ ID NO: 6910 - protein, 8 aa, synthetic construct
EHTFSSHV

SEQ ID NO: 6911 - protein, 10 aa, synthetic construct
GASITTGEFY

SEQ ID NO: 6912 - protein, 10 aa, synthetic construct
GASITTGEFY

SEQ ID NO: 6913 - protein, 10 aa, synthetic construct
GASITTGEFY

SEQ ID NO: 6914 - protein, 10 aa, synthetic construct
GASITTGEFY

SEQ ID NO: 6915 - protein, 10 aa, synthetic construct
GASITTGEYY

SEQ ID NO: 6916 - protein, 10 aa, synthetic construct
GASITTGEFY

SEQ ID NO: 6917 - protein, 10 aa, synthetic construct
GASITTGEYY

SEQ ID NO: 6918 - protein, 8 aa, synthetic construct
GNINSRNC

SEQ ID NO: 6919 - protein, 8 aa, synthetic construct
GNINSRTC

SEQ ID NO: 6920 - protein, 8 aa, synthetic construct
GNINSRNC

SEQ ID NO: 6921 - protein, 8 aa, synthetic construct
GNINSRNC

SEQ ID NO: 6922 - protein, 8 aa, synthetic construct
GNINSRSC

SEQ ID NO: 6923 - protein, 5 aa, synthetic construct
FSGYG

SEQ ID NO: 6924 - protein, 5 aa, synthetic construct
FSGYG

SEQ ID NO: 6925 - protein, 5 aa, synthetic construct
FSGYG

SEQ ID NO: 6926 - protein, 5 aa, synthetic construct
FSGYG

SEQ ID NO: 6927 - protein, 5 aa, synthetic construct
GRTFS

SEQ ID NO: 6928 - protein, 5 aa, synthetic construct
GRTFS

SEQ ID NO: 6929 - protein, 5 aa, synthetic construct
GRTFS

SEQ ID NO: 6930 - protein, 5 aa, synthetic construct
GRTFS

SEQ ID NO: 6931 - protein, 8 aa, synthetic construct
GRSFSSVN

SEQ ID NO: 6932 - protein, 8 aa, synthetic construct
GRSFSSVN

SEQ ID NO: 6933 - protein, 9 aa, synthetic construct
GFTFSSYAM

SEQ ID NO: 6934 - protein, 9 aa, synthetic construct
GFTFSSHAM

SEQ ID NO: 6935 - protein, 9 aa, synthetic construct
GFTFSSHAM

SEQ ID NO: 6936 - protein, 10 aa, synthetic construct
GGSISSGSYY

SEQ ID NO: 6937 - protein, 10 aa, synthetic construct
GDSISSGDYY

SEQ ID NO: 6938 - protein, 10 aa, synthetic construct
GDSISSGDYY

SEQ ID NO: 6939 - protein, 10 aa, synthetic construct
GDSISSGDYY

SEQ ID NO: 6940 - protein, 10 aa, synthetic construct
GDSISSGDYY

SEQ ID NO: 6941 - protein, 10 aa, synthetic construct
GDSISSGDYY

SEQ ID NO: 6942 - protein, 5 aa, synthetic construct
GPTVS

SEQ ID NO: 6943 - protein, 5 aa, synthetic construct
GPTVS

SEQ ID NO: 6944 - protein, 5 aa, synthetic construct
GPTVS

SEQ ID NO: 6945 - protein, 5 aa, synthetic construct
GPTVS

SEQ ID NO: 6946 - protein, 5 aa, synthetic construct
GPTVS

SEQ ID NO: 6947 - protein, 8 aa, synthetic construct
GIIFSNCG

SEQ ID NO: 6948 - protein, 8 aa, synthetic construct
GIIFSNCG

SEQ ID NO: 6949 - protein, 8 aa, synthetic construct
GYAYSPYC

SEQ ID NO: 6950 - protein, 8 aa, synthetic construct
GYAYSPYC

SEQ ID NO: 6951 - protein, 8 aa, synthetic construct
GYAYSPYC

SEQ ID NO: 6952 - protein, 8 aa, synthetic construct
GYAYSPYC

SEQ ID NO: 6953 - protein, 8 aa, synthetic construct
GYAYSPYC

SEQ ID NO: 6954 - protein, 8 aa, synthetic construct
GYAYSPYC

SEQ ID NO: 6955 - protein, 8 aa, synthetic construct
GSIFSLSA

SEQ ID NO: 6956 - protein, 8 aa, synthetic construct
GSIFSLSA

SEQ ID NO: 6957 - protein, 8 aa, synthetic construct
GYTYSINC

SEQ ID NO: 6958 - protein, 8 aa, synthetic construct
GYTYSINC

SEQ ID NO: 6959 - protein, 8 aa, synthetic construct
GYTYSINC

SEQ ID NO: 6960 - protein, 8 aa, synthetic construct
GYTYSINC

SEQ ID NO: 6961 - protein, 8 aa, synthetic construct
GYTYSINC

SEQ ID NO: 6962 - protein, 8 aa, synthetic construct
GYTYSINC

SEQ ID NO: 6963 - protein, 11 aa, synthetic construct
GSIFAINEINL

SEQ ID NO: 6964 - protein, 11 aa, synthetic construct
GSIFSINEINL

SEQ ID NO: 6965 - protein, 8 aa, synthetic construct
GSIRSINV

SEQ ID NO: 6966 - protein, 8 aa, synthetic construct
GDIRSINV

SEQ ID NO: 6967 - protein, 8 aa, synthetic construct
GSTRSINV

SEQ ID NO: 6968 - protein, 8 aa, synthetic construct
GFTFNSYA

SEQ ID NO: 6969 - protein, 8 aa, synthetic construct
GFTFSSYA

SEQ ID NO: 6970 - protein, 4 aa, synthetic construct
YQDS

SEQ ID NO: 6971 - protein, 4 aa, synthetic construct
YQDS

SEQ ID NO: 6972 - protein, 4 aa, synthetic construct
YQDT

SEQ ID NO: 6973 - protein, 4 aa, synthetic construct
YQDS

SEQ ID NO: 6974 - protein, 4 aa, synthetic construct
YEDN

SEQ ID NO: 6975 - protein, 4 aa, synthetic construct
YEDN

SEQ ID NO: 6976 - protein, 4 aa, synthetic construct
YEDN

SEQ ID NO: 6977 - protein, 4 aa, synthetic construct
YEDN

SEQ ID NO: 6978 - protein, 4 aa, synthetic construct
YSAS

SEQ ID NO: 6979 - protein, 4 aa, synthetic construct
YSAS

SEQ ID NO: 6980 - protein, 4 aa, synthetic construct
YSTS

SEQ ID NO: 6981 - protein, 4 aa, synthetic construct
YSTS

SEQ ID NO: 6982 - protein, 4 aa, synthetic construct
YWGS

SEQ ID NO: 6983 - protein, 4 aa, synthetic construct
YWGS

SEQ ID NO: 6984 - protein, 4 aa, synthetic construct
YGAT

SEQ ID NO: 6985 - protein, 4 aa, synthetic construct
YGAT

SEQ ID NO: 6986 - protein, 4 aa, synthetic construct
YGAT

SEQ ID NO: 6987 - protein, 4 aa, synthetic construct
YGAT

SEQ ID NO: 6988 - protein, 4 aa, synthetic construct
YDTS

SEQ ID NO: 6989 - protein, 4 aa, synthetic construct
YRMS

SEQ ID NO: 6990 - protein, 4 aa, synthetic construct
YHAS

SEQ ID NO: 6991 - protein, 4 aa, synthetic construct
YRMS

SEQ ID NO: 6992 - protein, 4 aa, synthetic construct
YHAS

SEQ ID NO: 6993 - protein, 4 aa, synthetic construct
YDAS

SEQ ID NO: 6994 - protein, 4 aa, synthetic construct
YSGS

SEQ ID NO: 6995 - protein, 4 aa, synthetic construct
YRAS

SEQ ID NO: 6996 - protein, 4 aa, synthetic construct
YSAY

SEQ ID NO: 6997 - protein, 4 aa, synthetic construct
YSAY

SEQ ID NO: 6998 - protein, 4 aa, synthetic construct
YSAS

SEQ ID NO: 6999 - protein, 4 aa, synthetic construct
YGAT

SEQ ID NO: 7000 - protein, 4 aa, synthetic construct
YDAS

SEQ ID NO: 7001 - protein, 4 aa, synthetic construct
YDAS

SEQ ID NO: 7002 - protein, 4 aa, synthetic construct
YYAS

SEQ ID NO: 7003 - protein, 4 aa, synthetic construct
YAAS

SEQ ID NO: 7004 - protein, 4 aa, synthetic construct
YSAS

SEQ ID NO: 7005 - protein, 4 aa, synthetic construct
YKVS

SEQ ID NO: 7006 - protein, 4 aa, synthetic construct
YDVS

SEQ ID NO: 7007 - protein, 4 aa, synthetic construct
YGAS

SEQ ID NO: 7008 - protein, 4 aa, synthetic construct
YGAS

SEQ ID NO: 7009 - protein, 4 aa, synthetic construct
YGAS

SEQ ID NO: 7010 - protein, 4 aa, synthetic construct
YGAS

SEQ ID NO: 7011 - protein, 4 aa, synthetic construct
YDAS

SEQ ID NO: 7012 - protein, 4 aa, synthetic construct
YYAS

SEQ ID NO: 7013 - protein, 4 aa, synthetic construct
YYAS

SEQ ID NO: 7014 - protein, 4 aa, synthetic construct
YWAS

SEQ ID NO: 7015 - protein, 4 aa, synthetic construct
YWAS

SEQ ID NO: 7016 - protein, 4 aa, synthetic construct
YSTS

SEQ ID NO: 7017 - protein, 4 aa, synthetic construct
YSTS

SEQ ID NO: 7018 - protein, 4 aa, synthetic construct
YSTS

SEQ ID NO: 7019 - protein, 4 aa, synthetic construct
YSTS

SEQ ID NO: 7020 - protein, 4 aa, synthetic construct
YSTS

SEQ ID NO: 7021 - protein, 4 aa, synthetic construct
YSTS

SEQ ID NO: 7022 - protein, 4 aa, synthetic construct
YAAS

SEQ ID NO: 7023 - protein, 4 aa, synthetic construct
YAAS

SEQ ID NO: 7024 - protein, 4 aa, synthetic construct
YAAS

SEQ ID NO: 7025 - protein, 4 aa, synthetic construct
YAAS

SEQ ID NO: 7026 - protein, 4 aa, synthetic construct
YAAS

SEQ ID NO: 7027 - protein, 4 aa, synthetic construct
YAAR

SEQ ID NO: 7028 - protein, 4 aa, synthetic construct
YAAS

SEQ ID NO: 7029 - protein, 4 aa, synthetic construct
YAAS

SEQ ID NO: 7030 - protein, 4 aa, synthetic construct
YAAS

SEQ ID NO: 7031 - protein, 4 aa, synthetic construct
YLVS

SEQ ID NO: 7032 - protein, 4 aa, synthetic construct
YLVS

SEQ ID NO: 7033 - protein, 4 aa, synthetic construct
YLVS

SEQ ID NO: 7034 - protein, 4 aa, synthetic construct
YLVS

SEQ ID NO: 7035 - protein, 4 aa, synthetic construct
YLVS

SEQ ID NO: 7036 - protein, 4 aa, synthetic construct
YLVS

SEQ ID NO: 7037 - protein, 4 aa, synthetic construct
YLVS

SEQ ID NO: 7038 - protein, 4 aa, synthetic construct
YAAS

SEQ ID NO: 7039 - protein, 4 aa, synthetic construct
YLVS

SEQ ID NO: 7040 - protein, 4 aa, synthetic construct
YAAS

SEQ ID NO: 7041 - protein, 4 aa, synthetic construct
YAAS

SEQ ID NO: 7042 - protein, 4 aa, synthetic construct
YAAS

SEQ ID NO: 7043 - protein, 4 aa, synthetic construct
YKVS

SEQ ID NO: 7044 - protein, 4 aa, synthetic construct
YKVS

SEQ ID NO: 7045 - protein, 4 aa, synthetic construct
YRVS

SEQ ID NO: 7046 - protein, 4 aa, synthetic construct
YSAS

SEQ ID NO: 7047 - protein, 4 aa, synthetic construct
YSAS

SEQ ID NO: 7048 - protein, 4 aa, synthetic construct
YSAS

SEQ ID NO: 7049 - protein, 4 aa, synthetic construct
YSAS

SEQ ID NO: 7050 - protein, 4 aa, synthetic construct
YDDS

SEQ ID NO: 7051 - protein, 4 aa, synthetic construct
YDDS

SEQ ID NO: 7052 - protein, 4 aa, synthetic construct
HAAS

SEQ ID NO: 7053 - protein, 4 aa, synthetic construct
HAAS

SEQ ID NO: 7054 - protein, 4 aa, synthetic construct
HAAS

SEQ ID NO: 7055 - protein, 4 aa, synthetic construct
HAAS

SEQ ID NO: 7056 - protein, 4 aa, synthetic construct
YAAS

SEQ ID NO: 7057 - protein, 4 aa, synthetic construct
YAAS

SEQ ID NO: 7058 - protein, 4 aa, synthetic construct
YAAS

SEQ ID NO: 7059 - protein, 4 aa, synthetic construct
YAAS

SEQ ID NO: 7060 - protein, 4 aa, synthetic construct
YAAS

SEQ ID NO: 7061 - protein, 4 aa, synthetic construct
YAAS

SEQ ID NO: 7062 - protein, 4 aa, synthetic construct
YAAS

SEQ ID NO: 7063 - protein, 4 aa, synthetic construct
YAAS

SEQ ID NO: 7064 - protein, 4 aa, synthetic construct
YAAS

SEQ ID NO: 7065 - protein, 4 aa, synthetic construct
YGAS

SEQ ID NO: 7066 - protein, 4 aa, synthetic construct
YAAS

SEQ ID NO: 7067 - protein, 4 aa, synthetic construct
YSTS

SEQ ID NO: 7068 - protein, 4 aa, synthetic construct
YSTS

SEQ ID NO: 7069 - protein, 4 aa, synthetic construct
YSTS

SEQ ID NO: 7070 - protein, 4 aa, synthetic construct
YSTS

SEQ ID NO: 7071 - protein, 4 aa, synthetic construct
YSTS

SEQ ID NO: 7072 - protein, 4 aa, synthetic construct
YSTS

SEQ ID NO: 7073 - protein, 4 aa, synthetic construct
YSTS

SEQ ID NO: 7074 - protein, 4 aa, synthetic construct
YSTS

SEQ ID NO: 7075 - protein, 4 aa, synthetic construct
YSTS

SEQ ID NO: 7076 - protein, 4 aa, synthetic construct
YGAS

SEQ ID NO: 7077 - protein, 4 aa, synthetic construct
YGAS

SEQ ID NO: 7078 - protein, 4 aa, synthetic construct
YDAS

SEQ ID NO: 7079 - protein, 4 aa, synthetic construct
YDAS

SEQ ID NO: 7080 - protein, 4 aa, synthetic construct
YDAS

SEQ ID NO: 7081 - protein, 4 aa, synthetic construct
YDAS

SEQ ID NO: 7082 - protein, 4 aa, synthetic construct
YDAS

SEQ ID NO: 7083 - protein, 4 aa, synthetic construct
YNAK

SEQ ID NO: 7084 - protein, 4 aa, synthetic construct
YNAK

SEQ ID NO: 7085 - protein, 4 aa, synthetic construct
YNAK

SEQ ID NO: 7086 - protein, 4 aa, synthetic construct
YNAK

SEQ ID NO: 7087 - protein, 4 aa, synthetic construct
YNAK

SEQ ID NO: 7088 - protein, 4 aa, synthetic construct
YNAK

SEQ ID NO: 7089 - protein, 4 aa, synthetic construct
YNAK

SEQ ID NO: 7090 - protein, 4 aa, synthetic construct
YGKN

SEQ ID NO: 7091 - protein, 4 aa, synthetic construct
YGKN

SEQ ID NO: 7092 - protein, 4 aa, synthetic construct
YGKD

SEQ ID NO: 7093 - protein, 4 aa, synthetic construct
YGKD

SEQ ID NO: 7094 - protein, 4 aa, synthetic construct
YLVS

SEQ ID NO: 7095 - protein, 4 aa, synthetic construct
YLVS

SEQ ID NO: 7096 - protein, 8 aa, synthetic construct
ISGSGGST

SEQ ID NO: 7097 - protein, 8 aa, synthetic construct
ISGSGGST

SEQ ID NO: 7098 - protein, 8 aa, synthetic construct
ISGSGGST

SEQ ID NO: 7099 - protein, 8 aa, synthetic construct
ISGSGGST

SEQ ID NO: 7100 - protein, 8 aa, synthetic construct
ISGSGGST

SEQ ID NO: 7101 - protein, 8 aa, synthetic construct
ISGSGGST

SEQ ID NO: 7102 - protein, 8 aa, synthetic construct
ISGSGGST

SEQ ID NO: 7103 - protein, 8 aa, synthetic construct
ISGSGGST

SEQ ID NO: 7104 - protein, 7 aa, synthetic construct
IWAGGIT

SEQ ID NO: 7105 - protein, 7 aa, synthetic construct
IWAGGIT

SEQ ID NO: 7106 - protein, 7 aa, synthetic construct
IWAGGST

SEQ ID NO: 7107 - protein, 7 aa, synthetic construct
IWAGGST

SEQ ID NO: 7108 - protein, 8 aa, synthetic construct
IYPSTSYT

SEQ ID NO: 7109 - protein, 8 aa, synthetic construct
IYPSDSYT

SEQ ID NO: 7110 - protein, 8 aa, synthetic construct
IYPGDGDT

SEQ ID NO: 7111 - protein, 8 aa, synthetic construct
IYPGDGDT

SEQ ID NO: 7112 - protein, 8 aa, synthetic construct
IYPGDGDT

SEQ ID NO: 7113 - protein, 8 aa, synthetic construct
IYPGDGDT

SEQ ID NO: 7114 - protein, 8 aa, synthetic construct
IYPGNLNT

SEQ ID NO: 7115 - protein, 8 aa, synthetic construct
ISTGGGNT

SEQ ID NO: 7116 - protein, 8 aa, synthetic construct
ISTGGVNT

SEQ ID NO: 7117 - protein, 8 aa, synthetic construct
ISTGGVNT

SEQ ID NO: 7118 - protein, 8 aa, synthetic construct
ISTGGGNT

SEQ ID NO: 7119 - protein, 7 aa, synthetic construct
MYYSGNI

SEQ ID NO: 7120 - protein, 7 aa, synthetic construct
IWRGGST

SEQ ID NO: 7121 - protein, 8 aa, synthetic construct
IHPYDGDT

SEQ ID NO: 7122 - protein, 8 aa, synthetic construct
IYPDSDYT

SEQ ID NO: 7123 - protein, 8 aa, synthetic construct
IYPDSDYT

SEQ ID NO: 7124 - protein, 8 aa, synthetic construct
LYGGSDST

SEQ ID NO: 7125 - protein, 7 aa, synthetic construct
ISYSGYT

SEQ ID NO: 7126 - protein, 8 aa, synthetic construct
IIPIEGRA

SEQ ID NO: 7127 - protein, 8 aa, synthetic construct
IIPIEGRA

SEQ ID NO: 7128 - protein, 8 aa, synthetic construct
INTYTGEP

SEQ ID NO: 7129 - protein, 8 aa, synthetic construct
ISGSGGST

SEQ ID NO: 7130 - protein, 9 aa, synthetic construct
IYVGSHVNT

SEQ ID NO: 7131 - protein, 8 aa, synthetic construct
IYPGDGST

SEQ ID NO: 7132 - protein, 7 aa, synthetic construct
INHRGST

SEQ ID NO: 7133 - protein, 8 aa, synthetic construct
ISAYNGNT

SEQ ID NO: 7134 - protein, 7 aa, synthetic construct
ISTNSRT

SEQ ID NO: 7135 - protein, 7 aa, synthetic construct
INHRGST

SEQ ID NO: 7136 - protein, 8 aa, synthetic construct
ISAYNGYT

SEQ ID NO: 7137 - protein, 8 aa, synthetic construct
ISTSGSYT

SEQ ID NO: 7138 - protein, 7 aa, synthetic construct
IWWDDDK

SEQ ID NO: 7139 - protein, 7 aa, synthetic construct
IWWDDDK

SEQ ID NO: 7140 - protein, 8 aa, synthetic construct
FSPGNDDF

SEQ ID NO: 7141 - protein, 8 aa, synthetic construct
FSPGNDDF

SEQ ID NO: 7142 - protein, 8 aa, synthetic construct
INPYNGGT

SEQ ID NO: 7143 - protein, 8 aa, synthetic construct
ISPYNGGT

SEQ ID NO: 7144 - protein, 8 aa, synthetic construct
ISPYNGGT

SEQ ID NO: 7145 - protein, 8 aa, synthetic construct
INPGSGGT

SEQ ID NO: 7146 - protein, 8 aa, synthetic construct
INPGSGST

SEQ ID NO: 7147 - protein, 8 aa, synthetic construct
ILPGGGDT

SEQ ID NO: 7148 - protein, 8 aa, synthetic construct
ILPGGGDT

SEQ ID NO: 7149 - protein, 8 aa, synthetic construct
ILPGGGDT

SEQ ID NO: 7150 - protein, 8 aa, synthetic construct
ILPGGGDT

SEQ ID NO: 7151 - protein, 8 aa, synthetic construct
ILPGGGDT

SEQ ID NO: 7152 - protein, 8 aa, synthetic construct
ILPGGGDT

SEQ ID NO: 7153 - protein, 8 aa, synthetic construct
ILPGGGDT

SEQ ID NO: 7154 - protein, 8 aa, synthetic construct
ILPGGGDT

SEQ ID NO: 7155 - protein, 8 aa, synthetic construct
ILPGGGDT

SEQ ID NO: 7156 - protein, 8 aa, synthetic construct
IDPSDSET

SEQ ID NO: 7157 - protein, 8 aa, synthetic construct
IDPSDSET

SEQ ID NO: 7158 - protein, 8 aa, synthetic construct
IDPSDSET

SEQ ID NO: 7159 - protein, 8 aa, synthetic construct
IDPSDSET

SEQ ID NO: 7160 - protein, 8 aa, synthetic construct
IDPSDSET

SEQ ID NO: 7161 - protein, 8 aa, synthetic construct
IDPSDSET

SEQ ID NO: 7162 - protein, 8 aa, synthetic construct
IDPSDSET

SEQ ID NO: 7163 - protein, 8 aa, synthetic construct
ILPGGGDT

SEQ ID NO: 7164 - protein, 7 aa, synthetic construct
IDPSDSE

SEQ ID NO: 7165 - protein, 8 aa, synthetic construct
ILPGGGDT

SEQ ID NO: 7166 - protein, 8 aa, synthetic construct
ILPGGGDT

SEQ ID NO: 7167 - protein, 8 aa, synthetic construct
ILPGGGDT

SEQ ID NO: 7168 - protein, 8 aa, synthetic construct
IFPRSGNT

SEQ ID NO: 7169 - protein, 8 aa, synthetic construct
IYPRSGNI

SEQ ID NO: 7170 - protein, 8 aa, synthetic construct
IWYSGSTT

SEQ ID NO: 7171 - protein, 8 aa, synthetic construct
INSDGSSI

SEQ ID NO: 7172 - protein, 8 aa, synthetic construct
INSDGSSI

SEQ ID NO: 7173 - protein, 8 aa, synthetic construct
INSDGSAI

SEQ ID NO: 7174 - protein, 8 aa, synthetic construct
INSDGSAV

SEQ ID NO: 7175 - protein, 7 aa, synthetic construct
IYYSGST

SEQ ID NO: 7176 - protein, 7 aa, synthetic construct
IYYSGST

SEQ ID NO: 7177 - protein, 9 aa, synthetic construct
TYYRSKWYN

SEQ ID NO: 7178 - protein, 9 aa, synthetic construct
TYYRSKWYN

SEQ ID NO: 7179 - protein, 9 aa, synthetic construct
TYYKSKWYN

SEQ ID NO: 7180 - protein, 9 aa, synthetic construct
TYYKSKWYN

SEQ ID NO: 7181 - protein, 9 aa, synthetic construct
TYYKSKWYN

SEQ ID NO: 7182 - protein, 9 aa, synthetic construct
TYYKSKWYN

SEQ ID NO: 7183 - protein, 9 aa, synthetic construct
TYYKSKWYN

SEQ ID NO: 7184 - protein, 9 aa, synthetic construct
TYYKSKWYN

SEQ ID NO: 7185 - protein, 8 aa, synthetic construct
ILPGGGDT

SEQ ID NO: 7186 - protein, 8 aa, synthetic construct
ILPGGGDT

SEQ ID NO: 7187 - protein, 8 aa, synthetic construct
ILPGGGDT

SEQ ID NO: 7188 - protein, 8 aa, synthetic construct
ILPGGGDT

SEQ ID NO: 7189 - protein, 8 aa, synthetic construct
ILPGGGDT

SEQ ID NO: 7190 - protein, 8 aa, synthetic construct
INPYNGGI

SEQ ID NO: 7191 - protein, 8 aa, synthetic construct
INPYNGGS

SEQ ID NO: 7192 - protein, 8 aa, synthetic construct
INPYNGGT

SEQ ID NO: 7193 - protein, 8 aa, synthetic construct
INPYNGGT

SEQ ID NO: 7194 - protein, 8 aa, synthetic construct
INPYNGGI

SEQ ID NO: 7195 - protein, 8 aa, synthetic construct
INPYNGGT

SEQ ID NO: 7196 - protein, 8 aa, synthetic construct
INPYNGGS

SEQ ID NO: 7197 - protein, 8 aa, synthetic construct
INPYNGGS

SEQ ID NO: 7198 - protein, 8 aa, synthetic construct
INPYNGGI

SEQ ID NO: 7199 - protein, 9 aa, synthetic construct
TYYRSEWYN

SEQ ID NO: 7200 - protein, 9 aa, synthetic construct
TYYRSKWYN

SEQ ID NO: 7201 - protein, 7 aa, synthetic construct
INTISTA

SEQ ID NO: 7202 - protein, 7 aa, synthetic construct
INTISTA

SEQ ID NO: 7203 - protein, 7 aa, synthetic construct
INTISTA

SEQ ID NO: 7204 - protein, 7 aa, synthetic construct
INTISTA

SEQ ID NO: 7205 - protein, 7 aa, synthetic construct
INTISTA

SEQ ID NO: 7206 - protein, 8 aa, synthetic construct
IDPANDNT

SEQ ID NO: 7207 - protein, 8 aa, synthetic construct
IDPANGNT

SEQ ID NO: 7208 - protein, 8 aa, synthetic construct
IDPANGNI

SEQ ID NO: 7209 - protein, 8 aa, synthetic construct
IDPANDNI

SEQ ID NO: 7210 - protein, 8 aa, synthetic construct
ISGSGGST

SEQ ID NO: 7211 - protein, 8 aa, synthetic construct
IKGSGGST

SEQ ID NO: 7212 - protein, 8 aa, synthetic construct
ISGDGGST

SEQ ID NO: 7213 - protein, 8 aa, synthetic construct
ISGSGGNT

SEQ ID NO: 7214 - protein, 4 aa, synthetic construct
INNN

SEQ ID NO: 7215 - protein, 4 aa, synthetic construct
INNN

SEQ ID NO: 7216 - protein, 4 aa, synthetic construct
INNN

SEQ ID NO: 7217 - protein, 4 aa, synthetic construct
INSN

SEQ ID NO: 7218 - protein, 4 aa, synthetic construct
INSN

SEQ ID NO: 7219 - protein, 8 aa, synthetic construct
ISLSPTLA

SEQ ID NO: 7220 - protein, 8 aa, synthetic construct
ISLSPTLA

SEQ ID NO: 7221 - protein, 8 aa, synthetic construct
ISLSPTLA

SEQ ID NO: 7222 - protein, 8 aa, synthetic construct
ISLSPTLA

SEQ ID NO: 7223 - protein, 8 aa, synthetic construct
ISLSPTLA

SEQ ID NO: 7224 - protein, 8 aa, synthetic construct
ISLSPTLA

SEQ ID NO: 7225 - protein, 8 aa, synthetic construct
ISLSPTLA

SEQ ID NO: 7226 - protein, 8 aa, synthetic construct
ITLSPTLA

SEQ ID NO: 7227 - protein, 8 aa, synthetic construct
ITLSPTLA

SEQ ID NO: 7228 - protein, 8 aa, synthetic construct
ITLSPTLA

SEQ ID NO: 7229 - protein, 8 aa, synthetic construct
ITYSGGSP

SEQ ID NO: 7230 - protein, 8 aa, synthetic construct
ITYSGGSP

SEQ ID NO: 7231 - protein, 8 aa, synthetic construct
ITYSGGSP

SEQ ID NO: 7232 - protein, 8 aa, synthetic construct
ISYSGGSP

SEQ ID NO: 7233 - protein, 7 aa, synthetic construct
VAASGST

SEQ ID NO: 7234 - protein, 8 aa, synthetic construct
IGQVTGRT

SEQ ID NO: 7235 - protein, 8 aa, synthetic construct
IGQVTGRT

SEQ ID NO: 7236 - protein, 8 aa, synthetic construct
IGQVTGRT

SEQ ID NO: 7237 - protein, 8 aa, synthetic construct
IGQVTGRT

SEQ ID NO: 7238 - protein, 8 aa, synthetic construct
IGQVTGRT

SEQ ID NO: 7239 - protein, 8 aa, synthetic construct
IGQVTGRT

SEQ ID NO: 7240 - protein, 8 aa, synthetic construct
IGQVTGRS

SEQ ID NO: 7241 - protein, 8 aa, synthetic construct
IGQVTGRS

SEQ ID NO: 7242 - protein, 8 aa, synthetic construct
ISTGGGRT

SEQ ID NO: 7243 - protein, 8 aa, synthetic construct
ISTGGGRT

SEQ ID NO: 7244 - protein, 8 aa, synthetic construct
ISTGGGRT

SEQ ID NO: 7245 - protein, 8 aa, synthetic construct
ISTGGGRT

SEQ ID NO: 7246 - protein, 8 aa, synthetic construct
ISTGGGTT

SEQ ID NO: 7247 - protein, 8 aa, synthetic construct
IPYTSQHM

SEQ ID NO: 7248 - protein, 8 aa, synthetic construct
IPYTSQHM

SEQ ID NO: 7249 - protein, 8 aa, synthetic construct
IPYTSQHM

SEQ ID NO: 7250 - protein, 8 aa, synthetic construct
IPYTSQHM

SEQ ID NO: 7251 - protein, 8 aa, synthetic construct
IPYTSQHM

SEQ ID NO: 7252 - protein, 8 aa, synthetic construct
IPYTSQHM

SEQ ID NO: 7253 - protein, 8 aa, synthetic construct
ITVGSGNT

SEQ ID NO: 7254 - protein, 8 aa, synthetic construct
ITVGSGNT

SEQ ID NO: 7255 - protein, 8 aa, synthetic construct
ITVGSGNT

SEQ ID NO: 7256 - protein, 8 aa, synthetic construct
ITVGSGNT

SEQ ID NO: 7257 - protein, 8 aa, synthetic construct
ITVGSGNT

SEQ ID NO: 7258 - protein, 8 aa, synthetic construct
ITVGSGNT

SEQ ID NO: 7259 - protein, 8 aa, synthetic construct
ITVGSGNT

SEQ ID NO: 7260 - protein, 8 aa, synthetic construct
ISSRYANT

SEQ ID NO: 7261 - protein, 8 aa, synthetic construct
ISSRYANT

SEQ ID NO: 7262 - protein, 8 aa, synthetic construct
ISSKYANT

SEQ ID NO: 7263 - protein, 8 aa, synthetic construct
ISSKYANT

SEQ ID NO: 7264 - protein, 8 aa, synthetic construct
ISRYSLYT

SEQ ID NO: 7265 - protein, 8 aa, synthetic construct
ISRYSLYT

SEQ ID NO: 7266 - protein, 8 aa, synthetic construct
ISKYSLYT

SEQ ID NO: 7267 - protein, 8 aa, synthetic construct
ISRYSLYT

SEQ ID NO: 7268 - protein, 8 aa, synthetic construct
ISKYSLYT

SEQ ID NO: 7269 - protein, 8 aa, synthetic construct
ISLSPTLA

SEQ ID NO: 7270 - protein, 8 aa, synthetic construct
INLSPTLA

SEQ ID NO: 7271 - protein, 8 aa, synthetic construct
ISLSPTLA

SEQ ID NO: 7272 - protein, 8 aa, synthetic construct
ISLSPTLA

SEQ ID NO: 7273 - protein, 8 aa, synthetic construct
INLSPTLA

SEQ ID NO: 7274 - protein, 8 aa, synthetic construct
INLSPTLA

SEQ ID NO: 7275 - protein, 8 aa, synthetic construct
INLSPTLA

SEQ ID NO: 7276 - protein, 8 aa, synthetic construct
INLSPTLA

SEQ ID NO: 7277 - protein, 8 aa, synthetic construct
INLSPTLA

SEQ ID NO: 7278 - protein, 8 aa, synthetic construct
IGWRDIST

SEQ ID NO: 7279 - protein, 8 aa, synthetic construct
IGWRDINT

SEQ ID NO: 7280 - protein, 7 aa, synthetic construct
IAASGST

SEQ ID NO: 7281 - protein, 7 aa, synthetic construct
IAASGST

SEQ ID NO: 7282 - protein, 7 aa, synthetic construct
IAASGST

SEQ ID NO: 7283 - protein, 7 aa, synthetic construct
IAASGAT

SEQ ID NO: 7284 - protein, 7 aa, synthetic construct
IAASGAT

SEQ ID NO: 7285 - protein, 7 aa, synthetic construct
IAASGST

SEQ ID NO: 7286 - protein, 7 aa, synthetic construct
IAASGST

SEQ ID NO: 7287 - protein, 8 aa, synthetic construct
IGQVTGRS

SEQ ID NO: 7288 - protein, 8 aa, synthetic construct
IGQVTGRS

SEQ ID NO: 7289 - protein, 8 aa, synthetic construct
IGQVTGRS

SEQ ID NO: 7290 - protein, 8 aa, synthetic construct
IGQVTGRS

SEQ ID NO: 7291 - protein, 8 aa, synthetic construct
IGQVTGRT

SEQ ID NO: 7292 - protein, 8 aa, synthetic construct
ITVGSGNT

SEQ ID NO: 7293 - protein, 8 aa, synthetic construct
ITVGSGST

SEQ ID NO: 7294 - protein, 8 aa, synthetic construct
ITVGGGST

SEQ ID NO: 7295 - protein, 8 aa, synthetic construct
ITVGSGNT

SEQ ID NO: 7296 - protein, 8 aa, synthetic construct
ITYSGGSP

SEQ ID NO: 7297 - protein, 8 aa, synthetic construct
ITYSGASP

SEQ ID NO: 7298 - protein, 8 aa, synthetic construct
ITYSGASP

SEQ ID NO: 7299 - protein, 8 aa, synthetic construct
ITYSGASP

SEQ ID NO: 7300 - protein, 8 aa, synthetic construct
IDWSGGSP

SEQ ID NO: 7301 - protein, 8 aa, synthetic construct
IDWSGGSP

SEQ ID NO: 7302 - protein, 8 aa, synthetic construct
ISGSGDYT

SEQ ID NO: 7303 - protein, 8 aa, synthetic construct
ISGSGDYI

SEQ ID NO: 7304 - protein, 8 aa, synthetic construct
ISGNGRTT

SEQ ID NO: 7305 - protein, 7 aa, synthetic construct
IYYSGVT

SEQ ID NO: 7306 - protein, 7 aa, synthetic construct
IYYSGIT

SEQ ID NO: 7307 - protein, 7 aa, synthetic construct
IYYSGIS

SEQ ID NO: 7308 - protein, 7 aa, synthetic construct
IYHSGIS

SEQ ID NO: 7309 - protein, 7 aa, synthetic construct
IYYNGIS

SEQ ID NO: 7310 - protein, 7 aa, synthetic construct
IYYAGIS

SEQ ID NO: 7311 - protein, 8 aa, synthetic construct
IQAGGGRI

SEQ ID NO: 7312 - protein, 8 aa, synthetic construct
IQASGGRI

SEQ ID NO: 7313 - protein, 8 aa, synthetic construct
IQAGGGRI

SEQ ID NO: 7314 - protein, 8 aa, synthetic construct
IQAGGGRI

SEQ ID NO: 7315 - protein, 8 aa, synthetic construct
IQAGGGRI

SEQ ID NO: 7316 - protein, 7 aa, synthetic construct
ISRRGTT

SEQ ID NO: 7317 - protein, 7 aa, synthetic construct
ISRRGTT

SEQ ID NO: 7318 - protein, 8 aa, synthetic construct
IYTGSGAT

SEQ ID NO: 7319 - protein, 9 aa, synthetic construct
IYTGSGGTY

SEQ ID NO: 7320 - protein, 8 aa, synthetic construct
IYTGSGST

SEQ ID NO: 7321 - protein, 8 aa, synthetic construct
IYTGSGAT

SEQ ID NO: 7322 - protein, 8 aa, synthetic construct
IYTGSGAT

SEQ ID NO: 7323 - protein, 8 aa, synthetic construct
IYTGNGAT

SEQ ID NO: 7324 - protein, 8 aa, synthetic construct
ISTNGEST

SEQ ID NO: 7325 - protein, 8 aa, synthetic construct
ISTNGDST

SEQ ID NO: 7326 - protein, 8 aa, synthetic construct
ISTGGGTT

SEQ ID NO: 7327 - protein, 8 aa, synthetic construct
ISTGGGTT

SEQ ID NO: 7328 - protein, 8 aa, synthetic construct
ISTGGGRT

SEQ ID NO: 7329 - protein, 8 aa, synthetic construct
ISTGGGRT

SEQ ID NO: 7330 - protein, 8 aa, synthetic construct
ISTGGGTT

SEQ ID NO: 7331 - protein, 8 aa, synthetic construct
ISTGGGTT

SEQ ID NO: 7332 - protein, 7 aa, synthetic construct
CASDGNT

SEQ ID NO: 7333 - protein, 7 aa, synthetic construct
CASDGNT

SEQ ID NO: 7334 - protein, 7 aa, synthetic construct
CASDGNT

SEQ ID NO: 7335 - protein, 7 aa, synthetic construct
CASDGNT

SEQ ID NO: 7336 - protein, 7 aa, synthetic construct
CASDGNT

SEQ ID NO: 7337 - protein, 8 aa, synthetic construct
INSGGGST

SEQ ID NO: 7338 - protein, 8 aa, synthetic construct
INSGGGST

SEQ ID NO: 7339 - protein, 6 aa, synthetic construct
QAWDSD

SEQ ID NO: 7340 - protein, 6 aa, synthetic construct
QAWDSD

SEQ ID NO: 7341 - protein, 6 aa, synthetic construct
QAWDSD

SEQ ID NO: 7342 - protein, 6 aa, synthetic construct
QAWDSD

SEQ ID NO: 7343 - protein, 4 aa, synthetic construct
QSYD

SEQ ID NO: 7344 - protein, 4 aa, synthetic construct
QSYD

SEQ ID NO: 7345 - protein, 4 aa, synthetic construct
QSYD

SEQ ID NO: 7346 - protein, 4 aa, synthetic construct
QSYD

SEQ ID NO: 7347 - protein, 6 aa, synthetic construct
QQDYSS

SEQ ID NO: 7348 - protein, 6 aa, synthetic construct
QQDYSS

SEQ ID NO: 7349 - protein, 7 aa, synthetic construct
QQYSGYP

SEQ ID NO: 7350 - protein, 7 aa, synthetic construct
QQYSGYP

SEQ ID NO: 7351 - protein, 7 aa, synthetic construct
QNDYTYP

SEQ ID NO: 7352 - protein, 7 aa, synthetic construct
QNDYTYP

SEQ ID NO: 7353 - protein, 7 aa, synthetic construct
QQSWNTP

SEQ ID NO: 7354 - protein, 7 aa, synthetic construct
QQSWNTP

SEQ ID NO: 7355 - protein, 7 aa, synthetic construct
QQSWNTP

SEQ ID NO: 7356 - protein, 7 aa, synthetic construct
QQSWNTP

SEQ ID NO: 7357 - protein, 7 aa, synthetic construct
QQWSSNP

SEQ ID NO: 7358 - protein, 7 aa, synthetic construct
GQLLENP

SEQ ID NO: 7359 - protein, 7 aa, synthetic construct
QQTRESP

SEQ ID NO: 7360 - protein, 7 aa, synthetic construct
GQLLENP

SEQ ID NO: 7361 - protein, 7 aa, synthetic construct
QQTRESP

SEQ ID NO: 7362 - protein, 7 aa, synthetic construct
QQRSNWP

SEQ ID NO: 7363 - protein, 7 aa, synthetic construct
QQHYSPP

SEQ ID NO: 7364 - protein, 7 aa, synthetic construct
QQSREYP

SEQ ID NO: 7365 - protein, 7 aa, synthetic construct
QQYSRYS

SEQ ID NO: 7366 - protein, 7 aa, synthetic construct
QQYSRYS

SEQ ID NO: 7367 - protein, 7 aa, synthetic construct
QQYLYQP

SEQ ID NO: 7368 - protein, 7 aa, synthetic construct
QQYWTTP

SEQ ID NO: 7369 - protein, 7 aa, synthetic construct
QQRSNWP

SEQ ID NO: 7370 - protein, 7 aa, synthetic construct
QQRSDWP

SEQ ID NO: 7371 - protein, 7 aa, synthetic construct
QQDYTSP

SEQ ID NO: 7372 - protein, 7 aa, synthetic construct
QQSYSTP

SEQ ID NO: 7373 - protein, 6 aa, synthetic construct
QQTNRY

SEQ ID NO: 7374 - protein, 7 aa, synthetic construct
FQGSHVP

SEQ ID NO: 7375 - protein, 8 aa, synthetic construct
SSYTSSST

SEQ ID NO: 7376 - protein, 7 aa, synthetic construct
QQYGSSP

SEQ ID NO: 7377 - protein, 7 aa, synthetic construct
QQRSNWP

SEQ ID NO: 7378 - protein, 7 aa, synthetic construct
QQRSNWP

SEQ ID NO: 7379 - protein, 7 aa, synthetic construct
QQYGSSP

SEQ ID NO: 7380 - protein, 7 aa, synthetic construct
QQSDGNP

SEQ ID NO: 7381 - protein, 7 aa, synthetic construct
LQDSEYP

SEQ ID NO: 7382 - protein, 7 aa, synthetic construct
LQDSEYP

SEQ ID NO: 7383 - protein, 7 aa, synthetic construct
QQPYSYP

SEQ ID NO: 7384 - protein, 7 aa, synthetic construct
QQYYSYP

SEQ ID NO: 7385 - protein, 8 aa, synthetic construct
QQRSIYPP

SEQ ID NO: 7386 - protein, 8 aa, synthetic construct
QQRSIYPP

SEQ ID NO: 7387 - protein, 8 aa, synthetic construct
QQRSNYPP

SEQ ID NO: 7388 - protein, 8 aa, synthetic construct
QQRSNYPP

SEQ ID NO: 7389 - protein, 7 aa, synthetic construct
QQWSSYP

SEQ ID NO: 7390 - protein, 7 aa, synthetic construct
QQWSSYP

SEQ ID NO: 7391 - protein, 7 aa, synthetic construct
QQSNEDP

SEQ ID NO: 7392 - protein, 7 aa, synthetic construct
QQSNEDP

SEQ ID NO: 7393 - protein, 7 aa, synthetic construct
QQSNEDP

SEQ ID NO: 7394 - protein, 7 aa, synthetic construct
QQSNEDP

SEQ ID NO: 7395 - protein, 7 aa, synthetic construct
QQSNEDP

SEQ ID NO: 7396 - protein, 7 aa, synthetic construct
QQSNEDP

SEQ ID NO: 7397 - protein, 7 aa, synthetic construct
QQSNDDP

SEQ ID NO: 7398 - protein, 7 aa, synthetic construct
QQSNDDP

SEQ ID NO: 7399 - protein, 7 aa, synthetic construct
QQSNDDP

SEQ ID NO: 7400 - protein, 7 aa, synthetic construct
FQGTHFP

SEQ ID NO: 7401 - protein, 7 aa, synthetic construct
FQGTHFP

SEQ ID NO: 7402 - protein, 7 aa, synthetic construct
WQGTHFP

SEQ ID NO: 7403 - protein, 7 aa, synthetic construct
WQGTHFP

SEQ ID NO: 7404 - protein, 7 aa, synthetic construct
FQGTHFP

SEQ ID NO: 7405 - protein, 7 aa, synthetic construct
FQGTHFP

SEQ ID NO: 7406 - protein, 7 aa, synthetic construct
FQGTHFP

SEQ ID NO: 7407 - protein, 7 aa, synthetic construct
QQSNEDP

SEQ ID NO: 7408 - protein, 7 aa, synthetic construct
WQGTHFP

SEQ ID NO: 7409 - protein, 7 aa, synthetic construct
QQSNEDP

SEQ ID NO: 7410 - protein, 7 aa, synthetic construct
QQSNDDP

SEQ ID NO: 7411 - protein, 7 aa, synthetic construct
QQSNEDP

SEQ ID NO: 7412 - protein, 7 aa, synthetic construct
FQGSHVP

SEQ ID NO: 7413 - protein, 7 aa, synthetic construct
FQGSHVP

SEQ ID NO: 7414 - protein, 7 aa, synthetic construct
QQSNEDP

SEQ ID NO: 7415 - protein, 7 aa, synthetic construct
QQYHIYP

SEQ ID NO: 7416 - protein, 7 aa, synthetic construct
QQYHIYP

SEQ ID NO: 7417 - protein, 7 aa, synthetic construct
QQYHIYP

SEQ ID NO: 7418 - protein, 7 aa, synthetic construct
QQYHIYP

SEQ ID NO: 7419 - protein, 9 aa, synthetic construct
QVWDSSSDH

SEQ ID NO: 7420 - protein, 9 aa, synthetic construct
QVWDSSSDH

SEQ ID NO: 7421 - protein, 8 aa, synthetic construct
QQSYSAPP

SEQ ID NO: 7422 - protein, 8 aa, synthetic construct
QQSYSTPP

SEQ ID NO: 7423 - protein, 8 aa, synthetic construct
QQSYSTPP

SEQ ID NO: 7424 - protein, 8 aa, synthetic construct
QQSYSTPP

SEQ ID NO: 7425 - protein, 7 aa, synthetic construct
QQSNEDP

SEQ ID NO: 7426 - protein, 7 aa, synthetic construct
QQSNEDP

SEQ ID NO: 7427 - protein, 7 aa, synthetic construct
QQSNEDP

SEQ ID NO: 7428 - protein, 7 aa, synthetic construct
QQSNEDP

SEQ ID NO: 7429 - protein, 7 aa, synthetic construct
QQSNEDP

SEQ ID NO: 7430 - protein, 7 aa, synthetic construct
QQSNEDP

SEQ ID NO: 7431 - protein, 7 aa, synthetic construct
QQSNEDP

SEQ ID NO: 7432 - protein, 7 aa, synthetic construct
QQSNEDP

SEQ ID NO: 7433 - protein, 7 aa, synthetic construct
QQSNEDP

SEQ ID NO: 7434 - protein, 7 aa, synthetic construct
QQSNEDP

SEQ ID NO: 7435 - protein, 7 aa, synthetic construct
QQSNEDP

SEQ ID NO: 7436 - protein, 7 aa, synthetic construct
QQRNNYP

SEQ ID NO: 7437 - protein, 7 aa, synthetic construct
QQRSNYP

SEQ ID NO: 7438 - protein, 7 aa, synthetic construct
QQRSIYP

SEQ ID NO: 7439 - protein, 7 aa, synthetic construct
QQRSIYP

SEQ ID NO: 7440 - protein, 7 aa, synthetic construct
QQRSTYP

SEQ ID NO: 7441 - protein, 7 aa, synthetic construct
QQRSNYP

SEQ ID NO: 7442 - protein, 7 aa, synthetic construct
QQRNNYP

SEQ ID NO: 7443 - protein, 7 aa, synthetic construct
QQRNIYP

SEQ ID NO: 7444 - protein, 7 aa, synthetic construct
QQRNIYP

SEQ ID NO: 7445 - protein, 7 aa, synthetic construct
QQYNNWP

SEQ ID NO: 7446 - protein, 7 aa, synthetic construct
QQYNNWP

SEQ ID NO: 7447 - protein, 10 aa, synthetic construct
LGEFSCSSGD

SEQ ID NO: 7448 - protein, 10 aa, synthetic construct
LGEFSCSSGD

SEQ ID NO: 7449 - protein, 10 aa, synthetic construct
LGEFSCSSGD

SEQ ID NO: 7450 - protein, 10 aa, synthetic construct
QGEFSCSSGD

SEQ ID NO: 7451 - protein, 10 aa, synthetic construct
QGEFSCSSGD

SEQ ID NO: 7452 - protein, 8 aa, synthetic construct
QHHYGTPY

SEQ ID NO: 7453 - protein, 8 aa, synthetic construct
QHHYGTPF

SEQ ID NO: 7454 - protein, 8 aa, synthetic construct
QHHYGTPY

SEQ ID NO: 7455 - protein, 8 aa, synthetic construct
QHHYGTPY

SEQ ID NO: 7456 - protein, 8 aa, synthetic construct
QHHYGSPY

SEQ ID NO: 7457 - protein, 8 aa, synthetic construct
QHHYGTPL

SEQ ID NO: 7458 - protein, 8 aa, synthetic construct
QHHYGTPW

SEQ ID NO: 7459 - protein, 10 aa, synthetic construct
NSSPRLKHRV

SEQ ID NO: 7460 - protein, 10 aa, synthetic construct
NSSPRLKHRV

SEQ ID NO: 7461 - protein, 10 aa, synthetic construct
NSSPRLKHRV

SEQ ID NO: 7462 - protein, 10 aa, synthetic construct
NSSPRLKHRV

SEQ ID NO: 7463 - protein, 9 aa, synthetic construct
WQGTHFPQT

SEQ ID NO: 7464 - protein, 9 aa, synthetic construct
WQGTHFPQT

SEQ ID NO: 7465 - protein, 11 aa, synthetic construct
QWEGDYFSAFD

SEQ ID NO: 7466 - protein, 11 aa, synthetic construct
QWEGDYFSAFD

SEQ ID NO: 7467 - protein, 11 aa, synthetic construct
QWEGDYFSAFD

SEQ ID NO: 7468 - protein, 11 aa, synthetic construct
QWEGDYFSAFD

SEQ ID NO: 7469 - protein, 9 aa, synthetic construct
GENTFESHP

SEQ ID NO: 7470 - protein, 9 aa, synthetic construct
GENTFESHP

SEQ ID NO: 7471 - protein, 9 aa, synthetic construct
GENTFESHP

SEQ ID NO: 7472 - protein, 9 aa, synthetic construct
GENTFESHP

SEQ ID NO: 7473 - protein, 11 aa, synthetic construct
SRGGHYGYALD

SEQ ID NO: 7474 - protein, 11 aa, synthetic construct
SRGGHYGYALD

SEQ ID NO: 7475 - protein, 10 aa, synthetic construct
RSDDYSWFAY

SEQ ID NO: 7476 - protein, 10 aa, synthetic construct
RSDDYSWFAY

SEQ ID NO: 7477 - protein, 8 aa, synthetic construct
WRGNSFDY

SEQ ID NO: 7478 - protein, 9 aa, synthetic construct
TWRGNSFDY

SEQ ID NO: 7479 - protein, 12 aa, synthetic construct
SITTVVGCAMDY

SEQ ID NO: 7480 - protein, 12 aa, synthetic construct
SITTVVGCAMDY

SEQ ID NO: 7481 - protein, 12 aa, synthetic construct
SITTVVGCAMDY

SEQ ID NO: 7482 - protein, 12 aa, synthetic construct
SITTVVGCAMDY

SEQ ID NO: 7483 - protein, 10 aa, synthetic construct
YDWYFDVWGA

SEQ ID NO: 7484 - protein, 7 aa, synthetic construct
HDRGGLY

SEQ ID NO: 7485 - protein, 8 aa, synthetic construct
HTGDYFDY

SEQ ID NO: 7486 - protein, 8 aa, synthetic construct
HTGDYFDY

SEQ ID NO: 7487 - protein, 7 aa, synthetic construct
HDRGGLY

SEQ ID NO: 7488 - protein, 12 aa, synthetic construct
HVGYSYGRRFWY

SEQ ID NO: 7489 - protein, 8 aa, synthetic construct
HYYGSSDY

SEQ ID NO: 7490 - protein, 9 aa, synthetic construct
YDGSRAMDY

SEQ ID NO: 7491 - protein, 10 aa, synthetic construct
SRDSSFYYVY

SEQ ID NO: 7492 - protein, 10 aa, synthetic construct
SRDSSFYYVY

SEQ ID NO: 7493 - protein, 9 aa, synthetic construct
SRQYSAYFD

SEQ ID NO: 7494 - protein, 8 aa, synthetic construct
ARWTSGLD

SEQ ID NO: 7495 - protein, 10 aa, synthetic construct
ARGRYSYRYW

SEQ ID NO: 7496 - protein, 10 aa, synthetic construct
ARGRYSYRYW

SEQ ID NO: 7497 - protein, 10 aa, synthetic construct
ARLGYPTTTL

SEQ ID NO: 7498 - protein, 10 aa, synthetic construct
ARLGYPTTTL

SEQ ID NO: 7499 - protein, 10 aa, synthetic construct
ATSGSSVLYF

SEQ ID NO: 7500 - protein, 10 aa, synthetic construct
AREGTYYAMD

SEQ ID NO: 7501 - protein, 10 aa, synthetic construct
ARAAWGSCYD

SEQ ID NO: 7502 - protein, 10 aa, synthetic construct
AREYDILTGY

SEQ ID NO: 7503 - protein, 11 aa, synthetic construct
ARDYGGIYYFD

SEQ ID NO: 7504 - protein, 10 aa, synthetic construct
ARAAWGSCYD

SEQ ID NO: 7505 - protein, 10 aa, synthetic construct
AREYDILTGY

SEQ ID NO: 7506 - protein, 9 aa, synthetic construct
AKGGYTFDY

SEQ ID NO: 7507 - protein, 11 aa, synthetic construct
ARIGPIKYPTA

SEQ ID NO: 7508 - protein, 11 aa, synthetic construct
ARIGPIKYPTA

SEQ ID NO: 7509 - protein, 8 aa, synthetic construct
TRSLNMAY

SEQ ID NO: 7510 - protein, 8 aa, synthetic construct
TRSLNMAY

SEQ ID NO: 7511 - protein, 10 aa, synthetic construct
ARDYGYVLDY

SEQ ID NO: 7512 - protein, 10 aa, synthetic construct
ARDYGYVLDY

SEQ ID NO: 7513 - protein, 10 aa, synthetic construct
ARDYGFVLDY

SEQ ID NO: 7514 - protein, 12 aa, synthetic construct
ARRSPLGSWIYY

SEQ ID NO: 7515 - protein, 12 aa, synthetic construct
ARRSPLGSWIYY

SEQ ID NO: 7516 - protein, 9 aa, synthetic construct
TRRVPIRLD

SEQ ID NO: 7517 - protein, 9 aa, synthetic construct
TRRVPIRLD

SEQ ID NO: 7518 - protein, 9 aa, synthetic construct
TRRVPIRLD

SEQ ID NO: 7519 - protein, 9 aa, synthetic construct
TRRVPIRLD

SEQ ID NO: 7520 - protein, 9 aa, synthetic construct
TRRVPIRLD

SEQ ID NO: 7521 - protein, 9 aa, synthetic construct
TRRVPIRLD

SEQ ID NO: 7522 - protein, 9 aa, synthetic construct
TRRVPIRLD

SEQ ID NO: 7523 - protein, 10 aa, synthetic construct
TRRVPIRLDY

SEQ ID NO: 7524 - protein, 10 aa, synthetic construct
TRRVPIRLDY

SEQ ID NO: 7525 - protein, 9 aa, synthetic construct
ARNLYLFGQ

SEQ ID NO: 7526 - protein, 9 aa, synthetic construct
ARNLYLWGQ

SEQ ID NO: 7527 - protein, 9 aa, synthetic construct
ARNLYLFGQ

SEQ ID NO: 7528 - protein, 9 aa, synthetic construct
ARNLYLWGQ

SEQ ID NO: 7529 - protein, 9 aa, synthetic construct
ARNLYLFGQ

SEQ ID NO: 7530 - protein, 9 aa, synthetic construct
ARNLYLWGQ

SEQ ID NO: 7531 - protein, 9 aa, synthetic construct
ARNLYLWGQ

SEQ ID NO: 7532 - protein, 9 aa, synthetic construct
TRRVPVYFD

SEQ ID NO: 7533 - protein, 6 aa, synthetic construct
ARNLYL

SEQ ID NO: 7534 - protein, 10 aa, synthetic construct
TRRVPIRLDY

SEQ ID NO: 7535 - protein, 10 aa, synthetic construct
TRRVPIRLDY

SEQ ID NO: 7536 - protein, 10 aa, synthetic construct
TRRVPIRLDY

SEQ ID NO: 7537 - protein, 10 aa, synthetic construct
AKGDLGDFDY

SEQ ID NO: 7538 - protein, 12 aa, synthetic construct
ARGSDYDGDFAY

SEQ ID NO: 7539 - protein, 5 aa, synthetic construct
SRMDF

SEQ ID NO: 7540 - protein, 7 aa, synthetic construct
VTTYGDY

SEQ ID NO: 7541 - protein, 7 aa, synthetic construct
VTTYGDY

SEQ ID NO: 7542 - protein, 7 aa, synthetic construct
VTTYGDY

SEQ ID NO: 7543 - protein, 7 aa, synthetic construct
VTTYGDY

SEQ ID NO: 7544 - protein, 13 aa, synthetic construct
ARHDGAVAGLFDY

SEQ ID NO: 7545 - protein, 13 aa, synthetic construct
ARHDGAVAGLFDY

SEQ ID NO: 7546 - protein, 15 aa, synthetic construct
ARAGIVVVPGPETFY

SEQ ID NO: 7547 - protein, 15 aa, synthetic construct
ARAGIVVVPGPETFY

SEQ ID NO: 7548 - protein, 15 aa, synthetic construct
ARAGIVVVPGPETFY

SEQ ID NO: 7549 - protein, 15 aa, synthetic construct
ARAGIVVVPGPETFY

SEQ ID NO: 7550 - protein, 15 aa, synthetic construct
ARAGIVVVPGPDTFY

SEQ ID NO: 7551 - protein, 14 aa, synthetic construct
ARAGIVVVPGPDTY

SEQ ID NO: 7552 - protein, 14 aa, synthetic construct
ARAGIVVVPGPDTY

SEQ ID NO: 7553 - protein, 15 aa, synthetic construct
ARAGIVVVPGPETFY

SEQ ID NO: 7554 - protein, 10 aa, synthetic construct
TRRVPIRLDY

SEQ ID NO: 7555 - protein, 10 aa, synthetic construct
TRRVPIRLDY

SEQ ID NO: 7556 - protein, 10 aa, synthetic construct
TRRVPIRLDY

SEQ ID NO: 7557 - protein, 10 aa, synthetic construct
TRRVPVYFDY

SEQ ID NO: 7558 - protein, 10 aa, synthetic construct
TRRVPIRLDY

SEQ ID NO: 7559 - protein, 10 aa, synthetic construct
ARDYGYVLDY

SEQ ID NO: 7560 - protein, 10 aa, synthetic construct
ARDYGYVLDY

SEQ ID NO: 7561 - protein, 10 aa, synthetic construct
ARDYGFVLDY

SEQ ID NO: 7562 - protein, 10 aa, synthetic construct
ARDYGFVLDY

SEQ ID NO: 7563 - protein, 10 aa, synthetic construct
ARDYGFVLDY

SEQ ID NO: 7564 - protein, 10 aa, synthetic construct
ARDFGYVLDY

SEQ ID NO: 7565 - protein, 10 aa, synthetic construct
ARDYGFVFDY

SEQ ID NO: 7566 - protein, 10 aa, synthetic construct
ARDYGFVLDY

SEQ ID NO: 7567 - protein, 10 aa, synthetic construct
ARDYGYVFDY

SEQ ID NO: 7568 - protein, 10 aa, synthetic construct
ARGLLQNNFY

SEQ ID NO: 7569 - protein, 10 aa, synthetic construct
ARGLLQNNFY

SEQ ID NO: 7570 - protein, 9 aa, synthetic construct
ARDHGYYDV

SEQ ID NO: 7571 - protein, 9 aa, synthetic construct
ARDHGYYDV

SEQ ID NO: 7572 - protein, 9 aa, synthetic construct
ARDHGYYDL

SEQ ID NO: 7573 - protein, 9 aa, synthetic construct
ARDHGYYDL

SEQ ID NO: 7574 - protein, 9 aa, synthetic construct
AREHGYYDV

SEQ ID NO: 7575 - protein, 10 aa, synthetic construct
DSSGYDAVDY

SEQ ID NO: 7576 - protein, 10 aa, synthetic construct
DSSGYDAVDY

SEQ ID NO: 7577 - protein, 10 aa, synthetic construct
DSSGYDAVDY

SEQ ID NO: 7578 - protein, 10 aa, synthetic construct
DSSGYDAVDY

SEQ ID NO: 7579 - protein, 8 aa, synthetic construct
WRNNAFDY

SEQ ID NO: 7580 - protein, 8 aa, synthetic construct
WRNNAFDY

SEQ ID NO: 7581 - protein, 8 aa, synthetic construct
WRNNAFDY

SEQ ID NO: 7582 - protein, 8 aa, synthetic construct
WRNNAFDY

SEQ ID NO: 7583 - protein, 7 aa, synthetic construct
PGLLWDA

SEQ ID NO: 7584 - protein, 7 aa, synthetic construct
PGLLWDA

SEQ ID NO: 7585 - protein, 7 aa, synthetic construct
PGLLWDA

SEQ ID NO: 7586 - protein, 7 aa, synthetic construct
PGLLWDA

SEQ ID NO: 7587 - protein, 7 aa, synthetic construct
PGLLWDA

SEQ ID NO: 7588 - protein, 14 aa, synthetic construct
AADRKSVMSIRPDY

SEQ ID NO: 7589 - protein, 14 aa, synthetic construct
AADRKSVMSIRPDY

SEQ ID NO: 7590 - protein, 13 aa, synthetic construct
ADRKSVMSIRPDY

SEQ ID NO: 7591 - protein, 14 aa, synthetic construct
AADRKSVMSIRPDY

SEQ ID NO: 7592 - protein, 14 aa, synthetic construct
AADRKSVMSIRPDY

SEQ ID NO: 7593 - protein, 14 aa, synthetic construct
AADRKSVMSIRPDY

SEQ ID NO: 7594 - protein, 14 aa, synthetic construct
AADRKSVMSIRPDY

SEQ ID NO: 7595 - protein, 14 aa, synthetic construct
AADRKSVMSIRPDY

SEQ ID NO: 7596 - protein, 14 aa, synthetic construct
AADRKSVMSIRPDY

SEQ ID NO: 7597 - protein, 14 aa, synthetic construct
AADRKSVMSIRPDY

SEQ ID NO: 7598 - protein, 14 aa, synthetic construct
AANPTYGSDWNAEN

SEQ ID NO: 7599 - protein, 14 aa, synthetic construct
AANPTYGSDWNAEN

SEQ ID NO: 7600 - protein, 14 aa, synthetic construct
AANPTYGSDWNAEN

SEQ ID NO: 7601 - protein, 14 aa, synthetic construct
AANPTYGSDWNAEN

SEQ ID NO: 7602 - protein, 12 aa, synthetic construct
GRSFGVAAITTG

SEQ ID NO: 7603 - protein, 16 aa, synthetic construct
AAAPGCLLSALRSADY

SEQ ID NO: 7604 - protein, 16 aa, synthetic construct
AAAPGCLLSALRSADY

SEQ ID NO: 7605 - protein, 16 aa, synthetic construct
AAAPGCLLSALRSADY

SEQ ID NO: 7606 - protein, 16 aa, synthetic construct
AAAPGCLLSALRSADY

SEQ ID NO: 7607 - protein, 16 aa, synthetic construct
AAAPGCLLSALRSADY

SEQ ID NO: 7608 - protein, 16 aa, synthetic construct
AAAPGCLLSALRSADY

SEQ ID NO: 7609 - protein, 16 aa, synthetic construct
AAAPGCLLSALRSADY

SEQ ID NO: 7610 - protein, 16 aa, synthetic construct
AAAPGCLLSALRSADY

SEQ ID NO: 7611 - protein, 18 aa, synthetic construct
AGKTTYPGYGCGLGRSAY

SEQ ID NO: 7612 - protein, 18 aa, synthetic construct
AGKTTYPGYGCGLGRSAY

SEQ ID NO: 7613 - protein, 18 aa, synthetic construct
AGKTTYPGYGCGLGRSAY

SEQ ID NO: 7614 - protein, 18 aa, synthetic construct
AGKTTYPGYGCGLGRSAY

SEQ ID NO: 7615 - protein, 19 aa, synthetic construct
AARSTYSGYACVYSEVNGY

SEQ ID NO: 7616 - protein, 9 aa, synthetic construct
ATDRRPGTS

SEQ ID NO: 7617 - protein, 9 aa, synthetic construct
ATDRRPGTS

SEQ ID NO: 7618 - protein, 9 aa, synthetic construct
ATDRRPGTT

SEQ ID NO: 7619 - protein, 9 aa, synthetic construct
ATDRRPGTS

SEQ ID NO: 7620 - protein, 9 aa, synthetic construct
ATDRRPGTT

SEQ ID NO: 7621 - protein, 9 aa, synthetic construct
ATDRRPGTT

SEQ ID NO: 7622 - protein, 9 aa, synthetic construct
AVGWLSGGS

SEQ ID NO: 7623 - protein, 9 aa, synthetic construct
AVGWLSGGS

SEQ ID NO: 7624 - protein, 9 aa, synthetic construct
AVGWLSGGS

SEQ ID NO: 7625 - protein, 9 aa, synthetic construct
AVGYLSGGS

SEQ ID NO: 7626 - protein, 9 aa, synthetic construct
AVGYLSGGS

SEQ ID NO: 7627 - protein, 9 aa, synthetic construct
AVGYLSGGS

SEQ ID NO: 7628 - protein, 9 aa, synthetic construct
AVGYLSGGS

SEQ ID NO: 7629 - protein, 10 aa, synthetic construct
AADTRRYTCP

SEQ ID NO: 7630 - protein, 10 aa, synthetic construct
AADTRRYTCP

SEQ ID NO: 7631 - protein, 10 aa, synthetic construct
AMDSRRVTCP

SEQ ID NO: 7632 - protein, 10 aa, synthetic construct
AADTRRVTCP

SEQ ID NO: 7633 - protein, 11 aa, synthetic construct
ASKLEYTSNDY

SEQ ID NO: 7634 - protein, 11 aa, synthetic construct
ASKLEYTSNDY

SEQ ID NO: 7635 - protein, 11 aa, synthetic construct
ASKLEYTSYDY

SEQ ID NO: 7636 - protein, 11 aa, synthetic construct
ASKLEYTSNDY

SEQ ID NO: 7637 - protein, 11 aa, synthetic construct
ASKLEYTSNDY

SEQ ID NO: 7638 - protein, 11 aa, synthetic construct
AADRKSVMSIR

SEQ ID NO: 7639 - protein, 12 aa, synthetic construct
AADRKSVMSIRP

SEQ ID NO: 7640 - protein, 12 aa, synthetic construct
AADRKSVMAIRP

SEQ ID NO: 7641 - protein, 12 aa, synthetic construct
AAERKSVMSIRP

SEQ ID NO: 7642 - protein, 12 aa, synthetic construct
AAERKSVMAIRP

SEQ ID NO: 7643 - protein, 12 aa, synthetic construct
AAERKSVMAIRP

SEQ ID NO: 7644 - protein, 12 aa, synthetic construct
AADRKSVMAIRP

SEQ ID NO: 7645 - protein, 12 aa, synthetic construct
AAERKSVMAIRP

SEQ ID NO: 7646 - protein, 12 aa, synthetic construct
AAERKSVMAIRP

SEQ ID NO: 7647 - protein, 12 aa, synthetic construct
AARRIDAADYDS

SEQ ID NO: 7648 - protein, 12 aa, synthetic construct
AARRIDASDFDS

SEQ ID NO: 7649 - protein, 11 aa, synthetic construct
GRSFGVAAVTT

SEQ ID NO: 7650 - protein, 11 aa, synthetic construct
GRSYGVAAVTT

SEQ ID NO: 7651 - protein, 11 aa, synthetic construct
GRSFGIAAVTT

SEQ ID NO: 7652 - protein, 11 aa, synthetic construct
GRSFGVAAVTT

SEQ ID NO: 7653 - protein, 11 aa, synthetic construct
GRSFGVAAVTT

SEQ ID NO: 7654 - protein, 11 aa, synthetic construct
GRSFGVAAITT

SEQ ID NO: 7655 - protein, 11 aa, synthetic construct
GRSFGVAAITT

SEQ ID NO: 7656 - protein, 13 aa, synthetic construct
AAAPGCLLSALRS

SEQ ID NO: 7657 - protein, 13 aa, synthetic construct
AAAPGCLLSALRS

SEQ ID NO: 7658 - protein, 13 aa, synthetic construct
AAAPGCLLSSLRS

SEQ ID NO: 7659 - protein, 13 aa, synthetic construct
AASPGCLLSALRS

SEQ ID NO: 7660 - protein, 13 aa, synthetic construct
AASPGCLLSALRS

SEQ ID NO: 7661 - protein, 13 aa, synthetic construct
AVGYLSGGSWDVP

SEQ ID NO: 7662 - protein, 13 aa, synthetic construct
AVGYLSGGSWDVP

SEQ ID NO: 7663 - protein, 13 aa, synthetic construct
AVGYLSGGSWDVP

SEQ ID NO: 7664 - protein, 13 aa, synthetic construct
AVGYLSGGSWEVP

SEQ ID NO: 7665 - protein, 9 aa, synthetic construct
AANPTYSSD

SEQ ID NO: 7666 - protein, 9 aa, synthetic construct
AANPTYGSD

SEQ ID NO: 7667 - protein, 9 aa, synthetic construct
AANPTYSSD

SEQ ID NO: 7668 - protein, 9 aa, synthetic construct
AANPTYGSD

SEQ ID NO: 7669 - protein, 12 aa, synthetic construct
GVSYGSRWLGDY

SEQ ID NO: 7670 - protein, 12 aa, synthetic construct
GVSFGSRWLGDY

SEQ ID NO: 7671 - protein, 12 aa, synthetic construct
AKDEDGGSLLGH

SEQ ID NO: 7672 - protein, 13 aa, synthetic construct
AKEGTGANSSLAD

SEQ ID NO: 7673 - protein, 11 aa, synthetic construct
AKDGGETLVDS

SEQ ID NO: 7674 - protein, 10 aa, synthetic construct
TREDSSNWRS

SEQ ID NO: 7675 - protein, 10 aa, synthetic construct
TREDSSNWRS

SEQ ID NO: 7676 - protein, 11 aa, synthetic construct
TREDSSNWRSR

SEQ ID NO: 7677 - protein, 12 aa, synthetic construct
TREDSSNWRSRG

SEQ ID NO: 7678 - protein, 12 aa, synthetic construct
TREDSSNWRSRG

SEQ ID NO: 7679 - protein, 12 aa, synthetic construct
TREDSSNWRSRG

SEQ ID NO: 7680 - protein, 10 aa, synthetic construct
QLRWDVWPIA

SEQ ID NO: 7681 - protein, 10 aa, synthetic construct
QLRWDVWPIA

SEQ ID NO: 7682 - protein, 10 aa, synthetic construct
QLRWEVWPIA

SEQ ID NO: 7683 - protein, 10 aa, synthetic construct
QLRWDVWPVA

SEQ ID NO: 7684 - protein, 10 aa, synthetic construct
QIRWDVWPIA

SEQ ID NO: 7685 - protein, 12 aa, synthetic construct
TTEPQLGLCARD

SEQ ID NO: 7686 - protein, 12 aa, synthetic construct
TTDPQLGLCARD

SEQ ID NO: 7687 - protein, 12 aa, synthetic construct
AAAYDLRSCGGT

SEQ ID NO: 7688 - protein, 13 aa, synthetic construct
CAASYDLRSCGGT

SEQ ID NO: 7689 - protein, 12 aa, synthetic construct
AAAYDLRSCGGT

SEQ ID NO: 7690 - protein, 12 aa, synthetic construct
AAAYDLRSCGGT

SEQ ID NO: 7691 - protein, 12 aa, synthetic construct
AAAYDLRSCGGS

SEQ ID NO: 7692 - protein, 12 aa, synthetic construct
AAAYDLRSCGGT

SEQ ID NO: 7693 - protein, 17 aa, synthetic construct
IAAPSFVVALIPSRIRS

SEQ ID NO: 7694 - protein, 16 aa, synthetic construct
IAAPSFVVALIPSRIR

SEQ ID NO: 7695 - protein, 10 aa, synthetic construct
VYSEVNGYNY

SEQ ID NO: 7696 - protein, 10 aa, synthetic construct
VYSEVNGYNY

SEQ ID NO: 7697 - protein, 10 aa, synthetic construct
VYSEVNGYNY

SEQ ID NO: 7698 - protein, 9 aa, synthetic construct
GLGRSAYNY

SEQ ID NO: 7699 - protein, 9 aa, synthetic construct
GLGRSAYNY

SEQ ID NO: 7700 - protein, 9 aa, synthetic construct
GLGRSAYNY

SEQ ID NO: 7701 - protein, 9 aa, synthetic construct
DANSRGNYY

SEQ ID NO: 7702 - protein, 9 aa, synthetic construct
DANSRGNYY

SEQ ID NO: 7703 - protein, 9 aa, synthetic construct
DANSRGNYY

SEQ ID NO: 7704 - protein, 9 aa, synthetic construct
DANSRGNYY

SEQ ID NO: 7705 - protein, 9 aa, synthetic construct
DANSRGNYY

SEQ ID NO: 7706 - protein, 10 aa, synthetic construct
ATELRGSDYY

SEQ ID NO: 7707 - protein, 10 aa, synthetic construct
ATELRGSDYY

SEQ ID NO: 7708 - DNA, 1476 bp, synthetic construct
  source 1..1476: mol_type = other DNA
atggccttaccagtgaccgccttgctcctgccgctggccttgctgctccacgccgccaggccggacatccagatgacacagagccctagcagcctgtctgccagcgtgggagacagagtgaccatcacatgcaaggccagcgaccacatcaacaactggctggcctggtatcagcagaagcctggacaggcccctaagctgctgatctacggcgctaccacactggaaacaggcgtgcccagcagattttctggcagcggctctggcaccgactacaccctgacaatatccagcctccagcctgaggacttcgccacctactactgtcagcagagctggaacaccccttggacattcggccagggcaccaagctggaaatcaagagactcgagggaggctctagaagcgaagatcggtatggcggaagcttcgaacaagttcagcttcaacagcctggcgctgagctggtcaaacctggcgcttctgtgaagatgagctgcaaagccagcggctacgccttcagcagctactggatcaactggatgaagcagaaacccggccagggactcgaatggatcggccaaatctatcccggcgacggcgacaccaactacaacggcaagttcaagggcagagccacactgaccgccgatacctctagcagcacagcctacatgcagctgagcagcctgaccagcgaagatagcgccgtgtacttctgtgcccggtccatcacaacagtcgtgggctgcgctatggactattggggccagggaacaagcgtgaccgtgtctagtacgcgtaccacgacgccagcgccgcgaccaccaacaccggcgcccaccatcgcgtcgcagcccctgtccctgcgcccagaggcgtgccggccagcggcggggggcgcagtgcacacgagggggctggacttcgcctgtgacatctacatctgggcgcccttggccgggacttgtggggtccttctcctgtcactggttatcaccctttactgcaaacggggcagaaagaaactcctgtatatattcaaacaaccatttatgagaccagtacaaactactcaagaggaagatggctgtagctgccgatttccagaagaagaagaaggaggatgtgaactgagagtgaagttcagcaggagcgcagacgcccccgcgtaccagcagggccagaaccagctctataacgagctgaatctaggacgaagagaggagtacgatgttttggacaagagacgtggccgggaccctgagatggggggaaagccgagaaggaagaaccctcaggaaggcctgtacaatgaactgcagaaagataagatggcggaggcctacagtgagattgggatgaaaggcgagcgccggaggggcaaggggcacgatggcctttaccagggtctcagtacagccaccaaggacacctacgacgcccttcacatgcaggccctgccccctcgctaa

SEQ ID NO: 7709 - DNA, 1479 bp, synthetic construct
  source 1..1479: mol_type = other DNA
atggccttaccagtgaccgccttgctcctgccgctggccttgctgctccacgccgccaggccggacatccagatgacacagagccctagcagcctgtctgccagcgtgggagacagagtgaccatcacatgcaaggccagcgaccacatcaacaactggctggcctggtatcagcagaagcctggacaggcccctaagctgctgatctacggcgctaccacactggaaacaggcgtgcccagcagattttctggcagcggctctggcaccgactacaccctgacaatatccagcctccagcctgaggacttcgccacctactactgtcagcagagctggaacaccccttggacattcggccagggcaccaagctggaaatcaagagactcgagggaggctctagaagcgaagatcggtatcggggcggaagcttcgaacaagttcagcttcaacagcctggcgctgagctggtcaaacctggcgcttctgtgaagatgagctgcaaagccagcggctacgccttcagcagctactggatcaactggatgaagcagaaacccggccagggactcgaatggatcggccaaatctatcccggcgacggcgacaccaactacaacggcaagttcaagggcagagccacactgaccgccgatacctctagcagcacagcctacatgcagctgagcagcctgaccagcgaagatagcgccgtgtacttctgtgcccggtccatcacaacagtcgtgggctgcgctatggactattggggccagggaacaagcgtgaccgtgtctagtacgcgtaccacgacgccagcgccgcgaccaccaacaccggcgcccaccatcgcgtcgcagcccctgtccctgcgcccagaggcgtgccggccagcggcggggggcgcagtgcacacgagggggctggacttcgcctgtgacatctacatctgggcgcccttggccgggacttgtggggtccttctcctgtcactggttatcaccctttactgcaaacggggcagaaagaaactcctgtatatattcaaacaaccatttatgagaccagtacaaactactcaagaggaagatggctgtagctgccgatttccagaagaagaagaaggaggatgtgaactgagagtgaagttcagcaggagcgcagacgcccccgcgtaccagcagggccagaaccagctctataacgagctgaatctaggacgaagagaggagtacgatgttttggacaagagacgtggccgggaccctgagatggggggaaagccgagaaggaagaaccctcaggaaggcctgtacaatgaactgcagaaagataagatggcggaggcctacagtgagattgggatgaaaggcgagcgccggaggggcaaggggcacgatggcctttaccagggtctcagtacagccaccaaggacacctacgacgcccttcacatgcaggccctgccccctcgctaa

SEQ ID NO: 7710 - DNA, 1482 bp, synthetic construct
  source 1..1482: mol_type = other DNA
atggccttaccagtgaccgccttgctcctgccgctggccttgctgctccacgccgccaggccggacatccagatgacacagagccctagcagcctgtctgccagcgtgggagacagagtgaccatcacatgcaaggccagcgaccacatcaacaactggctggcctggtatcagcagaagcctggacaggcccctaagctgctgatctacggcgctaccacactggaaacaggcgtgcccagcagattttctggcagcggctctggcaccgactacaccctgacaatatccagcctccagcctgaggacttcgccacctactactgtcagcagagctggaacaccccttggacattcggccagggcaccaagctggaaatcaagagactcgagggaggctctcgcagcgaggaccgctaccgcaacggcggaagcttcgaacaagttcagcttcaacagcctggcgctgagctggtcaaacctggcgcttctgtgaagatgagctgcaaagccagcggctacgccttcagcagctactggatcaactggatgaagcagaaacccggccagggactcgaatggatcggccaaatctatcccggcgacggcgacaccaactacaacggcaagttcaagggcagagccacactgaccgccgatacctctagcagcacagcctacatgcagctgagcagcctgaccagcgaagatagcgccgtgtacttctgtgcccggtccatcacaacagtcgtgggctgcgctatggactattggggccagggaacaagcgtgaccgtgtctagtacgcgtaccacgacgccagcgccgcgaccaccaacaccggcgcccaccatcgcgtcgcagcccctgtccctgcgcccagaggcgtgccggccagcggcggggggcgcagtgcacacgagggggctggacttcgcctgtgacatctacatctgggcgcccttggccgggacttgtggggtccttctcctgtcactggttatcaccctttactgcaaacggggcagaaagaaactcctgtatatattcaaacaaccatttatgagaccagtacaaactactcaagaggaagatggctgtagctgccgatttccagaagaagaagaaggaggatgtgaactgagagtgaagttcagcaggagcgcagacgcccccgcgtaccagcagggccagaaccagctctataacgagctgaatctaggacgaagagaggagtacgatgttttggacaagagacgtggccgggaccctgagatggggggaaagccgagaaggaagaaccctcaggaaggcctgtacaatgaactgcagaaagataagatggcggaggcctacagtgagattgggatgaaaggcgagcgccggaggggcaaggggcacgatggcctttaccagggtctcagtacagccaccaaggacacctacgacgcccttcacatgcaggccctgccccctcgctaa

SEQ ID NO: 7711 - DNA, 1485 bp, synthetic construct
  source 1..1485: mol_type = other DNA
atggccttaccagtgaccgccttgctcctgccgctggccttgctgctccacgccgccaggccggacatccagatgacacagagccctagcagcctgtctgccagcgtgggagacagagtgaccatcacatgcaaggccagcgaccacatcaacaactggctggcctggtatcagcagaagcctggacaggcccctaagctgctgatctacggcgctaccacactggaaacaggcgtgcccagcagattttctggcagcggctctggcaccgactacaccctgacaatatccagcctccagcctgaggacttcgccacctactactgtcagcagagctggaacaccccttggacattcggccagggcaccaagctggaaatcaagagactcgagggaggctctcgcagcgaggaccgctaccgcaaccccggcggaagcttcgaacaagttcagcttcaacagcctggcgctgagctggtcaaacctggcgcttctgtgaagatgagctgcaaagccagcggctacgccttcagcagctactggatcaactggatgaagcagaaacccggccagggactcgaatggatcggccaaatctatcccggcgacggcgacaccaactacaacggcaagttcaagggcagagccacactgaccgccgatacctctagcagcacagcctacatgcagctgagcagcctgaccagcgaagatagcgccgtgtacttctgtgcccggtccatcacaacagtcgtgggctgcgctatggactattggggccagggaacaagcgtgaccgtgtctagtacgcgtaccacgacgccagcgccgcgaccaccaacaccggcgcccaccatcgcgtcgcagcccctgtccctgcgcccagaggcgtgccggccagcggcggggggcgcagtgcacacgagggggctggacttcgcctgtgacatctacatctgggcgcccttggccgggacttgtggggtccttctcctgtcactggttatcaccctttactgcaaacggggcagaaagaaactcctgtatatattcaaacaaccatttatgagaccagtacaaactactcaagaggaagatggctgtagctgccgatttccagaagaagaagaaggaggatgtgaactgagagtgaagttcagcaggagcgcagacgcccccgcgtaccagcagggccagaaccagctctataacgagctgaatctaggacgaagagaggagtacgatgttttggacaagagacgtggccgggaccctgagatggggggaaagccgagaaggaagaaccctcaggaaggcctgtacaatgaactgcagaaagataagatggcggaggcctacagtgagattgggatgaaaggcgagcgccggaggggcaaggggcacgatggcctttaccagggtctcagtacagccaccaaggacacctacgacgcccttcacatgcaggccctgccccctcgctaa

SEQ ID NO: 7712 - DNA, 1488 bp, synthetic construct
  source 1..1488: mol_type = other DNA
atggccttaccagtgaccgccttgctcctgccgctggccttgctgctccacgccgccaggccggacatccagatgacacagagccctagcagcctgtctgccagcgtgggagacagagtgaccatcacatgcaaggccagcgaccacatcaacaactggctggcctggtatcagcagaagcctggacaggcccctaagctgctgatctacggcgctaccacactggaaacaggcgtgcccagcagattttctggcagcggctctggcaccgactacaccctgacaatatccagcctccagcctgaggacttcgccacctactactgtcagcagagctggaacaccccttggacattcggccagggcaccaagctggaaatcaagagactcgagggaggctctcgcagcgaggaccgctaccgcaaccccaagggcggaagcttcgaacaagttcagcttcaacagcctggcgctgagctggtcaaacctggcgcttctgtgaagatgagctgcaaagccagcggctacgccttcagcagctactggatcaactggatgaagcagaaacccggccagggactcgaatggatcggccaaatctatcccggcgacggcgacaccaactacaacggcaagttcaagggcagagccacactgaccgccgatacctctagcagcacagcctacatgcagctgagcagcctgaccagcgaagatagcgccgtgtacttctgtgcccggtccatcacaacagtcgtgggctgcgctatggactattggggccagggaacaagcgtgaccgtgtctagtacgcgtaccacgacgccagcgccgcgaccaccaacaccggcgcccaccatcgcgtcgcagcccctgtccctgcgcccagaggcgtgccggccagcggcggggggcgcagtgcacacgagggggctggacttcgcctgtgacatctacatctgggcgcccttggccgggacttgtggggtccttctcctgtcactggttatcaccctttactgcaaacggggcagaaagaaactcctgtatatattcaaacaaccatttatgagaccagtacaaactactcaagaggaagatggctgtagctgccgatttccagaagaagaagaaggaggatgtgaactgagagtgaagttcagcaggagcgcagacgcccccgcgtaccagcagggccagaaccagctctataacgagctgaatctaggacgaagagaggagtacgatgttttggacaagagacgtggccgggaccctgagatggggggaaagccgagaaggaagaaccctcaggaaggcctgtacaatgaactgcagaaagataagatggcggaggcctacagtgagattgggatgaaaggcgagcgccggaggggcaaggggcacgatggcctttaccagggtctcagtacagccaccaaggacacctacgacgcccttcacatgcaggccctgccccctcgctaa

SEQ ID NO: 7713 - DNA, 1491 bp, synthetic construct
  source 1..1491: mol_type = other DNA
atggccttaccagtgaccgccttgctcctgccgctggccttgctgctccacgccgccaggccggacatccagatgacacagagccctagcagcctgtctgccagcgtgggagacagagtgaccatcacatgcaaggccagcgaccacatcaacaactggctggcctggtatcagcagaagcctggacaggcccctaagctgctgatctacggcgctaccacactggaaacaggcgtgcccagcagattttctggcagcggctctggcaccgactacaccctgacaatatccagcctccagcctgaggacttcgccacctactactgtcagcagagctggaacaccccttggacattcggccagggcaccaagctggaaatcaagagactcgagggaggctctcgcagcgaggaccgctaccgcaaccccaagggcggcggaagcttcgaacaagttcagcttcaacagcctggcgctgagctggtcaaacctggcgcttctgtgaagatgagctgcaaagccagcggctacgccttcagcagctactggatcaactggatgaagcagaaacccggccagggactcgaatggatcggccaaatctatcccggcgacggcgacaccaactacaacggcaagttcaagggcagagccacactgaccgccgatacctctagcagcacagcctacatgcagctgagcagcctgaccagcgaagatagcgccgtgtacttctgtgcccggtccatcacaacagtcgtgggctgcgctatggactattggggccagggaacaagcgtgaccgtgtctagtacgcgtaccacgacgccagcgccgcgaccaccaacaccggcgcccaccatcgcgtcgcagcccctgtccctgcgcccagaggcgtgccggccagcggcggggggcgcagtgcacacgagggggctggacttcgcctgtgacatctacatctgggcgcccttggccgggacttgtggggtccttctcctgtcactggttatcaccctttactgcaaacggggcagaaagaaactcctgtatatattcaaacaaccatttatgagaccagtacaaactactcaagaggaagatggctgtagctgccgatttccagaagaagaagaaggaggatgtgaactgagagtgaagttcagcaggagcgcagacgcccccgcgtaccagcagggccagaaccagctctataacgagctgaatctaggacgaagagaggagtacgatgttttggacaagagacgtggccgggaccctgagatggggggaaagccgagaaggaagaaccctcaggaaggcctgtacaatgaactgcagaaagataagatggcggaggcctacagtgagattgggatgaaaggcgagcgccggaggggcaaggggcacgatggcctttaccagggtctcagtacagccaccaaggacacctacgacgcccttcacatgcaggccctgccccctcgctaa

SEQ ID NO: 7714 - DNA, 1494 bp, synthetic construct
  source 1..1494: mol_type = other DNA
atggccttaccagtgaccgccttgctcctgccgctggccttgctgctccacgccgccaggccggacatccagatgacacagagccctagcagcctgtctgccagcgtgggagacagagtgaccatcacatgcaaggccagcgaccacatcaacaactggctggcctggtatcagcagaagcctggacaggcccctaagctgctgatctacggcgctaccacactggaaacaggcgtgcccagcagattttctggcagcggctctggcaccgactacaccctgacaatatccagcctccagcctgaggacttcgccacctactactgtcagcagagctggaacaccccttggacattcggccagggcaccaagctggaaatcaagagactcgagggaggctctcgcagcgaggaccgctaccgcaaccccaagggcagcggcggaagcttcgaacaagttcagcttcaacagcctggcgctgagctggtcaaacctggcgcttctgtgaagatgagctgcaaagccagcggctacgccttcagcagctactggatcaactggatgaagcagaaacccggccagggactcgaatggatcggccaaatctatcccggcgacggcgacaccaactacaacggcaagttcaagggcagagccacactgaccgccgatacctctagcagcacagcctacatgcagctgagcagcctgaccagcgaagatagcgccgtgtacttctgtgcccggtccatcacaacagtcgtgggctgcgctatggactattggggccagggaacaagcgtgaccgtgtctagtacgcgtaccacgacgccagcgccgcgaccaccaacaccggcgcccaccatcgcgtcgcagcccctgtccctgcgcccagaggcgtgccggccagcggcggggggcgcagtgcacacgagggggctggacttcgcctgtgacatctacatctgggcgcccttggccgggacttgtggggtccttctcctgtcactggttatcaccctttactgcaaacggggcagaaagaaactcctgtatatattcaaacaaccatttatgagaccagtacaaactactcaagaggaagatggctgtagctgccgatttccagaagaagaagaaggaggatgtgaactgagagtgaagttcagcaggagcgcagacgcccccgcgtaccagcagggccagaaccagctctataacgagctgaatctaggacgaagagaggagtacgatgttttggacaagagacgtggccgggaccctgagatggggggaaagccgagaaggaagaaccctcaggaaggcctgtacaatgaactgcagaaagataagatggcggaggcctacagtgagattgggatgaaaggcgagcgccggaggggcaaggggcacgatggcctttaccagggtctcagtacagccaccaaggacacctacgacgcccttcacatgcaggccctgccccctcgctaa

SEQ ID NO: 7715 - DNA, 1497 bp, synthetic construct
  source 1..1497: mol_type = other DNA
atggccttaccagtgaccgccttgctcctgccgctggccttgctgctccacgccgccaggccggacatccagatgacacagagccctagcagcctgtctgccagcgtgggagacagagtgaccatcacatgcaaggccagcgaccacatcaacaactggctggcctggtatcagcagaagcctggacaggcccctaagctgctgatctacggcgctaccacactggaaacaggcgtgcccagcagattttctggcagcggctctggcaccgactacaccctgacaatatccagcctccagcctgaggacttcgccacctactactgtcagcagagctggaacaccccttggacattcggccagggcaccaagctggaaatcaagagactcgagggaggctctcgcagcgaggaccgctaccgcaaccccaagggcagcgccggcggaagcttcgaacaagttcagcttcaacagcctggcgctgagctggtcaaacctggcgcttctgtgaagatgagctgcaaagccagcggctacgccttcagcagctactggatcaactggatgaagcagaaacccggccagggactcgaatggatcggccaaatctatcccggcgacggcgacaccaactacaacggcaagttcaagggcagagccacactgaccgccgatacctctagcagcacagcctacatgcagctgagcagcctgaccagcgaagatagcgccgtgtacttctgtgcccggtccatcacaacagtcgtgggctgcgctatggactattggggccagggaacaagcgtgaccgtgtctagtacgcgtaccacgacgccagcgccgcgaccaccaacaccggcgcccaccatcgcgtcgcagcccctgtccctgcgcccagaggcgtgccggccagcggcggggggcgcagtgcacacgagggggctggacttcgcctgtgacatctacatctgggcgcccttggccgggacttgtggggtccttctcctgtcactggttatcaccctttactgcaaacggggcagaaagaaactcctgtatatattcaaacaaccatttatgagaccagtacaaactactcaagaggaagatggctgtagctgccgatttccagaagaagaagaaggaggatgtgaactgagagtgaagttcagcaggagcgcagacgcccccgcgtaccagcagggccagaaccagctctataacgagctgaatctaggacgaagagaggagtacgatgttttggacaagagacgtggccgggaccctgagatggggggaaagccgagaaggaagaaccctcaggaaggcctgtacaatgaactgcagaaagataagatggcggaggcctacagtgagattgggatgaaaggcgagcgccggaggggcaaggggcacgatggcctttaccagggtctcagtacagccaccaaggacacctacgacgcccttcacatgcaggccctgccccctcgctaa

SEQ ID NO: 7716 - DNA, 1500 bp, synthetic construct
  source 1..1500: mol_type = other DNA
atggccttaccagtgaccgccttgctcctgccgctggccttgctgctccacgccgccaggccggacatccagatgacacagagccctagcagcctgtctgccagcgtgggagacagagtgaccatcacatgcaaggccagcgaccacatcaacaactggctggcctggtatcagcagaagcctggacaggcccctaagctgctgatctacggcgctaccacactggaaacaggcgtgcccagcagattttctggcagcggctctggcaccgactacaccctgacaatatccagcctccagcctgaggacttcgccacctactactgtcagcagagctggaacaccccttggacattcggccagggcaccaagctggaaatcaagagactcgagggaggctctcgcagcgaggaccgctaccgcaaccccaagggcagcgcctgcggcggaagcttcgaacaagttcagcttcaacagcctggcgctgagctggtcaaacctggcgcttctgtgaagatgagctgcaaagccagcggctacgccttcagcagctactggatcaactggatgaagcagaaacccggccagggactcgaatggatcggccaaatctatcccggcgacggcgacaccaactacaacggcaagttcaagggcagagccacactgaccgccgatacctctagcagcacagcctacatgcagctgagcagcctgaccagcgaagatagcgccgtgtacttctgtgcccggtccatcacaacagtcgtgggctgcgctatggactattggggccagggaacaagcgtgaccgtgtctagtacgcgtaccacgacgccagcgccgcgaccaccaacaccggcgcccaccatcgcgtcgcagcccctgtccctgcgcccagaggcgtgccggccagcggcggggggcgcagtgcacacgagggggctggacttcgcctgtgacatctacatctgggcgcccttggccgggacttgtggggtccttctcctgtcactggttatcaccctttactgcaaacggggcagaaagaaactcctgtatatattcaaacaaccatttatgagaccagtacaaactactcaagaggaagatggctgtagctgccgatttccagaagaagaagaaggaggatgtgaactgagagtgaagttcagcaggagcgcagacgcccccgcgtaccagcagggccagaaccagctctataacgagctgaatctaggacgaagagaggagtacgatgttttggacaagagacgtggccgggaccctgagatggggggaaagccgagaaggaagaaccctcaggaaggcctgtacaatgaactgcagaaagataagatggcggaggcctacagtgagattgggatgaaaggcgagcgccggaggggcaaggggcacgatggcctttaccagggtctcagtacagccaccaaggacacctacgacgcccttcacatgcaggccctgccccctcgctaa

SEQ ID NO: 7717 - DNA, 1503 bp, synthetic construct
  source 1..1503: mol_type = other DNA
atggccttaccagtgaccgccttgctcctgccgctggccttgctgctccacgccgccaggccggacatccagatgacacagagccctagcagcctgtctgccagcgtgggagacagagtgaccatcacatgcaaggccagcgaccacatcaacaactggctggcctggtatcagcagaagcctggacaggcccctaagctgctgatctacggcgctaccacactggaaacaggcgtgcccagcagattttctggcagcggctctggcaccgactacaccctgacaatatccagcctccagcctgaggacttcgccacctactactgtcagcagagctggaacaccccttggacattcggccagggcaccaagctggaaatcaagagactcgagggaggctctcgcagcgaggaccgctaccgcaaccccaagggcagcgcctgcaagggcggaagcttcgaacaagttcagcttcaacagcctggcgctgagctggtcaaacctggcgcttctgtgaagatgagctgcaaagccagcggctacgccttcagcagctactggatcaactggatgaagcagaaacccggccagggactcgaatggatcggccaaatctatcccggcgacggcgacaccaactacaacggcaagttcaagggcagagccacactgaccgccgatacctctagcagcacagcctacatgcagctgagcagcctgaccagcgaagatagcgccgtgtacttctgtgcccggtccatcacaacagtcgtgggctgcgctatggactattggggccagggaacaagcgtgaccgtgtctagtacgcgtaccacgacgccagcgccgcgaccaccaacaccggcgcccaccatcgcgtcgcagcccctgtccctgcgcccagaggcgtgccggccagcggcggggggcgcagtgcacacgagggggctggacttcgcctgtgacatctacatctgggcgcccttggccgggacttgtggggtccttctcctgtcactggttatcaccctttactgcaaacggggcagaaagaaactcctgtatatattcaaacaaccatttatgagaccagtacaaactactcaagaggaagatggctgtagctgccgatttccagaagaagaagaaggaggatgtgaactgagagtgaagttcagcaggagcgcagacgcccccgcgtaccagcagggccagaaccagctctataacgagctgaatctaggacgaagagaggagtacgatgttttggacaagagacgtggccgggaccctgagatggggggaaagccgagaaggaagaaccctcaggaaggcctgtacaatgaactgcagaaagataagatggcggaggcctacagtgagattgggatgaaaggcgagcgccggaggggcaaggggcacgatggcctttaccagggtctcagtacagccaccaaggacacctacgacgcccttcacatgcaggccctgccccctcgctaa

SEQ ID NO: 7718 - DNA, 1503 bp, synthetic construct
  source 1..1503: mol_type = other DNA
atggccttaccagtgaccgccttgctcctgccgctggccttgctgctccacgccgccaggccggacatccagatgacacagagccctagcagcctgtctgccagcgtgggagacagagtgaccatcacatgcaaggccagcgaccacatcaacaactggctggcctggtatcagcagaagcctggacaggcccctaagctgctgatctacggcgctaccacactggaaacaggcgtgcccagcagattttctggcagcggctctggcaccgactacaccctgacaatatccagcctccagcctgaggacttcgccacctactactgtcagcagagctggaacaccccttggacattcggccagggcaccaagctggaaatcaagagactcgagggaggctctcgcagcgaggaccgctaccgcaaccccaagggcagcgcctgcagcggcggaagcttcgaacaagttcagcttcaacagcctggcgctgagctggtcaaacctggcgcttctgtgaagatgagctgcaaagccagcggctacgccttcagcagctactggatcaactggatgaagcagaaacccggccagggactcgaatggatcggccaaatctatcccggcgacggcgacaccaactacaacggcaagttcaagggcagagccacactgaccgccgatacctctagcagcacagcctacatgcagctgagcagcctgaccagcgaagatagcgccgtgtacttctgtgcccggtccatcacaacagtcgtgggctgcgctatggactattggggccagggaacaagcgtgaccgtgtctagtacgcgtaccacgacgccagcgccgcgaccaccaacaccggcgcccaccatcgcgtcgcagcccctgtccctgcgcccagaggcgtgccggccagcggcggggggcgcagtgcacacgagggggctggacttcgcctgtgacatctacatctgggcgcccttggccgggacttgtggggtccttctcctgtcactggttatcaccctttactgcaaacggggcagaaagaaactcctgtatatattcaaacaaccatttatgagaccagtacaaactactcaagaggaagatggctgtagctgccgatttccagaagaagaagaaggaggatgtgaactgagagtgaagttcagcaggagcgcagacgcccccgcgtaccagcagggccagaaccagctctataacgagctgaatctaggacgaagagaggagtacgatgttttggacaagagacgtggccgggaccctgagatggggggaaagccgagaaggaagaaccctcaggaaggcctgtacaatgaactgcagaaagataagatggcggaggcctacagtgagattgggatgaaaggcgagcgccggaggggcaaggggcacgatggcctttaccagggtctcagtacagccaccaaggacacctacgacgcccttcacatgcaggccctgccccctcgctaa

SEQ ID NO: 7719 - DNA, 1476 bp, synthetic construct
  source 1..1476: mol_type = other DNA
atggccttaccagtgaccgccttgctcctgccgctggccttgctgctccacgccgccaggccggacatccagatgacacagagccctagcagcctgtctgccagcgtgggagacagagtgaccatcacatgcaaggccagcgaccacatcaacaactggctggcctggtatcagcagaagcctggacaggcccctaagctgctgatctacggcgctaccacactggaaacaggcgtgcccagcagattttctggcagcggctctggcaccgactacaccctgacaatatccagcctccagcctgaggacttcgccacctactactgtcagcagagctggaacaccccttggacattcggccagggcaccaagctggaaatcaagagactcgagggaggctctcgcagcgaggaccactacggcggaagcttcgaacaagttcagcttcaacagcctggcgctgagctggtcaaacctggcgcttctgtgaagatgagctgcaaagccagcggctacgccttcagcagctactggatcaactggatgaagcagaaacccggccagggactcgaatggatcggccaaatctatcccggcgacggcgacaccaactacaacggcaagttcaagggcagagccacactgaccgccgatacctctagcagcacagcctacatgcagctgagcagcctgaccagcgaagatagcgccgtgtacttctgtgcccggtccatcacaacagtcgtgggctgcgctatggactattggggccagggaacaagcgtgaccgtgtctagtacgcgtaccacgacgccagcgccgcgaccaccaacaccggcgcccaccatcgcgtcgcagcccctgtccctgcgcccagaggcgtgccggccagcggcggggggcgcagtgcacacgagggggctggacttcgcctgtgacatctacatctgggcgcccttggccgggacttgtggggtccttctcctgtcactggttatcaccctttactgcaaacggggcagaaagaaactcctgtatatattcaaacaaccatttatgagaccagtacaaactactcaagaggaagatggctgtagctgccgatttccagaagaagaagaaggaggatgtgaactgagagtgaagttcagcaggagcgcagacgcccccgcgtaccagcagggccagaaccagctctataacgagctgaatctaggacgaagagaggagtacgatgttttggacaagagacgtggccgggaccctgagatggggggaaagccgagaaggaagaaccctcaggaaggcctgtacaatgaactgcagaaagataagatggcggaggcctacagtgagattgggatgaaaggcgagcgccggaggggcaaggggcacgatggcctttaccagggtctcagtacagccaccaaggacacctacgacgcccttcacatgcaggccctgccccctcgctaa

SEQ ID NO: 7720 - DNA, 1476 bp, synthetic construct
  source 1..1476: mol_type = other DNA
atggccttaccagtgaccgccttgctcctgccgctggccttgctgctccacgccgccaggccggacatccagatgacacagagccctagcagcctgtctgccagcgtgggagacagagtgaccatcacatgcaaggccagcgaccacatcaacaactggctggcctggtatcagcagaagcctggacaggcccctaagctgctgatctacggcgctaccacactggaaacaggcgtgcccagcagattttctggcagcggctctggcaccgactacaccctgacaatatccagcctccagcctgaggacttcgccacctactactgtcagcagagctggaacaccccttggacattcggccagggcaccaagctggaaatcaagagactcgagggaggctctcgcagcgagagccgctacggcggaagcttcgaacaagttcagcttcaacagcctggcgctgagctggtcaaacctggcgcttctgtgaagatgagctgcaaagccagcggctacgccttcagcagctactggatcaactggatgaagcagaaacccggccagggactcgaatggatcggccaaatctatcccggcgacggcgacaccaactacaacggcaagttcaagggcagagccacactgaccgccgatacctctagcagcacagcctacatgcagctgagcagcctgaccagcgaagatagcgccgtgtacttctgtgcccggtccatcacaacagtcgtgggctgcgctatggactattggggccagggaacaagcgtgaccgtgtctagtacgcgtaccacgacgccagcgccgcgaccaccaacaccggcgcccaccatcgcgtcgcagcccctgtccctgcgcccagaggcgtgccggccagcggcggggggcgcagtgcacacgagggggctggacttcgcctgtgacatctacatctgggcgcccttggccgggacttgtggggtccttctcctgtcactggttatcaccctttactgcaaacggggcagaaagaaactcctgtatatattcaaacaaccatttatgagaccagtacaaactactcaagaggaagatggctgtagctgccgatttccagaagaagaagaaggaggatgtgaactgagagtgaagttcagcaggagcgcagacgcccccgcgtaccagcagggccagaaccagctctataacgagctgaatctaggacgaagagaggagtacgatgttttggacaagagacgtggccgggaccctgagatggggggaaagccgagaaggaagaaccctcaggaaggcctgtacaatgaactgcagaaagataagatggcggaggcctacagtgagattgggatgaaaggcgagcgccggaggggcaaggggcacgatggcctttaccagggtctcagtacagccaccaaggacacctacgacgcccttcacatgcaggccctgccccctcgctaa

SEQ ID NO: 7721 - DNA, 1476 bp, synthetic construct
  source 1..1476: mol_type = other DNA
atggccttaccagtgaccgccttgctcctgccgctggccttgctgctccacgccgccaggccggacatccagatgacacagagccctagcagcctgtctgccagcgtgggagacagagtgaccatcacatgcaaggccagcgaccacatcaacaactggctggcctggtatcagcagaagcctggacaggcccctaagctgctgatctacggcgctaccacactggaaacaggcgtgcccagcagattttctggcagcggctctggcaccgactacaccctgacaatatccagcctccagcctgaggacttcgccacctactactgtcagcagagctggaacaccccttggacattcggccagggcaccaagctggaaatcaagagactcgagggaggctctcgcagcgagaaccgctacggcggaagcttcgaacaagttcagcttcaacagcctggcgctgagctggtcaaacctggcgcttctgtgaagatgagctgcaaagccagcggctacgccttcagcagctactggatcaactggatgaagcagaaacccggccagggactcgaatggatcggccaaatctatcccggcgacggcgacaccaactacaacggcaagttcaagggcagagccacactgaccgccgatacctctagcagcacagcctacatgcagctgagcagcctgaccagcgaagatagcgccgtgtacttctgtgcccggtccatcacaacagtcgtgggctgcgctatggactattggggccagggaacaagcgtgaccgtgtctagtacgcgtaccacgacgccagcgccgcgaccaccaacaccggcgcccaccatcgcgtcgcagcccctgtccctgcgcccagaggcgtgccggccagcggcggggggcgcagtgcacacgagggggctggacttcgcctgtgacatctacatctgggcgcccttggccgggacttgtggggtccttctcctgtcactggttatcaccctttactgcaaacggggcagaaagaaactcctgtatatattcaaacaaccatttatgagaccagtacaaactactcaagaggaagatggctgtagctgccgatttccagaagaagaagaaggaggatgtgaactgagagtgaagttcagcaggagcgcagacgcccccgcgtaccagcagggccagaaccagctctataacgagctgaatctaggacgaagagaggagtacgatgttttggacaagagacgtggccgggaccctgagatggggggaaagccgagaaggaagaaccctcaggaaggcctgtacaatgaactgcagaaagataagatggcggaggcctacagtgagattgggatgaaaggcgagcgccggaggggcaaggggcacgatggcctttaccagggtctcagtacagccaccaaggacacctacgacgcccttcacatgcaggccctgccccctcgctaa

SEQ ID NO: 7722 - DNA, 1476 bp, synthetic construct
  source 1..1476: mol_type = other DNA
atggccttaccagtgaccgccttgctcctgccgctggccttgctgctccacgccgccaggccggacatccagatgacacagagccctagcagcctgtctgccagcgtgggagacagagtgaccatcacatgcaaggccagcgaccacatcaacaactggctggcctggtatcagcagaagcctggacaggcccctaagctgctgatctacggcgctaccacactggaaacaggcgtgcccagcagattttctggcagcggctctggcaccgactacaccctgacaatatccagcctccagcctgaggacttcgccacctactactgtcagcagagctggaacaccccttggacattcggccagggcaccaagctggaaatcaagagactcgagggaggctctcgcagcgagggccgctacggcggaagcttcgaacaagttcagcttcaacagcctggcgctgagctggtcaaacctggcgcttctgtgaagatgagctgcaaagccagcggctacgccttcagcagctactggatcaactggatgaagcagaaacccggccagggactcgaatggatcggccaaatctatcccggcgacggcgacaccaactacaacggcaagttcaagggcagagccacactgaccgccgatacctctagcagcacagcctacatgcagctgagcagcctgaccagcgaagatagcgccgtgtacttctgtgcccggtccatcacaacagtcgtgggctgcgctatggactattggggccagggaacaagcgtgaccgtgtctagtacgcgtaccacgacgccagcgccgcgaccaccaacaccggcgcccaccatcgcgtcgcagcccctgtccctgcgcccagaggcgtgccggccagcggcggggggcgcagtgcacacgagggggctggacttcgcctgtgacatctacatctgggcgcccttggccgggacttgtggggtccttctcctgtcactggttatcaccctttactgcaaacggggcagaaagaaactcctgtatatattcaaacaaccatttatgagaccagtacaaactactcaagaggaagatggctgtagctgccgatttccagaagaagaagaaggaggatgtgaactgagagtgaagttcagcaggagcgcagacgcccccgcgtaccagcagggccagaaccagctctataacgagctgaatctaggacgaagagaggagtacgatgttttggacaagagacgtggccgggaccctgagatggggggaaagccgagaaggaagaaccctcaggaaggcctgtacaatgaactgcagaaagataagatggcggaggcctacagtgagattgggatgaaaggcgagcgccggaggggcaaggggcacgatggcctttaccagggtctcagtacagccaccaaggacacctacgacgcccttcacatgcaggccctgccccctcgctaa

SEQ ID NO: 7723 - DNA, 1476 bp, synthetic construct
  source 1..1476: mol_type = other DNA
atggccttaccagtgaccgccttgctcctgccgctggccttgctgctccacgccgccaggccggacatccagatgacacagagccctagcagcctgtctgccagcgtgggagacagagtgaccatcacatgcaaggccagcgaccacatcaacaactggctggcctggtatcagcagaagcctggacaggcccctaagctgctgatctacggcgctaccacactggaaacaggcgtgcccagcagattttctggcagcggctctggcaccgactacaccctgacaatatccagcctccagcctgaggacttcgccacctactactgtcagcagagctggaacaccccttggacattcggccagggcaccaagctggaaatcaagagactcgagggaggctctcgcagcgaggcccgctacggcggaagcttcgaacaagttcagcttcaacagcctggcgctgagctggtcaaacctggcgcttctgtgaagatgagctgcaaagccagcggctacgccttcagcagctactggatcaactggatgaagcagaaacccggccagggactcgaatggatcggccaaatctatcccggcgacggcgacaccaactacaacggcaagttcaagggcagagccacactgaccgccgatacctctagcagcacagcctacatgcagctgagcagcctgaccagcgaagatagcgccgtgtacttctgtgcccggtccatcacaacagtcgtgggctgcgctatggactattggggccagggaacaagcgtgaccgtgtctagtacgcgtaccacgacgccagcgccgcgaccaccaacaccggcgcccaccatcgcgtcgcagcccctgtccctgcgcccagaggcgtgccggccagcggcggggggcgcagtgcacacgagggggctggacttcgcctgtgacatctacatctgggcgcccttggccgggacttgtggggtccttctcctgtcactggttatcaccctttactgcaaacggggcagaaagaaactcctgtatatattcaaacaaccatttatgagaccagtacaaactactcaagaggaagatggctgtagctgccgatttccagaagaagaagaaggaggatgtgaactgagagtgaagttcagcaggagcgcagacgcccccgcgtaccagcagggccagaaccagctctataacgagctgaatctaggacgaagagaggagtacgatgttttggacaagagacgtggccgggaccctgagatggggggaaagccgagaaggaagaaccctcaggaaggcctgtacaatgaactgcagaaagataagatggcggaggcctacagtgagattgggatgaaaggcgagcgccggaggggcaaggggcacgatggcctttaccagggtctcagtacagccaccaaggacacctacgacgcccttcacatgcaggccctgccccctcgctaa

SEQ ID NO: 7724 - DNA, 1476 bp, synthetic construct
  source 1..1476: mol_type = other DNA
atggccttaccagtgaccgccttgctcctgccgctggccttgctgctccacgccgccaggccggacatccagatgacacagagccctagcagcctgtctgccagcgtgggagacagagtgaccatcacatgcaaggccagcgaccacatcaacaactggctggcctggtatcagcagaagcctggacaggcccctaagctgctgatctacggcgctaccacactggaaacaggcgtgcccagcagattttctggcagcggctctggcaccgactacaccctgacaatatccagcctccagcctgaggacttcgccacctactactgtcagcagagctggaacaccccttggacattcggccagggcaccaagctggaaatcaagagactcgagggaggctctcgcagcgagcagcgctacggcggaagcttcgaacaagttcagcttcaacagcctggcgctgagctggtcaaacctggcgcttctgtgaagatgagctgcaaagccagcggctacgccttcagcagctactggatcaactggatgaagcagaaacccggccagggactcgaatggatcggccaaatctatcccggcgacggcgacaccaactacaacggcaagttcaagggcagagccacactgaccgccgatacctctagcagcacagcctacatgcagctgagcagcctgaccagcgaagatagcgccgtgtacttctgtgcccggtccatcacaacagtcgtgggctgcgctatggactattggggccagggaacaagcgtgaccgtgtctagtacgcgtaccacgacgccagcgccgcgaccaccaacaccggcgcccaccatcgcgtcgcagcccctgtccctgcgcccagaggcgtgccggccagcggcggggggcgcagtgcacacgagggggctggacttcgcctgtgacatctacatctgggcgcccttggccgggacttgtggggtccttctcctgtcactggttatcaccctttactgcaaacggggcagaaagaaactcctgtatatattcaaacaaccatttatgagaccagtacaaactactcaagaggaagatggctgtagctgccgatttccagaagaagaagaaggaggatgtgaactgagagtgaagttcagcaggagcgcagacgcccccgcgtaccagcagggccagaaccagctctataacgagctgaatctaggacgaagagaggagtacgatgttttggacaagagacgtggccgggaccctgagatggggggaaagccgagaaggaagaaccctcaggaaggcctgtacaatgaactgcagaaagataagatggcggaggcctacagtgagattgggatgaaaggcgagcgccggaggggcaaggggcacgatggcctttaccagggtctcagtacagccaccaaggacacctacgacgcccttcacatgcaggccctgccccctcgctaa

SEQ ID NO: 7725 - DNA, 1476 bp, synthetic construct
  source 1..1476: mol_type = other DNA
atggccttaccagtgaccgccttgctcctgccgctggccttgctgctccacgccgccaggccggacatccagatgacacagagccctagcagcctgtctgccagcgtgggagacagagtgaccatcacatgcaaggccagcgaccacatcaacaactggctggcctggtatcagcagaagcctggacaggcccctaagctgctgatctacggcgctaccacactggaaacaggcgtgcccagcagattttctggcagcggctctggcaccgactacaccctgacaatatccagcctccagcctgaggacttcgccacctactactgtcagcagagctggaacaccccttggacattcggccagggcaccaagctggaaatcaagagactcgagggaggctctcgcagcgagaagcgctacggcggaagcttcgaacaagttcagcttcaacagcctggcgctgagctggtcaaacctggcgcttctgtgaagatgagctgcaaagccagcggctacgccttcagcagctactggatcaactggatgaagcagaaacccggccagggactcgaatggatcggccaaatctatcccggcgacggcgacaccaactacaacggcaagttcaagggcagagccacactgaccgccgatacctctagcagcacagcctacatgcagctgagcagcctgaccagcgaagatagcgccgtgtacttctgtgcccggtccatcacaacagtcgtgggctgcgctatggactattggggccagggaacaagcgtgaccgtgtctagtacgcgtaccacgacgccagcgccgcgaccaccaacaccggcgcccaccatcgcgtcgcagcccctgtccctgcgcccagaggcgtgccggccagcggcggggggcgcagtgcacacgagggggctggacttcgcctgtgacatctacatctgggcgcccttggccgggacttgtggggtccttctcctgtcactggttatcaccctttactgcaaacggggcagaaagaaactcctgtatatattcaaacaaccatttatgagaccagtacaaactactcaagaggaagatggctgtagctgccgatttccagaagaagaagaaggaggatgtgaactgagagtgaagttcagcaggagcgcagacgcccccgcgtaccagcagggccagaaccagctctataacgagctgaatctaggacgaagagaggagtacgatgttttggacaagagacgtggccgggaccctgagatggggggaaagccgagaaggaagaaccctcaggaaggcctgtacaatgaactgcagaaagataagatggcggaggcctacagtgagattgggatgaaaggcgagcgccggaggggcaaggggcacgatggcctttaccagggtctcagtacagccaccaaggacacctacgacgcccttcacatgcaggccctgccccctcgctaa

SEQ ID NO: 7726 - DNA, 1476 bp, synthetic construct
  source 1..1476: mol_type = other DNA
atggccttaccagtgaccgccttgctcctgccgctggccttgctgctccacgccgccaggccggacatccagatgacacagagccctagcagcctgtctgccagcgtgggagacagagtgaccatcacatgcaaggccagcgaccacatcaacaactggctggcctggtatcagcagaagcctggacaggcccctaagctgctgatctacggcgctaccacactggaaacaggcgtgcccagcagattttctggcagcggctctggcaccgactacaccctgacaatatccagcctccagcctgaggacttcgccacctactactgtcagcagagctggaacaccccttggacattcggccagggcaccaagctggaaatcaagagactcgagggaggctctcgcagcgagctgcgctacggcggaagcttcgaacaagttcagcttcaacagcctggcgctgagctggtcaaacctggcgcttctgtgaagatgagctgcaaagccagcggctacgccttcagcagctactggatcaactggatgaagcagaaacccggccagggactcgaatggatcggccaaatctatcccggcgacggcgacaccaactacaacggcaagttcaagggcagagccacactgaccgccgatacctctagcagcacagcctacatgcagctgagcagcctgaccagcgaagatagcgccgtgtacttctgtgcccggtccatcacaacagtcgtgggctgcgctatggactattggggccagggaacaagcgtgaccgtgtctagtacgcgtaccacgacgccagcgccgcgaccaccaacaccggcgcccaccatcgcgtcgcagcccctgtccctgcgcccagaggcgtgccggccagcggcggggggcgcagtgcacacgagggggctggacttcgcctgtgacatctacatctgggcgcccttggccgggacttgtggggtccttctcctgtcactggttatcaccctttactgcaaacggggcagaaagaaactcctgtatatattcaaacaaccatttatgagaccagtacaaactactcaagaggaagatggctgtagctgccgatttccagaagaagaagaaggaggatgtgaactgagagtgaagttcagcaggagcgcagacgcccccgcgtaccagcagggccagaaccagctctataacgagctgaatctaggacgaagagaggagtacgatgttttggacaagagacgtggccgggaccctgagatggggggaaagccgagaaggaagaaccctcaggaaggcctgtacaatgaactgcagaaagataagatggcggaggcctacagtgagattgggatgaaaggcgagcgccggaggggcaaggggcacgatggcctttaccagggtctcagtacagccaccaaggacacctacgacgcccttcacatgcaggccctgccccctcgctaa

SEQ ID NO: 7727 - DNA, 1476 bp, synthetic construct
  source 1..1476: mol_type = other DNA
atggccttaccagtgaccgccttgctcctgccgctggccttgctgctccacgccgccaggccggacatccagatgacacagagccctagcagcctgtctgccagcgtgggagacagagtgaccatcacatgcaaggccagcgaccacatcaacaactggctggcctggtatcagcagaagcctggacaggcccctaagctgctgatctacggcgctaccacactggaaacaggcgtgcccagcagattttctggcagcggctctggcaccgactacaccctgacaatatccagcctccagcctgaggacttcgccacctactactgtcagcagagctggaacaccccttggacattcggccagggcaccaagctggaaatcaagagactcgagggaggctctcgcagcgagacccgctacggcggaagcttcgaacaagttcagcttcaacagcctggcgctgagctggtcaaacctggcgcttctgtgaagatgagctgcaaagccagcggctacgccttcagcagctactggatcaactggatgaagcagaaacccggccagggactcgaatggatcggccaaatctatcccggcgacggcgacaccaactacaacggcaagttcaagggcagagccacactgaccgccgatacctctagcagcacagcctacatgcagctgagcagcctgaccagcgaagatagcgccgtgtacttctgtgcccggtccatcacaacagtcgtgggctgcgctatggactattggggccagggaacaagcgtgaccgtgtctagtacgcgtaccacgacgccagcgccgcgaccaccaacaccggcgcccaccatcgcgtcgcagcccctgtccctgcgcccagaggcgtgccggccagcggcggggggcgcagtgcacacgagggggctggacttcgcctgtgacatctacatctgggcgcccttggccgggacttgtggggtccttctcctgtcactggttatcaccctttactgcaaacggggcagaaagaaactcctgtatatattcaaacaaccatttatgagaccagtacaaactactcaagaggaagatggctgtagctgccgatttccagaagaagaagaaggaggatgtgaactgagagtgaagttcagcaggagcgcagacgcccccgcgtaccagcagggccagaaccagctctataacgagctgaatctaggacgaagagaggagtacgatgttttggacaagagacgtggccgggaccctgagatggggggaaagccgagaaggaagaaccctcaggaaggcctgtacaatgaactgcagaaagataagatggcggaggcctacagtgagattgggatgaaaggcgagcgccggaggggcaaggggcacgatggcctttaccagggtctcagtacagccaccaaggacacctacgacgcccttcacatgcaggccctgccccctcgctaa

SEQ ID NO: 7728 - DNA, 1479 bp, synthetic construct
  source 1..1479: mol_type = other DNA
atggccttaccagtgaccgccttgctcctgccgctggccttgctgctccacgccgccaggccggacatccagatgacacagagccctagcagcctgtctgccagcgtgggagacagagtgaccatcacatgcaaggccagcgaccacatcaacaactggctggcctggtatcagcagaagcctggacaggcccctaagctgctgatctacggcgctaccacactggaaacaggcgtgcccagcagattttctggcagcggctctggcaccgactacaccctgacaatatccagcctccagcctgaggacttcgccacctactactgtcagcagagctggaacaccccttggacattcggccagggcaccaagctggaaatcaagagactcgagggaggctctcgcagcgaggaccgctacaagggcggaagcttcgaacaagttcagcttcaacagcctggcgctgagctggtcaaacctggcgcttctgtgaagatgagctgcaaagccagcggctacgccttcagcagctactggatcaactggatgaagcagaaacccggccagggactcgaatggatcggccaaatctatcccggcgacggcgacaccaactacaacggcaagttcaagggcagagccacactgaccgccgatacctctagcagcacagcctacatgcagctgagcagcctgaccagcgaagatagcgccgtgtacttctgtgcccggtccatcacaacagtcgtgggctgcgctatggactattggggccagggaacaagcgtgaccgtgtctagtacgcgtaccacgacgccagcgccgcgaccaccaacaccggcgcccaccatcgcgtcgcagcccctgtccctgcgcccagaggcgtgccggccagcggcggggggcgcagtgcacacgagggggctggacttcgcctgtgacatctacatctgggcgcccttggccgggacttgtggggtccttctcctgtcactggttatcaccctttactgcaaacggggcagaaagaaactcctgtatatattcaaacaaccatttatgagaccagtacaaactactcaagaggaagatggctgtagctgccgatttccagaagaagaagaaggaggatgtgaactgagagtgaagttcagcaggagcgcagacgcccccgcgtaccagcagggccagaaccagctctataacgagctgaatctaggacgaagagaggagtacgatgttttggacaagagacgtggccgggaccctgagatggggggaaagccgagaaggaagaaccctcaggaaggcctgtacaatgaactgcagaaagataagatggcggaggcctacagtgagattgggatgaaaggcgagcgccggaggggcaaggggcacgatggcctttaccagggtctcagtacagccaccaaggacacctacgacgcccttcacatgcaggccctgccccctcgctaa

SEQ ID NO: 7729 - DNA, 1479 bp, synthetic construct
  source 1..1479: mol_type = other DNA
atggccttaccagtgaccgccttgctcctgccgctggccttgctgctccacgccgccaggccggacatccagatgacacagagccctagcagcctgtctgccagcgtgggagacagagtgaccatcacatgcaaggccagcgaccacatcaacaactggctggcctggtatcagcagaagcctggacaggcccctaagctgctgatctacggcgctaccacactggaaacaggcgtgcccagcagattttctggcagcggctctggcaccgactacaccctgacaatatccagcctccagcctgaggacttcgccacctactactgtcagcagagctggaacaccccttggacattcggccagggcaccaagctggaaatcaagagactcgagggaggctctcgcagcgaggaccgctacagcggcggaagcttcgaacaagttcagcttcaacagcctggcgctgagctggtcaaacctggcgcttctgtgaagatgagctgcaaagccagcggctacgccttcagcagctactggatcaactggatgaagcagaaacccggccagggactcgaatggatcggccaaatctatcccggcgacggcgacaccaactacaacggcaagttcaagggcagagccacactgaccgccgatacctctagcagcacagcctacatgcagctgagcagcctgaccagcgaagatagcgccgtgtacttctgtgcccggtccatcacaacagtcgtgggctgcgctatggactattggggccagggaacaagcgtgaccgtgtctagtacgcgtaccacgacgccagcgccgcgaccaccaacaccggcgcccaccatcgcgtcgcagcccctgtccctgcgcccagaggcgtgccggccagcggcggggggcgcagtgcacacgagggggctggacttcgcctgtgacatctacatctgggcgcccttggccgggacttgtggggtccttctcctgtcactggttatcaccctttactgcaaacggggcagaaagaaactcctgtatatattcaaacaaccatttatgagaccagtacaaactactcaagaggaagatggctgtagctgccgatttccagaagaagaagaaggaggatgtgaactgagagtgaagttcagcaggagcgcagacgcccccgcgtaccagcagggccagaaccagctctataacgagctgaatctaggacgaagagaggagtacgatgttttggacaagagacgtggccgggaccctgagatggggggaaagccgagaaggaagaaccctcaggaaggcctgtacaatgaactgcagaaagataagatggcggaggcctacagtgagattgggatgaaaggcgagcgccggaggggcaaggggcacgatggcctttaccagggtctcagtacagccaccaaggacacctacgacgcccttcacatgcaggccctgccccctcgctaa

SEQ ID NO: 7730 - DNA, 1479 bp, synthetic construct
  source 1..1479: mol_type = other DNA
atggccttaccagtgaccgccttgctcctgccgctggccttgctgctccacgccgccaggccggacatccagatgacacagagccctagcagcctgtctgccagcgtgggagacagagtgaccatcacatgcaaggccagcgaccacatcaacaactggctggcctggtatcagcagaagcctggacaggcccctaagctgctgatctacggcgctaccacactggaaacaggcgtgcccagcagattttctggcagcggctctggcaccgactacaccctgacaatatccagcctccagcctgaggacttcgccacctactactgtcagcagagctggaacaccccttggacattcggccagggcaccaagctggaaatcaagagactcgagggaggctctcgcagcgaggaccgctacttcggcggaagcttcgaacaagttcagcttcaacagcctggcgctgagctggtcaaacctggcgcttctgtgaagatgagctgcaaagccagcggctacgccttcagcagctactggatcaactggatgaagcagaaacccggccagggactcgaatggatcggccaaatctatcccggcgacggcgacaccaactacaacggcaagttcaagggcagagccacactgaccgccgatacctctagcagcacagcctacatgcagctgagcagcctgaccagcgaagatagcgccgtgtacttctgtgcccggtccatcacaacagtcgtgggctgcgctatggactattggggccagggaacaagcgtgaccgtgtctagtacgcgtaccacgacgccagcgccgcgaccaccaacaccggcgcccaccatcgcgtcgcagcccctgtccctgcgcccagaggcgtgccggccagcggcggggggcgcagtgcacacgagggggctggacttcgcctgtgacatctacatctgggcgcccttggccgggacttgtggggtccttctcctgtcactggttatcaccctttactgcaaacggggcagaaagaaactcctgtatatattcaaacaaccatttatgagaccagtacaaactactcaagaggaagatggctgtagctgccgatttccagaagaagaagaaggaggatgtgaactgagagtgaagttcagcaggagcgcagacgcccccgcgtaccagcagggccagaaccagctctataacgagctgaatctaggacgaagagaggagtacgatgttttggacaagagacgtggccgggaccctgagatggggggaaagccgagaaggaagaaccctcaggaaggcctgtacaatgaactgcagaaagataagatggcggaggcctacagtgagattgggatgaaaggcgagcgccggaggggcaaggggcacgatggcctttaccagggtctcagtacagccaccaaggacacctacgacgcccttcacatgcaggccctgccccctcgctaa

SEQ ID NO: 7731 - DNA, 1479 bp, synthetic construct
  source 1..1479: mol_type = other DNA
atggccttaccagtgaccgccttgctcctgccgctggccttgctgctccacgccgccaggccggacatccagatgacacagagccctagcagcctgtctgccagcgtgggagacagagtgaccatcacatgcaaggccagcgaccacatcaacaactggctggcctggtatcagcagaagcctggacaggcccctaagctgctgatctacggcgctaccacactggaaacaggcgtgcccagcagattttctggcagcggctctggcaccgactacaccctgacaatatccagcctccagcctgaggacttcgccacctactactgtcagcagagctggaacaccccttggacattcggccagggcaccaagctggaaatcaagagactcgagggaggctctcgcagcgaggaccgctacatcggcggaagcttcgaacaagttcagcttcaacagcctggcgctgagctggtcaaacctggcgcttctgtgaagatgagctgcaaagccagcggctacgccttcagcagctactggatcaactggatgaagcagaaacccggccagggactcgaatggatcggccaaatctatcccggcgacggcgacaccaactacaacggcaagttcaagggcagagccacactgaccgccgatacctctagcagcacagcctacatgcagctgagcagcctgaccagcgaagatagcgccgtgtacttctgtgcccggtccatcacaacagtcgtgggctgcgctatggactattggggccagggaacaagcgtgaccgtgtctagtacgcgtaccacgacgccagcgccgcgaccaccaacaccggcgcccaccatcgcgtcgcagcccctgtccctgcgcccagaggcgtgccggccagcggcggggggcgcagtgcacacgagggggctggacttcgcctgtgacatctacatctgggcgcccttggccgggacttgtggggtccttctcctgtcactggttatcaccctttactgcaaacggggcagaaagaaactcctgtatatattcaaacaaccatttatgagaccagtacaaactactcaagaggaagatggctgtagctgccgatttccagaagaagaagaaggaggatgtgaactgagagtgaagttcagcaggagcgcagacgcccccgcgtaccagcagggccagaaccagctctataacgagctgaatctaggacgaagagaggagtacgatgttttggacaagagacgtggccgggaccctgagatggggggaaagccgagaaggaagaaccctcaggaaggcctgtacaatgaactgcagaaagataagatggcggaggcctacagtgagattgggatgaaaggcgagcgccggaggggcaaggggcacgatggcctttaccagggtctcagtacagccaccaaggacacctacgacgcccttcacatgcaggccctgccccctcgctaa

SEQ ID NO: 7732 - DNA, 1479 bp, synthetic construct
  source 1..1479: mol_type = other DNA
atggccttaccagtgaccgccttgctcctgccgctggccttgctgctccacgccgccaggccggacatccagatgacacagagccctagcagcctgtctgccagcgtgggagacagagtgaccatcacatgcaaggccagcgaccacatcaacaactggctggcctggtatcagcagaagcctggacaggcccctaagctgctgatctacggcgctaccacactggaaacaggcgtgcccagcagattttctggcagcggctctggcaccgactacaccctgacaatatccagcctccagcctgaggacttcgccacctactactgtcagcagagctggaacaccccttggacattcggccagggcaccaagctggaaatcaagagactcgagggaggctctcgcagcgaggaccgctacaacggcggaagcttcgaacaagttcagcttcaacagcctggcgctgagctggtcaaacctggcgcttctgtgaagatgagctgcaaagccagcggctacgccttcagcagctactggatcaactggatgaagcagaaacccggccagggactcgaatggatcggccaaatctatcccggcgacggcgacaccaactacaacggcaagttcaagggcagagccacactgaccgccgatacctctagcagcacagcctacatgcagctgagcagcctgaccagcgaagatagcgccgtgtacttctgtgcccggtccatcacaacagtcgtgggctgcgctatggactattggggccagggaacaagcgtgaccgtgtctagtacgcgtaccacgacgccagcgccgcgaccaccaacaccggcgcccaccatcgcgtcgcagcccctgtccctgcgcccagaggcgtgccggccagcggcggggggcgcagtgcacacgagggggctggacttcgcctgtgacatctacatctgggcgcccttggccgggacttgtggggtccttctcctgtcactggttatcaccctttactgcaaacggggcagaaagaaactcctgtatatattcaaacaaccatttatgagaccagtacaaactactcaagaggaagatggctgtagctgccgatttccagaagaagaagaaggaggatgtgaactgagagtgaagttcagcaggagcgcagacgcccccgcgtaccagcagggccagaaccagctctataacgagctgaatctaggacgaagagaggagtacgatgttttggacaagagacgtggccgggaccctgagatggggggaaagccgagaaggaagaaccctcaggaaggcctgtacaatgaactgcagaaagataagatggcggaggcctacagtgagattgggatgaaaggcgagcgccggaggggcaaggggcacgatggcctttaccagggtctcagtacagccaccaaggacacctacgacgcccttcacatgcaggccctgccccctcgctaa

SEQ ID NO: 7733 - DNA, 1479 bp, synthetic construct
  source 1..1479: mol_type = other DNA
atggccttaccagtgaccgccttgctcctgccgctggccttgctgctccacgccgccaggccggacatccagatgacacagagccctagcagcctgtctgccagcgtgggagacagagtgaccatcacatgcaaggccagcgaccacatcaacaactggctggcctggtatcagcagaagcctggacaggcccctaagctgctgatctacggcgctaccacactggaaacaggcgtgcccagcagattttctggcagcggctctggcaccgactacaccctgacaatatccagcctccagcctgaggacttcgccacctactactgtcagcagagctggaacaccccttggacattcggccagggcaccaagctggaaatcaagagactcgagggaggctctcgcagcgaggaccgctacaccggcggaagcttcgaacaagttcagcttcaacagcctggcgctgagctggtcaaacctggcgcttctgtgaagatgagctgcaaagccagcggctacgccttcagcagctactggatcaactggatgaagcagaaacccggccagggactcgaatggatcggccaaatctatcccggcgacggcgacaccaactacaacggcaagttcaagggcagagccacactgaccgccgatacctctagcagcacagcctacatgcagctgagcagcctgaccagcgaagatagcgccgtgtacttctgtgcccggtccatcacaacagtcgtgggctgcgctatggactattggggccagggaacaagcgtgaccgtgtctagtacgcgtaccacgacgccagcgccgcgaccaccaacaccggcgcccaccatcgcgtcgcagcccctgtccctgcgcccagaggcgtgccggccagcggcggggggcgcagtgcacacgagggggctggacttcgcctgtgacatctacatctgggcgcccttggccgggacttgtggggtccttctcctgtcactggttatcaccctttactgcaaacggggcagaaagaaactcctgtatatattcaaacaaccatttatgagaccagtacaaactactcaagaggaagatggctgtagctgccgatttccagaagaagaagaaggaggatgtgaactgagagtgaagttcagcaggagcgcagacgcccccgcgtaccagcagggccagaaccagctctataacgagctgaatctaggacgaagagaggagtacgatgttttggacaagagacgtggccgggaccctgagatggggggaaagccgagaaggaagaaccctcaggaaggcctgtacaatgaactgcagaaagataagatggcggaggcctacagtgagattgggatgaaaggcgagcgccggaggggcaaggggcacgatggcctttaccagggtctcagtacagccaccaaggacacctacgacgcccttcacatgcaggccctgccccctcgctaa

SEQ ID NO: 7734 - DNA, 1479 bp, synthetic construct
  source 1..1479: mol_type = other DNA
atggccttaccagtgaccgccttgctcctgccgctggccttgctgctccacgccgccaggccggacatccagatgacacagagccctagcagcctgtctgccagcgtgggagacagagtgaccatcacatgcaaggccagcgaccacatcaacaactggctggcctggtatcagcagaagcctggacaggcccctaagctgctgatctacggcgctaccacactggaaacaggcgtgcccagcagattttctggcagcggctctggcaccgactacaccctgacaatatccagcctccagcctgaggacttcgccacctactactgtcagcagagctggaacaccccttggacattcggccagggcaccaagctggaaatcaagagactcgagggaggctctcgcagcgaggaccgctacgccggcggaagcttcgaacaagttcagcttcaacagcctggcgctgagctggtcaaacctggcgcttctgtgaagatgagctgcaaagccagcggctacgccttcagcagctactggatcaactggatgaagcagaaacccggccagggactcgaatggatcggccaaatctatcccggcgacggcgacaccaactacaacggcaagttcaagggcagagccacactgaccgccgatacctctagcagcacagcctacatgcagctgagcagcctgaccagcgaagatagcgccgtgtacttctgtgcccggtccatcacaacagtcgtgggctgcgctatggactattggggccagggaacaagcgtgaccgtgtctagtacgcgtaccacgacgccagcgccgcgaccaccaacaccggcgcccaccatcgcgtcgcagcccctgtccctgcgcccagaggcgtgccggccagcggcggggggcgcagtgcacacgagggggctggacttcgcctgtgacatctacatctgggcgcccttggccgggacttgtggggtccttctcctgtcactggttatcaccctttactgcaaacggggcagaaagaaactcctgtatatattcaaacaaccatttatgagaccagtacaaactactcaagaggaagatggctgtagctgccgatttccagaagaagaagaaggaggatgtgaactgagagtgaagttcagcaggagcgcagacgcccccgcgtaccagcagggccagaaccagctctataacgagctgaatctaggacgaagagaggagtacgatgttttggacaagagacgtggccgggaccctgagatggggggaaagccgagaaggaagaaccctcaggaaggcctgtacaatgaactgcagaaagataagatggcggaggcctacagtgagattgggatgaaaggcgagcgccggaggggcaaggggcacgatggcctttaccagggtctcagtacagccaccaaggacacctacgacgcccttcacatgcaggccctgccccctcgctaa

SEQ ID NO: 7735 - DNA, 1479 bp, synthetic construct
  source 1..1479: mol_type = other DNA
atggccttaccagtgaccgccttgctcctgccgctggccttgctgctccacgccgccaggccggacatccagatgacacagagccctagcagcctgtctgccagcgtgggagacagagtgaccatcacatgcaaggccagcgaccacatcaacaactggctggcctggtatcagcagaagcctggacaggcccctaagctgctgatctacggcgctaccacactggaaacaggcgtgcccagcagattttctggcagcggctctggcaccgactacaccctgacaatatccagcctccagcctgaggacttcgccacctactactgtcagcagagctggaacaccccttggacattcggccagggcaccaagctggaaatcaagagactcgagggaggctctcgcagcgaggaccactaccgcggcggaagcttcgaacaagttcagcttcaacagcctggcgctgagctggtcaaacctggcgcttctgtgaagatgagctgcaaagccagcggctacgccttcagcagctactggatcaactggatgaagcagaaacccggccagggactcgaatggatcggccaaatctatcccggcgacggcgacaccaactacaacggcaagttcaagggcagagccacactgaccgccgatacctctagcagcacagcctacatgcagctgagcagcctgaccagcgaagatagcgccgtgtacttctgtgcccggtccatcacaacagtcgtgggctgcgctatggactattggggccagggaacaagcgtgaccgtgtctagtacgcgtaccacgacgccagcgccgcgaccaccaacaccggcgcccaccatcgcgtcgcagcccctgtccctgcgcccagaggcgtgccggccagcggcggggggcgcagtgcacacgagggggctggacttcgcctgtgacatctacatctgggcgcccttggccgggacttgtggggtccttctcctgtcactggttatcaccctttactgcaaacggggcagaaagaaactcctgtatatattcaaacaaccatttatgagaccagtacaaactactcaagaggaagatggctgtagctgccgatttccagaagaagaagaaggaggatgtgaactgagagtgaagttcagcaggagcgcagacgcccccgcgtaccagcagggccagaaccagctctataacgagctgaatctaggacgaagagaggagtacgatgttttggacaagagacgtggccgggaccctgagatggggggaaagccgagaaggaagaaccctcaggaaggcctgtacaatgaactgcagaaagataagatggcggaggcctacagtgagattgggatgaaaggcgagcgccggaggggcaaggggcacgatggcctttaccagggtctcagtacagccaccaaggacacctacgacgcccttcacatgcaggccctgccccctcgctaa

SEQ ID NO: 7736 - DNA, 1479 bp, synthetic construct
  source 1..1479: mol_type = other DNA
atggccttaccagtgaccgccttgctcctgccgctggccttgctgctccacgccgccaggccggacatccagatgacacagagccctagcagcctgtctgccagcgtgggagacagagtgaccatcacatgcaaggccagcgaccacatcaacaactggctggcctggtatcagcagaagcctggacaggcccctaagctgctgatctacggcgctaccacactggaaacaggcgtgcccagcagattttctggcagcggctctggcaccgactacaccctgacaatatccagcctccagcctgaggacttcgccacctactactgtcagcagagctggaacaccccttggacattcggccagggcaccaagctggaaatcaagagactcgagggaggctctcgcagcgagagccgctaccgcggcggaagcttcgaacaagttcagcttcaacagcctggcgctgagctggtcaaacctggcgcttctgtgaagatgagctgcaaagccagcggctacgccttcagcagctactggatcaactggatgaagcagaaacccggccagggactcgaatggatcggccaaatctatcccggcgacggcgacaccaactacaacggcaagttcaagggcagagccacactgaccgccgatacctctagcagcacagcctacatgcagctgagcagcctgaccagcgaagatagcgccgtgtacttctgtgcccggtccatcacaacagtcgtgggctgcgctatggactattggggccagggaacaagcgtgaccgtgtctagtacgcgtaccacgacgccagcgccgcgaccaccaacaccggcgcccaccatcgcgtcgcagcccctgtccctgcgcccagaggcgtgccggccagcggcggggggcgcagtgcacacgagggggctggacttcgcctgtgacatctacatctgggcgcccttggccgggacttgtggggtccttctcctgtcactggttatcaccctttactgcaaacggggcagaaagaaactcctgtatatattcaaacaaccatttatgagaccagtacaaactactcaagaggaagatggctgtagctgccgatttccagaagaagaagaaggaggatgtgaactgagagtgaagttcagcaggagcgcagacgcccccgcgtaccagcagggccagaaccagctctataacgagctgaatctaggacgaagagaggagtacgatgttttggacaagagacgtggccgggaccctgagatggggggaaagccgagaaggaagaaccctcaggaaggcctgtacaatgaactgcagaaagataagatggcggaggcctacagtgagattgggatgaaaggcgagcgccggaggggcaaggggcacgatggcctttaccagggtctcagtacagccaccaaggacacctacgacgcccttcacatgcaggccctgccccctcgctaa

SEQ ID NO: 7737 - DNA, 1479 bp, synthetic construct
  source 1..1479: mol_type = other DNA
atggccttaccagtgaccgccttgctcctgccgctggccttgctgctccacgccgccaggccggacatccagatgacacagagccctagcagcctgtctgccagcgtgggagacagagtgaccatcacatgcaaggccagcgaccacatcaacaactggctggcctggtatcagcagaagcctggacaggcccctaagctgctgatctacggcgctaccacactggaaacaggcgtgcccagcagattttctggcagcggctctggcaccgactacaccctgacaatatccagcctccagcctgaggacttcgccacctactactgtcagcagagctggaacaccccttggacattcggccagggcaccaagctggaaatcaagagactcgagggaggctctcgcagcgagaaccgctaccgcggcggaagcttcgaacaagttcagcttcaacagcctggcgctgagctggtcaaacctggcgcttctgtgaagatgagctgcaaagccagcggctacgccttcagcagctactggatcaactggatgaagcagaaacccggccagggactcgaatggatcggccaaatctatcccggcgacggcgacaccaactacaacggcaagttcaagggcagagccacactgaccgccgatacctctagcagcacagcctacatgcagctgagcagcctgaccagcgaagatagcgccgtgtacttctgtgcccggtccatcacaacagtcgtgggctgcgctatggactattggggccagggaacaagcgtgaccgtgtctagtacgcgtaccacgacgccagcgccgcgaccaccaacaccggcgcccaccatcgcgtcgcagcccctgtccctgcgcccagaggcgtgccggccagcggcggggggcgcagtgcacacgagggggctggacttcgcctgtgacatctacatctgggcgcccttggccgggacttgtggggtccttctcctgtcactggttatcaccctttactgcaaacggggcagaaagaaactcctgtatatattcaaacaaccatttatgagaccagtacaaactactcaagaggaagatggctgtagctgccgatttccagaagaagaagaaggaggatgtgaactgagagtgaagttcagcaggagcgcagacgcccccgcgtaccagcagggccagaaccagctctataacgagctgaatctaggacgaagagaggagtacgatgttttggacaagagacgtggccgggaccctgagatggggggaaagccgagaaggaagaaccctcaggaaggcctgtacaatgaactgcagaaagataagatggcggaggcctacagtgagattgggatgaaaggcgagcgccggaggggcaaggggcacgatggcctttaccagggtctcagtacagccaccaaggacacctacgacgcccttcacatgcaggccctgccccctcgctaa

SEQ ID NO: 7738 - DNA, 1479 bp, synthetic construct
  source 1..1479: mol_type = other DNA
atggccttaccagtgaccgccttgctcctgccgctggccttgctgctccacgccgccaggccggacatccagatgacacagagccctagcagcctgtctgccagcgtgggagacagagtgaccatcacatgcaaggccagcgaccacatcaacaactggctggcctggtatcagcagaagcctggacaggcccctaagctgctgatctacggcgctaccacactggaaacaggcgtgcccagcagattttctggcagcggctctggcaccgactacaccctgacaatatccagcctccagcctgaggacttcgccacctactactgtcagcagagctggaacaccccttggacattcggccagggcaccaagctggaaatcaagagactcgagggaggctctcgcagcgagggccgctaccgcggcggaagcttcgaacaagttcagcttcaacagcctggcgctgagctggtcaaacctggcgcttctgtgaagatgagctgcaaagccagcggctacgccttcagcagctactggatcaactggatgaagcagaaacccggccagggactcgaatggatcggccaaatctatcccggcgacggcgacaccaactacaacggcaagttcaagggcagagccacactgaccgccgatacctctagcagcacagcctacatgcagctgagcagcctgaccagcgaagatagcgccgtgtacttctgtgcccggtccatcacaacagtcgtgggctgcgctatggactattggggccagggaacaagcgtgaccgtgtctagtacgcgtaccacgacgccagcgccgcgaccaccaacaccggcgcccaccatcgcgtcgcagcccctgtccctgcgcccagaggcgtgccggccagcggcggggggcgcagtgcacacgagggggctggacttcgcctgtgacatctacatctgggcgcccttggccgggacttgtggggtccttctcctgtcactggttatcaccctttactgcaaacggggcagaaagaaactcctgtatatattcaaacaaccatttatgagaccagtacaaactactcaagaggaagatggctgtagctgccgatttccagaagaagaagaaggaggatgtgaactgagagtgaagttcagcaggagcgcagacgcccccgcgtaccagcagggccagaaccagctctataacgagctgaatctaggacgaagagaggagtacgatgttttggacaagagacgtggccgggaccctgagatggggggaaagccgagaaggaagaaccctcaggaaggcctgtacaatgaactgcagaaagataagatggcggaggcctacagtgagattgggatgaaaggcgagcgccggaggggcaaggggcacgatggcctttaccagggtctcagtacagccaccaaggacacctacgacgcccttcacatgcaggccctgccccctcgctaa

SEQ ID NO: 7739 - DNA, 1479 bp, synthetic construct
  source 1..1479: mol_type = other DNA
atggccttaccagtgaccgccttgctcctgccgctggccttgctgctccacgccgccaggccggacatccagatgacacagagccctagcagcctgtctgccagcgtgggagacagagtgaccatcacatgcaaggccagcgaccacatcaacaactggctggcctggtatcagcagaagcctggacaggcccctaagctgctgatctacggcgctaccacactggaaacaggcgtgcccagcagattttctggcagcggctctggcaccgactacaccctgacaatatccagcctccagcctgaggacttcgccacctactactgtcagcagagctggaacaccccttggacattcggccagggcaccaagctggaaatcaagagactcgagggaggctctcgcagcgaggcccgctaccgcggcggaagcttcgaacaagttcagcttcaacagcctggcgctgagctggtcaaacctggcgcttctgtgaagatgagctgcaaagccagcggctacgccttcagcagctactggatcaactggatgaagcagaaacccggccagggactcgaatggatcggccaaatctatcccggcgacggcgacaccaactacaacggcaagttcaagggcagagccacactgaccgccgatacctctagcagcacagcctacatgcagctgagcagcctgaccagcgaagatagcgccgtgtacttctgtgcccggtccatcacaacagtcgtgggctgcgctatggactattggggccagggaacaagcgtgaccgtgtctagtacgcgtaccacgacgccagcgccgcgaccaccaacaccggcgcccaccatcgcgtcgcagcccctgtccctgcgcccagaggcgtgccggccagcggcggggggcgcagtgcacacgagggggctggacttcgcctgtgacatctacatctgggcgcccttggccgggacttgtggggtccttctcctgtcactggttatcaccctttactgcaaacggggcagaaagaaactcctgtatatattcaaacaaccatttatgagaccagtacaaactactcaagaggaagatggctgtagctgccgatttccagaagaagaagaaggaggatgtgaactgagagtgaagttcagcaggagcgcagacgcccccgcgtaccagcagggccagaaccagctctataacgagctgaatctaggacgaagagaggagtacgatgttttggacaagagacgtggccgggaccctgagatggggggaaagccgagaaggaagaaccctcaggaaggcctgtacaatgaactgcagaaagataagatggcggaggcctacagtgagattgggatgaaaggcgagcgccggaggggcaaggggcacgatggcctttaccagggtctcagtacagccaccaaggacacctacgacgcccttcacatgcaggccctgccccctcgctaa

SEQ ID NO: 7740 - DNA, 1479 bp, synthetic construct
  source 1..1479: mol_type = other DNA
atggccttaccagtgaccgccttgctcctgccgctggccttgctgctccacgccgccaggccggacatccagatgacacagagccctagcagcctgtctgccagcgtgggagacagagtgaccatcacatgcaaggccagcgaccacatcaacaactggctggcctggtatcagcagaagcctggacaggcccctaagctgctgatctacggcgctaccacactggaaacaggcgtgcccagcagattttctggcagcggctctggcaccgactacaccctgacaatatccagcctccagcctgaggacttcgccacctactactgtcagcagagctggaacaccccttggacattcggccagggcaccaagctggaaatcaagagactcgagggaggctctcgcagcgagcagcgctaccgcggcggaagcttcgaacaagttcagcttcaacagcctggcgctgagctggtcaaacctggcgcttctgtgaagatgagctgcaaagccagcggctacgccttcagcagctactggatcaactggatgaagcagaaacccggccagggactcgaatggatcggccaaatctatcccggcgacggcgacaccaactacaacggcaagttcaagggcagagccacactgaccgccgatacctctagcagcacagcctacatgcagctgagcagcctgaccagcgaagatagcgccgtgtacttctgtgcccggtccatcacaacagtcgtgggctgcgctatggactattggggccagggaacaagcgtgaccgtgtctagtacgcgtaccacgacgccagcgccgcgaccaccaacaccggcgcccaccatcgcgtcgcagcccctgtccctgcgcccagaggcgtgccggccagcggcggggggcgcagtgcacacgagggggctggacttcgcctgtgacatctacatctgggcgcccttggccgggacttgtggggtccttctcctgtcactggttatcaccctttactgcaaacggggcagaaagaaactcctgtatatattcaaacaaccatttatgagaccagtacaaactactcaagaggaagatggctgtagctgccgatttccagaagaagaagaaggaggatgtgaactgagagtgaagttcagcaggagcgcagacgcccccgcgtaccagcagggccagaaccagctctataacgagctgaatctaggacgaagagaggagtacgatgttttggacaagagacgtggccgggaccctgagatggggggaaagccgagaaggaagaaccctcaggaaggcctgtacaatgaactgcagaaagataagatggcggaggcctacagtgagattgggatgaaaggcgagcgccggaggggcaaggggcacgatggcctttaccagggtctcagtacagccaccaaggacacctacgacgcccttcacatgcaggccctgccccctcgctaa

SEQ ID NO: 7741 - DNA, 1479 bp, synthetic construct
  source 1..1479: mol_type = other DNA
atggccttaccagtgaccgccttgctcctgccgctggccttgctgctccacgccgccaggccggacatccagatgacacagagccctagcagcctgtctgccagcgtgggagacagagtgaccatcacatgcaaggccagcgaccacatcaacaactggctggcctggtatcagcagaagcctggacaggcccctaagctgctgatctacggcgctaccacactggaaacaggcgtgcccagcagattttctggcagcggctctggcaccgactacaccctgacaatatccagcctccagcctgaggacttcgccacctactactgtcagcagagctggaacaccccttggacattcggccagggcaccaagctggaaatcaagagactcgagggaggctctcgcagcgagaagcgctaccgcggcggaagcttcgaacaagttcagcttcaacagcctggcgctgagctggtcaaacctggcgcttctgtgaagatgagctgcaaagccagcggctacgccttcagcagctactggatcaactggatgaagcagaaacccggccagggactcgaatggatcggccaaatctatcccggcgacggcgacaccaactacaacggcaagttcaagggcagagccacactgaccgccgatacctctagcagcacagcctacatgcagctgagcagcctgaccagcgaagatagcgccgtgtacttctgtgcccggtccatcacaacagtcgtgggctgcgctatggactattggggccagggaacaagcgtgaccgtgtctagtacgcgtaccacgacgccagcgccgcgaccaccaacaccggcgcccaccatcgcgtcgcagcccctgtccctgcgcccagaggcgtgccggccagcggcggggggcgcagtgcacacgagggggctggacttcgcctgtgacatctacatctgggcgcccttggccgggacttgtggggtccttctcctgtcactggttatcaccctttactgcaaacggggcagaaagaaactcctgtatatattcaaacaaccatttatgagaccagtacaaactactcaagaggaagatggctgtagctgccgatttccagaagaagaagaaggaggatgtgaactgagagtgaagttcagcaggagcgcagacgcccccgcgtaccagcagggccagaaccagctctataacgagctgaatctaggacgaagagaggagtacgatgttttggacaagagacgtggccgggaccctgagatggggggaaagccgagaaggaagaaccctcaggaaggcctgtacaatgaactgcagaaagataagatggcggaggcctacagtgagattgggatgaaaggcgagcgccggaggggcaaggggcacgatggcctttaccagggtctcagtacagccaccaaggacacctacgacgcccttcacatgcaggccctgccccctcgctaa

SEQ ID NO: 7742 - DNA, 1479 bp, synthetic construct
  source 1..1479: mol_type = other DNA
atggccttaccagtgaccgccttgctcctgccgctggccttgctgctccacgccgccaggccggacatccagatgacacagagccctagcagcctgtctgccagcgtgggagacagagtgaccatcacatgcaaggccagcgaccacatcaacaactggctggcctggtatcagcagaagcctggacaggcccctaagctgctgatctacggcgctaccacactggaaacaggcgtgcccagcagattttctggcagcggctctggcaccgactacaccctgacaatatccagcctccagcctgaggacttcgccacctactactgtcagcagagctggaacaccccttggacattcggccagggcaccaagctggaaatcaagagactcgagggaggctctcgcagcgagctgcgctaccgcggcggaagcttcgaacaagttcagcttcaacagcctggcgctgagctggtcaaacctggcgcttctgtgaagatgagctgcaaagccagcggctacgccttcagcagctactggatcaactggatgaagcagaaacccggccagggactcgaatggatcggccaaatctatcccggcgacggcgacaccaactacaacggcaagttcaagggcagagccacactgaccgccgatacctctagcagcacagcctacatgcagctgagcagcctgaccagcgaagatagcgccgtgtacttctgtgcccggtccatcacaacagtcgtgggctgcgctatggactattggggccagggaacaagcgtgaccgtgtctagtacgcgtaccacgacgccagcgccgcgaccaccaacaccggcgcccaccatcgcgtcgcagcccctgtccctgcgcccagaggcgtgccggccagcggcggggggcgcagtgcacacgagggggctggacttcgcctgtgacatctacatctgggcgcccttggccgggacttgtggggtccttctcctgtcactggttatcaccctttactgcaaacggggcagaaagaaactcctgtatatattcaaacaaccatttatgagaccagtacaaactactcaagaggaagatggctgtagctgccgatttccagaagaagaagaaggaggatgtgaactgagagtgaagttcagcaggagcgcagacgcccccgcgtaccagcagggccagaaccagctctataacgagctgaatctaggacgaagagaggagtacgatgttttggacaagagacgtggccgggaccctgagatggggggaaagccgagaaggaagaaccctcaggaaggcctgtacaatgaactgcagaaagataagatggcggaggcctacagtgagattgggatgaaaggcgagcgccggaggggcaaggggcacgatggcctttaccagggtctcagtacagccaccaaggacacctacgacgcccttcacatgcaggccctgccccctcgctaa

SEQ ID NO: 7743 - DNA, 1479 bp, synthetic construct
  source 1..1479: mol_type = other DNA
atggccttaccagtgaccgccttgctcctgccgctggccttgctgctccacgccgccaggccggacatccagatgacacagagccctagcagcctgtctgccagcgtgggagacagagtgaccatcacatgcaaggccagcgaccacatcaacaactggctggcctggtatcagcagaagcctggacaggcccctaagctgctgatctacggcgctaccacactggaaacaggcgtgcccagcagattttctggcagcggctctggcaccgactacaccctgacaatatccagcctccagcctgaggacttcgccacctactactgtcagcagagctggaacaccccttggacattcggccagggcaccaagctggaaatcaagagactcgagggaggctctcgcagcgagacccgctaccgcggcggaagcttcgaacaagttcagcttcaacagcctggcgctgagctggtcaaacctggcgcttctgtgaagatgagctgcaaagccagcggctacgccttcagcagctactggatcaactggatgaagcagaaacccggccagggactcgaatggatcggccaaatctatcccggcgacggcgacaccaactacaacggcaagttcaagggcagagccacactgaccgccgatacctctagcagcacagcctacatgcagctgagcagcctgaccagcgaagatagcgccgtgtacttctgtgcccggtccatcacaacagtcgtgggctgcgctatggactattggggccagggaacaagcgtgaccgtgtctagtacgcgtaccacgacgccagcgccgcgaccaccaacaccggcgcccaccatcgcgtcgcagcccctgtccctgcgcccagaggcgtgccggccagcggcggggggcgcagtgcacacgagggggctggacttcgcctgtgacatctacatctgggcgcccttggccgggacttgtggggtccttctcctgtcactggttatcaccctttactgcaaacggggcagaaagaaactcctgtatatattcaaacaaccatttatgagaccagtacaaactactcaagaggaagatggctgtagctgccgatttccagaagaagaagaaggaggatgtgaactgagagtgaagttcagcaggagcgcagacgcccccgcgtaccagcagggccagaaccagctctataacgagctgaatctaggacgaagagaggagtacgatgttttggacaagagacgtggccgggaccctgagatggggggaaagccgagaaggaagaaccctcaggaaggcctgtacaatgaactgcagaaagataagatggcggaggcctacagtgagattgggatgaaaggcgagcgccggaggggcaaggggcacgatggcctttaccagggtctcagtacagccaccaaggacacctacgacgcccttcacatgcaggccctgccccctcgctaa

SEQ ID NO: 7744 - DNA, 1479 bp, synthetic construct
  source 1..1479: mol_type = other DNA
atggccttaccagtgaccgccttgctcctgccgctggccttgctgctccacgccgccaggccggacatccagatgacacagagccctagcagcctgtctgccagcgtgggagacagagtgaccatcacatgcaaggccagcgaccacatcaacaactggctggcctggtatcagcagaagcctggacaggcccctaagctgctgatctacggcgctaccacactggaaacaggcgtgcccagcagattttctggcagcggctctggcaccgactacaccctgacaatatccagcctccagcctgaggacttcgccacctactactgtcagcagagctggaacaccccttggacattcggccagggcaccaagctggaaatcaagagactcgagggaggctctcgcagcgaggaccactacaagggcggaagcttcgaacaagttcagcttcaacagcctggcgctgagctggtcaaacctggcgcttctgtgaagatgagctgcaaagccagcggctacgccttcagcagctactggatcaactggatgaagcagaaacccggccagggactcgaatggatcggccaaatctatcccggcgacggcgacaccaactacaacggcaagttcaagggcagagccacactgaccgccgatacctctagcagcacagcctacatgcagctgagcagcctgaccagcgaagatagcgccgtgtacttctgtgcccggtccatcacaacagtcgtgggctgcgctatggactattggggccagggaacaagcgtgaccgtgtctagtacgcgtaccacgacgccagcgccgcgaccaccaacaccggcgcccaccatcgcgtcgcagcccctgtccctgcgcccagaggcgtgccggccagcggcggggggcgcagtgcacacgagggggctggacttcgcctgtgacatctacatctgggcgcccttggccgggacttgtggggtccttctcctgtcactggttatcaccctttactgcaaacggggcagaaagaaactcctgtatatattcaaacaaccatttatgagaccagtacaaactactcaagaggaagatggctgtagctgccgatttccagaagaagaagaaggaggatgtgaactgagagtgaagttcagcaggagcgcagacgcccccgcgtaccagcagggccagaaccagctctataacgagctgaatctaggacgaagagaggagtacgatgttttggacaagagacgtggccgggaccctgagatggggggaaagccgagaaggaagaaccctcaggaaggcctgtacaatgaactgcagaaagataagatggcggaggcctacagtgagattgggatgaaaggcgagcgccggaggggcaaggggcacgatggcctttaccagggtctcagtacagccaccaaggacacctacgacgcccttcacatgcaggccctgccccctcgctaa

SEQ ID NO: 7745 - DNA, 1479 bp, synthetic construct
  source 1..1479: mol_type = other DNA
atggccttaccagtgaccgccttgctcctgccgctggccttgctgctccacgccgccaggccggacatccagatgacacagagccctagcagcctgtctgccagcgtgggagacagagtgaccatcacatgcaaggccagcgaccacatcaacaactggctggcctggtatcagcagaagcctggacaggcccctaagctgctgatctacggcgctaccacactggaaacaggcgtgcccagcagattttctggcagcggctctggcaccgactacaccctgacaatatccagcctccagcctgaggacttcgccacctactactgtcagcagagctggaacaccccttggacattcggccagggcaccaagctggaaatcaagagactcgagggaggctctcgcagcgagagccgctacaagggcggaagcttcgaacaagttcagcttcaacagcctggcgctgagctggtcaaacctggcgcttctgtgaagatgagctgcaaagccagcggctacgccttcagcagctactggatcaactggatgaagcagaaacccggccagggactcgaatggatcggccaaatctatcccggcgacggcgacaccaactacaacggcaagttcaagggcagagccacactgaccgccgatacctctagcagcacagcctacatgcagctgagcagcctgaccagcgaagatagcgccgtgtacttctgtgcccggtccatcacaacagtcgtgggctgcgctatggactattggggccagggaacaagcgtgaccgtgtctagtacgcgtaccacgacgccagcgccgcgaccaccaacaccggcgcccaccatcgcgtcgcagcccctgtccctgcgcccagaggcgtgccggccagcggcggggggcgcagtgcacacgagggggctggacttcgcctgtgacatctacatctgggcgcccttggccgggacttgtggggtccttctcctgtcactggttatcaccctttactgcaaacggggcagaaagaaactcctgtatatattcaaacaaccatttatgagaccagtacaaactactcaagaggaagatggctgtagctgccgatttccagaagaagaagaaggaggatgtgaactgagagtgaagttcagcaggagcgcagacgcccccgcgtaccagcagggccagaaccagctctataacgagctgaatctaggacgaagagaggagtacgatgttttggacaagagacgtggccgggaccctgagatggggggaaagccgagaaggaagaaccctcaggaaggcctgtacaatgaactgcagaaagataagatggcggaggcctacagtgagattgggatgaaaggcgagcgccggaggggcaaggggcacgatggcctttaccagggtctcagtacagccaccaaggacacctacgacgcccttcacatgcaggccctgccccctcgctaa

SEQ ID NO: 7746 - DNA, 1479 bp, synthetic construct
  source 1..1479: mol_type = other DNA
atggccttaccagtgaccgccttgctcctgccgctggccttgctgctccacgccgccaggccggacatccagatgacacagagccctagcagcctgtctgccagcgtgggagacagagtgaccatcacatgcaaggccagcgaccacatcaacaactggctggcctggtatcagcagaagcctggacaggcccctaagctgctgatctacggcgctaccacactggaaacaggcgtgcccagcagattttctggcagcggctctggcaccgactacaccctgacaatatccagcctccagcctgaggacttcgccacctactactgtcagcagagctggaacaccccttggacattcggccagggcaccaagctggaaatcaagagactcgagggaggctctcgcagcgagaaccgctacaagggcggaagcttcgaacaagttcagcttcaacagcctggcgctgagctggtcaaacctggcgcttctgtgaagatgagctgcaaagccagcggctacgccttcagcagctactggatcaactggatgaagcagaaacccggccagggactcgaatggatcggccaaatctatcccggcgacggcgacaccaactacaacggcaagttcaagggcagagccacactgaccgccgatacctctagcagcacagcctacatgcagctgagcagcctgaccagcgaagatagcgccgtgtacttctgtgcccggtccatcacaacagtcgtgggctgcgctatggactattggggccagggaacaagcgtgaccgtgtctagtacgcgtaccacgacgccagcgccgcgaccaccaacaccggcgcccaccatcgcgtcgcagcccctgtccctgcgcccagaggcgtgccggccagcggcggggggcgcagtgcacacgagggggctggacttcgcctgtgacatctacatctgggcgcccttggccgggacttgtggggtccttctcctgtcactggttatcaccctttactgcaaacggggcagaaagaaactcctgtatatattcaaacaaccatttatgagaccagtacaaactactcaagaggaagatggctgtagctgccgatttccagaagaagaagaaggaggatgtgaactgagagtgaagttcagcaggagcgcagacgcccccgcgtaccagcagggccagaaccagctctataacgagctgaatctaggacgaagagaggagtacgatgttttggacaagagacgtggccgggaccctgagatggggggaaagccgagaaggaagaaccctcaggaaggcctgtacaatgaactgcagaaagataagatggcggaggcctacagtgagattgggatgaaaggcgagcgccggaggggcaaggggcacgatggcctttaccagggtctcagtacagccaccaaggacacctacgacgcccttcacatgcaggccctgccccctcgctaa

SEQ ID NO: 7747 - DNA, 1479 bp, synthetic construct
  source 1..1479: mol_type = other DNA
atggccttaccagtgaccgccttgctcctgccgctggccttgctgctccacgccgccaggccggacatccagatgacacagagccctagcagcctgtctgccagcgtgggagacagagtgaccatcacatgcaaggccagcgaccacatcaacaactggctggcctggtatcagcagaagcctggacaggcccctaagctgctgatctacggcgctaccacactggaaacaggcgtgcccagcagattttctggcagcggctctggcaccgactacaccctgacaatatccagcctccagcctgaggacttcgccacctactactgtcagcagagctggaacaccccttggacattcggccagggcaccaagctggaaatcaagagactcgagggaggctctcgcagcgagggccgctacaagggcggaagcttcgaacaagttcagcttcaacagcctggcgctgagctggtcaaacctggcgcttctgtgaagatgagctgcaaagccagcggctacgccttcagcagctactggatcaactggatgaagcagaaacccggccagggactcgaatggatcggccaaatctatcccggcgacggcgacaccaactacaacggcaagttcaagggcagagccacactgaccgccgatacctctagcagcacagcctacatgcagctgagcagcctgaccagcgaagatagcgccgtgtacttctgtgcccggtccatcacaacagtcgtgggctgcgctatggactattggggccagggaacaagcgtgaccgtgtctagtacgcgtaccacgacgccagcgccgcgaccaccaacaccggcgcccaccatcgcgtcgcagcccctgtccctgcgcccagaggcgtgccggccagcggcggggggcgcagtgcacacgagggggctggacttcgcctgtgacatctacatctgggcgcccttggccgggacttgtggggtccttctcctgtcactggttatcaccctttactgcaaacggggcagaaagaaactcctgtatatattcaaacaaccatttatgagaccagtacaaactactcaagaggaagatggctgtagctgccgatttccagaagaagaagaaggaggatgtgaactgagagtgaagttcagcaggagcgcagacgcccccgcgtaccagcagggccagaaccagctctataacgagctgaatctaggacgaagagaggagtacgatgttttggacaagagacgtggccgggaccctgagatggggggaaagccgagaaggaagaaccctcaggaaggcctgtacaatgaactgcagaaagataagatggcggaggcctacagtgagattgggatgaaaggcgagcgccggaggggcaaggggcacgatggcctttaccagggtctcagtacagccaccaaggacacctacgacgcccttcacatgcaggccctgccccctcgctaa

SEQ ID NO: 7748 - DNA, 1479 bp, synthetic construct
  source 1..1479: mol_type = other DNA
atggccttaccagtgaccgccttgctcctgccgctggccttgctgctccacgccgccaggccggacatccagatgacacagagccctagcagcctgtctgccagcgtgggagacagagtgaccatcacatgcaaggccagcgaccacatcaacaactggctggcctggtatcagcagaagcctggacaggcccctaagctgctgatctacggcgctaccacactggaaacaggcgtgcccagcagattttctggcagcggctctggcaccgactacaccctgacaatatccagcctccagcctgaggacttcgccacctactactgtcagcagagctggaacaccccttggacattcggccagggcaccaagctggaaatcaagagactcgagggaggctctcgcagcgaggcccgctacaagggcggaagcttcgaacaagttcagcttcaacagcctggcgctgagctggtcaaacctggcgcttctgtgaagatgagctgcaaagccagcggctacgccttcagcagctactggatcaactggatgaagcagaaacccggccagggactcgaatggatcggccaaatctatcccggcgacggcgacaccaactacaacggcaagttcaagggcagagccacactgaccgccgatacctctagcagcacagcctacatgcagctgagcagcctgaccagcgaagatagcgccgtgtacttctgtgcccggtccatcacaacagtcgtgggctgcgctatggactattggggccagggaacaagcgtgaccgtgtctagtacgcgtaccacgacgccagcgccgcgaccaccaacaccggcgcccaccatcgcgtcgcagcccctgtccctgcgcccagaggcgtgccggccagcggcggggggcgcagtgcacacgagggggctggacttcgcctgtgacatctacatctgggcgcccttggccgggacttgtggggtccttctcctgtcactggttatcaccctttactgcaaacggggcagaaagaaactcctgtatatattcaaacaaccatttatgagaccagtacaaactactcaagaggaagatggctgtagctgccgatttccagaagaagaagaaggaggatgtgaactgagagtgaagttcagcaggagcgcagacgcccccgcgtaccagcagggccagaaccagctctataacgagctgaatctaggacgaagagaggagtacgatgttttggacaagagacgtggccgggaccctgagatggggggaaagccgagaaggaagaaccctcaggaaggcctgtacaatgaactgcagaaagataagatggcggaggcctacagtgagattgggatgaaaggcgagcgccggaggggcaaggggcacgatggcctttaccagggtctcagtacagccaccaaggacacctacgacgcccttcacatgcaggccctgccccctcgctaa

SEQ ID NO: 7749 - DNA, 1479 bp, synthetic construct
  source 1..1479: mol_type = other DNA
atggccttaccagtgaccgccttgctcctgccgctggccttgctgctccacgccgccaggccggacatccagatgacacagagccctagcagcctgtctgccagcgtgggagacagagtgaccatcacatgcaaggccagcgaccacatcaacaactggctggcctggtatcagcagaagcctggacaggcccctaagctgctgatctacggcgctaccacactggaaacaggcgtgcccagcagattttctggcagcggctctggcaccgactacaccctgacaatatccagcctccagcctgaggacttcgccacctactactgtcagcagagctggaacaccccttggacattcggccagggcaccaagctggaaatcaagagactcgagggaggctctcgcagcgagaagcgctacaagggcggaagcttcgaacaagttcagcttcaacagcctggcgctgagctggtcaaacctggcgcttctgtgaagatgagctgcaaagccagcggctacgccttcagcagctactggatcaactggatgaagcagaaacccggccagggactcgaatggatcggccaaatctatcccggcgacggcgacaccaactacaacggcaagttcaagggcagagccacactgaccgccgatacctctagcagcacagcctacatgcagctgagcagcctgaccagcgaagatagcgccgtgtacttctgtgcccggtccatcacaacagtcgtgggctgcgctatggactattggggccagggaacaagcgtgaccgtgtctagtacgcgtaccacgacgccagcgccgcgaccaccaacaccggcgcccaccatcgcgtcgcagcccctgtccctgcgcccagaggcgtgccggccagcggcggggggcgcagtgcacacgagggggctggacttcgcctgtgacatctacatctgggcgcccttggccgggacttgtggggtccttctcctgtcactggttatcaccctttactgcaaacggggcagaaagaaactcctgtatatattcaaacaaccatttatgagaccagtacaaactactcaagaggaagatggctgtagctgccgatttccagaagaagaagaaggaggatgtgaactgagagtgaagttcagcaggagcgcagacgcccccgcgtaccagcagggccagaaccagctctataacgagctgaatctaggacgaagagaggagtacgatgttttggacaagagacgtggccgggaccctgagatggggggaaagccgagaaggaagaaccctcaggaaggcctgtacaatgaactgcagaaagataagatggcggaggcctacagtgagattgggatgaaaggcgagcgccggaggggcaaggggcacgatggcctttaccagggtctcagtacagccaccaaggacacctacgacgcccttcacatgcaggccctgccccctcgctaa

SEQ ID NO: 7750 - DNA, 1479 bp, synthetic construct
  source 1..1479: mol_type = other DNA
atggccttaccagtgaccgccttgctcctgccgctggccttgctgctccacgccgccaggccggacatccagatgacacagagccctagcagcctgtctgccagcgtgggagacagagtgaccatcacatgcaaggccagcgaccacatcaacaactggctggcctggtatcagcagaagcctggacaggcccctaagctgctgatctacggcgctaccacactggaaacaggcgtgcccagcagattttctggcagcggctctggcaccgactacaccctgacaatatccagcctccagcctgaggacttcgccacctactactgtcagcagagctggaacaccccttggacattcggccagggcaccaagctggaaatcaagagactcgagggaggctctcgcagcgagctgcgctacaagggcggaagcttcgaacaagttcagcttcaacagcctggcgctgagctggtcaaacctggcgcttctgtgaagatgagctgcaaagccagcggctacgccttcagcagctactggatcaactggatgaagcagaaacccggccagggactcgaatggatcggccaaatctatcccggcgacggcgacaccaactacaacggcaagttcaagggcagagccacactgaccgccgatacctctagcagcacagcctacatgcagctgagcagcctgaccagcgaagatagcgccgtgtacttctgtgcccggtccatcacaacagtcgtgggctgcgctatggactattggggccagggaacaagcgtgaccgtgtctagtacgcgtaccacgacgccagcgccgcgaccaccaacaccggcgcccaccatcgcgtcgcagcccctgtccctgcgcccagaggcgtgccggccagcggcggggggcgcagtgcacacgagggggctggacttcgcctgtgacatctacatctgggcgcccttggccgggacttgtggggtccttctcctgtcactggttatcaccctttactgcaaacggggcagaaagaaactcctgtatatattcaaacaaccatttatgagaccagtacaaactactcaagaggaagatggctgtagctgccgatttccagaagaagaagaaggaggatgtgaactgagagtgaagttcagcaggagcgcagacgcccccgcgtaccagcagggccagaaccagctctataacgagctgaatctaggacgaagagaggagtacgatgttttggacaagagacgtggccgggaccctgagatggggggaaagccgagaaggaagaaccctcaggaaggcctgtacaatgaactgcagaaagataagatggcggaggcctacagtgagattgggatgaaaggcgagcgccggaggggcaaggggcacgatggcctttaccagggtctcagtacagccaccaaggacacctacgacgcccttcacatgcaggccctgccccctcgctaa

SEQ ID NO: 7751 - DNA, 1479 bp, synthetic construct
  source 1..1479: mol_type = other DNA
atggccttaccagtgaccgccttgctcctgccgctggccttgctgctccacgccgccaggccggacatccagatgacacagagccctagcagcctgtctgccagcgtgggagacagagtgaccatcacatgcaaggccagcgaccacatcaacaactggctggcctggtatcagcagaagcctggacaggcccctaagctgctgatctacggcgctaccacactggaaacaggcgtgcccagcagattttctggcagcggctctggcaccgactacaccctgacaatatccagcctccagcctgaggacttcgccacctactactgtcagcagagctggaacaccccttggacattcggccagggcaccaagctggaaatcaagagactcgagggaggctctcgcagcgagacccgctacaagggcggaagcttcgaacaagttcagcttcaacagcctggcgctgagctggtcaaacctggcgcttctgtgaagatgagctgcaaagccagcggctacgccttcagcagctactggatcaactggatgaagcagaaacccggccagggactcgaatggatcggccaaatctatcccggcgacggcgacaccaactacaacggcaagttcaagggcagagccacactgaccgccgatacctctagcagcacagcctacatgcagctgagcagcctgaccagcgaagatagcgccgtgtacttctgtgcccggtccatcacaacagtcgtgggctgcgctatggactattggggccagggaacaagcgtgaccgtgtctagtacgcgtaccacgacgccagcgccgcgaccaccaacaccggcgcccaccatcgcgtcgcagcccctgtccctgcgcccagaggcgtgccggccagcggcggggggcgcagtgcacacgagggggctggacttcgcctgtgacatctacatctgggcgcccttggccgggacttgtggggtccttctcctgtcactggttatcaccctttactgcaaacggggcagaaagaaactcctgtatatattcaaacaaccatttatgagaccagtacaaactactcaagaggaagatggctgtagctgccgatttccagaagaagaagaaggaggatgtgaactgagagtgaagttcagcaggagcgcagacgcccccgcgtaccagcagggccagaaccagctctataacgagctgaatctaggacgaagagaggagtacgatgttttggacaagagacgtggccgggaccctgagatggggggaaagccgagaaggaagaaccctcaggaaggcctgtacaatgaactgcagaaagataagatggcggaggcctacagtgagattgggatgaaaggcgagcgccggaggggcaaggggcacgatggcctttaccagggtctcagtacagccaccaaggacacctacgacgcccttcacatgcaggccctgccccctcgctaa

SEQ ID NO: 7752 - DNA, 1479 bp, synthetic construct
  source 1..1479: mol_type = other DNA
atggccttaccagtgaccgccttgctcctgccgctggccttgctgctccacgccgccaggccggacatccagatgacacagagccctagcagcctgtctgccagcgtgggagacagagtgaccatcacatgcaaggccagcgaccacatcaacaactggctggcctggtatcagcagaagcctggacaggcccctaagctgctgatctacggcgctaccacactggaaacaggcgtgcccagcagattttctggcagcggctctggcaccgactacaccctgacaatatccagcctccagcctgaggacttcgccacctactactgtcagcagagctggaacaccccttggacattcggccagggcaccaagctggaaatcaagagactcgagggaggctctcgcagcgagcagcgctacaagggcggaagcttcgaacaagttcagcttcaacagcctggcgctgagctggtcaaacctggcgcttctgtgaagatgagctgcaaagccagcggctacgccttcagcagctactggatcaactggatgaagcagaaacccggccagggactcgaatggatcggccaaatctatcccggcgacggcgacaccaactacaacggcaagttcaagggcagagccacactgaccgccgatacctctagcagcacagcctacatgcagctgagcagcctgaccagcgaagatagcgccgtgtacttctgtgcccggtccatcacaacagtcgtgggctgcgctatggactattggggccagggaacaagcgtgaccgtgtctagtacgcgtaccacgacgccagcgccgcgaccaccaacaccggcgcccaccatcgcgtcgcagcccctgtccctgcgcccagaggcgtgccggccagcggcggggggcgcagtgcacacgagggggctggacttcgcctgtgacatctacatctgggcgcccttggccgggacttgtggggtccttctcctgtcactggttatcaccctttactgcaaacggggcagaaagaaactcctgtatatattcaaacaaccatttatgagaccagtacaaactactcaagaggaagatggctgtagctgccgatttccagaagaagaagaaggaggatgtgaactgagagtgaagttcagcaggagcgcagacgcccccgcgtaccagcagggccagaaccagctctataacgagctgaatctaggacgaagagaggagtacgatgttttggacaagagacgtggccgggaccctgagatggggggaaagccgagaaggaagaaccctcaggaaggcctgtacaatgaactgcagaaagataagatggcggaggcctacagtgagattgggatgaaaggcgagcgccggaggggcaaggggcacgatggcctttaccagggtctcagtacagccaccaaggacacctacgacgcccttcacatgcaggccctgccccctcgctaa

SEQ ID NO: 7753 - DNA, 1479 bp, synthetic construct
  source 1..1479: mol_type = other DNA
atggccttaccagtgaccgccttgctcctgccgctggccttgctgctccacgccgccaggccggacatccagatgacacagagccctagcagcctgtctgccagcgtgggagacagagtgaccatcacatgcaaggccagcgaccacatcaacaactggctggcctggtatcagcagaagcctggacaggcccctaagctgctgatctacggcgctaccacactggaaacaggcgtgcccagcagattttctggcagcggctctggcaccgactacaccctgacaatatccagcctccagcctgaggacttcgccacctactactgtcagcagagctggaacaccccttggacattcggccagggcaccaagctggaaatcaagagactcgagggaggctctgcccgcagcgaggaccgctacggcggaagcttcgaacaagttcagcttcaacagcctggcgctgagctggtcaaacctggcgcttctgtgaagatgagctgcaaagccagcggctacgccttcagcagctactggatcaactggatgaagcagaaacccggccagggactcgaatggatcggccaaatctatcccggcgacggcgacaccaactacaacggcaagttcaagggcagagccacactgaccgccgatacctctagcagcacagcctacatgcagctgagcagcctgaccagcgaagatagcgccgtgtacttctgtgcccggtccatcacaacagtcgtgggctgcgctatggactattggggccagggaacaagcgtgaccgtgtctagtacgcgtaccacgacgccagcgccgcgaccaccaacaccggcgcccaccatcgcgtcgcagcccctgtccctgcgcccagaggcgtgccggccagcggcggggggcgcagtgcacacgagggggctggacttcgcctgtgacatctacatctgggcgcccttggccgggacttgtggggtccttctcctgtcactggttatcaccctttactgcaaacggggcagaaagaaactcctgtatatattcaaacaaccatttatgagaccagtacaaactactcaagaggaagatggctgtagctgccgatttccagaagaagaagaaggaggatgtgaactgagagtgaagttcagcaggagcgcagacgcccccgcgtaccagcagggccagaaccagctctataacgagctgaatctaggacgaagagaggagtacgatgttttggacaagagacgtggccgggaccctgagatggggggaaagccgagaaggaagaaccctcaggaaggcctgtacaatgaactgcagaaagataagatggcggaggcctacagtgagattgggatgaaaggcgagcgccggaggggcaaggggcacgatggcctttaccagggtctcagtacagccaccaaggacacctacgacgcccttcacatgcaggccctgccccctcgctaa

SEQ ID NO: 7754 - DNA, 1482 bp, synthetic construct
  source 1..1482: mol_type = other DNA
atggccttaccagtgaccgccttgctcctgccgctggccttgctgctccacgccgccaggccggacatccagatgacacagagccctagcagcctgtctgccagcgtgggagacagagtgaccatcacatgcaaggccagcgaccacatcaacaactggctggcctggtatcagcagaagcctggacaggcccctaagctgctgatctacggcgctaccacactggaaacaggcgtgcccagcagattttctggcagcggctctggcaccgactacaccctgacaatatccagcctccagcctgaggacttcgccacctactactgtcagcagagctggaacaccccttggacattcggccagggcaccaagctggaaatcaagagactcgagggaggctctgcccgcagcgaggaccgctaccgcggcggaagcttcgaacaagttcagcttcaacagcctggcgctgagctggtcaaacctggcgcttctgtgaagatgagctgcaaagccagcggctacgccttcagcagctactggatcaactggatgaagcagaaacccggccagggactcgaatggatcggccaaatctatcccggcgacggcgacaccaactacaacggcaagttcaagggcagagccacactgaccgccgatacctctagcagcacagcctacatgcagctgagcagcctgaccagcgaagatagcgccgtgtacttctgtgcccggtccatcacaacagtcgtgggctgcgctatggactattggggccagggaacaagcgtgaccgtgtctagtacgcgtaccacgacgccagcgccgcgaccaccaacaccggcgcccaccatcgcgtcgcagcccctgtccctgcgcccagaggcgtgccggccagcggcggggggcgcagtgcacacgagggggctggacttcgcctgtgacatctacatctgggcgcccttggccgggacttgtggggtccttctcctgtcactggttatcaccctttactgcaaacggggcagaaagaaactcctgtatatattcaaacaaccatttatgagaccagtacaaactactcaagaggaagatggctgtagctgccgatttccagaagaagaagaaggaggatgtgaactgagagtgaagttcagcaggagcgcagacgcccccgcgtaccagcagggccagaaccagctctataacgagctgaatctaggacgaagagaggagtacgatgttttggacaagagacgtggccgggaccctgagatggggggaaagccgagaaggaagaaccctcaggaaggcctgtacaatgaactgcagaaagataagatggcggaggcctacagtgagattgggatgaaaggcgagcgccggaggggcaaggggcacgatggcctttaccagggtctcagtacagccaccaaggacacctacgacgcccttcacatgcaggccctgccccctcgctaa

SEQ ID NO: 7755 - DNA, 1485 bp, synthetic construct
  source 1..1485: mol_type = other DNA
atggccttaccagtgaccgccttgctcctgccgctggccttgctgctccacgccgccaggccggacatccagatgacacagagccctagcagcctgtctgccagcgtgggagacagagtgaccatcacatgcaaggccagcgaccacatcaacaactggctggcctggtatcagcagaagcctggacaggcccctaagctgctgatctacggcgctaccacactggaaacaggcgtgcccagcagattttctggcagcggctctggcaccgactacaccctgacaatatccagcctccagcctgaggacttcgccacctactactgtcagcagagctggaacaccccttggacattcggccagggcaccaagctggaaatcaagagactcgagggaggctctgcccgcagcgaggaccgctaccgcaacggcggaagcttcgaacaagttcagcttcaacagcctggcgctgagctggtcaaacctggcgcttctgtgaagatgagctgcaaagccagcggctacgccttcagcagctactggatcaactggatgaagcagaaacccggccagggactcgaatggatcggccaaatctatcccggcgacggcgacaccaactacaacggcaagttcaagggcagagccacactgaccgccgatacctctagcagcacagcctacatgcagctgagcagcctgaccagcgaagatagcgccgtgtacttctgtgcccggtccatcacaacagtcgtgggctgcgctatggactattggggccagggaacaagcgtgaccgtgtctagtacgcgtaccacgacgccagcgccgcgaccaccaacaccggcgcccaccatcgcgtcgcagcccctgtccctgcgcccagaggcgtgccggccagcggcggggggcgcagtgcacacgagggggctggacttcgcctgtgacatctacatctgggcgcccttggccgggacttgtggggtccttctcctgtcactggttatcaccctttactgcaaacggggcagaaagaaactcctgtatatattcaaacaaccatttatgagaccagtacaaactactcaagaggaagatggctgtagctgccgatttccagaagaagaagaaggaggatgtgaactgagagtgaagttcagcaggagcgcagacgcccccgcgtaccagcagggccagaaccagctctataacgagctgaatctaggacgaagagaggagtacgatgttttggacaagagacgtggccgggaccctgagatggggggaaagccgagaaggaagaaccctcaggaaggcctgtacaatgaactgcagaaagataagatggcggaggcctacagtgagattgggatgaaaggcgagcgccggaggggcaaggggcacgatggcctttaccagggtctcagtacagccaccaaggacacctacgacgcccttcacatgcaggccctgccccctcgctaa

SEQ ID NO: 7756 - DNA, 1488 bp, synthetic construct
  source 1..1488: mol_type = other DNA
atggccttaccagtgaccgccttgctcctgccgctggccttgctgctccacgccgccaggccggacatccagatgacacagagccctagcagcctgtctgccagcgtgggagacagagtgaccatcacatgcaaggccagcgaccacatcaacaactggctggcctggtatcagcagaagcctggacaggcccctaagctgctgatctacggcgctaccacactggaaacaggcgtgcccagcagattttctggcagcggctctggcaccgactacaccctgacaatatccagcctccagcctgaggacttcgccacctactactgtcagcagagctggaacaccccttggacattcggccagggcaccaagctggaaatcaagagactcgagggaggctctgcccgcagcgaggaccgctaccgcaaccccggcggaagcttcgaacaagttcagcttcaacagcctggcgctgagctggtcaaacctggcgcttctgtgaagatgagctgcaaagccagcggctacgccttcagcagctactggatcaactggatgaagcagaaacccggccagggactcgaatggatcggccaaatctatcccggcgacggcgacaccaactacaacggcaagttcaagggcagagccacactgaccgccgatacctctagcagcacagcctacatgcagctgagcagcctgaccagcgaagatagcgccgtgtacttctgtgcccggtccatcacaacagtcgtgggctgcgctatggactattggggccagggaacaagcgtgaccgtgtctagtacgcgtaccacgacgccagcgccgcgaccaccaacaccggcgcccaccatcgcgtcgcagcccctgtccctgcgcccagaggcgtgccggccagcggcggggggcgcagtgcacacgagggggctggacttcgcctgtgacatctacatctgggcgcccttggccgggacttgtggggtccttctcctgtcactggttatcaccctttactgcaaacggggcagaaagaaactcctgtatatattcaaacaaccatttatgagaccagtacaaactactcaagaggaagatggctgtagctgccgatttccagaagaagaagaaggaggatgtgaactgagagtgaagttcagcaggagcgcagacgcccccgcgtaccagcagggccagaaccagctctataacgagctgaatctaggacgaagagaggagtacgatgttttggacaagagacgtggccgggaccctgagatggggggaaagccgagaaggaagaaccctcaggaaggcctgtacaatgaactgcagaaagataagatggcggaggcctacagtgagattgggatgaaaggcgagcgccggaggggcaaggggcacgatggcctttaccagggtctcagtacagccaccaaggacacctacgacgcccttcacatgcaggccctgccccctcgctaa

SEQ ID NO: 7757 - DNA, 1491 bp, synthetic construct
  source 1..1491: mol_type = other DNA
atggccttaccagtgaccgccttgctcctgccgctggccttgctgctccacgccgccaggccggacatccagatgacacagagccctagcagcctgtctgccagcgtgggagacagagtgaccatcacatgcaaggccagcgaccacatcaacaactggctggcctggtatcagcagaagcctggacaggcccctaagctgctgatctacggcgctaccacactggaaacaggcgtgcccagcagattttctggcagcggctctggcaccgactacaccctgacaatatccagcctccagcctgaggacttcgccacctactactgtcagcagagctggaacaccccttggacattcggccagggcaccaagctggaaatcaagagactcgagggaggctctgcccgcagcgaggaccgctaccgcaaccccaagggcggaagcttcgaacaagttcagcttcaacagcctggcgctgagctggtcaaacctggcgcttctgtgaagatgagctgcaaagccagcggctacgccttcagcagctactggatcaactggatgaagcagaaacccggccagggactcgaatggatcggccaaatctatcccggcgacggcgacaccaactacaacggcaagttcaagggcagagccacactgaccgccgatacctctagcagcacagcctacatgcagctgagcagcctgaccagcgaagatagcgccgtgtacttctgtgcccggtccatcacaacagtcgtgggctgcgctatggactattggggccagggaacaagcgtgaccgtgtctagtacgcgtaccacgacgccagcgccgcgaccaccaacaccggcgcccaccatcgcgtcgcagcccctgtccctgcgcccagaggcgtgccggccagcggcggggggcgcagtgcacacgagggggctggacttcgcctgtgacatctacatctgggcgcccttggccgggacttgtggggtccttctcctgtcactggttatcaccctttactgcaaacggggcagaaagaaactcctgtatatattcaaacaaccatttatgagaccagtacaaactactcaagaggaagatggctgtagctgccgatttccagaagaagaagaaggaggatgtgaactgagagtgaagttcagcaggagcgcagacgcccccgcgtaccagcagggccagaaccagctctataacgagctgaatctaggacgaagagaggagtacgatgttttggacaagagacgtggccgggaccctgagatggggggaaagccgagaaggaagaaccctcaggaaggcctgtacaatgaactgcagaaagataagatggcggaggcctacagtgagattgggatgaaaggcgagcgccggaggggcaaggggcacgatggcctttaccagggtctcagtacagccaccaaggacacctacgacgcccttcacatgcaggccctgccccctcgctaa

SEQ ID NO: 7758 - DNA, 1494 bp, synthetic construct
  source 1..1494: mol_type = other DNA
atggccttaccagtgaccgccttgctcctgccgctggccttgctgctccacgccgccaggccggacatccagatgacacagagccctagcagcctgtctgccagcgtgggagacagagtgaccatcacatgcaaggccagcgaccacatcaacaactggctggcctggtatcagcagaagcctggacaggcccctaagctgctgatctacggcgctaccacactggaaacaggcgtgcccagcagattttctggcagcggctctggcaccgactacaccctgacaatatccagcctccagcctgaggacttcgccacctactactgtcagcagagctggaacaccccttggacattcggccagggcaccaagctggaaatcaagagactcgagggaggctctgcccgcagcgaggaccgctaccgcaaccccaagggcggcggaagcttcgaacaagttcagcttcaacagcctggcgctgagctggtcaaacctggcgcttctgtgaagatgagctgcaaagccagcggctacgccttcagcagctactggatcaactggatgaagcagaaacccggccagggactcgaatggatcggccaaatctatcccggcgacggcgacaccaactacaacggcaagttcaagggcagagccacactgaccgccgatacctctagcagcacagcctacatgcagctgagcagcctgaccagcgaagatagcgccgtgtacttctgtgcccggtccatcacaacagtcgtgggctgcgctatggactattggggccagggaacaagcgtgaccgtgtctagtacgcgtaccacgacgccagcgccgcgaccaccaacaccggcgcccaccatcgcgtcgcagcccctgtccctgcgcccagaggcgtgccggccagcggcggggggcgcagtgcacacgagggggctggacttcgcctgtgacatctacatctgggcgcccttggccgggacttgtggggtccttctcctgtcactggttatcaccctttactgcaaacggggcagaaagaaactcctgtatatattcaaacaaccatttatgagaccagtacaaactactcaagaggaagatggctgtagctgccgatttccagaagaagaagaaggaggatgtgaactgagagtgaagttcagcaggagcgcagacgcccccgcgtaccagcagggccagaaccagctctataacgagctgaatctaggacgaagagaggagtacgatgttttggacaagagacgtggccgggaccctgagatggggggaaagccgagaaggaagaaccctcaggaaggcctgtacaatgaactgcagaaagataagatggcggaggcctacagtgagattgggatgaaaggcgagcgccggaggggcaaggggcacgatggcctttaccagggtctcagtacagccaccaaggacacctacgacgcccttcacatgcaggccctgccccctcgctaa

SEQ ID NO: 7759 - DNA, 1497 bp, synthetic construct
  source 1..1497: mol_type = other DNA
atggccttaccagtgaccgccttgctcctgccgctggccttgctgctccacgccgccaggccggacatccagatgacacagagccctagcagcctgtctgccagcgtgggagacagagtgaccatcacatgcaaggccagcgaccacatcaacaactggctggcctggtatcagcagaagcctggacaggcccctaagctgctgatctacggcgctaccacactggaaacaggcgtgcccagcagattttctggcagcggctctggcaccgactacaccctgacaatatccagcctccagcctgaggacttcgccacctactactgtcagcagagctggaacaccccttggacattcggccagggcaccaagctggaaatcaagagactcgagggaggctctgcccgcagcgaggaccgctaccgcaaccccaagggcagcggcggaagcttcgaacaagttcagcttcaacagcctggcgctgagctggtcaaacctggcgcttctgtgaagatgagctgcaaagccagcggctacgccttcagcagctactggatcaactggatgaagcagaaacccggccagggactcgaatggatcggccaaatctatcccggcgacggcgacaccaactacaacggcaagttcaagggcagagccacactgaccgccgatacctctagcagcacagcctacatgcagctgagcagcctgaccagcgaagatagcgccgtgtacttctgtgcccggtccatcacaacagtcgtgggctgcgctatggactattggggccagggaacaagcgtgaccgtgtctagtacgcgtaccacgacgccagcgccgcgaccaccaacaccggcgcccaccatcgcgtcgcagcccctgtccctgcgcccagaggcgtgccggccagcggcggggggcgcagtgcacacgagggggctggacttcgcctgtgacatctacatctgggcgcccttggccgggacttgtggggtccttctcctgtcactggttatcaccctttactgcaaacggggcagaaagaaactcctgtatatattcaaacaaccatttatgagaccagtacaaactactcaagaggaagatggctgtagctgccgatttccagaagaagaagaaggaggatgtgaactgagagtgaagttcagcaggagcgcagacgcccccgcgtaccagcagggccagaaccagctctataacgagctgaatctaggacgaagagaggagtacgatgttttggacaagagacgtggccgggaccctgagatggggggaaagccgagaaggaagaaccctcaggaaggcctgtacaatgaactgcagaaagataagatggcggaggcctacagtgagattgggatgaaaggcgagcgccggaggggcaaggggcacgatggcctttaccagggtctcagtacagccaccaaggacacctacgacgcccttcacatgcaggccctgccccctcgctaa

SEQ ID NO: 7760 - DNA, 1500 bp, synthetic construct
  source 1..1500: mol_type = other DNA
atggccttaccagtgaccgccttgctcctgccgctggccttgctgctccacgccgccaggccggacatccagatgacacagagccctagcagcctgtctgccagcgtgggagacagagtgaccatcacatgcaaggccagcgaccacatcaacaactggctggcctggtatcagcagaagcctggacaggcccctaagctgctgatctacggcgctaccacactggaaacaggcgtgcccagcagattttctggcagcggctctggcaccgactacaccctgacaatatccagcctccagcctgaggacttcgccacctactactgtcagcagagctggaacaccccttggacattcggccagggcaccaagctggaaatcaagagactcgagggaggctctgcccgcagcgaggaccgctaccgcaaccccaagggcagcgccggcggaagcttcgaacaagttcagcttcaacagcctggcgctgagctggtcaaacctggcgcttctgtgaagatgagctgcaaagccagcggctacgccttcagcagctactggatcaactggatgaagcagaaacccggccagggactcgaatggatcggccaaatctatcccggcgacggcgacaccaactacaacggcaagttcaagggcagagccacactgaccgccgatacctctagcagcacagcctacatgcagctgagcagcctgaccagcgaagatagcgccgtgtacttctgtgcccggtccatcacaacagtcgtgggctgcgctatggactattggggccagggaacaagcgtgaccgtgtctagtacgcgtaccacgacgccagcgccgcgaccaccaacaccggcgcccaccatcgcgtcgcagcccctgtccctgcgcccagaggcgtgccggccagcggcggggggcgcagtgcacacgagggggctggacttcgcctgtgacatctacatctgggcgcccttggccgggacttgtggggtccttctcctgtcactggttatcaccctttactgcaaacggggcagaaagaaactcctgtatatattcaaacaaccatttatgagaccagtacaaactactcaagaggaagatggctgtagctgccgatttccagaagaagaagaaggaggatgtgaactgagagtgaagttcagcaggagcgcagacgcccccgcgtaccagcagggccagaaccagctctataacgagctgaatctaggacgaagagaggagtacgatgttttggacaagagacgtggccgggaccctgagatggggggaaagccgagaaggaagaaccctcaggaaggcctgtacaatgaactgcagaaagataagatggcggaggcctacagtgagattgggatgaaaggcgagcgccggaggggcaaggggcacgatggcctttaccagggtctcagtacagccaccaaggacacctacgacgcccttcacatgcaggccctgccccctcgctaa

SEQ ID NO: 7761 - DNA, 1503 bp, synthetic construct
  source 1..1503: mol_type = other DNA
atggccttaccagtgaccgccttgctcctgccgctggccttgctgctccacgccgccaggccggacatccagatgacacagagccctagcagcctgtctgccagcgtgggagacagagtgaccatcacatgcaaggccagcgaccacatcaacaactggctggcctggtatcagcagaagcctggacaggcccctaagctgctgatctacggcgctaccacactggaaacaggcgtgcccagcagattttctggcagcggctctggcaccgactacaccctgacaatatccagcctccagcctgaggacttcgccacctactactgtcagcagagctggaacaccccttggacattcggccagggcaccaagctggaaatcaagagactcgagggaggctctgcccgcagcgaggaccgctaccgcaaccccaagggcagcgcctgcggcggaagcttcgaacaagttcagcttcaacagcctggcgctgagctggtcaaacctggcgcttctgtgaagatgagctgcaaagccagcggctacgccttcagcagctactggatcaactggatgaagcagaaacccggccagggactcgaatggatcggccaaatctatcccggcgacggcgacaccaactacaacggcaagttcaagggcagagccacactgaccgccgatacctctagcagcacagcctacatgcagctgagcagcctgaccagcgaagatagcgccgtgtacttctgtgcccggtccatcacaacagtcgtgggctgcgctatggactattggggccagggaacaagcgtgaccgtgtctagtacgcgtaccacgacgccagcgccgcgaccaccaacaccggcgcccaccatcgcgtcgcagcccctgtccctgcgcccagaggcgtgccggccagcggcggggggcgcagtgcacacgagggggctggacttcgcctgtgacatctacatctgggcgcccttggccgggacttgtggggtccttctcctgtcactggttatcaccctttactgcaaacggggcagaaagaaactcctgtatatattcaaacaaccatttatgagaccagtacaaactactcaagaggaagatggctgtagctgccgatttccagaagaagaagaaggaggatgtgaactgagagtgaagttcagcaggagcgcagacgcccccgcgtaccagcagggccagaaccagctctataacgagctgaatctaggacgaagagaggagtacgatgttttggacaagagacgtggccgggaccctgagatggggggaaagccgagaaggaagaaccctcaggaaggcctgtacaatgaactgcagaaagataagatggcggaggcctacagtgagattgggatgaaaggcgagcgccggaggggcaaggggcacgatggcctttaccagggtctcagtacagccaccaaggacacctacgacgcccttcacatgcaggccctgccccctcgctaa

SEQ ID NO: 7762 - DNA, 1506 bp, synthetic construct
  source 1..1506: mol_type = other DNA
atggccttaccagtgaccgccttgctcctgccgctggccttgctgctccacgccgccaggccggacatccagatgacacagagccctagcagcctgtctgccagcgtgggagacagagtgaccatcacatgcaaggccagcgaccacatcaacaactggctggcctggtatcagcagaagcctggacaggcccctaagctgctgatctacggcgctaccacactggaaacaggcgtgcccagcagattttctggcagcggctctggcaccgactacaccctgacaatatccagcctccagcctgaggacttcgccacctactactgtcagcagagctggaacaccccttggacattcggccagggcaccaagctggaaatcaagagactcgagggaggctctgcccgcagcgaggaccgctaccgcaaccccaagggcagcgcctgcaagggcggaagcttcgaacaagttcagcttcaacagcctggcgctgagctggtcaaacctggcgcttctgtgaagatgagctgcaaagccagcggctacgccttcagcagctactggatcaactggatgaagcagaaacccggccagggactcgaatggatcggccaaatctatcccggcgacggcgacaccaactacaacggcaagttcaagggcagagccacactgaccgccgatacctctagcagcacagcctacatgcagctgagcagcctgaccagcgaagatagcgccgtgtacttctgtgcccggtccatcacaacagtcgtgggctgcgctatggactattggggccagggaacaagcgtgaccgtgtctagtacgcgtaccacgacgccagcgccgcgaccaccaacaccggcgcccaccatcgcgtcgcagcccctgtccctgcgcccagaggcgtgccggccagcggcggggggcgcagtgcacacgagggggctggacttcgcctgtgacatctacatctgggcgcccttggccgggacttgtggggtccttctcctgtcactggttatcaccctttactgcaaacggggcagaaagaaactcctgtatatattcaaacaaccatttatgagaccagtacaaactactcaagaggaagatggctgtagctgccgatttccagaagaagaagaaggaggatgtgaactgagagtgaagttcagcaggagcgcagacgcccccgcgtaccagcagggccagaaccagctctataacgagctgaatctaggacgaagagaggagtacgatgttttggacaagagacgtggccgggaccctgagatggggggaaagccgagaaggaagaaccctcaggaaggcctgtacaatgaactgcagaaagataagatggcggaggcctacagtgagattgggatgaaaggcgagcgccggaggggcaaggggcacgatggcctttaccagggtctcagtacagccaccaaggacacctacgacgcccttcacatgcaggccctgccccctcgctaa

SEQ ID NO: 7763 - DNA, 1506 bp, synthetic construct
  source 1..1506: mol_type = other DNA
atggccttaccagtgaccgccttgctcctgccgctggccttgctgctccacgccgccaggccggacatccagatgacacagagccctagcagcctgtctgccagcgtgggagacagagtgaccatcacatgcaaggccagcgaccacatcaacaactggctggcctggtatcagcagaagcctggacaggcccctaagctgctgatctacggcgctaccacactggaaacaggcgtgcccagcagattttctggcagcggctctggcaccgactacaccctgacaatatccagcctccagcctgaggacttcgccacctactactgtcagcagagctggaacaccccttggacattcggccagggcaccaagctggaaatcaagagactcgagggaggctctgcccgcagcgaggaccgctaccgcaaccccaagggcagcgcctgcagcggcggaagcttcgaacaagttcagcttcaacagcctggcgctgagctggtcaaacctggcgcttctgtgaagatgagctgcaaagccagcggctacgccttcagcagctactggatcaactggatgaagcagaaacccggccagggactcgaatggatcggccaaatctatcccggcgacggcgacaccaactacaacggcaagttcaagggcagagccacactgaccgccgatacctctagcagcacagcctacatgcagctgagcagcctgaccagcgaagatagcgccgtgtacttctgtgcccggtccatcacaacagtcgtgggctgcgctatggactattggggccagggaacaagcgtgaccgtgtctagtacgcgtaccacgacgccagcgccgcgaccaccaacaccggcgcccaccatcgcgtcgcagcccctgtccctgcgcccagaggcgtgccggccagcggcggggggcgcagtgcacacgagggggctggacttcgcctgtgacatctacatctgggcgcccttggccgggacttgtggggtccttctcctgtcactggttatcaccctttactgcaaacggggcagaaagaaactcctgtatatattcaaacaaccatttatgagaccagtacaaactactcaagaggaagatggctgtagctgccgatttccagaagaagaagaaggaggatgtgaactgagagtgaagttcagcaggagcgcagacgcccccgcgtaccagcagggccagaaccagctctataacgagctgaatctaggacgaagagaggagtacgatgttttggacaagagacgtggccgggaccctgagatggggggaaagccgagaaggaagaaccctcaggaaggcctgtacaatgaactgcagaaagataagatggcggaggcctacagtgagattgggatgaaaggcgagcgccggaggggcaaggggcacgatggcctttaccagggtctcagtacagccaccaaggacacctacgacgcccttcacatgcaggccctgccccctcgctaa

SEQ ID NO: 7764 - DNA, 1491 bp, synthetic construct; identical to SEQ ID NO: 7757
  source 1..1491: mol_type = other DNA

SEQ ID NO: 7765 - DNA, 1491 bp, synthetic construct
  source 1..1491: mol_type = other DNA
atggccttaccagtgaccgccttgctcctgccgctggccttgctgctccacgccgccaggccggacatccagatgacacagagccctagcagcctgtctgccagcgtgggagacagagtgaccatcacatgcaaggccagcgaccacatcaacaactggctggcctggtatcagcagaagcctggacaggcccctaagctgctgatctacggcgctaccacactggaaacaggcgtgcccagcagattttctggcagcggctctggcaccgactacaccctgacaatatccagcctccagcctgaggacttcgccacctactactgtcagcagagctggaacaccccttggacattcggccagggcaccaagctggaaatcaagagactcgagggaggctctgcccgcagcgacgaccgctaccgcaaccccaagggcggaagcttcgaacaagttcagcttcaacagcctggcgctgagctggtcaaacctggcgcttctgtgaagatgagctgcaaagccagcggctacgccttcagcagctactggatcaactggatgaagcagaaacccggccagggactcgaatggatcggccaaatctatcccggcgacggcgacaccaactacaacggcaagttcaagggcagagccacactgaccgccgatacctctagcagcacagcctacatgcagctgagcagcctgaccagcgaagatagcgccgtgtacttctgtgcccggtccatcacaacagtcgtgggctgcgctatggactattggggccagggaacaagcgtgaccgtgtctagtacgcgtaccacgacgccagcgccgcgaccaccaacaccggcgcccaccatcgcgtcgcagcccctgtccctgcgcccagaggcgtgccggccagcggcggggggcgcagtgcacacgagggggctggacttcgcctgtgacatctacatctgggcgcccttggccgggacttgtggggtccttctcctgtcactggttatcaccctttactgcaaacggggcagaaagaaactcctgtatatattcaaacaaccatttatgagaccagtacaaactactcaagaggaagatggctgtagctgccgatttccagaagaagaagaaggaggatgtgaactgagagtgaagttcagcaggagcgcagacgcccccgcgtaccagcagggccagaaccagctctataacgagctgaatctaggacgaagagaggagtacgatgttttggacaagagacgtggccgggaccctgagatggggggaaagccgagaaggaagaaccctcaggaaggcctgtacaatgaactgcagaaagataagatggcggaggcctacagtgagattgggatgaaaggcgagcgccggaggggcaaggggcacgatggcctttaccagggtctcagtacagccaccaaggacacctacgacgcccttcacatgcaggccctgccccctcgctaa

SEQ ID NO: 7766 - DNA, 1491 bp, synthetic construct
  source 1..1491: mol_type = other DNA
atggccttaccagtgaccgccttgctcctgccgctggccttgctgctccacgccgccaggccggacatccagatgacacagagccctagcagcctgtctgccagcgtgggagacagagtgaccatcacatgcaaggccagcgaccacatcaacaactggctggcctggtatcagcagaagcctggacaggcccctaagctgctgatctacggcgctaccacactggaaacaggcgtgcccagcagattttctggcagcggctctggcaccgactacaccctgacaatatccagcctccagcctgaggacttcgccacctactactgtcagcagagctggaacaccccttggacattcggccagggcaccaagctggaaatcaagagactcgagggaggctctgcccgcagcgacgagcgctaccgcaaccccaagggcggaagcttcgaacaagttcagcttcaacagcctggcgctgagctggtcaaacctggcgcttctgtgaagatgagctgcaaagccagcggctacgccttcagcagctactggatcaactggatgaagcagaaacccggccagggactcgaatggatcggccaaatctatcccggcgacggcgacaccaactacaacggcaagttcaagggcagagccacactgaccgccgatacctctagcagcacagcctacatgcagctgagcagcctgaccagcgaagatagcgccgtgtacttctgtgcccggtccatcacaacagtcgtgggctgcgctatggactattggggccagggaacaagcgtgaccgtgtctagtacgcgtaccacgacgccagcgccgcgaccaccaacaccggcgcccaccatcgcgtcgcagcccctgtccctgcgcccagaggcgtgccggccagcggcggggggcgcagtgcacacgagggggctggacttcgcctgtgacatctacatctgggcgcccttggccgggacttgtggggtccttctcctgtcactggttatcaccctttactgcaaacggggcagaaagaaactcctgtatatattcaaacaaccatttatgagaccagtacaaactactcaagaggaagatggctgtagctgccgatttccagaagaagaagaaggaggatgtgaactgagagtgaagttcagcaggagcgcagacgcccccgcgtaccagcagggccagaaccagctctataacgagctgaatctaggacgaagagaggagtacgatgttttggacaagagacgtggccgggaccctgagatggggggaaagccgagaaggaagaaccctcaggaaggcctgtacaatgaactgcagaaagataagatggcggaggcctacagtgagattgggatgaaaggcgagcgccggaggggcaaggggcacgatggcctttaccagggtctcagtacagccaccaaggacacctacgacgcccttcacatgcaggccctgccccctcgctaa

SEQ ID NO: 7767 - DNA, 1491 bp, synthetic construct
  source 1..1491: mol_type = other DNA
atggccttaccagtgaccgccttgctcctgccgctggccttgctgctccacgccgccaggccggacatccagatgacacagagccctagcagcctgtctgccagcgtgggagacagagtgaccatcacatgcaaggccagcgaccacatcaacaactggctggcctggtatcagcagaagcctggacaggcccctaagctgctgatctacggcgctaccacactggaaacaggcgtgcccagcagattttctggcagcggctctggcaccgactacaccctgacaatatccagcctccagcctgaggacttcgccacctactactgtcagcagagctggaacaccccttggacattcggccagggcaccaagctggaaatcaagagactcgagggaggctctgcccgcgccgaggaccgctaccgcaaccccaagggcggaagcttcgaacaagttcagcttcaacagcctggcgctgagctggtcaaacctggcgcttctgtgaagatgagctgcaaagccagcggctacgccttcagcagctactggatcaactggatgaagcagaaacccggccagggactcgaatggatcggccaaatctatcccggcgacggcgacaccaactacaacggcaagttcaagggcagagccacactgaccgccgatacctctagcagcacagcctacatgcagctgagcagcctgaccagcgaagatagcgccgtgtacttctgtgcccggtccatcacaacagtcgtgggctgcgctatggactattggggccagggaacaagcgtgaccgtgtctagtacgcgtaccacgacgccagcgccgcgaccaccaacaccggcgcccaccatcgcgtcgcagcccctgtccctgcgcccagaggcgtgccggccagcggcggggggcgcagtgcacacgagggggctggacttcgcctgtgacatctacatctgggcgcccttggccgggacttgtggggtccttctcctgtcactggttatcaccctttactgcaaacggggcagaaagaaactcctgtatatattcaaacaaccatttatgagaccagtacaaactactcaagaggaagatggctgtagctgccgatttccagaagaagaagaaggaggatgtgaactgagagtgaagttcagcaggagcgcagacgcccccgcgtaccagcagggccagaaccagctctataacgagctgaatctaggacgaagagaggagtacgatgttttggacaagagacgtggccgggaccctgagatggggggaaagccgagaaggaagaaccctcaggaaggcctgtacaatgaactgcagaaagataagatggcggaggcctacagtgagattgggatgaaaggcgagcgccggaggggcaaggggcacgatggcctttaccagggtctcagtacagccaccaaggacacctacgacgcccttcacatgcaggccctgccccctcgctaa

SEQ ID NO: 7768 - DNA, 1491 bp, synthetic construct
  source 1..1491: mol_type = other DNA
atggccttaccagtgaccgccttgctcctgccgctggccttgctgctccacgccgccaggccggacatccagatgacacagagccctagcagcctgtctgccagcgtgggagacagagtgaccatcacatgcaaggccagcgaccacatcaacaactggctggcctggtatcagcagaagcctggacaggcccctaagctgctgatctacggcgctaccacactggaaacaggcgtgcccagcagattttctggcagcggctctggcaccgactacaccctgacaatatccagcctccagcctgaggacttcgccacctactactgtcagcagagctggaacaccccttggacattcggccagggcaccaagctggaaatcaagagactcgagggaggctctgcccgcaacgaggaccgctaccgcaaccccaagggcggaagcttcgaacaagttcagcttcaacagcctggcgctgagctggtcaaacctggcgcttctgtgaagatgagctgcaaagccagcggctacgccttcagcagctactggatcaactggatgaagcagaaacccggccagggactcgaatggatcggccaaatctatcccggcgacggcgacaccaactacaacggcaagttcaagggcagagccacactgaccgccgatacctctagcagcacagcctacatgcagctgagcagcctgaccagcgaagatagcgccgtgtacttctgtgcccggtccatcacaacagtcgtgggctgcgctatggactattggggccagggaacaagcgtgaccgtgtctagtacgcgtaccacgacgccagcgccgcgaccaccaacaccggcgcccaccatcgcgtcgcagcccctgtccctgcgcccagaggcgtgccggccagcggcggggggcgcagtgcacacgagggggctggacttcgcctgtgacatctacatctgggcgcccttggccgggacttgtggggtccttctcctgtcactggttatcaccctttactgcaaacggggcagaaagaaactcctgtatatattcaaacaaccatttatgagaccagtacaaactactcaagaggaagatggctgtagctgccgatttccagaagaagaagaaggaggatgtgaactgagagtgaagttcagcaggagcgcagacgcccccgcgtaccagcagggccagaaccagctctataacgagctgaatctaggacgaagagaggagtacgatgttttggacaagagacgtggccgggaccctgagatggggggaaagccgagaaggaagaaccctcaggaaggcctgtacaatgaactgcagaaagataagatggcggaggcctacagtgagattgggatgaaaggcgagcgccggaggggcaaggggcacgatggcctttaccagggtctcagtacagccaccaaggacacctacgacgcccttcacatgcaggccctgccccctcgctaa

SEQ ID NO: 7769 - DNA, 1491 bp, synthetic construct
  source 1..1491: mol_type = other DNA
atggccttaccagtgaccgccttgctcctgccgctggccttgctgctccacgccgccaggccggacatccagatgacacagagccctagcagcctgtctgccagcgtgggagacagagtgaccatcacatgcaaggccagcgaccacatcaacaactggctggcctggtatcagcagaagcctggacaggcccctaagctgctgatctacggcgctaccacactggaaacaggcgtgcccagcagattttctggcagcggctctggcaccgactacaccctgacaatatccagcctccagcctgaggacttcgccacctactactgtcagcagagctggaacaccccttggacattcggccagggcaccaagctggaaatcaagagactcgagggaggctctgcccgcaacgaggaccgctaccgcagccccaagggcggaagcttcgaacaagttcagcttcaacagcctggcgctgagctggtcaaacctggcgcttctgtgaagatgagctgcaaagccagcggctacgccttcagcagctactggatcaactggatgaagcagaaacccggccagggactcgaatggatcggccaaatctatcccggcgacggcgacaccaactacaacggcaagttcaagggcagagccacactgaccgccgatacctctagcagcacagcctacatgcagctgagcagcctgaccagcgaagatagcgccgtgtacttctgtgcccggtccatcacaacagtcgtgggctgcgctatggactattggggccagggaacaagcgtgaccgtgtctagtacgcgtaccacgacgccagcgccgcgaccaccaacaccggcgcccaccatcgcgtcgcagcccctgtccctgcgcccagaggcgtgccggccagcggcggggggcgcagtgcacacgagggggctggacttcgcctgtgacatctacatctgggcgcccttggccgggacttgtggggtccttctcctgtcactggttatcaccctttactgcaaacggggcagaaagaaactcctgtatatattcaaacaaccatttatgagaccagtacaaactactcaagaggaagatggctgtagctgccgatttccagaagaagaagaaggaggatgtgaactgagagtgaagttcagcaggagcgcagacgcccccgcgtaccagcagggccagaaccagctctataacgagctgaatctaggacgaagagaggagtacgatgttttggacaagagacgtggccgggaccctgagatggggggaaagccgagaaggaagaaccctcaggaaggcctgtacaatgaactgcagaaagataagatggcggaggcctacagtgagattgggatgaaaggcgagcgccggaggggcaaggggcacgatggcctttaccagggtctcagtacagccaccaaggacacctacgacgcccttcacatgcaggccctgccccctcgctaa

SEQ ID NO: 7770 - DNA, 1482 bp, synthetic construct; identical to SEQ ID NO: 7754
  source 1..1482: mol_type = other DNA

SEQ ID NO: 7771 - DNA, 1482 bp, synthetic construct
  source 1..1482: mol_type = other DNA
atggccttaccagtgaccgccttgctcctgccgctggccttgctgctccacgccgccaggccggacatccagatgacacagagccctagcagcctgtctgccagcgtgggagacagagtgaccatcacatgcaaggccagcgaccacatcaacaactggctggcctggtatcagcagaagcctggacaggcccctaagctgctgatctacggcgctaccacactggaaacaggcgtgcccagcagattttctggcagcggctctggcaccgactacaccctgacaatatccagcctccagcctgaggacttcgccacctactactgtcagcagagctggaacaccccttggacattcggccagggcaccaagctggaaatcaagagactcgagggaggctctgcccgcagcgaggaccgctacaagggcggaagcttcgaacaagttcagcttcaacagcctggcgctgagctggtcaaacctggcgcttctgtgaagatgagctgcaaagccagcggctacgccttcagcagctactggatcaactggatgaagcagaaacccggccagggactcgaatggatcggccaaatctatcccggcgacggcgacaccaactacaacggcaagttcaagggcagagccacactgaccgccgatacctctagcagcacagcctacatgcagctgagcagcctgaccagcgaagatagcgccgtgtacttctgtgcccggtccatcacaacagtcgtgggctgcgctatggactattggggccagggaacaagcgtgaccgtgtctagtacgcgtaccacgacgccagcgccgcgaccaccaacaccggcgcccaccatcgcgtcgcagcccctgtccctgcgcccagaggcgtgccggccagcggcggggggcgcagtgcacacgagggggctggacttcgcctgtgacatctacatctgggcgcccttggccgggacttgtggggtccttctcctgtcactggttatcaccctttactgcaaacggggcagaaagaaactcctgtatatattcaaacaaccatttatgagaccagtacaaactactcaagaggaagatggctgtagctgccgatttccagaagaagaagaaggaggatgtgaactgagagtgaagttcagcaggagcgcagacgcccccgcgtaccagcagggccagaaccagctctataacgagctgaatctaggacgaagagaggagtacgatgttttggacaagagacgtggccgggaccctgagatggggggaaagccgagaaggaagaaccctcaggaaggcctgtacaatgaactgcagaaagataagatggcggaggcctacagtgagattgggatgaaaggcgagcgccggaggggcaaggggcacgatggcctttaccagggtctcagtacagccaccaaggacacctacgacgcccttcacatgcaggccctgccccctcgctaa

SEQ ID NO: 7772 - DNA, 1482 bp, synthetic construct
  source 1..1482: mol_type = other DNA
atggccttaccagtgaccgccttgctcctgccgctggccttgctgctccacgccgccaggccggacatccagatgacacagagccctagcagcctgtctgccagcgtgggagacagagtgaccatcacatgcaaggccagcgaccacatcaacaactggctggcctggtatcagcagaagcctggacaggcccctaagctgctgatctacggcgctaccacactggaaacaggcgtgcccagcagattttctggcagcggctctggcaccgactacaccctgacaatatccagcctccagcctgaggacttcgccacctactactgtcagcagagctggaacaccccttggacattcggccagggcaccaagctggaaatcaagagactcgagggaggctctgcccgcagcgaggaccgctacagcggcggaagcttcgaacaagttcagcttcaacagcctggcgctgagctggtcaaacctggcgcttctgtgaagatgagctgcaaagccagcggctacgccttcagcagctactggatcaactggatgaagcagaaacccggccagggactcgaatggatcggccaaatctatcccggcgacggcgacaccaactacaacggcaagttcaagggcagagccacactgaccgccgatacctctagcagcacagcctacatgcagctgagcagcctgaccagcgaagatagcgccgtgtacttctgtgcccggtccatcacaacagtcgtgggctgcgctatggactattggggccagggaacaagcgtgaccgtgtctagtacgcgtaccacgacgccagcgccgcgaccaccaacaccggcgcccaccatcgcgtcgcagcccctgtccctgcgcccagaggcgtgccggccagcggcggggggcgcagtgcacacgagggggctggacttcgcctgtgacatctacatctgggcgcccttggccgggacttgtggggtccttctcctgtcactggttatcaccctttactgcaaacggggcagaaagaaactcctgtatatattcaaacaaccatttatgagaccagtacaaactactcaagaggaagatggctgtagctgccgatttccagaagaagaagaaggaggatgtgaactgagagtgaagttcagcaggagcgcagacgcccccgcgtaccagcagggccagaaccagctctataacgagctgaatctaggacgaagagaggagtacgatgttttggacaagagacgtggccgggaccctgagatggggggaaagccgagaaggaagaaccctcaggaaggcctgtacaatgaactgcagaaagataagatggcggaggcctacagtgagattgggatgaaaggcgagcgccggaggggcaaggggcacgatggcctttaccagggtctcagtacagccaccaaggacacctacgacgcccttcacatgcaggccctgccccctcgctaa

SEQ ID NO: 7773 - DNA, 1482 bp, synthetic construct
  source 1..1482: mol_type = other DNA
atggccttaccagtgaccgccttgctcctgccgctggccttgctgctccacgccgccaggccggacatccagatgacacagagccctagcagcctgtctgccagcgtgggagacagagtgaccatcacatgcaaggccagcgaccacatcaacaactggctggcctggtatcagcagaagcctggacaggcccctaagctgctgatctacggcgctaccacactggaaacaggcgtgcccagcagattttctggcagcggctctggcaccgactacaccctgacaatatccagcctccagcctgaggacttcgccacctactactgtcagcagagctggaacaccccttggacattcggccagggcaccaagctggaaatcaagagactcgagggaggctctgcccgcagcgaggaccgctacttcggcggaagcttcgaacaagttcagcttcaacagcctggcgctgagctggtcaaacctggcgcttctgtgaagatgagctgcaaagccagcggctacgccttcagcagctactggatcaactggatgaagcagaaacccggccagggactcgaatggatcggccaaatctatcccggcgacggcgacaccaactacaacggcaagttcaagggcagagccacactgaccgccgatacctctagcagcacagcctacatgcagctgagcagcctgaccagcgaagatagcgccgtgtacttctgtgcccggtccatcacaacagtcgtgggctgcgctatggactattggggccagggaacaagcgtgaccgtgtctagtacgcgtaccacgacgccagcgccgcgaccaccaacaccggcgcccaccatcgcgtcgcagcccctgtccctgcgcccagaggcgtgccggccagcggcggggggcgcagtgcacacgagggggctggacttcgcctgtgacatctacatctgggcgcccttggccgggacttgtggggtccttctcctgtcactggttatcaccctttactgcaaacggggcagaaagaaactcctgtatatattcaaacaaccatttatgagaccagtacaaactactcaagaggaagatggctgtagctgccgatttccagaagaagaagaaggaggatgtgaactgagagtgaagttcagcaggagcgcagacgcccccgcgtaccagcagggccagaaccagctctataacgagctgaatctaggacgaagagaggagtacgatgttttggacaagagacgtggccgggaccctgagatggggggaaagccgagaaggaagaaccctcaggaaggcctgtacaatgaactgcagaaagataagatggcggaggcctacagtgagattgggatgaaaggcgagcgccggaggggcaaggggcacgatggcctttaccagggtctcagtacagccaccaaggacacctacgacgcccttcacatgcaggccctgccccctcgctaa

SEQ ID NO: 7774 - DNA, 1482 bp, synthetic construct
  source 1..1482: mol_type = other DNA
atggccttaccagtgaccgccttgctcctgccgctggccttgctgctccacgccgccaggccggacatccagatgacacagagccctagcagcctgtctgccagcgtgggagacagagtgaccatcacatgcaaggccagcgaccacatcaacaactggctggcctggtatcagcagaagcctggacaggcccctaagctgctgatctacggcgctaccacactggaaacaggcgtgcccagcagattttctggcagcggctctggcaccgactacaccctgacaatatccagcctccagcctgaggacttcgccacctactactgtcagcagagctggaacaccccttggacattcggccagggcaccaagctggaaatcaagagactcgagggaggctctgcccgcagcgaggaccgctacatcggcggaagcttcgaacaagttcagcttcaacagcctggcgctgagctggtcaaacctggcgcttctgtgaagatgagctgcaaagccagcggctacgccttcagcagctactggatcaactggatgaagcagaaacccggccagggactcgaatggatcggccaaatctatcccggcgacggcgacaccaactacaacggcaagttcaagggcagagccacactgaccgccgatacctctagcagcacagcctacatgcagctgagcagcctgaccagcgaagatagcgccgtgtacttctgtgcccggtccatcacaacagtcgtgggctgcgctatggactattggggccagggaacaagcgtgaccgtgtctagtacgcgtaccacgacgccagcgccgcgaccaccaacaccggcgcccaccatcgcgtcgcagcccctgtccctgcgcccagaggcgtgccggccagcggcggggggcgcagtgcacacgagggggctggacttcgcctgtgacatctacatctgggcgcccttggccgggacttgtggggtccttctcctgtcactggttatcaccctttactgcaaacggggcagaaagaaactcctgtatatattcaaacaaccatttatgagaccagtacaaactactcaagaggaagatggctgtagctgccgatttccagaagaagaagaaggaggatgtgaactgagagtgaagttcagcaggagcgcagacgcccccgcgtaccagcagggccagaaccagctctataacgagctgaatctaggacgaagagaggagtacgatgttttggacaagagacgtggccgggaccctgagatggggggaaagccgagaaggaagaaccctcaggaaggcctgtacaatgaactgcagaaagataagatggcggaggcctacagtgagattgggatgaaaggcgagcgccggaggggcaaggggcacgatggcctttaccagggtctcagtacagccaccaaggacacctacgacgcccttcacatgcaggccctgccccctcgctaa

SEQ ID NO: 7775 - DNA, 1482 bp, synthetic construct
  source 1..1482: mol_type = other DNA
atggccttaccagtgaccgccttgctcctgccgctggccttgctgctccacgccgccaggccggacatccagatgacacagagccctagcagcctgtctgccagcgtgggagacagagtgaccatcacatgcaaggccagcgaccacatcaacaactggctggcctggtatcagcagaagcctggacaggcccctaagctgctgatctacggcgctaccacactggaaacaggcgtgcccagcagattttctggcagcggctctggcaccgactacaccctgacaatatccagcctccagcctgaggacttcgccacctactactgtcagcagagctggaacaccccttggacattcggccagggcaccaagctggaaatcaagagactcgagggaggctctgcccgcagcgaggaccgctacaacggcggaagcttcgaacaagttcagcttcaacagcctggcgctgagctggtcaaacctggcgcttctgtgaagatgagctgcaaagccagcggctacgccttcagcagctactggatcaactggatgaagcagaaacccggccagggactcgaatggatcggccaaatctatcccggcgacggcgacaccaactacaacggcaagttcaagggcagagccacactgaccgccgatacctctagcagcacagcctacatgcagctgagcagcctgaccagcgaagatagcgccgtgtacttctgtgcccggtccatcacaacagtcgtgggctgcgctatggactattggggccagggaacaagcgtgaccgtgtctagtacgcgtaccacgacgccagcgccgcgaccaccaacaccggcgcccaccatcgcgtcgcagcccctgtccctgcgcccagaggcgtgccggccagcggcggggggcgcagtgcacacgagggggctggacttcgcctgtgacatctacatctgggcgcccttggccgggacttgtggggtccttctcctgtcactggttatcaccctttactgcaaacggggcagaaagaaactcctgtatatattcaaacaaccatttatgagaccagtacaaactactcaagaggaagatggctgtagctgccgatttccagaagaagaagaaggaggatgtgaactgagagtgaagttcagcaggagcgcagacgcccccgcgtaccagcagggccagaaccagctctataacgagctgaatctaggacgaagagaggagtacgatgttttggacaagagacgtggccgggaccctgagatggggggaaagccgagaaggaagaaccctcaggaaggcctgtacaatgaactgcagaaagataagatggcggaggcctacagtgagattgggatgaaaggcgagcgccggaggggcaaggggcacgatggcctttaccagggtctcagtacagccaccaaggacacctacgacgcccttcacatgcaggccctgccccctcgctaa

SEQ ID NO: 7776 - DNA, 1482 bp, synthetic construct
  source 1..1482: mol_type = other DNA
atggccttaccagtgaccgccttgctcctgccgctggccttgctgctccacgccgccaggccggacatccagatgacacagagccctagcagcctgtctgccagcgtgggagacagagtgaccatcacatgcaaggccagcgaccacatcaacaactggctggcctggtatcagcagaagcctggacaggcccctaagctgctgatctacggcgctaccacactggaaacaggcgtgcccagcagattttctggcagcggctctggcaccgactacaccctgacaatatccagcctccagcctgaggacttcgccacctactactgtcagcagagctggaacaccccttggacattcggccagggcaccaagctggaaatcaagagactcgagggaggctctgcccgcagcgaggaccgctacaccggcggaagcttcgaacaagttcagcttcaacagcctggcgctgagctggtcaaacctggcgcttctgtgaagatgagctgcaaagccagcggctacgccttcagcagctactggatcaactggatgaagcagaaacccggccagggactcgaatggatcggccaaatctatcccggcgacggcgacaccaactacaacggcaagttcaagggcagagccacactgaccgccgatacctctagcagcacagcctacatgcagctgagcagcctgaccagcgaagatagcgccgtgtacttctgtgcccggtccatcacaacagtcgtgggctgcgctatggactattggggccagggaacaagcgtgaccgtgtctagtacgcgtaccacgacgccagcgccgcgaccaccaacaccggcgcccaccatcgcgtcgcagcccctgtccctgcgcccagaggcgtgccggccagcggcggggggcgcagtgcacacgagggggctggacttcgcctgtgacatctacatctgggcgcccttggccgggacttgtggggtccttctcctgtcactggttatcaccctttactgcaaacggggcagaaagaaactcctgtatatattcaaacaaccatttatgagaccagtacaaactactcaagaggaagatggctgtagctgccgatttccagaagaagaagaaggaggatgtgaactgagagtgaagttcagcaggagcgcagacgcccccgcgtaccagcagggccagaaccagctctataacgagctgaatctaggacgaagagaggagtacgatgttttggacaagagacgtggccgggaccctgagatggggggaaagccgagaaggaagaaccctcaggaaggcctgtacaatgaactgcagaaagataagatggcggaggcctacagtgagattgggatgaaaggcgagcgccggaggggcaaggggcacgatggcctttaccagggtctcagtacagccaccaaggacacctacgacgcccttcacatgcaggccctgccccctcgctaa

SEQ ID NO: 7777 - DNA, 1482 bp, synthetic construct
  source 1..1482: mol_type = other DNA
atggccttaccagtgaccgccttgctcctgccgctggccttgctgctccacgccgccaggccggacatccagatgacacagagccctagcagcctgtctgccagcgtgggagacagagtgaccatcacatgcaaggccagcgaccacatcaacaactggctggcctggtatcagcagaagcctggacaggcccctaagctgctgatctacggcgctaccacactggaaacaggcgtgcccagcagattttctggcagcggctctggcaccgactacaccctgacaatatccagcctccagcctgaggacttcgccacctactactgtcagcagagctggaacaccccttggacattcggccagggcaccaagctggaaatcaagagactcgagggaggctctgcccgcagcgaggaccgctacgccggcggaagcttcgaacaagttcagcttcaacagcctggcgctgagctggtcaaacctggcgcttctgtgaagatgagctgcaaagccagcggctacgccttcagcagctactggatcaactggatgaagcagaaacccggccagggactcgaatggatcggccaaatctatcccggcgacggcgacaccaactacaacggcaagttcaagggcagagccacactgaccgccgatacctctagcagcacagcctacatgcagctgagcagcctgaccagcgaagatagcgccgtgtacttctgtgcccggtccatcacaacagtcgtgggctgcgctatggactattggggccagggaacaagcgtgaccgtgtctagtacgcgtaccacgacgccagcgccgcgaccaccaacaccggcgcccaccatcgcgtcgcagcccctgtccctgcgcccagaggcgtgccggccagcggcggggggcgcagtgcacacgagggggctggacttcgcctgtgacatctacatctgggcgcccttggccgggacttgtggggtccttctcctgtcactggttatcaccctttactgcaaacggggcagaaagaaactcctgtatatattcaaacaaccatttatgagaccagtacaaactactcaagaggaagatggctgtagctgccgatttccagaagaagaagaaggaggatgtgaactgagagtgaagttcagcaggagcgcagacgcccccgcgtaccagcagggccagaaccagctctataacgagctgaatctaggacgaagagaggagtacgatgttttggacaagagacgtggccgggaccctgagatggggggaaagccgagaaggaagaaccctcaggaaggcctgtacaatgaactgcagaaagataagatggcggaggcctacagtgagattgggatgaaaggcgagcgccggaggggcaaggggcacgatggcctttaccagggtctcagtacagccaccaaggacacctacgacgcccttcacatgcaggccctgccccctcgctaa

SEQ ID NO: 7778 - DNA, 1482 bp, synthetic construct
  source 1..1482: mol_type = other DNA
atggccttaccagtgaccgccttgctcctgccgctggccttgctgctccacgccgccaggccggacatccagatgacacagagccctagcagcctgtctgccagcgtgggagacagagtgaccatcacatgcaaggccagcgaccacatcaacaactggctggcctggtatcagcagaagcctggacaggcccctaagctgctgatctacggcgctaccacactggaaacaggcgtgcccagcagattttctggcagcggctctggcaccgactacaccctgacaatatccagcctccagcctgaggacttcgccacctactactgtcagcagagctggaacaccccttggacattcggccagggcaccaagctggaaatcaagagactcgagggaggctctgcccgcagcgaggaccgctactacggcggaagcttcgaacaagttcagcttcaacagcctggcgctgagctggtcaaacctggcgcttctgtgaagatgagctgcaaagccagcggctacgccttcagcagctactggatcaactggatgaagcagaaacccggccagggactcgaatggatcggccaaatctatcccggcgacggcgacaccaactacaacggcaagttcaagggcagagccacactgaccgccgatacctctagcagcacagcctacatgcagctgagcagcctgaccagcgaagatagcgccgtgtacttctgtgcccggtccatcacaacagtcgtgggctgcgctatggactattggggccagggaacaagcgtgaccgtgtctagtacgcgtaccacgacgccagcgccgcgaccaccaacaccggcgcccaccatcgcgtcgcagcccctgtccctgcgcccagaggcgtgccggccagcggcggggggcgcagtgcacacgagggggctggacttcgcctgtgacatctacatctgggcgcccttggccgggacttgtggggtccttctcctgtcactggttatcaccctttactgcaaacggggcagaaagaaactcctgtatatattcaaacaaccatttatgagaccagtacaaactactcaagaggaagatggctgtagctgccgatttccagaagaagaagaaggaggatgtgaactgagagtgaagttcagcaggagcgcagacgcccccgcgtaccagcagggccagaaccagctctataacgagctgaatctaggacgaagagaggagtacgatgttttggacaagagacgtggccgggaccctgagatggggggaaagccgagaaggaagaaccctcaggaaggcctgtacaatgaactgcagaaagataagatggcggaggcctacagtgagattgggatgaaaggcgagcgccggaggggcaaggggcacgatggcctttaccagggtctcagtacagccaccaaggacacctacgacgcccttcacatgcaggccctgccccctcgctaa

SEQ ID NO: 7779 - DNA, 1482 bp, synthetic construct
  source 1..1482: mol_type = other DNA
atggccttaccagtgaccgccttgctcctgccgctggccttgctgctccacgccgccaggccggacatccagatgacacagagccctagcagcctgtctgccagcgtgggagacagagtgaccatcacatgcaaggccagcgaccacatcaacaactggctggcctggtatcagcagaagcctggacaggcccctaagctgctgatctacggcgctaccacactggaaacaggcgtgcccagcagattttctggcagcggctctggcaccgactacaccctgacaatatccagcctccagcctgaggacttcgccacctactactgtcagcagagctggaacaccccttggacattcggccagggcaccaagctggaaatcaagagactcgagggaggctctgcccgcagcgaggaccgctaccccggcggaagcttcgaacaagttcagcttcaacagcctggcgctgagctggtcaaacctggcgcttctgtgaagatgagctgcaaagccagcggctacgccttcagcagctactggatcaactggatgaagcagaaacccggccagggactcgaatggatcggccaaatctatcccggcgacggcgacaccaactacaacggcaagttcaagggcagagccacactgaccgccgatacctctagcagcacagcctacatgcagctgagcagcctgaccagcgaagatagcgccgtgtacttctgtgcccggtccatcacaacagtcgtgggctgcgctatggactattggggccagggaacaagcgtgaccgtgtctagtacgcgtaccacgacgccagcgccgcgaccaccaacaccggcgcccaccatcgcgtcgcagcccctgtccctgcgcccagaggcgtgccggccagcggcggggggcgcagtgcacacgagggggctggacttcgcctgtgacatctacatctgggcgcccttggccgggacttgtggggtccttctcctgtcactggttatcaccctttactgcaaacggggcagaaagaaactcctgtatatattcaaacaaccatttatgagaccagtacaaactactcaagaggaagatggctgtagctgccgatttccagaagaagaagaaggaggatgtgaactgagagtgaagttcagcaggagcgcagacgcccccgcgtaccagcagggccagaaccagctctataacgagctgaatctaggacgaagagaggagtacgatgttttggacaagagacgtggccgggaccctgagatggggggaaagccgagaaggaagaaccctcaggaaggcctgtacaatgaactgcagaaagataagatggcggaggcctacagtgagattgggatgaaaggcgagcgccggaggggcaaggggcacgatggcctttaccagggtctcagtacagccaccaaggacacctacgacgcccttcacatgcaggccctgccccctcgctaa

SEQ ID NO: 7780 - DNA, 1482 bp, synthetic construct
  source 1..1482: mol_type = other DNA
atggccttaccagtgaccgccttgctcctgccgctggccttgctgctccacgccgccaggccggacatccagatgacacagagccctagcagcctgtctgccagcgtgggagacagagtgaccatcacatgcaaggccagcgaccacatcaacaactggctggcctggtatcagcagaagcctggacaggcccctaagctgctgatctacggcgctaccacactggaaacaggcgtgcccagcagattttctggcagcggctctggcaccgactacaccctgacaatatccagcctccagcctgaggacttcgccacctactactgtcagcagagctggaacaccccttggacattcggccagggcaccaagctggaaatcaagagactcgagggaggctctgcccgcagcgaggaccgctacgacggcggaagcttcgaacaagttcagcttcaacagcctggcgctgagctggtcaaacctggcgcttctgtgaagatgagctgcaaagccagcggctacgccttcagcagctactggatcaactggatgaagcagaaacccggccagggactcgaatggatcggccaaatctatcccggcgacggcgacaccaactacaacggcaagttcaagggcagagccacactgaccgccgatacctctagcagcacagcctacatgcagctgagcagcctgaccagcgaagatagcgccgtgtacttctgtgcccggtccatcacaacagtcgtgggctgcgctatggactattggggccagggaacaagcgtgaccgtgtctagtacgcgtaccacgacgccagcgccgcgaccaccaacaccggcgcccaccatcgcgtcgcagcccctgtccctgcgcccagaggcgtgccggccagcggcggggggcgcagtgcacacgagggggctggacttcgcctgtgacatctacatctgggcgcccttggccgggacttgtggggtccttctcctgtcactggttatcaccctttactgcaaacggggcagaaagaaactcctgtatatattcaaacaaccatttatgagaccagtacaaactactcaagaggaagatggctgtagctgccgatttccagaagaagaagaaggaggatgtgaactgagagtgaagttcagcaggagcgcagacgcccccgcgtaccagcagggccagaaccagctctataacgagctgaatctaggacgaagagaggagtacgatgttttggacaagagacgtggccgggaccctgagatggggggaaagccgagaaggaagaaccctcaggaaggcctgtacaatgaactgcagaaagataagatggcggaggcctacagtgagattgggatgaaaggcgagcgccggaggggcaaggggcacgatggcctttaccagggtctcagtacagccaccaaggacacctacgacgcccttcacatgcaggccctgccccctcgctaa

SEQ ID NO: 7781 - DNA, 1482 bp, synthetic construct
  source 1..1482: mol_type = other DNA
atggccttaccagtgaccgccttgctcctgccgctggccttgctgctccacgccgccaggccggacatccagatgacacagagccctagcagcctgtctgccagcgtgggagacagagtgaccatcacatgcaaggccagcgaccacatcaacaactggctggcctggtatcagcagaagcctggacaggcccctaagctgctgatctacggcgctaccacactggaaacaggcgtgcccagcagattttctggcagcggctctggcaccgactacaccctgacaatatccagcctccagcctgaggacttcgccacctactactgtcagcagagctggaacaccccttggacattcggccagggcaccaagctggaaatcaagagactcgagggaggctctgcccgcagcgaggaccactaccgcggcggaagcttcgaacaagttcagcttcaacagcctggcgctgagctggtcaaacctggcgcttctgtgaagatgagctgcaaagccagcggctacgccttcagcagctactggatcaactggatgaagcagaaacccggccagggactcgaatggatcggccaaatctatcccggcgacggcgacaccaactacaacggcaagttcaagggcagagccacactgaccgccgatacctctagcagcacagcctacatgcagctgagcagcctgaccagcgaagatagcgccgtgtacttctgtgcccggtccatcacaacagtcgtgggctgcgctatggactattggggccagggaacaagcgtgaccgtgtctagtacgcgtaccacgacgccagcgccgcgaccaccaacaccggcgcccaccatcgcgtcgcagcccctgtccctgcgcccagaggcgtgccggccagcggcggggggcgcagtgcacacgagggggctggacttcgcctgtgacatctacatctgggcgcccttggccgggacttgtggggtccttctcctgtcactggttatcaccctttactgcaaacggggcagaaagaaactcctgtatatattcaaacaaccatttatgagaccagtacaaactactcaagaggaagatggctgtagctgccgatttccagaagaagaagaaggaggatgtgaactgagagtgaagttcagcaggagcgcagacgcccccgcgtaccagcagggccagaaccagctctataacgagctgaatctaggacgaagagaggagtacgatgttttggacaagagacgtggccgggaccctgagatggggggaaagccgagaaggaagaaccctcaggaaggcctgtacaatgaactgcagaaagataagatggcggaggcctacagtgagattgggatgaaaggcgagcgccggaggggcaaggggcacgatggcctttaccagggtctcagtacagccaccaaggacacctacgacgcccttcacatgcaggccctgccccctcgctaa

SEQ ID NO: 7782 - DNA, 1482 bp, synthetic construct
  source 1..1482: mol_type = other DNA
atggccttaccagtgaccgccttgctcctgccgctggccttgctgctccacgccgccaggccggacatccagatgacacagagccctagcagcctgtctgccagcgtgggagacagagtgaccatcacatgcaaggccagcgaccacatcaacaactggctggcctggtatcagcagaagcctggacaggcccctaagctgctgatctacggcgctaccacactggaaacaggcgtgcccagcagattttctggcagcggctctggcaccgactacaccctgacaatatccagcctccagcctgaggacttcgccacctactactgtcagcagagctggaacaccccttggacattcggccagggcaccaagctggaaatcaagagactcgagggaggctctgcccgcagcgagagccgctaccgcggcggaagcttcgaacaagttcagcttcaacagcctggcgctgagctggtcaaacctggcgcttctgtgaagatgagctgcaaagccagcggctacgccttcagcagctactggatcaactggatgaagcagaaacccggccagggactcgaatggatcggccaaatctatcccggcgacggcgacaccaactacaacggcaagttcaagggcagagccacactgaccgccgatacctctagcagcacagcctacatgcagctgagcagcctgaccagcgaagatagcgccgtgtacttctgtgcccggtccatcacaacagtcgtgggctgcgctatggactattggggccagggaacaagcgtgaccgtgtctagtacgcgtaccacgacgccagcgccgcgaccaccaacaccggcgcccaccatcgcgtcgcagcccctgtccctgcgcccagaggcgtgccggccagcggcggggggcgcagtgcacacgagggggctggacttcgcctgtgacatctacatctgggcgcccttggccgggacttgtggggtccttctcctgtcactggttatcaccctttactgcaaacggggcagaaagaaactcctgtatatattcaaacaaccatttatgagaccagtacaaactactcaagaggaagatggctgtagctgccgatttccagaagaagaagaaggaggatgtgaactgagagtgaagttcagcaggagcgcagacgcccccgcgtaccagcagggccagaaccagctctataacgagctgaatctaggacgaagagaggagtacgatgttttggacaagagacgtggccgggaccctgagatggggggaaagccgagaaggaagaaccctcaggaaggcctgtacaatgaactgcagaaagataagatggcggaggcctacagtgagattgggatgaaaggcgagcgccggaggggcaaggggcacgatggcctttaccagggtctcagtacagccaccaaggacacctacgacgcccttcacatgcaggccctgccccctcgctaa

SEQ ID NO: 7783 - DNA, 1482 bp, synthetic construct
  source 1..1482: mol_type = other DNA
atggccttaccagtgaccgccttgctcctgccgctggccttgctgctccacgccgccaggccggacatccagatgacacagagccctagcagcctgtctgccagcgtgggagacagagtgaccatcacatgcaaggccagcgaccacatcaacaactggctggcctggtatcagcagaagcctggacaggcccctaagctgctgatctacggcgctaccacactggaaacaggcgtgcccagcagattttctggcagcggctctggcaccgactacaccctgacaatatccagcctccagcctgaggacttcgccacctactactgtcagcagagctggaacaccccttggacattcggccagggcaccaagctggaaatcaagagactcgagggaggctctgcccgcagcgagaaccgctaccgcggcggaagcttcgaacaagttcagcttcaacagcctggcgctgagctggtcaaacctggcgcttctgtgaagatgagctgcaaagccagcggctacgccttcagcagctactggatcaactggatgaagcagaaacccggccagggactcgaatggatcggccaaatctatcccggcgacggcgacaccaactacaacggcaagttcaagggcagagccacactgaccgccgatacctctagcagcacagcctacatgcagctgagcagcctgaccagcgaagatagcgccgtgtacttctgtgcccggtccatcacaacagtcgtgggctgcgctatggactattggggccagggaacaagcgtgaccgtgtctagtacgcgtaccacgacgccagcgccgcgaccaccaacaccggcgcccaccatcgcgtcgcagcccctgtccctgcgcccagaggcgtgccggccagcggcggggggcgcagtgcacacgagggggctggacttcgcctgtgacatctacatctgggcgcccttggccgggacttgtggggtccttctcctgtcactggttatcaccctttactgcaaacggggcagaaagaaactcctgtatatattcaaacaaccatttatgagaccagtacaaactactcaagaggaagatggctgtagctgccgatttccagaagaagaagaaggaggatgtgaactgagagtgaagttcagcaggagcgcagacgcccccgcgtaccagcagggccagaaccagctctataacgagctgaatctaggacgaagagaggagtacgatgttttggacaagagacgtggccgggaccctgagatggggggaaagccgagaaggaagaaccctcaggaaggcctgtacaatgaactgcagaaagataagatggcggaggcctacagtgagattgggatgaaaggcgagcgccggaggggcaaggggcacgatggcctttaccagggtctcagtacagccaccaaggacacctacgacgcccttcacatgcaggccctgccccctcgctaa

SEQ ID NO: 7784 - DNA, 1482 bp, synthetic construct
  source 1..1482: mol_type = other DNA
atggccttaccagtgaccgccttgctcctgccgctggccttgctgctccacgccgccaggccggacatccagatgacacagagccctagcagcctgtctgccagcgtgggagacagagtgaccatcacatgcaaggccagcgaccacatcaacaactggctggcctggtatcagcagaagcctggacaggcccctaagctgctgatctacggcgctaccacactggaaacaggcgtgcccagcagattttctggcagcggctctggcaccgactacaccctgacaatatccagcctccagcctgaggacttcgccacctactactgtcagcagagctggaacaccccttggacattcggccagggcaccaagctggaaatcaagagactcgagggaggctctgcccgcagcgagggccgctaccgcggcggaagcttcgaacaagttcagcttcaacagcctggcgctgagctggtcaaacctggcgcttctgtgaagatgagctgcaaagccagcggctacgccttcagcagctactggatcaactggatgaagcagaaacccggccagggactcgaatggatcggccaaatctatcccggcgacggcgacaccaactacaacggcaagttcaagggcagagccacactgaccgccgatacctctagcagcacagcctacatgcagctgagcagcctgaccagcgaagatagcgccgtgtacttctgtgcccggtccatcacaacagtcgtgggctgcgctatggactattggggccagggaacaagcgtgaccgtgtctagtacgcgtaccacgacgccagcgccgcgaccaccaacaccggcgcccaccatcgcgtcgcagcccctgtccctgcgcccagaggcgtgccggccagcggcggggggcgcagtgcacacgagggggctggacttcgcctgtgacatctacatctgggcgcccttggccgggacttgtggggtccttctcctgtcactggttatcaccctttactgcaaacggggcagaaagaaactcctgtatatattcaaacaaccatttatgagaccagtacaaactactcaagaggaagatggctgtagctgccgatttccagaagaagaagaaggaggatgtgaactgagagtgaagttcagcaggagcgcagacgcccccgcgtaccagcagggccagaaccagctctataacgagctgaatctaggacgaagagaggagtacgatgttttggacaagagacgtggccgggaccctgagatggggggaaagccgagaaggaagaaccctcaggaaggcctgtacaatgaactgcagaaagataagatggcggaggcctacagtgagattgggatgaaaggcgagcgccggaggggcaaggggcacgatggcctttaccagggtctcagtacagccaccaaggacacctacgacgcccttcacatgcaggccctgccccctcgctaa

SEQ ID NO: 7785 - DNA, 1482 bp, synthetic construct
  source 1..1482: mol_type = other DNA
atggccttaccagtgaccgccttgctcctgccgctggccttgctgctccacgccgccaggccggacatccagatgacacagagccctagcagcctgtctgccagcgtgggagacagagtgaccatcacatgcaaggccagcgaccacatcaacaactggctggcctggtatcagcagaagcctggacaggcccctaagctgctgatctacggcgctaccacactggaaacaggcgtgcccagcagattttctggcagcggctctggcaccgactacaccctgacaatatccagcctccagcctgaggacttcgccacctactactgtcagcagagctggaacaccccttggacattcggccagggcaccaagctggaaatcaagagactcgagggaggctctgcccgcagcgaggcccgctaccgcggcggaagcttcgaacaagttcagcttcaacagcctggcgctgagctggtcaaacctggcgcttctgtgaagatgagctgcaaagccagcggctacgccttcagcagctactggatcaactggatgaagcagaaacccggccagggactcgaatggatcggccaaatctatcccggcgacggcgacaccaactacaacggcaagttcaagggcagagccacactgaccgccgatacctctagcagcacagcctacatgcagctgagcagcctgaccagcgaagatagcgccgtgtacttctgtgcccggtccatcacaacagtcgtgggctgcgctatggactattggggccagggaacaagcgtgaccgtgtctagtacgcgtaccacgacgccagcgccgcgaccaccaacaccggcgcccaccatcgcgtcgcagcccctgtccctgcgcccagaggcgtgccggccagcggcggggggcgcagtgcacacgagggggctggacttcgcctgtgacatctacatctgggcgcccttggccgggacttgtggggtccttctcctgtcactggttatcaccctttactgcaaacggggcagaaagaaactcctgtatatattcaaacaaccatttatgagaccagtacaaactactcaagaggaagatggctgtagctgccgatttccagaagaagaagaaggaggatgtgaactgagagtgaagttcagcaggagcgcagacgcccccgcgtaccagcagggccagaaccagctctataacgagctgaatctaggacgaagagaggagtacgatgttttggacaagagacgtggccgggaccctgagatggggggaaagccgagaaggaagaaccctcaggaaggcctgtacaatgaactgcagaaagataagatggcggaggcctacagtgagattgggatgaaaggcgagcgccggaggggcaaggggcacgatggcctttaccagggtctcagtacagccaccaaggacacctacgacgcccttcacatgcaggccctgccccctcgctaa

SEQ ID NO: 7786 - DNA, 1482 bp, synthetic construct
  source 1..1482: mol_type = other DNA
atggccttaccagtgaccgccttgctcctgccgctggccttgctgctccacgccgccaggccggacatccagatgacacagagccctagcagcctgtctgccagcgtgggagacagagtgaccatcacatgcaaggccagcgaccacatcaacaactggctggcctggtatcagcagaagcctggacaggcccctaagctgctgatctacggcgctaccacactggaaacaggcgtgcccagcagattttctggcagcggctctggcaccgactacaccctgacaatatccagcctccagcctgaggacttcgccacctactactgtcagcagagctggaacaccccttggacattcggccagggcaccaagctggaaatcaagagactcgagggaggctctgcccgcagcgagcagcgctaccgcggcggaagcttcgaacaagttcagcttcaacagcctggcgctgagctggtcaaacctggcgcttctgtgaagatgagctgcaaagccagcggctacgccttcagcagctactggatcaactggatgaagcagaaacccggccagggactcgaatggatcggccaaatctatcccggcgacggcgacaccaactacaacggcaagttcaagggcagagccacactgaccgccgatacctctagcagcacagcctacatgcagctgagcagcctgaccagcgaagatagcgccgtgtacttctgtgcccggtccatcacaacagtcgtgggctgcgctatggactattggggccagggaacaagcgtgaccgtgtctagtacgcgtaccacgacgccagcgccgcgaccaccaacaccggcgcccaccatcgcgtcgcagcccctgtccctgcgcccagaggcgtgccggccagcggcggggggcgcagtgcacacgagggggctggacttcgcctgtgacatctacatctgggcgcccttggccgggacttgtggggtccttctcctgtcactggttatcaccctttactgcaaacggggcagaaagaaactcctgtatatattcaaacaaccatttatgagaccagtacaaactactcaagaggaagatggctgtagctgccgatttccagaagaagaagaaggaggatgtgaactgagagtgaagttcagcaggagcgcagacgcccccgcgtaccagcagggccagaaccagctctataacgagctgaatctaggacgaagagaggagtacgatgttttggacaagagacgtggccgggaccctgagatggggggaaagccgagaaggaagaaccctcaggaaggcctgtacaatgaactgcagaaagataagatggcggaggcctacagtgagattgggatgaaaggcgagcgccggaggggcaaggggcacgatggcctttaccagggtctcagtacagccaccaaggacacctacgacgcccttcacatgcaggccctgccccctcgctaa

SEQ ID NO: 7787 - DNA, 1482 bp, synthetic construct
  source 1..1482: mol_type = other DNA
atggccttaccagtgaccgccttgctcctgccgctggccttgctgctccacgccgccaggccggacatccagatgacacagagccctagcagcctgtctgccagcgtgggagacagagtgaccatcacatgcaaggccagcgaccacatcaacaactggctggcctggtatcagcagaagcctggacaggcccctaagctgctgatctacggcgctaccacactggaaacaggcgtgcccagcagattttctggcagcggctctggcaccgactacaccctgacaatatccagcctccagcctgaggacttcgccacctactactgtcagcagagctggaacaccccttggacattcggccagggcaccaagctggaaatcaagagactcgagggaggctctgcccgcagcgagaagcgctaccgcggcggaagcttcgaacaagttcagcttcaacagcctggcgctgagctggtcaaacctggcgcttctgtgaagatgagctgcaaagccagcggctacgccttcagcagctactggatcaactggatgaagcagaaacccggccagggactcgaatggatcggccaaatctatcccggcgacggcgacaccaactacaacggcaagttcaagggcagagccacactgaccgccgatacctctagcagcacagcctacatgcagctgagcagcctgaccagcgaagatagcgccgtgtacttctgtgcccggtccatcacaacagtcgtgggctgcgctatggactattggggccagggaacaagcgtgaccgtgtctagtacgcgtaccacgacgccagcgccgcgaccaccaacaccggcgcccaccatcgcgtcgcagcccctgtccctgcgcccagaggcgtgccggccagcggcggggggcgcagtgcacacgagggggctggacttcgcctgtgacatctacatctgggcgcccttggccgggacttgtggggtccttctcctgtcactggttatcaccctttactgcaaacggggcagaaagaaactcctgtatatattcaaacaaccatttatgagaccagtacaaactactcaagaggaagatggctgtagctgccgatttccagaagaagaagaaggaggatgtgaactgagagtgaagttcagcaggagcgcagacgcccccgcgtaccagcagggccagaaccagctctataacgagctgaatctaggacgaagagaggagtacgatgttttggacaagagacgtggccgggaccctgagatggggggaaagccgagaaggaagaaccctcaggaaggcctgtacaatgaactgcagaaagataagatggcggaggcctacagtgagattgggatgaaaggcgagcgccggaggggcaaggggcacgatggcctttaccagggtctcagtacagccaccaaggacacctacgacgcccttcacatgcaggccctgccccctcgctaa

SEQ ID NO: 7788 - DNA, 1482 bp, synthetic construct
  source 1..1482: mol_type = other DNA
atggccttaccagtgaccgccttgctcctgccgctggccttgctgctccacgccgccaggccggacatccagatgacacagagccctagcagcctgtctgccagcgtgggagacagagtgaccatcacatgcaaggccagcgaccacatcaacaactggctggcctggtatcagcagaagcctggacaggcccctaagctgctgatctacggcgctaccacactggaaacaggcgtgcccagcagattttctggcagcggctctggcaccgactacaccctgacaatatccagcctccagcctgaggacttcgccacctactactgtcagcagagctggaacaccccttggacattcggccagggcaccaagctggaaatcaagagactcgagggaggctctgcccgcagcgagctgcgctaccgcggcggaagcttcgaacaagttcagcttcaacagcctggcgctgagctggtcaaacctggcgcttctgtgaagatgagctgcaaagccagcggctacgccttcagcagctactggatcaactggatgaagcagaaacccggccagggactcgaatggatcggccaaatctatcccggcgacggcgacaccaactacaacggcaagttcaagggcagagccacactgaccgccgatacctctagcagcacagcctacatgcagctgagcagcctgaccagcgaagatagcgccgtgtacttctgtgcccggtccatcacaacagtcgtgggctgcgctatggactattggggccagggaacaagcgtgaccgtgtctagtacgcgtaccacgacgccagcgccgcgaccaccaacaccggcgcccaccatcgcgtcgcagcccctgtccctgcgcccagaggcgtgccggccagcggcggggggcgcagtgcacacgagggggctggacttcgcctgtgacatctacatctgggcgcccttggccgggacttgtggggtccttctcctgtcactggttatcaccctttactgcaaacggggcagaaagaaactcctgtatatattcaaacaaccatttatgagaccagtacaaactactcaagaggaagatggctgtagctgccgatttccagaagaagaagaaggaggatgtgaactgagagtgaagttcagcaggagcgcagacgcccccgcgtaccagcagggccagaaccagctctataacgagctgaatctaggacgaagagaggagtacgatgttttggacaagagacgtggccgggaccctgagatggggggaaagccgagaaggaagaaccctcaggaaggcctgtacaatgaactgcagaaagataagatggcggaggcctacagtgagattgggatgaaaggcgagcgccggaggggcaaggggcacgatggcctttaccagggtctcagtacagccaccaaggacacctacgacgcccttcacatgcaggccctgccccctcgctaa

SEQ ID NO: 7789 - DNA, 1482 bp, synthetic construct
  source 1..1482: mol_type = other DNA
atggccttaccagtgaccgccttgctcctgccgctggccttgctgctccacgccgccaggccggacatccagatgacacagagccctagcagcctgtctgccagcgtgggagacagagtgaccatcacatgcaaggccagcgaccacatcaacaactggctggcctggtatcagcagaagcctggacaggcccctaagctgctgatctacggcgctaccacactggaaacaggcgtgcccagcagattttctggcagcggctctggcaccgactacaccctgacaatatccagcctccagcctgaggacttcgccacctactactgtcagcagagctggaacaccccttggacattcggccagggcaccaagctggaaatcaagagactcgagggaggctctgcccgcagcgagacccgctaccgcggcggaagcttcgaacaagttcagcttcaacagcctggcgctgagctggtcaaacctggcgcttctgtgaagatgagctgcaaagccagcggctacgccttcagcagctactggatcaactggatgaagcagaaacccggccagggactcgaatggatcggccaaatctatcccggcgacggcgacaccaactacaacggcaagttcaagggcagagccacactgaccgccgatacctctagcagcacagcctacatgcagctgagcagcctgaccagcgaagatagcgccgtgtacttctgtgcccggtccatcacaacagtcgtgggctgcgctatggactattggggccagggaacaagcgtgaccgtgtctagtacgcgtaccacgacgccagcgccgcgaccaccaacaccggcgcccaccatcgcgtcgcagcccctgtccctgcgcccagaggcgtgccggccagcggcggggggcgcagtgcacacgagggggctggacttcgcctgtgacatctacatctgggcgcccttggccgggacttgtggggtccttctcctgtcactggttatcaccctttactgcaaacggggcagaaagaaactcctgtatatattcaaacaaccatttatgagaccagtacaaactactcaagaggaagatggctgtagctgccgatttccagaagaagaagaaggaggatgtgaactgagagtgaagttcagcaggagcgcagacgcccccgcgtaccagcagggccagaaccagctctataacgagctgaatctaggacgaagagaggagtacgatgttttggacaagagacgtggccgggaccctgagatggggggaaagccgagaaggaagaaccctcaggaaggcctgtacaatgaactgcagaaagataagatggcggaggcctacagtgagattgggatgaaaggcgagcgccggaggggcaaggggcacgatggcctttaccagggtctcagtacagccaccaaggacacctacgacgcccttcacatgcaggccctgccccctcgctaa

SEQ ID NO: 7790 - DNA, 1482 bp, synthetic construct; identical to SEQ ID NO: 7771
  source 1..1482: mol_type = other DNA

SEQ ID NO: 7791 - DNA, 1482 bp, synthetic construct
  source 1..1482: mol_type = other DNA
atggccttaccagtgaccgccttgctcctgccgctggccttgctgctccacgccgccaggccggacatccagatgacacagagccctagcagcctgtctgccagcgtgggagacagagtgaccatcacatgcaaggccagcgaccacatcaacaactggctggcctggtatcagcagaagcctggacaggcccctaagctgctgatctacggcgctaccacactggaaacaggcgtgcccagcagattttctggcagcggctctggcaccgactacaccctgacaatatccagcctccagcctgaggacttcgccacctactactgtcagcagagctggaacaccccttggacattcggccagggcaccaagctggaaatcaagagactcgagggaggctctgcccgcagcgaggaccactacaagggcggaagcttcgaacaagttcagcttcaacagcctggcgctgagctggtcaaacctggcgcttctgtgaagatgagctgcaaagccagcggctacgccttcagcagctactggatcaactggatgaagcagaaacccggccagggactcgaatggatcggccaaatctatcccggcgacggcgacaccaactacaacggcaagttcaagggcagagccacactgaccgccgatacctctagcagcacagcctacatgcagctgagcagcctgaccagcgaagatagcgccgtgtacttctgtgcccggtccatcacaacagtcgtgggctgcgctatggactattggggccagggaacaagcgtgaccgtgtctagtacgcgtaccacgacgccagcgccgcgaccaccaacaccggcgcccaccatcgcgtcgcagcccctgtccctgcgcccagaggcgtgccggccagcggcggggggcgcagtgcacacgagggggctggacttcgcctgtgacatctacatctgggcgcccttggccgggacttgtggggtccttctcctgtcactggttatcaccctttactgcaaacggggcagaaagaaactcctgtatatattcaaacaaccatttatgagaccagtacaaactactcaagaggaagatggctgtagctgccgatttccagaagaagaagaaggaggatgtgaactgagagtgaagttcagcaggagcgcagacgcccccgcgtaccagcagggccagaaccagctctataacgagctgaatctaggacgaagagaggagtacgatgttttggacaagagacgtggccgggaccctgagatggggggaaagccgagaaggaagaaccctcaggaaggcctgtacaatgaactgcagaaagataagatggcggaggcctacagtgagattgggatgaaaggcgagcgccggaggggcaaggggcacgatggcctttaccagggtctcagtacagccaccaaggacacctacgacgcccttcacatgcaggccctgccccctcgctaa

SEQ ID NO: 7792 - DNA, 1482 bp, synthetic construct
  source 1..1482: mol_type = other DNA
atggccttaccagtgaccgccttgctcctgccgctggccttgctgctccacgccgccaggccggacatccagatgacacagagccctagcagcctgtctgccagcgtgggagacagagtgaccatcacatgcaaggccagcgaccacatcaacaactggctggcctggtatcagcagaagcctggacaggcccctaagctgctgatctacggcgctaccacactggaaacaggcgtgcccagcagattttctggcagcggctctggcaccgactacaccctgacaatatccagcctccagcctgaggacttcgccacctactactgtcagcagagctggaacaccccttggacattcggccagggcaccaagctggaaatcaagagactcgagggaggctctgcccgcagcgagagccgctacaagggcggaagcttcgaacaagttcagcttcaacagcctggcgctgagctggtcaaacctggcgcttctgtgaagatgagctgcaaagccagcggctacgccttcagcagctactggatcaactggatgaagcagaaacccggccagggactcgaatggatcggccaaatctatcccggcgacggcgacaccaactacaacggcaagttcaagggcagagccacactgaccgccgatacctctagcagcacagcctacatgcagctgagcagcctgaccagcgaagatagcgccgtgtacttctgtgcccggtccatcacaacagtcgtgggctgcgctatggactattggggccagggaacaagcgtgaccgtgtctagtacgcgtaccacgacgccagcgccgcgaccaccaacaccggcgcccaccatcgcgtcgcagcccctgtccctgcgcccagaggcgtgccggccagcggcggggggcgcagtgcacacgagggggctggacttcgcctgtgacatctacatctgggcgcccttggccgggacttgtggggtccttctcctgtcactggttatcaccctttactgcaaacggggcagaaagaaactcctgtatatattcaaacaaccatttatgagaccagtacaaactactcaagaggaagatggctgtagctgccgatttccagaagaagaagaaggaggatgtgaactgagagtgaagttcagcaggagcgcagacgcccccgcgtaccagcagggccagaaccagctctataacgagctgaatctaggacgaagagaggagtacgatgttttggacaagagacgtggccgggaccctgagatggggggaaagccgagaaggaagaaccctcaggaaggcctgtacaatgaactgcagaaagataagatggcggaggcctacagtgagattgggatgaaaggcgagcgccggaggggcaaggggcacgatggcctttaccagggtctcagtacagccaccaaggacacctacgacgcccttcacatgcaggccctgccccctcgctaa

SEQ ID NO: 7793 - DNA, 1482 bp, synthetic construct
  source 1..1482: mol_type = other DNA
atggccttaccagtgaccgccttgctcctgccgctggccttgctgctccacgccgccaggccggacatccagatgacacagagccctagcagcctgtctgccagcgtgggagacagagtgaccatcacatgcaaggccagcgaccacatcaacaactggctggcctggtatcagcagaagcctggacaggcccctaagctgctgatctacggcgctaccacactggaaacaggcgtgcccagcagattttctggcagcggctctggcaccgactacaccctgacaatatccagcctccagcctgaggacttcgccacctactactgtcagcagagctggaacaccccttggacattcggccagggcaccaagctggaaatcaagagactcgagggaggctctgcccgcagcgagaaccgctacaagggcggaagcttcgaacaagttcagcttcaacagcctggcgctgagctggtcaaacctggcgcttctgtgaagatgagctgcaaagccagcggctacgccttcagcagctactggatcaactggatgaagcagaaacccggccagggactcgaatggatcggccaaatctatcccggcgacggcgacaccaactacaacggcaagttcaagggcagagccacactgaccgccgatacctctagcagcacagcctacatgcagctgagcagcctgaccagcgaagatagcgccgtgtacttctgtgcccggtccatcacaacagtcgtgggctgcgctatggactattggggccagggaacaagcgtgaccgtgtctagtacgcgtaccacgacgccagcgccgcgaccaccaacaccggcgcccaccatcgcgtcgcagcccctgtccctgcgcccagaggcgtgccggccagcggcggggggcgcagtgcacacgagggggctggacttcgcctgtgacatctacatctgggcgcccttggccgggacttgtggggtccttctcctgtcactggttatcaccctttactgcaaacggggcagaaagaaactcctgtatatattcaaacaaccatttatgagaccagtacaaactactcaagaggaagatggctgtagctgccgatttccagaagaagaagaaggaggatgtgaactgagagtgaagttcagcaggagcgcagacgcccccgcgtaccagcagggccagaaccagctctataacgagctgaatctaggacgaagagaggagtacgatgttttggacaagagacgtggccgggaccctgagatggggggaaagccgagaaggaagaaccctcaggaaggcctgtacaatgaactgcagaaagataagatggcggaggcctacagtgagattgggatgaaaggcgagcgccggaggggcaaggggcacgatggcctttaccagggtctcagtacagccaccaaggacacctacgacgcccttcacatgcaggccctgccccctcgctaa

SEQ ID NO: 7794 - DNA, 1482 bp, synthetic construct
  source 1..1482: mol_type = other DNA
atggccttaccagtgaccgccttgctcctgccgctggccttgctgctccacgccgccaggccggacatccagatgacacagagccctagcagcctgtctgccagcgtgggagacagagtgaccatcacatgcaaggccagcgaccacatcaacaactggctggcctggtatcagcagaagcctggacaggcccctaagctgctgatctacggcgctaccacactggaaacaggcgtgcccagcagattttctggcagcggctctggcaccgactacaccctgacaatatccagcctccagcctgaggacttcgccacctactactgtcagcagagctggaacaccccttggacattcggccagggcaccaagctggaaatcaagagactcgagggaggctctgcccgcagcgagggccgctacaagggcggaagcttcgaacaagttcagcttcaacagcctggcgctgagctggtcaaacctggcgcttctgtgaagatgagctgcaaagccagcggctacgccttcagcagctactggatcaactggatgaagcagaaacccggccagggactcgaatggatcggccaaatctatcccggcgacggcgacaccaactacaacggcaagttcaagggcagagccacactgaccgccgatacctctagcagcacagcctacatgcagctgagcagcctgaccagcgaagatagcgccgtgtacttctgtgcccggtccatcacaacagtcgtgggctgcgctatggactattggggccagggaacaagcgtgaccgtgtctagtacgcgtaccacgacgccagcgccgcgaccaccaacaccggcgcccaccatcgcgtcgcagcccctgtccctgcgcccagaggcgtgccggccagcggcggggggcgcagtgcacacgagggggctggacttcgcctgtgacatctacatctgggcgcccttggccgggacttgtggggtccttctcctgtcactggttatcaccctttactgcaaacggggcagaaagaaactcctgtatatattcaaacaaccatttatgagaccagtacaaactactcaagaggaagatggctgtagctgccgatttccagaagaagaagaaggaggatgtgaactgagagtgaagttcagcaggagcgcagacgcccccgcgtaccagcagggccagaaccagctctataacgagctgaatctaggacgaagagaggagtacgatgttttggacaagagacgtggccgggaccctgagatggggggaaagccgagaaggaagaaccctcaggaaggcctgtacaatgaactgcagaaagataagatggcggaggcctacagtgagattgggatgaaaggcgagcgccggaggggcaaggggcacgatggcctttaccagggtctcagtacagccaccaaggacacctacgacgcccttcacatgcaggccctgccccctcgctaa

SEQ ID NO: 7795 - DNA, 1482 bp, synthetic construct
  source 1..1482: mol_type = other DNA
atggccttaccagtgaccgccttgctcctgccgctggccttgctgctccacgccgccaggccggacatccagatgacacagagccctagcagcctgtctgccagcgtgggagacagagtgaccatcacatgcaaggccagcgaccacatcaacaactggctggcctggtatcagcagaagcctggacaggcccctaagctgctgatctacggcgctaccacactggaaacaggcgtgcccagcagattttctggcagcggctctggcaccgactacaccctgacaatatccagcctccagcctgaggacttcgccacctactactgtcagcagagctggaacaccccttggacattcggccagggcaccaagctggaaatcaagagactcgagggaggctctgcccgcagcgaggcccgctacaagggcggaagcttcgaacaagttcagcttcaacagcctggcgctgagctggtcaaacctggcgcttctgtgaagatgagctgcaaagccagcggctacgccttcagcagctactggatcaactggatgaagcagaaacccggccagggactcgaatggatcggccaaatctatcccggcgacggcgacaccaactacaacggcaagttcaagggcagagccacactgaccgccgatacctctagcagcacagcctacatgcagctgagcagcctgaccagcgaagatagcgccgtgtacttctgtgcccggtccatcacaacagtcgtgggctgcgctatggactattggggccagggaacaagcgtgaccgtgtctagtacgcgtaccacgacgccagcgccgcgaccaccaacaccggcgcccaccatcgcgtcgcagcccctgtccctgcgcccagaggcgtgccggccagcggcggggggcgcagtgcacacgagggggctggacttcgcctgtgacatctacatctgggcgcccttggccgggacttgtggggtccttctcctgtcactggttatcaccctttactgcaaacggggcagaaagaaactcctgtatatattcaaacaaccatttatgagaccagtacaaactactcaagaggaagatggctgtagctgccgatttccagaagaagaagaaggaggatgtgaactgagagtgaagttcagcaggagcgcagacgcccccgcgtaccagcagggccagaaccagctctataacgagctgaatctaggacgaagagaggagtacgatgttttggacaagagacgtggccgggaccctgagatggggggaaagccgagaaggaagaaccctcaggaaggcctgtacaatgaactgcagaaagataagatggcggaggcctacagtgagattgggatgaaaggcgagcgccggaggggcaaggggcacgatggcctttaccagggtctcagtacagccaccaaggacacctacgacgcccttcacatgcaggccctgccccctcgctaa

SEQ ID NO: 7796 - DNA, 1482 bp, synthetic construct
  source 1..1482: mol_type = other DNA
atggccttaccagtgaccgccttgctcctgccgctggccttgctgctccacgccgccaggccggacatccagatgacacagagccctagcagcctgtctgccagcgtgggagacagagtgaccatcacatgcaaggccagcgaccacatcaacaactggctggcctggtatcagcagaagcctggacaggcccctaagctgctgatctacggcgctaccacactggaaacaggcgtgcccagcagattttctggcagcggctctggcaccgactacaccctgacaatatccagcctccagcctgaggacttcgccacctactactgtcagcagagctggaacaccccttggacattcggccagggcaccaagctggaaatcaagagactcgagggaggctctgcccgcagcgagaagcgctacaagggcggaagcttcgaacaagttcagcttcaacagcctggcgctgagctggtcaaacctggcgcttctgtgaagatgagctgcaaagccagcggctacgccttcagcagctactggatcaactggatgaagcagaaacccggccagggactcgaatggatcggccaaatctatcccggcgacggcgacaccaactacaacggcaagttcaagggcagagccacactgaccgccgatacctctagcagcacagcctacatgcagctgagcagcctgaccagcgaagatagcgccgtgtacttctgtgcccggtccatcacaacagtcgtgggctgcgctatggactattggggccagggaacaagcgtgaccgtgtctagtacgcgtaccacgacgccagcgccgcgaccaccaacaccggcgcccaccatcgcgtcgcagcccctgtccctgcgcccagaggcgtgccggccagcggcggggggcgcagtgcacacgagggggctggacttcgcctgtgacatctacatctgggcgcccttggccgggacttgtggggtccttctcctgtcactggttatcaccctttactgcaaacggggcagaaagaaactcctgtatatattcaaacaaccatttatgagaccagtacaaactactcaagaggaagatggctgtagctgccgatttccagaagaagaagaaggaggatgtgaactgagagtgaagttcagcaggagcgcagacgcccccgcgtaccagcagggccagaaccagctctataacgagctgaatctaggacgaagagaggagtacgatgttttggacaagagacgtggccgggaccctgagatggggggaaagccgagaaggaagaaccctcaggaaggcctgtacaatgaactgcagaaagataagatggcggaggcctacagtgagattgggatgaaaggcgagcgccggaggggcaaggggcacgatggcctttaccagggtctcagtacagccaccaaggacacctacgacgcccttcacatgcaggccctgccccctcgctaa

SEQ ID NO: 7797 - DNA, 1482 bp, synthetic construct
  source 1..1482: mol_type = other DNA
atggccttaccagtgaccgccttgctcctgccgctggccttgctgctccacgccgccaggccggacatccagatgacacagagccctagcagcctgtctgccagcgtgggagacagagtgaccatcacatgcaaggccagcgaccacatcaacaactggctggcctggtatcagcagaagcctggacaggcccctaagctgctgatctacggcgctaccacactggaaacaggcgtgcccagcagattttctggcagcggctctggcaccgactacaccctgacaatatccagcctccagcctgaggacttcgccacctactactgtcagcagagctggaacaccccttggacattcggccagggcaccaagctggaaatcaagagactcgagggaggctctgcccgcagcgagctgcgctacaagggcggaagcttcgaacaagttcagcttcaacagcctggcgctgagctggtcaaacctggcgcttctgtgaagatgagctgcaaagccagcggctacgccttcagcagctactggatcaactggatgaagcagaaacccggccagggactcgaatggatcggccaaatctatcccggcgacggcgacaccaactacaacggcaagttcaagggcagagccacactgaccgccgatacctctagcagcacagcctacatgcagctgagcagcctgaccagcgaagatagcgccgtgtacttctgtgcccggtccatcacaacagtcgtgggctgcgctatggactattggggccagggaacaagcgtgaccgtgtctagtacgcgtaccacgacgccagcgccgcgaccaccaacaccggcgcccaccatcgcgtcgcagcccctgtccctgcgcccagaggcgtgccggccagcggcggggggcgcagtgcacacgagggggctggacttcgcctgtgacatctacatctgggcgcccttggccgggacttgtggggtccttctcctgtcactggttatcaccctttactgcaaacggggcagaaagaaactcctgtatatattcaaacaaccatttatgagaccagtacaaactactcaagaggaagatggctgtagctgccgatttccagaagaagaagaaggaggatgtgaactgagagtgaagttcagcaggagcgcagacgcccccgcgtaccagcagggccagaaccagctctataacgagctgaatctaggacgaagagaggagtacgatgttttggacaagagacgtggccgggaccctgagatggggggaaagccgagaaggaagaaccctcaggaaggcctgtacaatgaactgcagaaagataagatggcggaggcctacagtgagattgggatgaaaggcgagcgccggaggggcaaggggcacgatggcctttaccagggtctcagtacagccaccaaggacacctacgacgcccttcacatgcaggccctgccccctcgctaa

SEQ ID NO: 7798 - DNA, 1482 bp, synthetic construct
  source 1..1482: mol_type = other DNA
atggccttaccagtgaccgccttgctcctgccgctggccttgctgctccacgccgccaggccggacatccagatgacacagagccctagcagcctgtctgccagcgtgggagacagagtgaccatcacatgcaaggccagcgaccacatcaacaactggctggcctggtatcagcagaagcctggacaggcccctaagctgctgatctacggcgctaccacactggaaacaggcgtgcccagcagattttctggcagcggctctggcaccgactacaccctgacaatatccagcctccagcctgaggacttcgccacctactactgtcagcagagctggaacaccccttggacattcggccagggcaccaagctggaaatcaagagactcgagggaggctctgcccgcagcgagacccgctacaagggcggaagcttcgaacaagttcagcttcaacagcctggcgctgagctggtcaaacctggcgcttctgtgaagatgagctgcaaagccagcggctacgccttcagcagctactggatcaactggatgaagcagaaacccggccagggactcgaatggatcggccaaatctatcccggcgacggcgacaccaactacaacggcaagttcaagggcagagccacactgaccgccgatacctctagcagcacagcctacatgcagctgagcagcctgaccagcgaagatagcgccgtgtacttctgtgcccggtccatcacaacagtcgtgggctgcgctatggactattggggccagggaacaagcgtgaccgtgtctagtacgcgtaccacgacgccagcgccgcgaccaccaacaccggcgcccaccatcgcgtcgcagcccctgtccctgcgcccagaggcgtgccggccagcggcggggggcgcagtgcacacgagggggctggacttcgcctgtgacatctacatctgggcgcccttggccgggacttgtggggtccttctcctgtcactggttatcaccctttactgcaaacggggcagaaagaaactcctgtatatattcaaacaaccatttatgagaccagtacaaactactcaagaggaagatggctgtagctgccgatttccagaagaagaagaaggaggatgtgaactgagagtgaagttcagcaggagcgcagacgcccccgcgtaccagcagggccagaaccagctctataacgagctgaatctaggacgaagagaggagtacgatgttttggacaagagacgtggccgggaccctgagatggggggaaagccgagaaggaagaaccctcaggaaggcctgtacaatgaactgcagaaagataagatggcggaggcctacagtgagattgggatgaaaggcgagcgccggaggggcaaggggcacgatggcctttaccagggtctcagtacagccaccaaggacacctacgacgcccttcacatgcaggccctgccccctcgctaa

SEQ ID NO: 7799 - DNA, 1482 bp, synthetic construct
  source 1..1482: mol_type = other DNA
atggccttaccagtgaccgccttgctcctgccgctggccttgctgctccacgccgccaggccggacatccagatgacacagagccctagcagcctgtctgccagcgtgggagacagagtgaccatcacatgcaaggccagcgaccacatcaacaactggctggcctggtatcagcagaagcctggacaggcccctaagctgctgatctacggcgctaccacactggaaacaggcgtgcccagcagattttctggcagcggctctggcaccgactacaccctgacaatatccagcctccagcctgaggacttcgccacctactactgtcagcagagctggaacaccccttggacattcggccagggcaccaagctggaaatcaagagactcgagggaggctctgcccgcagcgagcagcgctacaagggcggaagcttcgaacaagttcagcttcaacagcctggcgctgagctggtcaaacctggcgcttctgtgaagatgagctgcaaagccagcggctacgccttcagcagctactggatcaactggatgaagcagaaacccggccagggactcgaatggatcggccaaatctatcccggcgacggcgacaccaactacaacggcaagttcaagggcagagccacactgaccgccgatacctctagcagcacagcctacatgcagctgagcagcctgaccagcgaagatagcgccgtgtacttctgtgcccggtccatcacaacagtcgtgggctgcgctatggactattggggccagggaacaagcgtgaccgtgtctagtacgcgtaccacgacgccagcgccgcgaccaccaacaccggcgcccaccatcgcgtcgcagcccctgtccctgcgcccagaggcgtgccggccagcggcggggggcgcagtgcacacgagggggctggacttcgcctgtgacatctacatctgggcgcccttggccgggacttgtggggtccttctcctgtcactggttatcaccctttactgcaaacggggcagaaagaaactcctgtatatattcaaacaaccatttatgagaccagtacaaactactcaagaggaagatggctgtagctgccgatttccagaagaagaagaaggaggatgtgaactgagagtgaagttcagcaggagcgcagacgcccccgcgtaccagcagggccagaaccagctctataacgagctgaatctaggacgaagagaggagtacgatgttttggacaagagacgtggccgggaccctgagatggggggaaagccgagaaggaagaaccctcaggaaggcctgtacaatgaactgcagaaagataagatggcggaggcctacagtgagattgggatgaaaggcgagcgccggaggggcaaggggcacgatggcctttaccagggtctcagtacagccaccaaggacacctacgacgcccttcacatgcaggccctgccccctcgctaa

SEQ ID NO: 7800 - DNA, 1479 bp, synthetic construct
  source 1..1479: mol_type = other DNA
atggccttaccagtgaccgccttgctcctgccgctggccttgctgctccacgccgccaggccggacatccagatgacacagagccctagcagcctgtctgccagcgtgggagacagagtgaccatcacatgcaaggccagcgaccacatcaacaactggctggcctggtatcagcagaagcctggacaggcccctaagctgctgatctacggcgctaccacactggaaacaggcgtgcccagcagattttctggcagcggctctggcaccgactacaccctgacaatatccagcctccagcctgaggacttcgccacctactactgtcagcagagctggaacaccccttggacattcggccagggcaccaagctggaaatcaagagactcgagggaggctctcgcagcgaggaccgctaccgcggcggaagcttcgaacaagttcagcttcaacagcctggcgctgagctggtcaaacctggcgcttctgtgaagatgagctgcaaagccagcggctacgccttcagcagctactggatcaactggatgaagcagaaacccggccagggactcgaatggatcggccaaatctatcccggcgacggcgacaccaactacaacggcaagttcaagggcagagccacactgaccgccgatacctctagcagcacagcctacatgcagctgagcagcctgaccagcgaagatagcgccgtgtacttctgtgcccggtccatcacaacagtcgtgggctgcgctatggactattggggccagggaacaagcgtgaccgtgtctagtacgcgtaccacgacgccagcgccgcgaccaccaacaccggcgcccaccatcgcgtcgcagcccctgtccctgcgcccagaggcgtgccggccagcggcggggggcgcagtgcacacgagggggctggacttcgcctgtgacatctacatctgggcgcccttggccgggacttgtggggtccttctcctgtcactggttatcaccctttactgcaaacggggcagaaagaaactcctgtatatattcaaacaaccatttatgagaccagtacaaactactcaagaggaagatggctgtagctgccgatttccagaagaagaagaaggaggatgtgaactgagagtgaagttcagcaggagcgcagacgcccccgcgtaccagcagggccagaaccagctctataacgagctgaatctaggacgaagagaggagtacgatgttttggacaagagacgtggccgggaccctgagatggggggaaagccgagaaggaagaaccctcaggaaggcctgtacaatgaactgcagaaagataagatggcggaggcctacagtgagattgggatgaaaggcgagcgccggaggggcaaggggcacgatggcctttaccagggtctcagtacagccaccaaggacacctacgacgcccttcacatgcaggccctgccccctcgctaa

SEQ ID NO: 7801 - DNA, 1482 bp, synthetic construct; identical to SEQ ID NO: 7754
  source 1..1482: mol_type = other DNA

SEQ ID NO: 7802 - DNA, 1482 bp, synthetic construct; identical to SEQ ID NO: 7782
  source 1..1482: mol_type = other DNA

SEQ ID NO: 7803 - DNA, 1482 bp, synthetic construct; identical to SEQ ID NO: 7789
  source 1..1482: mol_type = other DNA

SEQ ID NO: 7804 - DNA, 1482 bp, synthetic construct; identical to SEQ ID NO: 7783
  source 1..1482: mol_type = other DNA

SEQ ID NO: 7805 - DNA, 1482 bp, synthetic construct; identical to SEQ ID NO: 7784
  source 1..1482: mol_type = other DNA

SEQ ID NO: 7806 - DNA, 1479 bp, synthetic construct; identical to SEQ ID NO: 7753
  source 1..1479: mol_type = other DNA

SEQ ID NO: 7807 - DNA, 1482 bp, synthetic construct; identical to SEQ ID NO: 7754
  source 1..1482: mol_type = other DNA

SEQ ID NO: 7808 - DNA, 1485 bp, synthetic construct; identical to SEQ ID NO: 7755
  source 1..1485: mol_type = other DNA

SEQ ID NO: 7809 - DNA, 1488 bp, synthetic construct; identical to SEQ ID NO: 7756
  source 1..1488: mol_type = other DNA

SEQ ID NO: 7810 - DNA, 1491 bp, synthetic construct; identical to SEQ ID NO: 7757
  source 1..1491: mol_type = other DNA

SEQ ID NO: 7811 - DNA, 1494 bp, synthetic construct; identical to SEQ ID NO: 7758
  source 1..1494: mol_type = other DNA

SEQ ID NO: 7812 - DNA, 1497 bp, synthetic construct; identical to SEQ ID NO: 7759
  source 1..1497: mol_type = other DNA

SEQ ID NO: 7813 - DNA, 1500 bp, synthetic construct; identical to SEQ ID NO: 7760
  source 1..1500: mol_type = other DNA

SEQ ID NO: 7814 - DNA, 1503 bp, synthetic construct; identical to SEQ ID NO: 7761
  source 1..1503: mol_type = other DNA

SEQ ID NO: 7815 - DNA, 1506 bp, synthetic construct; identical to SEQ ID NO: 7762
  source 1..1506: mol_type = other DNA

SEQ ID NO: 7816 - DNA, 1506 bp, synthetic construct; identical to SEQ ID NO: 7763
  source 1..1506: mol_type = other DNA

SEQ ID NO: 7817 - DNA, 1491 bp, synthetic construct; identical to SEQ ID NO: 7757
  source 1..1491: mol_type = other DNA

SEQ ID NO: 7818 - DNA, 1491 bp, synthetic construct; identical to SEQ ID NO: 7765
  source 1..1491: mol_type = other DNA

SEQ ID NO: 7819 - DNA, 1491 bp, synthetic construct; identical to SEQ ID NO: 7766
  source 1..1491: mol_type = other DNA

SEQ ID NO: 7820 - DNA, 1491 bp, synthetic construct; identical to SEQ ID NO: 7767
  source 1..1491: mol_type = other DNA

SEQ ID NO: 7821 - DNA, 1491 bp, synthetic construct; identical to SEQ ID NO: 7768
  source 1..1491: mol_type = other DNA

SEQ ID NO: 7822 - DNA, 1491 bp, synthetic construct; identical to SEQ ID NO: 7769
  source 1..1491: mol_type = other DNA

SEQ ID NO: 7823 - DNA, 1503 bp, synthetic construct; identical to SEQ ID NO: 7718
  source 1..1503: mol_type = other DNA

SEQ ID NO: 7824 - DNA, 1503 bp, synthetic construct; identical to SEQ ID NO: 7717
  source 1..1503: mol_type = other DNA

SEQ ID NO: 7825 - DNA, 1500 bp, synthetic construct; identical to SEQ ID NO: 7716
  source 1..1500: mol_type = other DNA

SEQ ID NO: 7826 - DNA, 1497 bp, synthetic construct; identical to SEQ ID NO: 7715
  source 1..1497: mol_type = other DNA

SEQ ID NO: 7827 - DNA, 1494 bp, synthetic construct; identical to SEQ ID NO: 7714
  source 1..1494: mol_type = other DNA

SEQ ID NO: 7828 - DNA, 1491 bp, synthetic construct; identical to SEQ ID NO: 7713
  source 1..1491: mol_type = other DNA

SEQ ID NO: 7829 - DNA, 1488 bp, synthetic construct; identical to SEQ ID NO: 7712
  source 1..1488: mol_type = other DNA

SEQ ID NO: 7830 - DNA, 1485 bp, synthetic construct; identical to SEQ ID NO: 7711
  source 1..1485: mol_type = other DNA

SEQ ID NO: 7831 - DNA, 1482 bp, synthetic construct; identical to SEQ ID NO: 7710
  source 1..1482: mol_type = other DNA

SEQ ID NO: 7832 - DNA, 1479 bp, synthetic construct; identical to SEQ ID NO: 7800
  source 1..1479: mol_type = other DNA

SEQ ID NO: 7833 - DNA, 1479 bp, synthetic construct; identical to SEQ ID NO: 7728
  source 1..1479: mol_type = other DNA

SEQ ID NO: 7834 - DNA, 1479 bp, synthetic construct; identical to SEQ ID NO: 7729
  source 1..1479: mol_type = other DNA

SEQ ID NO: 7835 - DNA, 1479 bp, synthetic construct; identical to SEQ ID NO: 7730
  source 1..1479: mol_type = other DNA

SEQ ID NO: 7836 - DNA, 1479 bp, synthetic construct; identical to SEQ ID NO: 7731
  source 1..1479: mol_type = other DNA

SEQ ID NO: 7837 - DNA, 1479 bp, synthetic construct; identical to SEQ ID NO: 7732
  source 1..1479: mol_type = other DNA

SEQ ID NO: 7838 - DNA, 1479 bp, synthetic construct; identical to SEQ ID NO: 7733
  source 1..1479: mol_type = other DNA

SEQ ID NO: 7839 - DNA, 1479 bp, synthetic construct; identical to SEQ ID NO: 7734
  source 1..1479: mol_type = other DNA

SEQ ID NO: 7840 - DNA, 1479 bp, synthetic construct; identical to SEQ ID NO: 7735
  source 1..1479: mol_type = other DNA

SEQ ID NO: 7841 - DNA, 1479 bp, synthetic construct; identical to SEQ ID NO: 7738
  source 1..1479: mol_type = other DNA

SEQ ID NO: 7842 - DNA, 1479 bp, synthetic construct; identical to SEQ ID NO: 7739
  source 1..1479: mol_type = other DNA

SEQ ID NO: 7843 - DNA, 1479 bp, synthetic construct
  source 1..1479: mol_type = other DNA
atggccttaccagtgaccgccttgctcctgccgctggccttgctgctccacgccgccaggccggacatccagatgacacagagccctagcagcctgtctgccagcgtgggagacagagtgaccatcacatgcaaggccagcgaccacatcaacaactggctggcctggtatcagcagaagcctggacaggcccctaagctgctgatctacggcgctaccacactggaaacaggcgtgcccagcagattttctggcagcggctctggcaccgactacaccctgacaatatccagcctccagcctgaggacttcgccacctactactgtcagcagagctggaacaccccttggacattcggccagggcaccaagctggaaatcaagagactcgagggaggctctcgcagcgagtaccgctaccgcggcggaagcttcgaacaagttcagcttcaacagcctggcgctgagctggtcaaacctggcgcttctgtgaagatgagctgcaaagccagcggctacgccttcagcagctactggatcaactggatgaagcagaaacccggccagggactcgaatggatcggccaaatctatcccggcgacggcgacaccaactacaacggcaagttcaagggcagagccacactgaccgccgatacctctagcagcacagcctacatgcagctgagcagcctgaccagcgaagatagcgccgtgtacttctgtgcccggtccatcacaacagtcgtgggctgcgctatggactattggggccagggaacaagcgtgaccgtgtctagtacgcgtaccacgacgccagcgccgcgaccaccaacaccggcgcccaccatcgcgtcgcagcccctgtccctgcgcccagaggcgtgccggccagcggcggggggcgcagtgcacacgagggggctggacttcgcctgtgacatctacatctgggcgcccttggccgggacttgtggggtccttctcctgtcactggttatcaccctttactgcaaacggggcagaaagaaactcctgtatatattcaaacaaccatttatgagaccagtacaaactactcaagaggaagatggctgtagctgccgatttccagaagaagaagaaggaggatgtgaactgagagtgaagttcagcaggagcgcagacgcccccgcgtaccagcagggccagaaccagctctataacgagctgaatctaggacgaagagaggagtacgatgttttggacaagagacgtggccgggaccctgagatggggggaaagccgagaaggaagaaccctcaggaaggcctgtacaatgaactgcagaaagataagatggcggaggcctacagtgagattgggatgaaaggcgagcgccggaggggcaaggggcacgatggcctttaccagggtctcagtacagccaccaaggacacctacgacgcccttcacatgcaggccctgccccctcgctaa

SEQ ID NO: 7844 - DNA, 1479 bp, synthetic construct
  source 1..1479: mol_type = other DNA
atggccttaccagtgaccgccttgctcctgccgctggccttgctgctccacgccgccaggccggacatccagatgacacagagccctagcagcctgtctgccagcgtgggagacagagtgaccatcacatgcaaggccagcgaccacatcaacaactggctggcctggtatcagcagaagcctggacaggcccctaagctgctgatctacggcgctaccacactggaaacaggcgtgcccagcagattttctggcagcggctctggcaccgactacaccctgacaatatccagcctccagcctgaggacttcgccacctactactgtcagcagagctggaacaccccttggacattcggccagggcaccaagctggaaatcaagagactcgagggaggctctcgcagcgagtggcgctaccgcggcggaagcttcgaacaagttcagcttcaacagcctggcgctgagctggtcaaacctggcgcttctgtgaagatgagctgcaaagccagcggctacgccttcagcagctactggatcaactggatgaagcagaaacccggccagggactcgaatggatcggccaaatctatcccggcgacggcgacaccaactacaacggcaagttcaagggcagagccacactgaccgccgatacctctagcagcacagcctacatgcagctgagcagcctgaccagcgaagatagcgccgtgtacttctgtgcccggtccatcacaacagtcgtgggctgcgctatggactattggggccagggaacaagcgtgaccgtgtctagtacgcgtaccacgacgccagcgccgcgaccaccaacaccggcgcccaccatcgcgtcgcagcccctgtccctgcgcccagaggcgtgccggccagcggcggggggcgcagtgcacacgagggggctggacttcgcctgtgacatctacatctgggcgcccttggccgggacttgtggggtccttctcctgtcactggttatcaccctttactgcaaacggggcagaaagaaactcctgtatatattcaaacaaccatttatgagaccagtacaaactactcaagaggaagatggctgtagctgccgatttccagaagaagaagaaggaggatgtgaactgagagtgaagttcagcaggagcgcagacgcccccgcgtaccagcagggccagaaccagctctataacgagctgaatctaggacgaagagaggagtacgatgttttggacaagagacgtggccgggaccctgagatggggggaaagccgagaaggaagaaccctcaggaaggcctgtacaatgaactgcagaaagataagatggcggaggcctacagtgagattgggatgaaaggcgagcgccggaggggcaaggggcacgatggcctttaccagggtctcagtacagccaccaaggacacctacgacgcccttcacatgcaggccctgccccctcgctaa

SEQ ID NO: 7845 - DNA, 1479 bp, synthetic construct
  source 1..1479: mol_type = other DNA
atggccttaccagtgaccgccttgctcctgccgctggccttgctgctccacgccgccaggccggacatccagatgacacagagccctagcagcctgtctgccagcgtgggagacagagtgaccatcacatgcaaggccagcgaccacatcaacaactggctggcctggtatcagcagaagcctggacaggcccctaagctgctgatctacggcgctaccacactggaaacaggcgtgcccagcagattttctggcagcggctctggcaccgactacaccctgacaatatccagcctccagcctgaggacttcgccacctactactgtcagcagagctggaacaccccttggacattcggccagggcaccaagctggaaatcaagagactcgagggaggctctcgcagcgagcgccgctaccgcggcggaagcttcgaacaagttcagcttcaacagcctggcgctgagctggtcaaacctggcgcttctgtgaagatgagctgcaaagccagcggctacgccttcagcagctactggatcaactggatgaagcagaaacccggccagggactcgaatggatcggccaaatctatcccggcgacggcgacaccaactacaacggcaagttcaagggcagagccacactgaccgccgatacctctagcagcacagcctacatgcagctgagcagcctgaccagcgaagatagcgccgtgtacttctgtgcccggtccatcacaacagtcgtgggctgcgctatggactattggggccagggaacaagcgtgaccgtgtctagtacgcgtaccacgacgccagcgccgcgaccaccaacaccggcgcccaccatcgcgtcgcagcccctgtccctgcgcccagaggcgtgccggccagcggcggggggcgcagtgcacacgagggggctggacttcgcctgtgacatctacatctgggcgcccttggccgggacttgtggggtccttctcctgtcactggttatcaccctttactgcaaacggggcagaaagaaactcctgtatatattcaaacaaccatttatgagaccagtacaaactactcaagaggaagatggctgtagctgccgatttccagaagaagaagaaggaggatgtgaactgagagtgaagttcagcaggagcgcagacgcccccgcgtaccagcagggccagaaccagctctataacgagctgaatctaggacgaagagaggagtacgatgttttggacaagagacgtggccgggaccctgagatggggggaaagccgagaaggaagaaccctcaggaaggcctgtacaatgaactgcagaaagataagatggcggaggcctacagtgagattgggatgaaaggcgagcgccggaggggcaaggggcacgatggcctttaccagggtctcagtacagccaccaaggacacctacgacgcccttcacatgcaggccctgccccctcgctaa

SEQ ID NO: 7846 - DNA, 1479 bp, synthetic construct
  source 1..1479: mol_type = other DNA
atggccttaccagtgaccgccttgctcctgccgctggccttgctgctccacgccgccaggccggacatccagatgacacagagccctagcagcctgtctgccagcgtgggagacagagtgaccatcacatgcaaggccagcgaccacatcaacaactggctggcctggtatcagcagaagcctggacaggcccctaagctgctgatctacggcgctaccacactggaaacaggcgtgcccagcagattttctggcagcggctctggcaccgactacaccctgacaatatccagcctccagcctgaggacttcgccacctactactgtcagcagagctggaacaccccttggacattcggccagggcaccaagctggaaatcaagagactcgagggaggctctcgcagcgaggtgcgctaccgcggcggaagcttcgaacaagttcagcttcaacagcctggcgctgagctggtcaaacctggcgcttctgtgaagatgagctgcaaagccagcggctacgccttcagcagctactggatcaactggatgaagcagaaacccggccagggactcgaatggatcggccaaatctatcccggcgacggcgacaccaactacaacggcaagttcaagggcagagccacactgaccgccgatacctctagcagcacagcctacatgcagctgagcagcctgaccagcgaagatagcgccgtgtacttctgtgcccggtccatcacaacagtcgtgggctgcgctatggactattggggccagggaacaagcgtgaccgtgtctagtacgcgtaccacgacgccagcgccgcgaccaccaacaccggcgcccaccatcgcgtcgcagcccctgtccctgcgcccagaggcgtgccggccagcggcggggggcgcagtgcacacgagggggctggacttcgcctgtgacatctacatctgggcgcccttggccgggacttgtggggtccttctcctgtcactggttatcaccctttactgcaaacggggcagaaagaaactcctgtatatattcaaacaaccatttatgagaccagtacaaactactcaagaggaagatggctgtagctgccgatttccagaagaagaagaaggaggatgtgaactgagagtgaagttcagcaggagcgcagacgcccccgcgtaccagcagggccagaaccagctctataacgagctgaatctaggacgaagagaggagtacgatgttttggacaagagacgtggccgggaccctgagatggggggaaagccgagaaggaagaaccctcaggaaggcctgtacaatgaactgcagaaagataagatggcggaggcctacagtgagattgggatgaaaggcgagcgccggaggggcaaggggcacgatggcctttaccagggtctcagtacagccaccaaggacacctacgacgcccttcacatgcaggccctgccccctcgctaa

SEQ ID NO: 7847 - DNA, 1479 bp, synthetic construct
  source 1..1479: mol_type = other DNA
atggccttaccagtgaccgccttgctcctgccgctggccttgctgctccacgccgccaggccggacatccagatgacacagagccctagcagcctgtctgccagcgtgggagacagagtgaccatcacatgcaaggccagcgaccacatcaacaactggctggcctggtatcagcagaagcctggacaggcccctaagctgctgatctacggcgctaccacactggaaacaggcgtgcccagcagattttctggcagcggctctggcaccgactacaccctgacaatatccagcctccagcctgaggacttcgccacctactactgtcagcagagctggaacaccccttggacattcggccagggcaccaagctggaaatcaagagactcgagggaggctctcgcatcgaggaccgctaccgcggcggaagcttcgaacaagttcagcttcaacagcctggcgctgagctggtcaaacctggcgcttctgtgaagatgagctgcaaagccagcggctacgccttcagcagctactggatcaactggatgaagcagaaacccggccagggactcgaatggatcggccaaatctatcccggcgacggcgacaccaactacaacggcaagttcaagggcagagccacactgaccgccgatacctctagcagcacagcctacatgcagctgagcagcctgaccagcgaagatagcgccgtgtacttctgtgcccggtccatcacaacagtcgtgggctgcgctatggactattggggccagggaacaagcgtgaccgtgtctagtacgcgtaccacgacgccagcgccgcgaccaccaacaccggcgcccaccatcgcgtcgcagcccctgtccctgcgcccagaggcgtgccggccagcggcggggggcgcagtgcacacgagggggctggacttcgcctgtgacatctacatctgggcgcccttggccgggacttgtggggtccttctcctgtcactggttatcaccctttactgcaaacggggcagaaagaaactcctgtatatattcaaacaaccatttatgagaccagtacaaactactcaagaggaagatggctgtagctgccgatttccagaagaagaagaaggaggatgtgaactgagagtgaagttcagcaggagcgcagacgcccccgcgtaccagcagggccagaaccagctctataacgagctgaatctaggacgaagagaggagtacgatgttttggacaagagacgtggccgggaccctgagatggggggaaagccgagaaggaagaaccctcaggaaggcctgtacaatgaactgcagaaagataagatggcggaggcctacagtgagattgggatgaaaggcgagcgccggaggggcaaggggcacgatggcctttaccagggtctcagtacagccaccaaggacacctacgacgcccttcacatgcaggccctgccccctcgctaa

SEQ ID NO: 7848 - DNA, 1479 bp, synthetic construct
  source 1..1479: mol_type = other DNA
atggccttaccagtgaccgccttgctcctgccgctggccttgctgctccacgccgccaggccggacatccagatgacacagagccctagcagcctgtctgccagcgtgggagacagagtgaccatcacatgcaaggccagcgaccacatcaacaactggctggcctggtatcagcagaagcctggacaggcccctaagctgctgatctacggcgctaccacactggaaacaggcgtgcccagcagattttctggcagcggctctggcaccgactacaccctgacaatatccagcctccagcctgaggacttcgccacctactactgtcagcagagctggaacaccccttggacattcggccagggcaccaagctggaaatcaagagactcgagggaggctctcgcctggaggaccgctaccgcggcggaagcttcgaacaagttcagcttcaacagcctggcgctgagctggtcaaacctggcgcttctgtgaagatgagctgcaaagccagcggctacgccttcagcagctactggatcaactggatgaagcagaaacccggccagggactcgaatggatcggccaaatctatcccggcgacggcgacaccaactacaacggcaagttcaagggcagagccacactgaccgccgatacctctagcagcacagcctacatgcagctgagcagcctgaccagcgaagatagcgccgtgtacttctgtgcccggtccatcacaacagtcgtgggctgcgctatggactattggggccagggaacaagcgtgaccgtgtctagtacgcgtaccacgacgccagcgccgcgaccaccaacaccggcgcccaccatcgcgtcgcagcccctgtccctgcgcccagaggcgtgccggccagcggcggggggcgcagtgcacacgagggggctggacttcgcctgtgacatctacatctgggcgcccttggccgggacttgtggggtccttctcctgtcactggttatcaccctttactgcaaacggggcagaaagaaactcctgtatatattcaaacaaccatttatgagaccagtacaaactactcaagaggaagatggctgtagctgccgatttccagaagaagaagaaggaggatgtgaactgagagtgaagttcagcaggagcgcagacgcccccgcgtaccagcagggccagaaccagctctataacgagctgaatctaggacgaagagaggagtacgatgttttggacaagagacgtggccgggaccctgagatggggggaaagccgagaaggaagaaccctcaggaaggcctgtacaatgaactgcagaaagataagatggcggaggcctacagtgagattgggatgaaaggcgagcgccggaggggcaaggggcacgatggcctttaccagggtctcagtacagccaccaaggacacctacgacgcccttcacatgcaggccctgccccctcgctaa

SEQ ID NO: 7849 - DNA, 1479 bp, synthetic construct
  source 1..1479: mol_type = other DNA
atggccttaccagtgaccgccttgctcctgccgctggccttgctgctccacgccgccaggccggacatccagatgacacagagccctagcagcctgtctgccagcgtgggagacagagtgaccatcacatgcaaggccagcgaccacatcaacaactggctggcctggtatcagcagaagcctggacaggcccctaagctgctgatctacggcgctaccacactggaaacaggcgtgcccagcagattttctggcagcggctctggcaccgactacaccctgacaatatccagcctccagcctgaggacttcgccacctactactgtcagcagagctggaacaccccttggacattcggccagggcaccaagctggaaatcaagagactcgagggaggctctcgcatggaggaccgctaccgcggcggaagcttcgaacaagttcagcttcaacagcctggcgctgagctggtcaaacctggcgcttctgtgaagatgagctgcaaagccagcggctacgccttcagcagctactggatcaactggatgaagcagaaacccggccagggactcgaatggatcggccaaatctatcccggcgacggcgacaccaactacaacggcaagttcaagggcagagccacactgaccgccgatacctctagcagcacagcctacatgcagctgagcagcctgaccagcgaagatagcgccgtgtacttctgtgcccggtccatcacaacagtcgtgggctgcgctatggactattggggccagggaacaagcgtgaccgtgtctagtacgcgtaccacgacgccagcgccgcgaccaccaacaccggcgcccaccatcgcgtcgcagcccctgtccctgcgcccagaggcgtgccggccagcggcggggggcgcagtgcacacgagggggctggacttcgcctgtgacatctacatctgggcgcccttggccgggacttgtggggtccttctcctgtcactggttatcaccctttactgcaaacggggcagaaagaaactcctgtatatattcaaacaaccatttatgagaccagtacaaactactcaagaggaagatggctgtagctgccgatttccagaagaagaagaaggaggatgtgaactgagagtgaagttcagcaggagcgcagacgcccccgcgtaccagcagggccagaaccagctctataacgagctgaatctaggacgaagagaggagtacgatgttttggacaagagacgtggccgggaccctgagatggggggaaagccgagaaggaagaaccctcaggaaggcctgtacaatgaactgcagaaagataagatggcggaggcctacagtgagattgggatgaaaggcgagcgccggaggggcaaggggcacgatggcctttaccagggtctcagtacagccaccaaggacacctacgacgcccttcacatgcaggccctgccccctcgctaa

SEQ ID NO: 7850 - DNA, 1479 bp, synthetic construct
  source 1..1479: mol_type = other DNA
atggccttaccagtgaccgccttgctcctgccgctggccttgctgctccacgccgccaggccggacatccagatgacacagagccctagcagcctgtctgccagcgtgggagacagagtgaccatcacatgcaaggccagcgaccacatcaacaactggctggcctggtatcagcagaagcctggacaggcccctaagctgctgatctacggcgctaccacactggaaacaggcgtgcccagcagattttctggcagcggctctggcaccgactacaccctgacaatatccagcctccagcctgaggacttcgccacctactactgtcagcagagctggaacaccccttggacattcggccagggcaccaagctggaaatcaagagactcgagggaggctctcgcgtggaggaccgctaccgcggcggaagcttcgaacaagttcagcttcaacagcctggcgctgagctggtcaaacctggcgcttctgtgaagatgagctgcaaagccagcggctacgccttcagcagctactggatcaactggatgaagcagaaacccggccagggactcgaatggatcggccaaatctatcccggcgacggcgacaccaactacaacggcaagttcaagggcagagccacactgaccgccgatacctctagcagcacagcctacatgcagctgagcagcctgaccagcgaagatagcgccgtgtacttctgtgcccggtccatcacaacagtcgtgggctgcgctatggactattggggccagggaacaagcgtgaccgtgtctagtacgcgtaccacgacgccagcgccgcgaccaccaacaccggcgcccaccatcgcgtcgcagcccctgtccctgcgcccagaggcgtgccggccagcggcggggggcgcagtgcacacgagggggctggacttcgcctgtgacatctacatctgggcgcccttggccgggacttgtggggtccttctcctgtcactggttatcaccctttactgcaaacggggcagaaagaaactcctgtatatattcaaacaaccatttatgagaccagtacaaactactcaagaggaagatggctgtagctgccgatttccagaagaagaagaaggaggatgtgaactgagagtgaagttcagcaggagcgcagacgcccccgcgtaccagcagggccagaaccagctctataacgagctgaatctaggacgaagagaggagtacgatgttttggacaagagacgtggccgggaccctgagatggggggaaagccgagaaggaagaaccctcaggaaggcctgtacaatgaactgcagaaagataagatggcggaggcctacagtgagattgggatgaaaggcgagcgccggaggggcaaggggcacgatggcctttaccagggtctcagtacagccaccaaggacacctacgacgcccttcacatgcaggccctgccccctcgctaa

SEQ ID NO: 7851 - DNA, 1479 bp, synthetic construct
  source 1..1479: mol_type = other DNA
atggccttaccagtgaccgccttgctcctgccgctggccttgctgctccacgccgccaggccggacatccagatgacacagagccctagcagcctgtctgccagcgtgggagacagagtgaccatcacatgcaaggccagcgaccacatcaacaactggctggcctggtatcagcagaagcctggacaggcccctaagctgctgatctacggcgctaccacactggaaacaggcgtgcccagcagattttctggcagcggctctggcaccgactacaccctgacaatatccagcctccagcctgaggacttcgccacctactactgtcagcagagctggaacaccccttggacattcggccagggcaccaagctggaaatcaagagactcgagggaggctctcgcgccgaggaccgctaccgcggcggaagcttcgaacaagttcagcttcaacagcctggcgctgagctggtcaaacctggcgcttctgtgaagatgagctgcaaagccagcggctacgccttcagcagctactggatcaactggatgaagcagaaacccggccagggactcgaatggatcggccaaatctatcccggcgacggcgacaccaactacaacggcaagttcaagggcagagccacactgaccgccgatacctctagcagcacagcctacatgcagctgagcagcctgaccagcgaagatagcgccgtgtacttctgtgcccggtccatcacaacagtcgtgggctgcgctatggactattggggccagggaacaagcgtgaccgtgtctagtacgcgtaccacgacgccagcgccgcgaccaccaacaccggcgcccaccatcgcgtcgcagcccctgtccctgcgcccagaggcgtgccggccagcggcggggggcgcagtgcacacgagggggctggacttcgcctgtgacatctacatctgggcgcccttggccgggacttgtggggtccttctcctgtcactggttatcaccctttactgcaaacggggcagaaagaaactcctgtatatattcaaacaaccatttatgagaccagtacaaactactcaagaggaagatggctgtagctgccgatttccagaagaagaagaaggaggatgtgaactgagagtgaagttcagcaggagcgcagacgcccccgcgtaccagcagggccagaaccagctctataacgagctgaatctaggacgaagagaggagtacgatgttttggacaagagacgtggccgggaccctgagatggggggaaagccgagaaggaagaaccctcaggaaggcctgtacaatgaactgcagaaagataagatggcggaggcctacagtgagattgggatgaaaggcgagcgccggaggggcaaggggcacgatggcctttaccagggtctcagtacagccaccaaggacacctacgacgcccttcacatgcaggccctgccccctcgctaa

SEQ ID NO: 7852 - DNA, 1479 bp, synthetic construct
  source 1..1479: mol_type = other DNA
atggccttaccagtgaccgccttgctcctgccgctggccttgctgctccacgccgccaggccggacatccagatgacacagagccctagcagcctgtctgccagcgtgggagacagagtgaccatcacatgcaaggccagcgaccacatcaacaactggctggcctggtatcagcagaagcctggacaggcccctaagctgctgatctacggcgctaccacactggaaacaggcgtgcccagcagattttctggcagcggctctggcaccgactacaccctgacaatatccagcctccagcctgaggacttcgccacctactactgtcagcagagctggaacaccccttggacattcggccagggcaccaagctggaaatcaagagactcgagggaggctctcgcttcgaggaccgctaccgcggcggaagcttcgaacaagttcagcttcaacagcctggcgctgagctggtcaaacctggcgcttctgtgaagatgagctgcaaagccagcggctacgccttcagcagctactggatcaactggatgaagcagaaacccggccagggactcgaatggatcggccaaatctatcccggcgacggcgacaccaactacaacggcaagttcaagggcagagccacactgaccgccgatacctctagcagcacagcctacatgcagctgagcagcctgaccagcgaagatagcgccgtgtacttctgtgcccggtccatcacaacagtcgtgggctgcgctatggactattggggccagggaacaagcgtgaccgtgtctagtacgcgtaccacgacgccagcgccgcgaccaccaacaccggcgcccaccatcgcgtcgcagcccctgtccctgcgcccagaggcgtgccggccagcggcggggggcgcagtgcacacgagggggctggacttcgcctgtgacatctacatctgggcgcccttggccgggacttgtggggtccttctcctgtcactggttatcaccctttactgcaaacggggcagaaagaaactcctgtatatattcaaacaaccatttatgagaccagtacaaactactcaagaggaagatggctgtagctgccgatttccagaagaagaagaaggaggatgtgaactgagagtgaagttcagcaggagcgcagacgcccccgcgtaccagcagggccagaaccagctctataacgagctgaatctaggacgaagagaggagtacgatgttttggacaagagacgtggccgggaccctgagatggggggaaagccgagaaggaagaaccctcaggaaggcctgtacaatgaactgcagaaagataagatggcggaggcctacagtgagattgggatgaaaggcgagcgccggaggggcaaggggcacgatggcctttaccagggtctcagtacagccaccaaggacacctacgacgcccttcacatgcaggccctgccccctcgctaa

SEQ ID NO: 7853 - DNA, 1479 bp, synthetic construct
  source 1..1479: mol_type = other DNA
atggccttaccagtgaccgccttgctcctgccgctggccttgctgctccacgccgccaggccggacatccagatgacacagagccctagcagcctgtctgccagcgtgggagacagagtgaccatcacatgcaaggccagcgaccacatcaacaactggctggcctggtatcagcagaagcctggacaggcccctaagctgctgatctacggcgctaccacactggaaacaggcgtgcccagcagattttctggcagcggctctggcaccgactacaccctgacaatatccagcctccagcctgaggacttcgccacctactactgtcagcagagctggaacaccccttggacattcggccagggcaccaagctggaaatcaagagactcgagggaggctctcgccacgaggaccgctaccgcggcggaagcttcgaacaagttcagcttcaacagcctggcgctgagctggtcaaacctggcgcttctgtgaagatgagctgcaaagccagcggctacgccttcagcagctactggatcaactggatgaagcagaaacccggccagggactcgaatggatcggccaaatctatcccggcgacggcgacaccaactacaacggcaagttcaagggcagagccacactgaccgccgatacctctagcagcacagcctacatgcagctgagcagcctgaccagcgaagatagcgccgtgtacttctgtgcccggtccatcacaacagtcgtgggctgcgctatggactattggggccagggaacaagcgtgaccgtgtctagtacgcgtaccacgacgccagcgccgcgaccaccaacaccggcgcccaccatcgcgtcgcagcccctgtccctgcgcccagaggcgtgccggccagcggcggggggcgcagtgcacacgagggggctggacttcgcctgtgacatctacatctgggcgcccttggccgggacttgtggggtccttctcctgtcactggttatcaccctttactgcaaacggggcagaaagaaactcctgtatatattcaaacaaccatttatgagaccagtacaaactactcaagaggaagatggctgtagctgccgatttccagaagaagaagaaggaggatgtgaactgagagtgaagttcagcaggagcgcagacgcccccgcgtaccagcagggccagaaccagctctataacgagctgaatctaggacgaagagaggagtacgatgttttggacaagagacgtggccgggaccctgagatggggggaaagccgagaaggaagaaccctcaggaaggcctgtacaatgaactgcagaaagataagatggcggaggcctacagtgagattgggatgaaaggcgagcgccggaggggcaaggggcacgatggcctttaccagggtctcagtacagccaccaaggacacctacgacgcccttcacatgcaggccctgccccctcgctaa

SEQ ID NO: 7854 - DNA, 1479 bp, synthetic construct
  source 1..1479: mol_type = other DNA
atggccttaccagtgaccgccttgctcctgccgctggccttgctgctccacgccgccaggccggacatccagatgacacagagccctagcagcctgtctgccagcgtgggagacagagtgaccatcacatgcaaggccagcgaccacatcaacaactggctggcctggtatcagcagaagcctggacaggcccctaagctgctgatctacggcgctaccacactggaaacaggcgtgcccagcagattttctggcagcggctctggcaccgactacaccctgacaatatccagcctccagcctgaggacttcgccacctactactgtcagcagagctggaacaccccttggacattcggccagggcaccaagctggaaatcaagagactcgagggaggctctcgcggcgaggaccgctaccgcggcggaagcttcgaacaagttcagcttcaacagcctggcgctgagctggtcaaacctggcgcttctgtgaagatgagctgcaaagccagcggctacgccttcagcagctactggatcaactggatgaagcagaaacccggccagggactcgaatggatcggccaaatctatcccggcgacggcgacaccaactacaacggcaagttcaagggcagagccacactgaccgccgatacctctagcagcacagcctacatgcagctgagcagcctgaccagcgaagatagcgccgtgtacttctgtgcccggtccatcacaacagtcgtgggctgcgctatggactattggggccagggaacaagcgtgaccgtgtctagtacgcgtaccacgacgccagcgccgcgaccaccaacaccggcgcccaccatcgcgtcgcagcccctgtccctgcgcccagaggcgtgccggccagcggcggggggcgcagtgcacacgagggggctggacttcgcctgtgacatctacatctgggcgcccttggccgggacttgtggggtccttctcctgtcactggttatcaccctttactgcaaacggggcagaaagaaactcctgtatatattcaaacaaccatttatgagaccagtacaaactactcaagaggaagatggctgtagctgccgatttccagaagaagaagaaggaggatgtgaactgagagtgaagttcagcaggagcgcagacgcccccgcgtaccagcagggccagaaccagctctataacgagctgaatctaggacgaagagaggagtacgatgttttggacaagagacgtggccgggaccctgagatggggggaaagccgagaaggaagaaccctcaggaaggcctgtacaatgaactgcagaaagataagatggcggaggcctacagtgagattgggatgaaaggcgagcgccggaggggcaaggggcacgatggcctttaccagggtctcagtacagccaccaaggacacctacgacgcccttcacatgcaggccctgccccctcgctaa

SEQ ID NO: 7855 - DNA, 1479 bp, synthetic construct
  source 1..1479: mol_type = other DNA
atggccttaccagtgaccgccttgctcctgccgctggccttgctgctccacgccgccaggccggacatccagatgacacagagccctagcagcctgtctgccagcgtgggagacagagtgaccatcacatgcaaggccagcgaccacatcaacaactggctggcctggtatcagcagaagcctggacaggcccctaagctgctgatctacggcgctaccacactggaaacaggcgtgcccagcagattttctggcagcggctctggcaccgactacaccctgacaatatccagcctccagcctgaggacttcgccacctactactgtcagcagagctggaacaccccttggacattcggccagggcaccaagctggaaatcaagagactcgagggaggctctcgcaccgaggaccgctaccgcggcggaagcttcgaacaagttcagcttcaacagcctggcgctgagctggtcaaacctggcgcttctgtgaagatgagctgcaaagccagcggctacgccttcagcagctactggatcaactggatgaagcagaaacccggccagggactcgaatggatcggccaaatctatcccggcgacggcgacaccaactacaacggcaagttcaagggcagagccacactgaccgccgatacctctagcagcacagcctacatgcagctgagcagcctgaccagcgaagatagcgccgtgtacttctgtgcccggtccatcacaacagtcgtgggctgcgctatggactattggggccagggaacaagcgtgaccgtgtctagtacgcgtaccacgacgccagcgccgcgaccaccaacaccggcgcccaccatcgcgtcgcagcccctgtccctgcgcccagaggcgtgccggccagcggcggggggcgcagtgcacacgagggggctggacttcgcctgtgacatctacatctgggcgcccttggccgggacttgtggggtccttctcctgtcactggttatcaccctttactgcaaacggggcagaaagaaactcctgtatatattcaaacaaccatttatgagaccagtacaaactactcaagaggaagatggctgtagctgccgatttccagaagaagaagaaggaggatgtgaactgagagtgaagttcagcaggagcgcagacgcccccgcgtaccagcagggccagaaccagctctataacgagctgaatctaggacgaagagaggagtacgatgttttggacaagagacgtggccgggaccctgagatggggggaaagccgagaaggaagaaccctcaggaaggcctgtacaatgaactgcagaaagataagatggcggaggcctacagtgagattgggatgaaaggcgagcgccggaggggcaaggggcacgatggcctttaccagggtctcagtacagccaccaaggacacctacgacgcccttcacatgcaggccctgccccctcgctaa

SEQ ID NO: 7856 - DNA, 1479 bp, synthetic construct
  source 1..1479: mol_type = other DNA
atggccttaccagtgaccgccttgctcctgccgctggccttgctgctccacgccgccaggccggacatccagatgacacagagccctagcagcctgtctgccagcgtgggagacagagtgaccatcacatgcaaggccagcgaccacatcaacaactggctggcctggtatcagcagaagcctggacaggcccctaagctgctgatctacggcgctaccacactggaaacaggcgtgcccagcagattttctggcagcggctctggcaccgactacaccctgacaatatccagcctccagcctgaggacttcgccacctactactgtcagcagagctggaacaccccttggacattcggccagggcaccaagctggaaatcaagagactcgagggaggctctagcagcgaggaccgctaccgcggcggaagcttcgaacaagttcagcttcaacagcctggcgctgagctggtcaaacctggcgcttctgtgaagatgagctgcaaagccagcggctacgccttcagcagctactggatcaactggatgaagcagaaacccggccagggactcgaatggatcggccaaatctatcccggcgacggcgacaccaactacaacggcaagttcaagggcagagccacactgaccgccgatacctctagcagcacagcctacatgcagctgagcagcctgaccagcgaagatagcgccgtgtacttctgtgcccggtccatcacaacagtcgtgggctgcgctatggactattggggccagggaacaagcgtgaccgtgtctagtacgcgtaccacgacgccagcgccgcgaccaccaacaccggcgcccaccatcgcgtcgcagcccctgtccctgcgcccagaggcgtgccggccagcggcggggggcgcagtgcacacgagggggctggacttcgcctgtgacatctacatctgggcgcccttggccgggacttgtggggtccttctcctgtcactggttatcaccctttactgcaaacggggcagaaagaaactcctgtatatattcaaacaaccatttatgagaccagtacaaactactcaagaggaagatggctgtagctgccgatttccagaagaagaagaaggaggatgtgaactgagagtgaagttcagcaggagcgcagacgcccccgcgtaccagcagggccagaaccagctctataacgagctgaatctaggacgaagagaggagtacgatgttttggacaagagacgtggccgggaccctgagatggggggaaagccgagaaggaagaaccctcaggaaggcctgtacaatgaactgcagaaagataagatggcggaggcctacagtgagattgggatgaaaggcgagcgccggaggggcaaggggcacgatggcctttaccagggtctcagtacagccaccaaggacacctacgacgcccttcacatgcaggccctgccccctcgctaa

SEQ ID NO: 7857 - DNA, 1479 bp, synthetic construct
  source 1..1479: mol_type = other DNA
atggccttaccagtgaccgccttgctcctgccgctggccttgctgctccacgccgccaggccggacatccagatgacacagagccctagcagcctgtctgccagcgtgggagacagagtgaccatcacatgcaaggccagcgaccacatcaacaactggctggcctggtatcagcagaagcctggacaggcccctaagctgctgatctacggcgctaccacactggaaacaggcgtgcccagcagattttctggcagcggctctggcaccgactacaccctgacaatatccagcctccagcctgaggacttcgccacctactactgtcagcagagctggaacaccccttggacattcggccagggcaccaagctggaaatcaagagactcgagggaggctctcacagcgaggaccgctaccgcggcggaagcttcgaacaagttcagcttcaacagcctggcgctgagctggtcaaacctggcgcttctgtgaagatgagctgcaaagccagcggctacgccttcagcagctactggatcaactggatgaagcagaaacccggccagggactcgaatggatcggccaaatctatcccggcgacggcgacaccaactacaacggcaagttcaagggcagagccacactgaccgccgatacctctagcagcacagcctacatgcagctgagcagcctgaccagcgaagatagcgccgtgtacttctgtgcccggtccatcacaacagtcgtgggctgcgctatggactattggggccagggaacaagcgtgaccgtgtctagtacgcgtaccacgacgccagcgccgcgaccaccaacaccggcgcccaccatcgcgtcgcagcccctgtccctgcgcccagaggcgtgccggccagcggcggggggcgcagtgcacacgagggggctggacttcgcctgtgacatctacatctgggcgcccttggccgggacttgtggggtccttctcctgtcactggttatcaccctttactgcaaacggggcagaaagaaactcctgtatatattcaaacaaccatttatgagaccagtacaaactactcaagaggaagatggctgtagctgccgatttccagaagaagaagaaggaggatgtgaactgagagtgaagttcagcaggagcgcagacgcccccgcgtaccagcagggccagaaccagctctataacgagctgaatctaggacgaagagaggagtacgatgttttggacaagagacgtggccgggaccctgagatggggggaaagccgagaaggaagaaccctcaggaaggcctgtacaatgaactgcagaaagataagatggcggaggcctacagtgagattgggatgaaaggcgagcgccggaggggcaaggggcacgatggcctttaccagggtctcagtacagccaccaaggacacctacgacgcccttcacatgcaggccctgccccctcgctaa

SEQ ID NO: 7858 - DNA, 1479 bp, synthetic construct
  source 1..1479: mol_type = other DNA
atggccttaccagtgaccgccttgctcctgccgctggccttgctgctccacgccgccaggccggacatccagatgacacagagccctagcagcctgtctgccagcgtgggagacagagtgaccatcacatgcaaggccagcgaccacatcaacaactggctggcctggtatcagcagaagcctggacaggcccctaagctgctgatctacggcgctaccacactggaaacaggcgtgcccagcagattttctggcagcggctctggcaccgactacaccctgacaatatccagcctccagcctgaggacttcgccacctactactgtcagcagagctggaacaccccttggacattcggccagggcaccaagctggaaatcaagagactcgagggaggctctgacagcgaggaccgctaccgcggcggaagcttcgaacaagttcagcttcaacagcctggcgctgagctggtcaaacctggcgcttctgtgaagatgagctgcaaagccagcggctacgccttcagcagctactggatcaactggatgaagcagaaacccggccagggactcgaatggatcggccaaatctatcccggcgacggcgacaccaactacaacggcaagttcaagggcagagccacactgaccgccgatacctctagcagcacagcctacatgcagctgagcagcctgaccagcgaagatagcgccgtgtacttctgtgcccggtccatcacaacagtcgtgggctgcgctatggactattggggccagggaacaagcgtgaccgtgtctagtacgcgtaccacgacgccagcgccgcgaccaccaacaccggcgcccaccatcgcgtcgcagcccctgtccctgcgcccagaggcgtgccggccagcggcggggggcgcagtgcacacgagggggctggacttcgcctgtgacatctacatctgggcgcccttggccgggacttgtggggtccttctcctgtcactggttatcaccctttactgcaaacggggcagaaagaaactcctgtatatattcaaacaaccatttatgagaccagtacaaactactcaagaggaagatggctgtagctgccgatttccagaagaagaagaaggaggatgtgaactgagagtgaagttcagcaggagcgcagacgcccccgcgtaccagcagggccagaaccagctctataacgagctgaatctaggacgaagagaggagtacgatgttttggacaagagacgtggccgggaccctgagatggggggaaagccgagaaggaagaaccctcaggaaggcctgtacaatgaactgcagaaagataagatggcggaggcctacagtgagattgggatgaaaggcgagcgccggaggggcaaggggcacgatggcctttaccagggtctcagtacagccaccaaggacacctacgacgcccttcacatgcaggccctgccccctcgctaa

SEQ ID NO: 7859 - DNA, 1479 bp, synthetic construct
  source 1..1479: mol_type = other DNA
atggccttaccagtgaccgccttgctcctgccgctggccttgctgctccacgccgccaggccggacatccagatgacacagagccctagcagcctgtctgccagcgtgggagacagagtgaccatcacatgcaaggccagcgaccacatcaacaactggctggcctggtatcagcagaagcctggacaggcccctaagctgctgatctacggcgctaccacactggaaacaggcgtgcccagcagattttctggcagcggctctggcaccgactacaccctgacaatatccagcctccagcctgaggacttcgccacctactactgtcagcagagctggaacaccccttggacattcggccagggcaccaagctggaaatcaagagactcgagggaggctctttcagcgaggaccgctaccgcggcggaagcttcgaacaagttcagcttcaacagcctggcgctgagctggtcaaacctggcgcttctgtgaagatgagctgcaaagccagcggctacgccttcagcagctactggatcaactggatgaagcagaaacccggccagggactcgaatggatcggccaaatctatcccggcgacggcgacaccaactacaacggcaagttcaagggcagagccacactgaccgccgatacctctagcagcacagcctacatgcagctgagcagcctgaccagcgaagatagcgccgtgtacttctgtgcccggtccatcacaacagtcgtgggctgcgctatggactattggggccagggaacaagcgtgaccgtgtctagtacgcgtaccacgacgccagcgccgcgaccaccaacaccggcgcccaccatcgcgtcgcagcccctgtccctgcgcccagaggcgtgccggccagcggcggggggcgcagtgcacacgagggggctggacttcgcctgtgacatctacatctgggcgcccttggccgggacttgtggggtccttctcctgtcactggttatcaccctttactgcaaacggggcagaaagaaactcctgtatatattcaaacaaccatttatgagaccagtacaaactactcaagaggaagatggctgtagctgccgatttccagaagaagaagaaggaggatgtgaactgagagtgaagttcagcaggagcgcagacgcccccgcgtaccagcagggccagaaccagctctataacgagctgaatctaggacgaagagaggagtacgatgttttggacaagagacgtggccgggaccctgagatggggggaaagccgagaaggaagaaccctcaggaaggcctgtacaatgaactgcagaaagataagatggcggaggcctacagtgagattgggatgaaaggcgagcgccggaggggcaaggggcacgatggcctttaccagggtctcagtacagccaccaaggacacctacgacgcccttcacatgcaggccctgccccctcgctaa

SEQ ID NO: 7860 - DNA, 1479 bp, synthetic construct
  source 1..1479: mol_type = other DNA
atggccttaccagtgaccgccttgctcctgccgctggccttgctgctccacgccgccaggccggacatccagatgacacagagccctagcagcctgtctgccagcgtgggagacagagtgaccatcacatgcaaggccagcgaccacatcaacaactggctggcctggtatcagcagaagcctggacaggcccctaagctgctgatctacggcgctaccacactggaaacaggcgtgcccagcagattttctggcagcggctctggcaccgactacaccctgacaatatccagcctccagcctgaggacttcgccacctactactgtcagcagagctggaacaccccttggacattcggccagggcaccaagctggaaatcaagagactcgagggaggctctcgcagcgaggaccgcttccgcggcggaagcttcgaacaagttcagcttcaacagcctggcgctgagctggtcaaacctggcgcttctgtgaagatgagctgcaaagccagcggctacgccttcagcagctactggatcaactggatgaagcagaaacccggccagggactcgaatggatcggccaaatctatcccggcgacggcgacaccaactacaacggcaagttcaagggcagagccacactgaccgccgatacctctagcagcacagcctacatgcagctgagcagcctgaccagcgaagatagcgccgtgtacttctgtgcccggtccatcacaacagtcgtgggctgcgctatggactattggggccagggaacaagcgtgaccgtgtctagtacgcgtaccacgacgccagcgccgcgaccaccaacaccggcgcccaccatcgcgtcgcagcccctgtccctgcgcccagaggcgtgccggccagcggcggggggcgcagtgcacacgagggggctggacttcgcctgtgacatctacatctgggcgcccttggccgggacttgtggggtccttctcctgtcactggttatcaccctttactgcaaacggggcagaaagaaactcctgtatatattcaaacaaccatttatgagaccagtacaaactactcaagaggaagatggctgtagctgccgatttccagaagaagaagaaggaggatgtgaactgagagtgaagttcagcaggagcgcagacgcccccgcgtaccagcagggccagaaccagctctataacgagctgaatctaggacgaagagaggagtacgatgttttggacaagagacgtggccgggaccctgagatggggggaaagccgagaaggaagaaccctcaggaaggcctgtacaatgaactgcagaaagataagatggcggaggcctacagtgagattgggatgaaaggcgagcgccggaggggcaaggggcacgatggcctttaccagggtctcagtacagccaccaaggacacctacgacgcccttcacatgcaggccctgccccctcgctaa

SEQ ID NO: 7861 - DNA, 1479 bp, synthetic construct
  source 1..1479: mol_type = other DNA
atggccttaccagtgaccgccttgctcctgccgctggccttgctgctccacgccgccaggccggacatccagatgacacagagccctagcagcctgtctgccagcgtgggagacagagtgaccatcacatgcaaggccagcgaccacatcaacaactggctggcctggtatcagcagaagcctggacaggcccctaagctgctgatctacggcgctaccacactggaaacaggcgtgcccagcagattttctggcagcggctctggcaccgactacaccctgacaatatccagcctccagcctgaggacttcgccacctactactgtcagcagagctggaacaccccttggacattcggccagggcaccaagctggaaatcaagagactcgagggaggctctcgcagcgaggaccgccaccgcggcggaagcttcgaacaagttcagcttcaacagcctggcgctgagctggtcaaacctggcgcttctgtgaagatgagctgcaaagccagcggctacgccttcagcagctactggatcaactggatgaagcagaaacccggccagggactcgaatggatcggccaaatctatcccggcgacggcgacaccaactacaacggcaagttcaagggcagagccacactgaccgccgatacctctagcagcacagcctacatgcagctgagcagcctgaccagcgaagatagcgccgtgtacttctgtgcccggtccatcacaacagtcgtgggctgcgctatggactattggggccagggaacaagcgtgaccgtgtctagtacgcgtaccacgacgccagcgccgcgaccaccaacaccggcgcccaccatcgcgtcgcagcccctgtccctgcgcccagaggcgtgccggccagcggcggggggcgcagtgcacacgagggggctggacttcgcctgtgacatctacatctgggcgcccttggccgggacttgtggggtccttctcctgtcactggttatcaccctttactgcaaacggggcagaaagaaactcctgtatatattcaaacaaccatttatgagaccagtacaaactactcaagaggaagatggctgtagctgccgatttccagaagaagaagaaggaggatgtgaactgagagtgaagttcagcaggagcgcagacgcccccgcgtaccagcagggccagaaccagctctataacgagctgaatctaggacgaagagaggagtacgatgttttggacaagagacgtggccgggaccctgagatggggggaaagccgagaaggaagaaccctcaggaaggcctgtacaatgaactgcagaaagataagatggcggaggcctacagtgagattgggatgaaaggcgagcgccggaggggcaaggggcacgatggcctttaccagggtctcagtacagccaccaaggacacctacgacgcccttcacatgcaggccctgccccctcgctaa

SEQ ID NO: 7862 - DNA, 1482 bp, synthetic construct; identical to SEQ ID NO: 7754
  source 1..1482: mol_type = other DNA

SEQ ID NO: 7863 - DNA, 1482 bp, synthetic construct; identical to SEQ ID NO: 7771
  source 1..1482: mol_type = other DNA

SEQ ID NO: 7864 - DNA, 1482 bp, synthetic construct; identical to SEQ ID NO: 7772
  source 1..1482: mol_type = other DNA

SEQ ID NO: 7865 - DNA, 1482 bp, synthetic construct; identical to SEQ ID NO: 7773
  source 1..1482: mol_type = other DNA

SEQ ID NO: 7866 - DNA, 1482 bp, synthetic construct; identical to SEQ ID NO: 7774
  source 1..1482: mol_type = other DNA

SEQ ID NO: 7867 - DNA, 1482 bp, synthetic construct; identical to SEQ ID NO: 7775
  source 1..1482: mol_type = other DNA

SEQ ID NO: 7868 - DNA, 1482 bp, synthetic construct; identical to SEQ ID NO: 7776
  source 1..1482: mol_type = other DNA

SEQ ID NO: 7869 - DNA, 1482 bp, synthetic construct; identical to SEQ ID NO: 7777
  source 1..1482: mol_type = other DNA

SEQ ID NO: 7870 - DNA, 1482 bp, synthetic construct; identical to SEQ ID NO: 7778
  source 1..1482: mol_type = other DNA

SEQ ID NO: 7871 - DNA, 1482 bp, synthetic construct; identical to SEQ ID NO: 7779
  source 1..1482: mol_type = other DNA

SEQ ID NO: 7872 - DNA, 1482 bp, synthetic construct; identical to SEQ ID NO: 7780
  source 1..1482: mol_type = other DNA

SEQ ID NO: 7873 - DNA, 1482 bp, synthetic construct; identical to SEQ ID NO: 7781
  source 1..1482: mol_type = other DNA

SEQ ID NO: 7874 - DNA, 1482 bp, synthetic construct; identical to SEQ ID NO: 7784
  source 1..1482: mol_type = other DNA

SEQ ID NO: 7875 - DNA, 1482 bp, synthetic construct; identical to SEQ ID NO: 7785
  source 1..1482: mol_type = other DNA

SEQ ID NO: 7876 - DNA, 1482 bp, synthetic construct
  source 1..1482: mol_type = other DNA
atggccttaccagtgaccgccttgctcctgccgctggccttgctgctccacgccgccaggccggacatccagatgacacagagccctagcagcctgtctgccagcgtgggagacagagtgaccatcacatgcaaggccagcgaccacatcaacaactggctggcctggtatcagcagaagcctggacaggcccctaagctgctgatctacggcgctaccacactggaaacaggcgtgcccagcagattttctggcagcggctctggcaccgactacaccctgacaatatccagcctccagcctgaggacttcgccacctactactgtcagcagagctggaacaccccttggacattcggccagggcaccaagctggaaatcaagagactcgagggaggctctgcccgcagcgagtggcgctaccgcggcggaagcttcgaacaagttcagcttcaacagcctggcgctgagctggtcaaacctggcgcttctgtgaagatgagctgcaaagccagcggctacgccttcagcagctactggatcaactggatgaagcagaaacccggccagggactcgaatggatcggccaaatctatcccggcgacggcgacaccaactacaacggcaagttcaagggcagagccacactgaccgccgatacctctagcagcacagcctacatgcagctgagcagcctgaccagcgaagatagcgccgtgtacttctgtgcccggtccatcacaacagtcgtgggctgcgctatggactattggggccagggaacaagcgtgaccgtgtctagtacgcgtaccacgacgccagcgccgcgaccaccaacaccggcgcccaccatcgcgtcgcagcccctgtccctgcgcccagaggcgtgccggccagcggcggggggcgcagtgcacacgagggggctggacttcgcctgtgacatctacatctgggcgcccttggccgggacttgtggggtccttctcctgtcactggttatcaccctttactgcaaacggggcagaaagaaactcctgtatatattcaaacaaccatttatgagaccagtacaaactactcaagaggaagatggctgtagctgccgatttccagaagaagaagaaggaggatgtgaactgagagtgaagttcagcaggagcgcagacgcccccgcgtaccagcagggccagaaccagctctataacgagctgaatctaggacgaagagaggagtacgatgttttggacaagagacgtggccgggaccctgagatggggggaaagccgagaaggaagaaccctcaggaaggcctgtacaatgaactgcagaaagataagatggcggaggcctacagtgagattgggatgaaaggcgagcgccggaggggcaaggggcacgatggcctttaccagggtctcagtacagccaccaaggacacctacgacgcccttcacatgcaggccctgccccctcgctaa

SEQ ID NO: 7877 - DNA, 1482 bp, synthetic construct
  source 1..1482: mol_type = other DNA
atggccttaccagtgaccgccttgctcctgccgctggccttgctgctccacgccgccaggccggacatccagatgacacagagccctagcagcctgtctgccagcgtgggagacagagtgaccatcacatgcaaggccagcgaccacatcaacaactggctggcctggtatcagcagaagcctggacaggcccctaagctgctgatctacggcgctaccacactggaaacaggcgtgcccagcagattttctggcagcggctctggcaccgactacaccctgacaatatccagcctccagcctgaggacttcgccacctactactgtcagcagagctggaacaccccttggacattcggccagggcaccaagctggaaatcaagagactcgagggaggctctgcccgcagcgagtaccgctaccgcggcggaagcttcgaacaagttcagcttcaacagcctggcgctgagctggtcaaacctggcgcttctgtgaagatgagctgcaaagccagcggctacgccttcagcagctactggatcaactggatgaagcagaaacccggccagggactcgaatggatcggccaaatctatcccggcgacggcgacaccaactacaacggcaagttcaagggcagagccacactgaccgccgatacctctagcagcacagcctacatgcagctgagcagcctgaccagcgaagatagcgccgtgtacttctgtgcccggtccatcacaacagtcgtgggctgcgctatggactattggggccagggaacaagcgtgaccgtgtctagtacgcgtaccacgacgccagcgccgcgaccaccaacaccggcgcccaccatcgcgtcgcagcccctgtccctgcgcccagaggcgtgccggccagcggcggggggcgcagtgcacacgagggggctggacttcgcctgtgacatctacatctgggcgcccttggccgggacttgtggggtccttctcctgtcactggttatcaccctttactgcaaacggggcagaaagaaactcctgtatatattcaaacaaccatttatgagaccagtacaaactactcaagaggaagatggctgtagctgccgatttccagaagaagaagaaggaggatgtgaactgagagtgaagttcagcaggagcgcagacgcccccgcgtaccagcagggccagaaccagctctataacgagctgaatctaggacgaagagaggagtacgatgttttggacaagagacgtggccgggaccctgagatggggggaaagccgagaaggaagaaccctcaggaaggcctgtacaatgaactgcagaaagataagatggcggaggcctacagtgagattgggatgaaaggcgagcgccggaggggcaaggggcacgatggcctttaccagggtctcagtacagccaccaaggacacctacgacgcccttcacatgcaggccctgccccctcgctaa

SEQ ID NO: 7878 - DNA, 1482 bp, synthetic construct
  source 1..1482: mol_type = other DNA
atggccttaccagtgaccgccttgctcctgccgctggccttgctgctccacgccgccaggccggacatccagatgacacagagccctagcagcctgtctgccagcgtgggagacagagtgaccatcacatgcaaggccagcgaccacatcaacaactggctggcctggtatcagcagaagcctggacaggcccctaagctgctgatctacggcgctaccacactggaaacaggcgtgcccagcagattttctggcagcggctctggcaccgactacaccctgacaatatccagcctccagcctgaggacttcgccacctactactgtcagcagagctggaacaccccttggacattcggccagggcaccaagctggaaatcaagagactcgagggaggctctgcccgcagcgagcgccgctaccgcggcggaagcttcgaacaagttcagcttcaacagcctggcgctgagctggtcaaacctggcgcttctgtgaagatgagctgcaaagccagcggctacgccttcagcagctactggatcaactggatgaagcagaaacccggccagggactcgaatggatcggccaaatctatcccggcgacggcgacaccaactacaacggcaagttcaagggcagagccacactgaccgccgatacctctagcagcacagcctacatgcagctgagcagcctgaccagcgaagatagcgccgtgtacttctgtgcccggtccatcacaacagtcgtgggctgcgctatggactattggggccagggaacaagcgtgaccgtgtctagtacgcgtaccacgacgccagcgccgcgaccaccaacaccggcgcccaccatcgcgtcgcagcccctgtccctgcgcccagaggcgtgccggccagcggcggggggcgcagtgcacacgagggggctggacttcgcctgtgacatctacatctgggcgcccttggccgggacttgtggggtccttctcctgtcactggttatcaccctttactgcaaacggggcagaaagaaactcctgtatatattcaaacaaccatttatgagaccagtacaaactactcaagaggaagatggctgtagctgccgatttccagaagaagaagaaggaggatgtgaactgagagtgaagttcagcaggagcgcagacgcccccgcgtaccagcagggccagaaccagctctataacgagctgaatctaggacgaagagaggagtacgatgttttggacaagagacgtggccgggaccctgagatggggggaaagccgagaaggaagaaccctcaggaaggcctgtacaatgaactgcagaaagataagatggcggaggcctacagtgagattgggatgaaaggcgagcgccggaggggcaaggggcacgatggcctttaccagggtctcagtacagccaccaaggacacctacgacgcccttcacatgcaggccctgccccctcgctaa

SEQ ID NO: 7879 - DNA, 1482 bp, synthetic construct
  source 1..1482: mol_type = other DNA
atggccttaccagtgaccgccttgctcctgccgctggccttgctgctccacgccgccaggccggacatccagatgacacagagccctagcagcctgtctgccagcgtgggagacagagtgaccatcacatgcaaggccagcgaccacatcaacaactggctggcctggtatcagcagaagcctggacaggcccctaagctgctgatctacggcgctaccacactggaaacaggcgtgcccagcagattttctggcagcggctctggcaccgactacaccctgacaatatccagcctccagcctgaggacttcgccacctactactgtcagcagagctggaacaccccttggacattcggccagggcaccaagctggaaatcaagagactcgagggaggctctgcccgcagcgaggtgcgctaccgcggcggaagcttcgaacaagttcagcttcaacagcctggcgctgagctggtcaaacctggcgcttctgtgaagatgagctgcaaagccagcggctacgccttcagcagctactggatcaactggatgaagcagaaacccggccagggactcgaatggatcggccaaatctatcccggcgacggcgacaccaactacaacggcaagttcaagggcagagccacactgaccgccgatacctctagcagcacagcctacatgcagctgagcagcctgaccagcgaagatagcgccgtgtacttctgtgcccggtccatcacaacagtcgtgggctgcgctatggactattggggccagggaacaagcgtgaccgtgtctagtacgcgtaccacgacgccagcgccgcgaccaccaacaccggcgcccaccatcgcgtcgcagcccctgtccctgcgcccagaggcgtgccggccagcggcggggggcgcagtgcacacgagggggctggacttcgcctgtgacatctacatctgggcgcccttggccgggacttgtggggtccttctcctgtcactggttatcaccctttactgcaaacggggcagaaagaaactcctgtatatattcaaacaaccatttatgagaccagtacaaactactcaagaggaagatggctgtagctgccgatttccagaagaagaagaaggaggatgtgaactgagagtgaagttcagcaggagcgcagacgcccccgcgtaccagcagggccagaaccagctctataacgagctgaatctaggacgaagagaggagtacgatgttttggacaagagacgtggccgggaccctgagatggggggaaagccgagaaggaagaaccctcaggaaggcctgtacaatgaactgcagaaagataagatggcggaggcctacagtgagattgggatgaaaggcgagcgccggaggggcaaggggcacgatggcctttaccagggtctcagtacagccaccaaggacacctacgacgcccttcacatgcaggccctgccccctcgctaa

SEQ ID NO: 7880 - DNA, 1482 bp, synthetic construct
  source 1..1482: mol_type = other DNA
atggccttaccagtgaccgccttgctcctgccgctggccttgctgctccacgccgccaggccggacatccagatgacacagagccctagcagcctgtctgccagcgtgggagacagagtgaccatcacatgcaaggccagcgaccacatcaacaactggctggcctggtatcagcagaagcctggacaggcccctaagctgctgatctacggcgctaccacactggaaacaggcgtgcccagcagattttctggcagcggctctggcaccgactacaccctgacaatatccagcctccagcctgaggacttcgccacctactactgtcagcagagctggaacaccccttggacattcggccagggcaccaagctggaaatcaagagactcgagggaggctctgcccgcatcgaggaccgctaccgcggcggaagcttcgaacaagttcagcttcaacagcctggcgctgagctggtcaaacctggcgcttctgtgaagatgagctgcaaagccagcggctacgccttcagcagctactggatcaactggatgaagcagaaacccggccagggactcgaatggatcggccaaatctatcccggcgacggcgacaccaactacaacggcaagttcaagggcagagccacactgaccgccgatacctctagcagcacagcctacatgcagctgagcagcctgaccagcgaagatagcgccgtgtacttctgtgcccggtccatcacaacagtcgtgggctgcgctatggactattggggccagggaacaagcgtgaccgtgtctagtacgcgtaccacgacgccagcgccgcgaccaccaacaccggcgcccaccatcgcgtcgcagcccctgtccctgcgcccagaggcgtgccggccagcggcggggggcgcagtgcacacgagggggctggacttcgcctgtgacatctacatctgggcgcccttggccgggacttgtggggtccttctcctgtcactggttatcaccctttactgcaaacggggcagaaagaaactcctgtatatattcaaacaaccatttatgagaccagtacaaactactcaagaggaagatggctgtagctgccgatttccagaagaagaagaaggaggatgtgaactgagagtgaagttcagcaggagcgcagacgcccccgcgtaccagcagggccagaaccagctctataacgagctgaatctaggacgaagagaggagtacgatgttttggacaagagacgtggccgggaccctgagatggggggaaagccgagaaggaagaaccctcaggaaggcctgtacaatgaactgcagaaagataagatggcggaggcctacagtgagattgggatgaaaggcgagcgccggaggggcaaggggcacgatggcctttaccagggtctcagtacagccaccaaggacacctacgacgcccttcacatgcaggccctgccccctcgctaa

SEQ ID NO: 7881 - DNA, 1482 bp, synthetic construct
  source 1..1482: mol_type = other DNA
atggccttaccagtgaccgccttgctcctgccgctggccttgctgctccacgccgccaggccggacatccagatgacacagagccctagcagcctgtctgccagcgtgggagacagagtgaccatcacatgcaaggccagcgaccacatcaacaactggctggcctggtatcagcagaagcctggacaggcccctaagctgctgatctacggcgctaccacactggaaacaggcgtgcccagcagattttctggcagcggctctggcaccgactacaccctgacaatatccagcctccagcctgaggacttcgccacctactactgtcagcagagctggaacaccccttggacattcggccagggcaccaagctggaaatcaagagactcgagggaggctctgcccgcctggaggaccgctaccgcggcggaagcttcgaacaagttcagcttcaacagcctggcgctgagctggtcaaacctggcgcttctgtgaagatgagctgcaaagccagcggctacgccttcagcagctactggatcaactggatgaagcagaaacccggccagggactcgaatggatcggccaaatctatcccggcgacggcgacaccaactacaacggcaagttcaagggcagagccacactgaccgccgatacctctagcagcacagcctacatgcagctgagcagcctgaccagcgaagatagcgccgtgtacttctgtgcccggtccatcacaacagtcgtgggctgcgctatggactattggggccagggaacaagcgtgaccgtgtctagtacgcgtaccacgacgccagcgccgcgaccaccaacaccggcgcccaccatcgcgtcgcagcccctgtccctgcgcccagaggcgtgccggccagcggcggggggcgcagtgcacacgagggggctggacttcgcctgtgacatctacatctgggcgcccttggccgggacttgtggggtccttctcctgtcactggttatcaccctttactgcaaacggggcagaaagaaactcctgtatatattcaaacaaccatttatgagaccagtacaaactactcaagaggaagatggctgtagctgccgatttccagaagaagaagaaggaggatgtgaactgagagtgaagttcagcaggagcgcagacgcccccgcgtaccagcagggccagaaccagctctataacgagctgaatctaggacgaagagaggagtacgatgttttggacaagagacgtggccgggaccctgagatggggggaaagccgagaaggaagaaccctcaggaaggcctgtacaatgaactgcagaaagataagatggcggaggcctacagtgagattgggatgaaaggcgagcgccggaggggcaaggggcacgatggcctttaccagggtctcagtacagccaccaaggacacctacgacgcccttcacatgcaggccctgccccctcgctaa

SEQ ID NO: 7882 - DNA, 1482 bp, synthetic construct
  source 1..1482: mol_type = other DNA
atggccttaccagtgaccgccttgctcctgccgctggccttgctgctccacgccgccaggccggacatccagatgacacagagccctagcagcctgtctgccagcgtgggagacagagtgaccatcacatgcaaggccagcgaccacatcaacaactggctggcctggtatcagcagaagcctggacaggcccctaagctgctgatctacggcgctaccacactggaaacaggcgtgcccagcagattttctggcagcggctctggcaccgactacaccctgacaatatccagcctccagcctgaggacttcgccacctactactgtcagcagagctggaacaccccttggacattcggccagggcaccaagctggaaatcaagagactcgagggaggctctgcccgcatggaggaccgctaccgcggcggaagcttcgaacaagttcagcttcaacagcctggcgctgagctggtcaaacctggcgcttctgtgaagatgagctgcaaagccagcggctacgccttcagcagctactggatcaactggatgaagcagaaacccggccagggactcgaatggatcggccaaatctatcccggcgacggcgacaccaactacaacggcaagttcaagggcagagccacactgaccgccgatacctctagcagcacagcctacatgcagctgagcagcctgaccagcgaagatagcgccgtgtacttctgtgcccggtccatcacaacagtcgtgggctgcgctatggactattggggccagggaacaagcgtgaccgtgtctagtacgcgtaccacgacgccagcgccgcgaccaccaacaccggcgcccaccatcgcgtcgcagcccctgtccctgcgcccagaggcgtgccggccagcggcggggggcgcagtgcacacgagggggctggacttcgcctgtgacatctacatctgggcgcccttggccgggacttgtggggtccttctcctgtcactggttatcaccctttactgcaaacggggcagaaagaaactcctgtatatattcaaacaaccatttatgagaccagtacaaactactcaagaggaagatggctgtagctgccgatttccagaagaagaagaaggaggatgtgaactgagagtgaagttcagcaggagcgcagacgcccccgcgtaccagcagggccagaaccagctctataacgagctgaatctaggacgaagagaggagtacgatgttttggacaagagacgtggccgggaccctgagatggggggaaagccgagaaggaagaaccctcaggaaggcctgtacaatgaactgcagaaagataagatggcggaggcctacagtgagattgggatgaaaggcgagcgccggaggggcaaggggcacgatggcctttaccagggtctcagtacagccaccaaggacacctacgacgcccttcacatgcaggccctgccccctcgctaa

SEQ ID NO: 7883 - DNA, 1482 bp, synthetic construct
  source 1..1482: mol_type = other DNA
atggccttaccagtgaccgccttgctcctgccgctggccttgctgctccacgccgccaggccggacatccagatgacacagagccctagcagcctgtctgccagcgtgggagacagagtgaccatcacatgcaaggccagcgaccacatcaacaactggctggcctggtatcagcagaagcctggacaggcccctaagctgctgatctacggcgctaccacactggaaacaggcgtgcccagcagattttctggcagcggctctggcaccgactacaccctgacaatatccagcctccagcctgaggacttcgccacctactactgtcagcagagctggaacaccccttggacattcggccagggcaccaagctggaaatcaagagactcgagggaggctctgcccgcgtggaggaccgctaccgcggcggaagcttcgaacaagttcagcttcaacagcctggcgctgagctggtcaaacctggcgcttctgtgaagatgagctgcaaagccagcggctacgccttcagcagctactggatcaactggatgaagcagaaacccggccagggactcgaatggatcggccaaatctatcccggcgacggcgacaccaactacaacggcaagttcaagggcagagccacactgaccgccgatacctctagcagcacagcctacatgcagctgagcagcctgaccagcgaagatagcgccgtgtacttctgtgcccggtccatcacaacagtcgtgggctgcgctatggactattggggccagggaacaagcgtgaccgtgtctagtacgcgtaccacgacgccagcgccgcgaccaccaacaccggcgcccaccatcgcgtcgcagcccctgtccctgcgcccagaggcgtgccggccagcggcggggggcgcagtgcacacgagggggctggacttcgcctgtgacatctacatctgggcgcccttggccgggacttgtggggtccttctcctgtcactggttatcaccctttactgcaaacggggcagaaagaaactcctgtatatattcaaacaaccatttatgagaccagtacaaactactcaagaggaagatggctgtagctgccgatttccagaagaagaagaaggaggatgtgaactgagagtgaagttcagcaggagcgcagacgcccccgcgtaccagcagggccagaaccagctctataacgagctgaatctaggacgaagagaggagtacgatgttttggacaagagacgtggccgggaccctgagatggggggaaagccgagaaggaagaaccctcaggaaggcctgtacaatgaactgcagaaagataagatggcggaggcctacagtgagattgggatgaaaggcgagcgccggaggggcaaggggcacgatggcctttaccagggtctcagtacagccaccaaggacacctacgacgcccttcacatgcaggccctgccccctcgctaa

SEQ ID NO: 7884 - DNA, 1482 bp, synthetic construct
  source 1..1482: mol_type = other DNA
atggccttaccagtgaccgccttgctcctgccgctggccttgctgctccacgccgccaggccggacatccagatgacacagagccctagcagcctgtctgccagcgtgggagacagagtgaccatcacatgcaaggccagcgaccacatcaacaactggctggcctggtatcagcagaagcctggacaggcccctaagctgctgatctacggcgctaccacactggaaacaggcgtgcccagcagattttctggcagcggctctggcaccgactacaccctgacaatatccagcctccagcctgaggacttcgccacctactactgtcagcagagctggaacaccccttggacattcggccagggcaccaagctggaaatcaagagactcgagggaggctctgcccgcgccgaggaccgctaccgcggcggaagcttcgaacaagttcagcttcaacagcctggcgctgagctggtcaaacctggcgcttctgtgaagatgagctgcaaagccagcggctacgccttcagcagctactggatcaactggatgaagcagaaacccggccagggactcgaatggatcggccaaatctatcccggcgacggcgacaccaactacaacggcaagttcaagggcagagccacactgaccgccgatacctctagcagcacagcctacatgcagctgagcagcctgaccagcgaagatagcgccgtgtacttctgtgcccggtccatcacaacagtcgtgggctgcgctatggactattggggccagggaacaagcgtgaccgtgtctagtacgcgtaccacgacgccagcgccgcgaccaccaacaccggcgcccaccatcgcgtcgcagcccctgtccctgcgcccagaggcgtgccggccagcggcggggggcgcagtgcacacgagggggctggacttcgcctgtgacatctacatctgggcgcccttggccgggacttgtggggtccttctcctgtcactggttatcaccctttactgcaaacggggcagaaagaaactcctgtatatattcaaacaaccatttatgagaccagtacaaactactcaagaggaagatggctgtagctgccgatttccagaagaagaagaaggaggatgtgaactgagagtgaagttcagcaggagcgcagacgcccccgcgtaccagcagggccagaaccagctctataacgagctgaatctaggacgaagagaggagtacgatgttttggacaagagacgtggccgggaccctgagatggggggaaagccgagaaggaagaaccctcaggaaggcctgtacaatgaactgcagaaagataagatggcggaggcctacagtgagattgggatgaaaggcgagcgccggaggggcaaggggcacgatggcctttaccagggtctcagtacagccaccaaggacacctacgacgcccttcacatgcaggccctgccccctcgctaa

SEQ ID NO: 7885 - DNA, 1482 bp, synthetic construct
  source 1..1482: mol_type = other DNA
atggccttaccagtgaccgccttgctcctgccgctggccttgctgctccacgccgccaggccggacatccagatgacacagagccctagcagcctgtctgccagcgtgggagacagagtgaccatcacatgcaaggccagcgaccacatcaacaactggctggcctggtatcagcagaagcctggacaggcccctaagctgctgatctacggcgctaccacactggaaacaggcgtgcccagcagattttctggcagcggctctggcaccgactacaccctgacaatatccagcctccagcctgaggacttcgccacctactactgtcagcagagctggaacaccccttggacattcggccagggcaccaagctggaaatcaagagactcgagggaggctctgcccgcttcgaggaccgctaccgcggcggaagcttcgaacaagttcagcttcaacagcctggcgctgagctggtcaaacctggcgcttctgtgaagatgagctgcaaagccagcggctacgccttcagcagctactggatcaactggatgaagcagaaacccggccagggactcgaatggatcggccaaatctatcccggcgacggcgacaccaactacaacggcaagttcaagggcagagccacactgaccgccgatacctctagcagcacagcctacatgcagctgagcagcctgaccagcgaagatagcgccgtgtacttctgtgcccggtccatcacaacagtcgtgggctgcgctatggactattggggccagggaacaagcgtgaccgtgtctagtacgcgtaccacgacgccagcgccgcgaccaccaacaccggcgcccaccatcgcgtcgcagcccctgtccctgcgcccagaggcgtgccggccagcggcggggggcgcagtgcacacgagggggctggacttcgcctgtgacatctacatctgggcgcccttggccgggacttgtggggtccttctcctgtcactggttatcaccctttactgcaaacggggcagaaagaaactcctgtatatattcaaacaaccatttatgagaccagtacaaactactcaagaggaagatggctgtagctgccgatttccagaagaagaagaaggaggatgtgaactgagagtgaagttcagcaggagcgcagacgcccccgcgtaccagcagggccagaaccagctctataacgagctgaatctaggacgaagagaggagtacgatgttttggacaagagacgtggccgggaccctgagatggggggaaagccgagaaggaagaaccctcaggaaggcctgtacaatgaactgcagaaagataagatggcggaggcctacagtgagattgggatgaaaggcgagcgccggaggggcaaggggcacgatggcctttaccagggtctcagtacagccaccaaggacacctacgacgcccttcacatgcaggccctgccccctcgctaa

SEQ ID NO: 7886 - DNA, 1482 bp, synthetic construct
  source 1..1482: mol_type = other DNA
atggccttaccagtgaccgccttgctcctgccgctggccttgctgctccacgccgccaggccggacatccagatgacacagagccctagcagcctgtctgccagcgtgggagacagagtgaccatcacatgcaaggccagcgaccacatcaacaactggctggcctggtatcagcagaagcctggacaggcccctaagctgctgatctacggcgctaccacactggaaacaggcgtgcccagcagattttctggcagcggctctggcaccgactacaccctgacaatatccagcctccagcctgaggacttcgccacctactactgtcagcagagctggaacaccccttggacattcggccagggcaccaagctggaaatcaagagactcgagggaggctctgcccgccacgaggaccgctaccgcggcggaagcttcgaacaagttcagcttcaacagcctggcgctgagctggtcaaacctggcgcttctgtgaagatgagctgcaaagccagcggctacgccttcagcagctactggatcaactggatgaagcagaaacccggccagggactcgaatggatcggccaaatctatcccggcgacggcgacaccaactacaacggcaagttcaagggcagagccacactgaccgccgatacctctagcagcacagcctacatgcagctgagcagcctgaccagcgaagatagcgccgtgtacttctgtgcccggtccatcacaacagtcgtgggctgcgctatggactattggggccagggaacaagcgtgaccgtgtctagtacgcgtaccacgacgccagcgccgcgaccaccaacaccggcgcccaccatcgcgtcgcagcccctgtccctgcgcccagaggcgtgccggccagcggcggggggcgcagtgcacacgagggggctggacttcgcctgtgacatctacatctgggcgcccttggccgggacttgtggggtccttctcctgtcactggttatcaccctttactgcaaacggggcagaaagaaactcctgtatatattcaaacaaccatttatgagaccagtacaaactactcaagaggaagatggctgtagctgccgatttccagaagaagaagaaggaggatgtgaactgagagtgaagttcagcaggagcgcagacgcccccgcgtaccagcagggccagaaccagctctataacgagctgaatctaggacgaagagaggagtacgatgttttggacaagagacgtggccgggaccctgagatggggggaaagccgagaaggaagaaccctcaggaaggcctgtacaatgaactgcagaaagataagatggcggaggcctacagtgagattgggatgaaaggcgagcgccggaggggcaaggggcacgatggcctttaccagggtctcagtacagccaccaaggacacctacgacgcccttcacatgcaggccctgccccctcgctaa

SEQ ID NO: 7887 - DNA, 1482 bp, synthetic construct
  source 1..1482: mol_type = other DNA
atggccttaccagtgaccgccttgctcctgccgctggccttgctgctccacgccgccaggccggacatccagatgacacagagccctagcagcctgtctgccagcgtgggagacagagtgaccatcacatgcaaggccagcgaccacatcaacaactggctggcctggtatcagcagaagcctggacaggcccctaagctgctgatctacggcgctaccacactggaaacaggcgtgcccagcagattttctggcagcggctctggcaccgactacaccctgacaatatccagcctccagcctgaggacttcgccacctactactgtcagcagagctggaacaccccttggacattcggccagggcaccaagctggaaatcaagagactcgagggaggctctgcccgcggcgaggaccgctaccgcggcggaagcttcgaacaagttcagcttcaacagcctggcgctgagctggtcaaacctggcgcttctgtgaagatgagctgcaaagccagcggctacgccttcagcagctactggatcaactggatgaagcagaaacccggccagggactcgaatggatcggccaaatctatcccggcgacggcgacaccaactacaacggcaagttcaagggcagagccacactgaccgccgatacctctagcagcacagcctacatgcagctgagcagcctgaccagcgaagatagcgccgtgtacttctgtgcccggtccatcacaacagtcgtgggctgcgctatggactattggggccagggaacaagcgtgaccgtgtctagtacgcgtaccacgacgccagcgccgcgaccaccaacaccggcgcccaccatcgcgtcgcagcccctgtccctgcgcccagaggcgtgccggccagcggcggggggcgcagtgcacacgagggggctggacttcgcctgtgacatctacatctgggcgcccttggccgggacttgtggggtccttctcctgtcactggttatcaccctttactgcaaacggggcagaaagaaactcctgtatatattcaaacaaccatttatgagaccagtacaaactactcaagaggaagatggctgtagctgccgatttccagaagaagaagaaggaggatgtgaactgagagtgaagttcagcaggagcgcagacgcccccgcgtaccagcagggccagaaccagctctataacgagctgaatctaggacgaagagaggagtacgatgttttggacaagagacgtggccgggaccctgagatggggggaaagccgagaaggaagaaccctcaggaaggcctgtacaatgaactgcagaaagataagatggcggaggcctacagtgagattgggatgaaaggcgagcgccggaggggcaaggggcacgatggcctttaccagggtctcagtacagccaccaaggacacctacgacgcccttcacatgcaggccctgccccctcgctaa

SEQ ID NO: 7888 - DNA, 1482 bp, synthetic construct
  source 1..1482: mol_type = other DNA
atggccttaccagtgaccgccttgctcctgccgctggccttgctgctccacgccgccaggccggacatccagatgacacagagccctagcagcctgtctgccagcgtgggagacagagtgaccatcacatgcaaggccagcgaccacatcaacaactggctggcctggtatcagcagaagcctggacaggcccctaagctgctgatctacggcgctaccacactggaaacaggcgtgcccagcagattttctggcagcggctctggcaccgactacaccctgacaatatccagcctccagcctgaggacttcgccacctactactgtcagcagagctggaacaccccttggacattcggccagggcaccaagctggaaatcaagagactcgagggaggctctgcccgcaccgaggaccgctaccgcggcggaagcttcgaacaagttcagcttcaacagcctggcgctgagctggtcaaacctggcgcttctgtgaagatgagctgcaaagccagcggctacgccttcagcagctactggatcaactggatgaagcagaaacccggccagggactcgaatggatcggccaaatctatcccggcgacggcgacaccaactacaacggcaagttcaagggcagagccacactgaccgccgatacctctagcagcacagcctacatgcagctgagcagcctgaccagcgaagatagcgccgtgtacttctgtgcccggtccatcacaacagtcgtgggctgcgctatggactattggggccagggaacaagcgtgaccgtgtctagtacgcgtaccacgacgccagcgccgcgaccaccaacaccggcgcccaccatcgcgtcgcagcccctgtccctgcgcccagaggcgtgccggccagcggcggggggcgcagtgcacacgagggggctggacttcgcctgtgacatctacatctgggcgcccttggccgggacttgtggggtccttctcctgtcactggttatcaccctttactgcaaacggggcagaaagaaactcctgtatatattcaaacaaccatttatgagaccagtacaaactactcaagaggaagatggctgtagctgccgatttccagaagaagaagaaggaggatgtgaactgagagtgaagttcagcaggagcgcagacgcccccgcgtaccagcagggccagaaccagctctataacgagctgaatctaggacgaagagaggagtacgatgttttggacaagagacgtggccgggaccctgagatggggggaaagccgagaaggaagaaccctcaggaaggcctgtacaatgaactgcagaaagataagatggcggaggcctacagtgagattgggatgaaaggcgagcgccggaggggcaaggggcacgatggcctttaccagggtctcagtacagccaccaaggacacctacgacgcccttcacatgcaggccctgccccctcgctaa

SEQ ID NO: 7889 - DNA, 1482 bp, synthetic construct
  source 1..1482: mol_type = other DNA
atggccttaccagtgaccgccttgctcctgccgctggccttgctgctccacgccgccaggccggacatccagatgacacagagccctagcagcctgtctgccagcgtgggagacagagtgaccatcacatgcaaggccagcgaccacatcaacaactggctggcctggtatcagcagaagcctggacaggcccctaagctgctgatctacggcgctaccacactggaaacaggcgtgcccagcagattttctggcagcggctctggcaccgactacaccctgacaatatccagcctccagcctgaggacttcgccacctactactgtcagcagagctggaacaccccttggacattcggccagggcaccaagctggaaatcaagagactcgagggaggctctgccagcagcgaggaccgctaccgcggcggaagcttcgaacaagttcagcttcaacagcctggcgctgagctggtcaaacctggcgcttctgtgaagatgagctgcaaagccagcggctacgccttcagcagctactggatcaactggatgaagcagaaacccggccagggactcgaatggatcggccaaatctatcccggcgacggcgacaccaactacaacggcaagttcaagggcagagccacactgaccgccgatacctctagcagcacagcctacatgcagctgagcagcctgaccagcgaagatagcgccgtgtacttctgtgcccggtccatcacaacagtcgtgggctgcgctatggactattggggccagggaacaagcgtgaccgtgtctagtacgcgtaccacgacgccagcgccgcgaccaccaacaccggcgcccaccatcgcgtcgcagcccctgtccctgcgcccagaggcgtgccggccagcggcggggggcgcagtgcacacgagggggctggacttcgcctgtgacatctacatctgggcgcccttggccgggacttgtggggtccttctcctgtcactggttatcaccctttactgcaaacggggcagaaagaaactcctgtatatattcaaacaaccatttatgagaccagtacaaactactcaagaggaagatggctgtagctgccgatttccagaagaagaagaaggaggatgtgaactgagagtgaagttcagcaggagcgcagacgcccccgcgtaccagcagggccagaaccagctctataacgagctgaatctaggacgaagagaggagtacgatgttttggacaagagacgtggccgggaccctgagatggggggaaagccgagaaggaagaaccctcaggaaggcctgtacaatgaactgcagaaagataagatggcggaggcctacagtgagattgggatgaaaggcgagcgccggaggggcaaggggcacgatggcctttaccagggtctcagtacagccaccaaggacacctacgacgcccttcacatgcaggccctgccccctcgctaa

SEQ ID NO: 7890 - DNA, 1482 bp, synthetic construct
  source 1..1482: mol_type = other DNA
atggccttaccagtgaccgccttgctcctgccgctggccttgctgctccacgccgccaggccggacatccagatgacacagagccctagcagcctgtctgccagcgtgggagacagagtgaccatcacatgcaaggccagcgaccacatcaacaactggctggcctggtatcagcagaagcctggacaggcccctaagctgctgatctacggcgctaccacactggaaacaggcgtgcccagcagattttctggcagcggctctggcaccgactacaccctgacaatatccagcctccagcctgaggacttcgccacctactactgtcagcagagctggaacaccccttggacattcggccagggcaccaagctggaaatcaagagactcgagggaggctctgcccacagcgaggaccgctaccgcggcggaagcttcgaacaagttcagcttcaacagcctggcgctgagctggtcaaacctggcgcttctgtgaagatgagctgcaaagccagcggctacgccttcagcagctactggatcaactggatgaagcagaaacccggccagggactcgaatggatcggccaaatctatcccggcgacggcgacaccaactacaacggcaagttcaagggcagagccacactgaccgccgatacctctagcagcacagcctacatgcagctgagcagcctgaccagcgaagatagcgccgtgtacttctgtgcccggtccatcacaacagtcgtgggctgcgctatggactattggggccagggaacaagcgtgaccgtgtctagtacgcgtaccacgacgccagcgccgcgaccaccaacaccggcgcccaccatcgcgtcgcagcccctgtccctgcgcccagaggcgtgccggccagcggcggggggcgcagtgcacacgagggggctggacttcgcctgtgacatctacatctgggcgcccttggccgggacttgtggggtccttctcctgtcactggttatcaccctttactgcaaacggggcagaaagaaactcctgtatatattcaaacaaccatttatgagaccagtacaaactactcaagaggaagatggctgtagctgccgatttccagaagaagaagaaggaggatgtgaactgagagtgaagttcagcaggagcgcagacgcccccgcgtaccagcagggccagaaccagctctataacgagctgaatctaggacgaagagaggagtacgatgttttggacaagagacgtggccgggaccctgagatggggggaaagccgagaaggaagaaccctcaggaaggcctgtacaatgaactgcagaaagataagatggcggaggcctacagtgagattgggatgaaaggcgagcgccggaggggcaaggggcacgatggcctttaccagggtctcagtacagccaccaaggacacctacgacgcccttcacatgcaggccctgccccctcgctaa

SEQ ID NO: 7891 - DNA, 1482 bp, synthetic construct
  source 1..1482: mol_type = other DNA
atggccttaccagtgaccgccttgctcctgccgctggccttgctgctccacgccgccaggccggacatccagatgacacagagccctagcagcctgtctgccagcgtgggagacagagtgaccatcacatgcaaggccagcgaccacatcaacaactggctggcctggtatcagcagaagcctggacaggcccctaagctgctgatctacggcgctaccacactggaaacaggcgtgcccagcagattttctggcagcggctctggcaccgactacaccctgacaatatccagcctccagcctgaggacttcgccacctactactgtcagcagagctggaacaccccttggacattcggccagggcaccaagctggaaatcaagagactcgagggaggctctgccgacagcgaggaccgctaccgcggcggaagcttcgaacaagttcagcttcaacagcctggcgctgagctggtcaaacctggcgcttctgtgaagatgagctgcaaagccagcggctacgccttcagcagctactggatcaactggatgaagcagaaacccggccagggactcgaatggatcggccaaatctatcccggcgacggcgacaccaactacaacggcaagttcaagggcagagccacactgaccgccgatacctctagcagcacagcctacatgcagctgagcagcctgaccagcgaagatagcgccgtgtacttctgtgcccggtccatcacaacagtcgtgggctgcgctatggactattggggccagggaacaagcgtgaccgtgtctagtacgcgtaccacgacgccagcgccgcgaccaccaacaccggcgcccaccatcgcgtcgcagcccctgtccctgcgcccagaggcgtgccggccagcggcggggggcgcagtgcacacgagggggctggacttcgcctgtgacatctacatctgggcgcccttggccgggacttgtggggtccttctcctgtcactggttatcaccctttactgcaaacggggcagaaagaaactcctgtatatattcaaacaaccatttatgagaccagtacaaactactcaagaggaagatggctgtagctgccgatttccagaagaagaagaaggaggatgtgaactgagagtgaagttcagcaggagcgcagacgcccccgcgtaccagcagggccagaaccagctctataacgagctgaatctaggacgaagagaggagtacgatgttttggacaagagacgtggccgggaccctgagatggggggaaagccgagaaggaagaaccctcaggaaggcctgtacaatgaactgcagaaagataagatggcggaggcctacagtgagattgggatgaaaggcgagcgccggaggggcaaggggcacgatggcctttaccagggtctcagtacagccaccaaggacacctacgacgcccttcacatgcaggccctgccccctcgctaa

SEQ ID NO: 7892 - DNA, 1482 bp, synthetic construct
  source 1..1482: mol_type = other DNA
atggccttaccagtgaccgccttgctcctgccgctggccttgctgctccacgccgccaggccggacatccagatgacacagagccctagcagcctgtctgccagcgtgggagacagagtgaccatcacatgcaaggccagcgaccacatcaacaactggctggcctggtatcagcagaagcctggacaggcccctaagctgctgatctacggcgctaccacactggaaacaggcgtgcccagcagattttctggcagcggctctggcaccgactacaccctgacaatatccagcctccagcctgaggacttcgccacctactactgtcagcagagctggaacaccccttggacattcggccagggcaccaagctggaaatcaagagactcgagggaggctctgccttcagcgaggaccgctaccgcggcggaagcttcgaacaagttcagcttcaacagcctggcgctgagctggtcaaacctggcgcttctgtgaagatgagctgcaaagccagcggctacgccttcagcagctactggatcaactggatgaagcagaaacccggccagggactcgaatggatcggccaaatctatcccggcgacggcgacaccaactacaacggcaagttcaagggcagagccacactgaccgccgatacctctagcagcacagcctacatgcagctgagcagcctgaccagcgaagatagcgccgtgtacttctgtgcccggtccatcacaacagtcgtgggctgcgctatggactattggggccagggaacaagcgtgaccgtgtctagtacgcgtaccacgacgccagcgccgcgaccaccaacaccggcgcccaccatcgcgtcgcagcccctgtccctgcgcccagaggcgtgccggccagcggcggggggcgcagtgcacacgagggggctggacttcgcctgtgacatctacatctgggcgcccttggccgggacttgtggggtccttctcctgtcactggttatcaccctttactgcaaacggggcagaaagaaactcctgtatatattcaaacaaccatttatgagaccagtacaaactactcaagaggaagatggctgtagctgccgatttccagaagaagaagaaggaggatgtgaactgagagtgaagttcagcaggagcgcagacgcccccgcgtaccagcagggccagaaccagctctataacgagctgaatctaggacgaagagaggagtacgatgttttggacaagagacgtggccgggaccctgagatggggggaaagccgagaaggaagaaccctcaggaaggcctgtacaatgaactgcagaaagataagatggcggaggcctacagtgagattgggatgaaaggcgagcgccggaggggcaaggggcacgatggcctttaccagggtctcagtacagccaccaaggacacctacgacgcccttcacatgcaggccctgccccctcgctaa

SEQ ID NO: 7893 - DNA, 1482 bp, synthetic construct
  source 1..1482: mol_type = other DNA
atggccttaccagtgaccgccttgctcctgccgctggccttgctgctccacgccgccaggccggacatccagatgacacagagccctagcagcctgtctgccagcgtgggagacagagtgaccatcacatgcaaggccagcgaccacatcaacaactggctggcctggtatcagcagaagcctggacaggcccctaagctgctgatctacggcgctaccacactggaaacaggcgtgcccagcagattttctggcagcggctctggcaccgactacaccctgacaatatccagcctccagcctgaggacttcgccacctactactgtcagcagagctggaacaccccttggacattcggccagggcaccaagctggaaatcaagagactcgagggaggctctgcccgcagcgaggaccgcttccgcggcggaagcttcgaacaagttcagcttcaacagcctggcgctgagctggtcaaacctggcgcttctgtgaagatgagctgcaaagccagcggctacgccttcagcagctactggatcaactggatgaagcagaaacccggccagggactcgaatggatcggccaaatctatcccggcgacggcgacaccaactacaacggcaagttcaagggcagagccacactgaccgccgatacctctagcagcacagcctacatgcagctgagcagcctgaccagcgaagatagcgccgtgtacttctgtgcccggtccatcacaacagtcgtgggctgcgctatggactattggggccagggaacaagcgtgaccgtgtctagtacgcgtaccacgacgccagcgccgcgaccaccaacaccggcgcccaccatcgcgtcgcagcccctgtccctgcgcccagaggcgtgccggccagcggcggggggcgcagtgcacacgagggggctggacttcgcctgtgacatctacatctgggcgcccttggccgggacttgtggggtccttctcctgtcactggttatcaccctttactgcaaacggggcagaaagaaactcctgtatatattcaaacaaccatttatgagaccagtacaaactactcaagaggaagatggctgtagctgccgatttccagaagaagaagaaggaggatgtgaactgagagtgaagttcagcaggagcgcagacgcccccgcgtaccagcagggccagaaccagctctataacgagctgaatctaggacgaagagaggagtacgatgttttggacaagagacgtggccgggaccctgagatggggggaaagccgagaaggaagaaccctcaggaaggcctgtacaatgaactgcagaaagataagatggcggaggcctacagtgagattgggatgaaaggcgagcgccggaggggcaaggggcacgatggcctttaccagggtctcagtacagccaccaaggacacctacgacgcccttcacatgcaggccctgccccctcgctaa

SEQ ID NO: 7894 - DNA, 1482 bp, synthetic construct
  source 1..1482: mol_type = other DNA
atggccttaccagtgaccgccttgctcctgccgctggccttgctgctccacgccgccaggccggacatccagatgacacagagccctagcagcctgtctgccagcgtgggagacagagtgaccatcacatgcaaggccagcgaccacatcaacaactggctggcctggtatcagcagaagcctggacaggcccctaagctgctgatctacggcgctaccacactggaaacaggcgtgcccagcagattttctggcagcggctctggcaccgactacaccctgacaatatccagcctccagcctgaggacttcgccacctactactgtcagcagagctggaacaccccttggacattcggccagggcaccaagctggaaatcaagagactcgagggaggctctgcccgcagcgaggaccgccaccgcggcggaagcttcgaacaagttcagcttcaacagcctggcgctgagctggtcaaacctggcgcttctgtgaagatgagctgcaaagccagcggctacgccttcagcagctactggatcaactggatgaagcagaaacccggccagggactcgaatggatcggccaaatctatcccggcgacggcgacaccaactacaacggcaagttcaagggcagagccacactgaccgccgatacctctagcagcacagcctacatgcagctgagcagcctgaccagcgaagatagcgccgtgtacttctgtgcccggtccatcacaacagtcgtgggctgcgctatggactattggggccagggaacaagcgtgaccgtgtctagtacgcgtaccacgacgccagcgccgcgaccaccaacaccggcgcccaccatcgcgtcgcagcccctgtccctgcgcccagaggcgtgccggccagcggcggggggcgcagtgcacacgagggggctggacttcgcctgtgacatctacatctgggcgcccttggccgggacttgtggggtccttctcctgtcactggttatcaccctttactgcaaacggggcagaaagaaactcctgtatatattcaaacaaccatttatgagaccagtacaaactactcaagaggaagatggctgtagctgccgatttccagaagaagaagaaggaggatgtgaactgagagtgaagttcagcaggagcgcagacgcccccgcgtaccagcagggccagaaccagctctataacgagctgaatctaggacgaagagaggagtacgatgttttggacaagagacgtggccgggaccctgagatggggggaaagccgagaaggaagaaccctcaggaaggcctgtacaatgaactgcagaaagataagatggcggaggcctacagtgagattgggatgaaaggcgagcgccggaggggcaaggggcacgatggcctttaccagggtctcagtacagccaccaaggacacctacgacgcccttcacatgcaggccctgccccctcgctaa

SEQ ID NO: 7895 - DNA, 1479 bp, synthetic construct
  source 1..1479: mol_type = other DNA
atggccttaccagtgaccgccttgctcctgccgctggccttgctgctccacgccgccaggccggacatccagatgacacagagccctagcagcctgtctgccagcgtgggagacagagtgaccatcacatgcaaggccagcgaccacatcaacaactggctggcctggtatcagcagaagcctggacaggcccctaagctgctgatctacggcgctaccacactggaaacaggcgtgcccagcagattttctggcagcggctctggcaccgactacaccctgacaatatccagcctccagcctgaggacttcgccacctactactgtcagcagagctggaacaccccttggacattcggccagggcaccaagctggaaatcaagagactcgagggaggctctcgcagcgaggaccgcttcaagggcggaagcttcgaacaagttcagcttcaacagcctggcgctgagctggtcaaacctggcgcttctgtgaagatgagctgcaaagccagcggctacgccttcagcagctactggatcaactggatgaagcagaaacccggccagggactcgaatggatcggccaaatctatcccggcgacggcgacaccaactacaacggcaagttcaagggcagagccacactgaccgccgatacctctagcagcacagcctacatgcagctgagcagcctgaccagcgaagatagcgccgtgtacttctgtgcccggtccatcacaacagtcgtgggctgcgctatggactattggggccagggaacaagcgtgaccgtgtctagtacgcgtaccacgacgccagcgccgcgaccaccaacaccggcgcccaccatcgcgtcgcagcccctgtccctgcgcccagaggcgtgccggccagcggcggggggcgcagtgcacacgagggggctggacttcgcctgtgacatctacatctgggcgcccttggccgggacttgtggggtccttctcctgtcactggttatcaccctttactgcaaacggggcagaaagaaactcctgtatatattcaaacaaccatttatgagaccagtacaaactactcaagaggaagatggctgtagctgccgatttccagaagaagaagaaggaggatgtgaactgagagtgaagttcagcaggagcgcagacgcccccgcgtaccagcagggccagaaccagctctataacgagctgaatctaggacgaagagaggagtacgatgttttggacaagagacgtggccgggaccctgagatggggggaaagccgagaaggaagaaccctcaggaaggcctgtacaatgaactgcagaaagataagatggcggaggcctacagtgagattgggatgaaaggcgagcgccggaggggcaaggggcacgatggcctttaccagggtctcagtacagccaccaaggacacctacgacgcccttcacatgcaggccctgccccctcgctaa

SEQ ID NO: 7896 - DNA, 1479 bp, synthetic construct
  source 1..1479: mol_type = other DNA
atggccttaccagtgaccgccttgctcctgccgctggccttgctgctccacgccgccaggccggacatccagatgacacagagccctagcagcctgtctgccagcgtgggagacagagtgaccatcacatgcaaggccagcgaccacatcaacaactggctggcctggtatcagcagaagcctggacaggcccctaagctgctgatctacggcgctaccacactggaaacaggcgtgcccagcagattttctggcagcggctctggcaccgactacaccctgacaatatccagcctccagcctgaggacttcgccacctactactgtcagcagagctggaacaccccttggacattcggccagggcaccaagctggaaatcaagagactcgagggaggctctcgcagcgaggaccgccacaagggcggaagcttcgaacaagttcagcttcaacagcctggcgctgagctggtcaaacctggcgcttctgtgaagatgagctgcaaagccagcggctacgccttcagcagctactggatcaactggatgaagcagaaacccggccagggactcgaatggatcggccaaatctatcccggcgacggcgacaccaactacaacggcaagttcaagggcagagccacactgaccgccgatacctctagcagcacagcctacatgcagctgagcagcctgaccagcgaagatagcgccgtgtacttctgtgcccggtccatcacaacagtcgtgggctgcgctatggactattggggccagggaacaagcgtgaccgtgtctagtacgcgtaccacgacgccagcgccgcgaccaccaacaccggcgcccaccatcgcgtcgcagcccctgtccctgcgcccagaggcgtgccggccagcggcggggggcgcagtgcacacgagggggctggacttcgcctgtgacatctacatctgggcgcccttggccgggacttgtggggtccttctcctgtcactggttatcaccctttactgcaaacggggcagaaagaaactcctgtatatattcaaacaaccatttatgagaccagtacaaactactcaagaggaagatggctgtagctgccgatttccagaagaagaagaaggaggatgtgaactgagagtgaagttcagcaggagcgcagacgcccccgcgtaccagcagggccagaaccagctctataacgagctgaatctaggacgaagagaggagtacgatgttttggacaagagacgtggccgggaccctgagatggggggaaagccgagaaggaagaaccctcaggaaggcctgtacaatgaactgcagaaagataagatggcggaggcctacagtgagattgggatgaaaggcgagcgccggaggggcaaggggcacgatggcctttaccagggtctcagtacagccaccaaggacacctacgacgcccttcacatgcaggccctgccccctcgctaa

SEQ ID NO: 7897 - DNA, 1479 bp, synthetic construct; identical to SEQ ID NO: 7744
  source 1..1479: mol_type = other DNA

SEQ ID NO: 7898 - DNA, 1479 bp, synthetic construct; identical to SEQ ID NO: 7747
  source 1..1479: mol_type = other DNA

SEQ ID NO: 7899 - DNA, 1479 bp, synthetic construct; identical to SEQ ID NO: 7748
  source 1..1479: mol_type = other DNA

SEQ ID NO: 7900 - DNA, 1479 bp, synthetic construct
  source 1..1479: mol_type = other DNA
atggccttaccagtgaccgccttgctcctgccgctggccttgctgctccacgccgccaggccggacatccagatgacacagagccctagcagcctgtctgccagcgtgggagacagagtgaccatcacatgcaaggccagcgaccacatcaacaactggctggcctggtatcagcagaagcctggacaggcccctaagctgctgatctacggcgctaccacactggaaacaggcgtgcccagcagattttctggcagcggctctggcaccgactacaccctgacaatatccagcctccagcctgaggacttcgccacctactactgtcagcagagctggaacaccccttggacattcggccagggcaccaagctggaaatcaagagactcgagggaggctctcgcagcgagtggcgctacaagggcggaagcttcgaacaagttcagcttcaacagcctggcgctgagctggtcaaacctggcgcttctgtgaagatgagctgcaaagccagcggctacgccttcagcagctactggatcaactggatgaagcagaaacccggccagggactcgaatggatcggccaaatctatcccggcgacggcgacaccaactacaacggcaagttcaagggcagagccacactgaccgccgatacctctagcagcacagcctacatgcagctgagcagcctgaccagcgaagatagcgccgtgtacttctgtgcccggtccatcacaacagtcgtgggctgcgctatggactattggggccagggaacaagcgtgaccgtgtctagtacgcgtaccacgacgccagcgccgcgaccaccaacaccggcgcccaccatcgcgtcgcagcccctgtccctgcgcccagaggcgtgccggccagcggcggggggcgcagtgcacacgagggggctggacttcgcctgtgacatctacatctgggcgcccttggccgggacttgtggggtccttctcctgtcactggttatcaccctttactgcaaacggggcagaaagaaactcctgtatatattcaaacaaccatttatgagaccagtacaaactactcaagaggaagatggctgtagctgccgatttccagaagaagaagaaggaggatgtgaactgagagtgaagttcagcaggagcgcagacgcccccgcgtaccagcagggccagaaccagctctataacgagctgaatctaggacgaagagaggagtacgatgttttggacaagagacgtggccgggaccctgagatggggggaaagccgagaaggaagaaccctcaggaaggcctgtacaatgaactgcagaaagataagatggcggaggcctacagtgagattgggatgaaaggcgagcgccggaggggcaaggggcacgatggcctttaccagggtctcagtacagccaccaaggacacctacgacgcccttcacatgcaggccctgccccctcgctaa

SEQ ID NO: 7901 - DNA, 1479 bp, synthetic construct
  source 1..1479: mol_type = other DNA
atggccttaccagtgaccgccttgctcctgccgctggccttgctgctccacgccgccaggccggacatccagatgacacagagccctagcagcctgtctgccagcgtgggagacagagtgaccatcacatgcaaggccagcgaccacatcaacaactggctggcctggtatcagcagaagcctggacaggcccctaagctgctgatctacggcgctaccacactggaaacaggcgtgcccagcagattttctggcagcggctctggcaccgactacaccctgacaatatccagcctccagcctgaggacttcgccacctactactgtcagcagagctggaacaccccttggacattcggccagggcaccaagctggaaatcaagagactcgagggaggctctcgcagcgagtaccgctacaagggcggaagcttcgaacaagttcagcttcaacagcctggcgctgagctggtcaaacctggcgcttctgtgaagatgagctgcaaagccagcggctacgccttcagcagctactggatcaactggatgaagcagaaacccggccagggactcgaatggatcggccaaatctatcccggcgacggcgacaccaactacaacggcaagttcaagggcagagccacactgaccgccgatacctctagcagcacagcctacatgcagctgagcagcctgaccagcgaagatagcgccgtgtacttctgtgcccggtccatcacaacagtcgtgggctgcgctatggactattggggccagggaacaagcgtgaccgtgtctagtacgcgtaccacgacgccagcgccgcgaccaccaacaccggcgcccaccatcgcgtcgcagcccctgtccctgcgcccagaggcgtgccggccagcggcggggggcgcagtgcacacgagggggctggacttcgcctgtgacatctacatctgggcgcccttggccgggacttgtggggtccttctcctgtcactggttatcaccctttactgcaaacggggcagaaagaaactcctgtatatattcaaacaaccatttatgagaccagtacaaactactcaagaggaagatggctgtagctgccgatttccagaagaagaagaaggaggatgtgaactgagagtgaagttcagcaggagcgcagacgcccccgcgtaccagcagggccagaaccagctctataacgagctgaatctaggacgaagagaggagtacgatgttttggacaagagacgtggccgggaccctgagatggggggaaagccgagaaggaagaaccctcaggaaggcctgtacaatgaactgcagaaagataagatggcggaggcctacagtgagattgggatgaaaggcgagcgccggaggggcaaggggcacgatggcctttaccagggtctcagtacagccaccaaggacacctacgacgcccttcacatgcaggccctgccccctcgctaa

SEQ ID NO: 7902 - DNA, 1479 bp, synthetic construct
  source 1..1479: mol_type = other DNA
atggccttaccagtgaccgccttgctcctgccgctggccttgctgctccacgccgccaggccggacatccagatgacacagagccctagcagcctgtctgccagcgtgggagacagagtgaccatcacatgcaaggccagcgaccacatcaacaactggctggcctggtatcagcagaagcctggacaggcccctaagctgctgatctacggcgctaccacactggaaacaggcgtgcccagcagattttctggcagcggctctggcaccgactacaccctgacaatatccagcctccagcctgaggacttcgccacctactactgtcagcagagctggaacaccccttggacattcggccagggcaccaagctggaaatcaagagactcgagggaggctctcgcagcgagcgccgctacaagggcggaagcttcgaacaagttcagcttcaacagcctggcgctgagctggtcaaacctggcgcttctgtgaagatgagctgcaaagccagcggctacgccttcagcagctactggatcaactggatgaagcagaaacccggccagggactcgaatggatcggccaaatctatcccggcgacggcgacaccaactacaacggcaagttcaagggcagagccacactgaccgccgatacctctagcagcacagcctacatgcagctgagcagcctgaccagcgaagatagcgccgtgtacttctgtgcccggtccatcacaacagtcgtgggctgcgctatggactattggggccagggaacaagcgtgaccgtgtctagtacgcgtaccacgacgccagcgccgcgaccaccaacaccggcgcccaccatcgcgtcgcagcccctgtccctgcgcccagaggcgtgccggccagcggcggggggcgcagtgcacacgagggggctggacttcgcctgtgacatctacatctgggcgcccttggccgggacttgtggggtccttctcctgtcactggttatcaccctttactgcaaacggggcagaaagaaactcctgtatatattcaaacaaccatttatgagaccagtacaaactactcaagaggaagatggctgtagctgccgatttccagaagaagaagaaggaggatgtgaactgagagtgaagttcagcaggagcgcagacgcccccgcgtaccagcagggccagaaccagctctataacgagctgaatctaggacgaagagaggagtacgatgttttggacaagagacgtggccgggaccctgagatggggggaaagccgagaaggaagaaccctcaggaaggcctgtacaatgaactgcagaaagataagatggcggaggcctacagtgagattgggatgaaaggcgagcgccggaggggcaaggggcacgatggcctttaccagggtctcagtacagccaccaaggacacctacgacgcccttcacatgcaggccctgccccctcgctaa

SEQ ID NO: 7903 - DNA, 1479 bp, synthetic construct
  source 1..1479: mol_type = other DNA
atggccttaccagtgaccgccttgctcctgccgctggccttgctgctccacgccgccaggccggacatccagatgacacagagccctagcagcctgtctgccagcgtgggagacagagtgaccatcacatgcaaggccagcgaccacatcaacaactggctggcctggtatcagcagaagcctggacaggcccctaagctgctgatctacggcgctaccacactggaaacaggcgtgcccagcagattttctggcagcggctctggcaccgactacaccctgacaatatccagcctccagcctgaggacttcgccacctactactgtcagcagagctggaacaccccttggacattcggccagggcaccaagctggaaatcaagagactcgagggaggctctcgcagcgaggtgcgctacaagggcggaagcttcgaacaagttcagcttcaacagcctggcgctgagctggtcaaacctggcgcttctgtgaagatgagctgcaaagccagcggctacgccttcagcagctactggatcaactggatgaagcagaaacccggccagggactcgaatggatcggccaaatctatcccggcgacggcgacaccaactacaacggcaagttcaagggcagagccacactgaccgccgatacctctagcagcacagcctacatgcagctgagcagcctgaccagcgaagatagcgccgtgtacttctgtgcccggtccatcacaacagtcgtgggctgcgctatggactattggggccagggaacaagcgtgaccgtgtctagtacgcgtaccacgacgccagcgccgcgaccaccaacaccggcgcccaccatcgcgtcgcagcccctgtccctgcgcccagaggcgtgccggccagcggcggggggcgcagtgcacacgagggggctggacttcgcctgtgacatctacatctgggcgcccttggccgggacttgtggggtccttctcctgtcactggttatcaccctttactgcaaacggggcagaaagaaactcctgtatatattcaaacaaccatttatgagaccagtacaaactactcaagaggaagatggctgtagctgccgatttccagaagaagaagaaggaggatgtgaactgagagtgaagttcagcaggagcgcagacgcccccgcgtaccagcagggccagaaccagctctataacgagctgaatctaggacgaagagaggagtacgatgttttggacaagagacgtggccgggaccctgagatggggggaaagccgagaaggaagaaccctcaggaaggcctgtacaatgaactgcagaaagataagatggcggaggcctacagtgagattgggatgaaaggcgagcgccggaggggcaaggggcacgatggcctttaccagggtctcagtacagccaccaaggacacctacgacgcccttcacatgcaggccctgccccctcgctaa

SEQ ID NO: 7904 - DNA, 1479 bp, synthetic construct
  source 1..1479: mol_type = other DNA
atggccttaccagtgaccgccttgctcctgccgctggccttgctgctccacgccgccaggccggacatccagatgacacagagccctagcagcctgtctgccagcgtgggagacagagtgaccatcacatgcaaggccagcgaccacatcaacaactggctggcctggtatcagcagaagcctggacaggcccctaagctgctgatctacggcgctaccacactggaaacaggcgtgcccagcagattttctggcagcggctctggcaccgactacaccctgacaatatccagcctccagcctgaggacttcgccacctactactgtcagcagagctggaacaccccttggacattcggccagggcaccaagctggaaatcaagagactcgagggaggctctcgcatcgaggaccgctacaagggcggaagcttcgaacaagttcagcttcaacagcctggcgctgagctggtcaaacctggcgcttctgtgaagatgagctgcaaagccagcggctacgccttcagcagctactggatcaactggatgaagcagaaacccggccagggactcgaatggatcggccaaatctatcccggcgacggcgacaccaactacaacggcaagttcaagggcagagccacactgaccgccgatacctctagcagcacagcctacatgcagctgagcagcctgaccagcgaagatagcgccgtgtacttctgtgcccggtccatcacaacagtcgtgggctgcgctatggactattggggccagggaacaagcgtgaccgtgtctagtacgcgtaccacgacgccagcgccgcgaccaccaacaccggcgcccaccatcgcgtcgcagcccctgtccctgcgcccagaggcgtgccggccagcggcggggggcgcagtgcacacgagggggctggacttcgcctgtgacatctacatctgggcgcccttggccgggacttgtggggtccttctcctgtcactggttatcaccctttactgcaaacggggcagaaagaaactcctgtatatattcaaacaaccatttatgagaccagtacaaactactcaagaggaagatggctgtagctgccgatttccagaagaagaagaaggaggatgtgaactgagagtgaagttcagcaggagcgcagacgcccccgcgtaccagcagggccagaaccagctctataacgagctgaatctaggacgaagagaggagtacgatgttttggacaagagacgtggccgggaccctgagatggggggaaagccgagaaggaagaaccctcaggaaggcctgtacaatgaactgcagaaagataagatggcggaggcctacagtgagattgggatgaaaggcgagcgccggaggggcaaggggcacgatggcctttaccagggtctcagtacagccaccaaggacacctacgacgcccttcacatgcaggccctgccccctcgctaa

SEQ ID NO: 7905 - DNA, 1479 bp, synthetic construct
  source 1..1479: mol_type = other DNA
atggccttaccagtgaccgccttgctcctgccgctggccttgctgctccacgccgccaggccggacatccagatgacacagagccctagcagcctgtctgccagcgtgggagacagagtgaccatcacatgcaaggccagcgaccacatcaacaactggctggcctggtatcagcagaagcctggacaggcccctaagctgctgatctacggcgctaccacactggaaacaggcgtgcccagcagattttctggcagcggctctggcaccgactacaccctgacaatatccagcctccagcctgaggacttcgccacctactactgtcagcagagctggaacaccccttggacattcggccagggcaccaagctggaaatcaagagactcgagggaggctctcgcctggaggaccgctacaagggcggaagcttcgaacaagttcagcttcaacagcctggcgctgagctggtcaaacctggcgcttctgtgaagatgagctgcaaagccagcggctacgccttcagcagctactggatcaactggatgaagcagaaacccggccagggactcgaatggatcggccaaatctatcccggcgacggcgacaccaactacaacggcaagttcaagggcagagccacactgaccgccgatacctctagcagcacagcctacatgcagctgagcagcctgaccagcgaagatagcgccgtgtacttctgtgcccggtccatcacaacagtcgtgggctgcgctatggactattggggccagggaacaagcgtgaccgtgtctagtacgcgtaccacgacgccagcgccgcgaccaccaacaccggcgcccaccatcgcgtcgcagcccctgtccctgcgcccagaggcgtgccggccagcggcggggggcgcagtgcacacgagggggctggacttcgcctgtgacatctacatctgggcgcccttggccgggacttgtggggtccttctcctgtcactggttatcaccctttactgcaaacggggcagaaagaaactcctgtatatattcaaacaaccatttatgagaccagtacaaactactcaagaggaagatggctgtagctgccgatttccagaagaagaagaaggaggatgtgaactgagagtgaagttcagcaggagcgcagacgcccccgcgtaccagcagggccagaaccagctctataacgagctgaatctaggacgaagagaggagtacgatgttttggacaagagacgtggccgggaccctgagatggggggaaagccgagaaggaagaaccctcaggaaggcctgtacaatgaactgcagaaagataagatggcggaggcctacagtgagattgggatgaaaggcgagcgccggaggggcaaggggcacgatggcctttaccagggtctcagtacagccaccaaggacacctacgacgcccttcacatgcaggccctgccccctcgctaa

SEQ ID NO: 7906 - DNA, 1479 bp, synthetic construct
  source 1..1479: mol_type = other DNA
atggccttaccagtgaccgccttgctcctgccgctggccttgctgctccacgccgccaggccggacatccagatgacacagagccctagcagcctgtctgccagcgtgggagacagagtgaccatcacatgcaaggccagcgaccacatcaacaactggctggcctggtatcagcagaagcctggacaggcccctaagctgctgatctacggcgctaccacactggaaacaggcgtgcccagcagattttctggcagcggctctggcaccgactacaccctgacaatatccagcctccagcctgaggacttcgccacctactactgtcagcagagctggaacaccccttggacattcggccagggcaccaagctggaaatcaagagactcgagggaggctctcgcatggaggaccgctacaagggcggaagcttcgaacaagttcagcttcaacagcctggcgctgagctggtcaaacctggcgcttctgtgaagatgagctgcaaagccagcggctacgccttcagcagctactggatcaactggatgaagcagaaacccggccagggactcgaatggatcggccaaatctatcccggcgacggcgacaccaactacaacggcaagttcaagggcagagccacactgaccgccgatacctctagcagcacagcctacatgcagctgagcagcctgaccagcgaagatagcgccgtgtacttctgtgcccggtccatcacaacagtcgtgggctgcgctatggactattggggccagggaacaagcgtgaccgtgtctagtacgcgtaccacgacgccagcgccgcgaccaccaacaccggcgcccaccatcgcgtcgcagcccctgtccctgcgcccagaggcgtgccggccagcggcggggggcgcagtgcacacgagggggctggacttcgcctgtgacatctacatctgggcgcccttggccgggacttgtggggtccttctcctgtcactggttatcaccctttactgcaaacggggcagaaagaaactcctgtatatattcaaacaaccatttatgagaccagtacaaactactcaagaggaagatggctgtagctgccgatttccagaagaagaagaaggaggatgtgaactgagagtgaagttcagcaggagcgcagacgcccccgcgtaccagcagggccagaaccagctctataacgagctgaatctaggacgaagagaggagtacgatgttttggacaagagacgtggccgggaccctgagatggggggaaagccgagaaggaagaaccctcaggaaggcctgtacaatgaactgcagaaagataagatggcggaggcctacagtgagattgggatgaaaggcgagcgccggaggggcaaggggcacgatggcctttaccagggtctcagtacagccaccaaggacacctacgacgcccttcacatgcaggccctgccccctcgctaa

SEQ ID NO: 7907 - DNA, 1479 bp, synthetic construct
  source 1..1479: mol_type = other DNA
atggccttaccagtgaccgccttgctcctgccgctggccttgctgctccacgccgccaggccggacatccagatgacacagagccctagcagcctgtctgccagcgtgggagacagagtgaccatcacatgcaaggccagcgaccacatcaacaactggctggcctggtatcagcagaagcctggacaggcccctaagctgctgatctacggcgctaccacactggaaacaggcgtgcccagcagattttctggcagcggctctggcaccgactacaccctgacaatatccagcctccagcctgaggacttcgccacctactactgtcagcagagctggaacaccccttggacattcggccagggcaccaagctggaaatcaagagactcgagggaggctctcgcgtggaggaccgctacaagggcggaagcttcgaacaagttcagcttcaacagcctggcgctgagctggtcaaacctggcgcttctgtgaagatgagctgcaaagccagcggctacgccttcagcagctactggatcaactggatgaagcagaaacccggccagggactcgaatggatcggccaaatctatcccggcgacggcgacaccaactacaacggcaagttcaagggcagagccacactgaccgccgatacctctagcagcacagcctacatgcagctgagcagcctgaccagcgaagatagcgccgtgtacttctgtgcccggtccatcacaacagtcgtgggctgcgctatggactattggggccagggaacaagcgtgaccgtgtctagtacgcgtaccacgacgccagcgccgcgaccaccaacaccggcgcccaccatcgcgtcgcagcccctgtccctgcgcccagaggcgtgccggccagcggcggggggcgcagtgcacacgagggggctggacttcgcctgtgacatctacatctgggcgcccttggccgggacttgtggggtccttctcctgtcactggttatcaccctttactgcaaacggggcagaaagaaactcctgtatatattcaaacaaccatttatgagaccagtacaaactactcaagaggaagatggctgtagctgccgatttccagaagaagaagaaggaggatgtgaactgagagtgaagttcagcaggagcgcagacgcccccgcgtaccagcagggccagaaccagctctataacgagctgaatctaggacgaagagaggagtacgatgttttggacaagagacgtggccgggaccctgagatggggggaaagccgagaaggaagaaccctcaggaaggcctgtacaatgaactgcagaaagataagatggcggaggcctacagtgagattgggatgaaaggcgagcgccggaggggcaaggggcacgatggcctttaccagggtctcagtacagccaccaaggacacctacgacgcccttcacatgcaggccctgccccctcgctaa

SEQ ID NO: 7908 - DNA, 1479 bp, synthetic construct
  source 1..1479: mol_type = other DNA
atggccttaccagtgaccgccttgctcctgccgctggccttgctgctccacgccgccaggccggacatccagatgacacagagccctagcagcctgtctgccagcgtgggagacagagtgaccatcacatgcaaggccagcgaccacatcaacaactggctggcctggtatcagcagaagcctggacaggcccctaagctgctgatctacggcgctaccacactggaaacaggcgtgcccagcagattttctggcagcggctctggcaccgactacaccctgacaatatccagcctccagcctgaggacttcgccacctactactgtcagcagagctggaacaccccttggacattcggccagggcaccaagctggaaatcaagagactcgagggaggctctcgcgccgaggaccgctacaagggcggaagcttcgaacaagttcagcttcaacagcctggcgctgagctggtcaaacctggcgcttctgtgaagatgagctgcaaagccagcggctacgccttcagcagctactggatcaactggatgaagcagaaacccggccagggactcgaatggatcggccaaatctatcccggcgacggcgacaccaactacaacggcaagttcaagggcagagccacactgaccgccgatacctctagcagcacagcctacatgcagctgagcagcctgaccagcgaagatagcgccgtgtacttctgtgcccggtccatcacaacagtcgtgggctgcgctatggactattggggccagggaacaagcgtgaccgtgtctagtacgcgtaccacgacgccagcgccgcgaccaccaacaccggcgcccaccatcgcgtcgcagcccctgtccctgcgcccagaggcgtgccggccagcggcggggggcgcagtgcacacgagggggctggacttcgcctgtgacatctacatctgggcgcccttggccgggacttgtggggtccttctcctgtcactggttatcaccctttactgcaaacggggcagaaagaaactcctgtatatattcaaacaaccatttatgagaccagtacaaactactcaagaggaagatggctgtagctgccgatttccagaagaagaagaaggaggatgtgaactgagagtgaagttcagcaggagcgcagacgcccccgcgtaccagcagggccagaaccagctctataacgagctgaatctaggacgaagagaggagtacgatgttttggacaagagacgtggccgggaccctgagatggggggaaagccgagaaggaagaaccctcaggaaggcctgtacaatgaactgcagaaagataagatggcggaggcctacagtgagattgggatgaaaggcgagcgccggaggggcaaggggcacgatggcctttaccagggtctcagtacagccaccaaggacacctacgacgcccttcacatgcaggccctgccccctcgctaa

SEQ ID NO: 7909 - DNA, 1479 bp, synthetic construct
  source 1..1479: mol_type = other DNA
atggccttaccagtgaccgccttgctcctgccgctggccttgctgctccacgccgccaggccggacatccagatgacacagagccctagcagcctgtctgccagcgtgggagacagagtgaccatcacatgcaaggccagcgaccacatcaacaactggctggcctggtatcagcagaagcctggacaggcccctaagctgctgatctacggcgctaccacactggaaacaggcgtgcccagcagattttctggcagcggctctggcaccgactacaccctgacaatatccagcctccagcctgaggacttcgccacctactactgtcagcagagctggaacaccccttggacattcggccagggcaccaagctggaaatcaagagactcgagggaggctctcgcttcgaggaccgctacaagggcggaagcttcgaacaagttcagcttcaacagcctggcgctgagctggtcaaacctggcgcttctgtgaagatgagctgcaaagccagcggctacgccttcagcagctactggatcaactggatgaagcagaaacccggccagggactcgaatggatcggccaaatctatcccggcgacggcgacaccaactacaacggcaagttcaagggcagagccacactgaccgccgatacctctagcagcacagcctacatgcagctgagcagcctgaccagcgaagatagcgccgtgtacttctgtgcccggtccatcacaacagtcgtgggctgcgctatggactattggggccagggaacaagcgtgaccgtgtctagtacgcgtaccacgacgccagcgccgcgaccaccaacaccggcgcccaccatcgcgtcgcagcccctgtccctgcgcccagaggcgtgccggccagcggcggggggcgcagtgcacacgagggggctggacttcgcctgtgacatctacatctgggcgcccttggccgggacttgtggggtccttctcctgtcactggttatcaccctttactgcaaacggggcagaaagaaactcctgtatatattcaaacaaccatttatgagaccagtacaaactactcaagaggaagatggctgtagctgccgatttccagaagaagaagaaggaggatgtgaactgagagtgaagttcagcaggagcgcagacgcccccgcgtaccagcagggccagaaccagctctataacgagctgaatctaggacgaagagaggagtacgatgttttggacaagagacgtggccgggaccctgagatggggggaaagccgagaaggaagaaccctcaggaaggcctgtacaatgaactgcagaaagataagatggcggaggcctacagtgagattgggatgaaaggcgagcgccggaggggcaaggggcacgatggcctttaccagggtctcagtacagccaccaaggacacctacgacgcccttcacatgcaggccctgccccctcgctaa

SEQ ID NO: 7910 - DNA, 1479 bp, synthetic construct
  source 1..1479: mol_type = other DNA
atggccttaccagtgaccgccttgctcctgccgctggccttgctgctccacgccgccaggccggacatccagatgacacagagccctagcagcctgtctgccagcgtgggagacagagtgaccatcacatgcaaggccagcgaccacatcaacaactggctggcctggtatcagcagaagcctggacaggcccctaagctgctgatctacggcgctaccacactggaaacaggcgtgcccagcagattttctggcagcggctctggcaccgactacaccctgacaatatccagcctccagcctgaggacttcgccacctactactgtcagcagagctggaacaccccttggacattcggccagggcaccaagctggaaatcaagagactcgagggaggctctcgccacgaggaccgctacaagggcggaagcttcgaacaagttcagcttcaacagcctggcgctgagctggtcaaacctggcgcttctgtgaagatgagctgcaaagccagcggctacgccttcagcagctactggatcaactggatgaagcagaaacccggccagggactcgaatggatcggccaaatctatcccggcgacggcgacaccaactacaacggcaagttcaagggcagagccacactgaccgccgatacctctagcagcacagcctacatgcagctgagcagcctgaccagcgaagatagcgccgtgtacttctgtgcccggtccatcacaacagtcgtgggctgcgctatggactattggggccagggaacaagcgtgaccgtgtctagtacgcgtaccacgacgccagcgccgcgaccaccaacaccggcgcccaccatcgcgtcgcagcccctgtccctgcgcccagaggcgtgccggccagcggcggggggcgcagtgcacacgagggggctggacttcgcctgtgacatctacatctgggcgcccttggccgggacttgtggggtccttctcctgtcactggttatcaccctttactgcaaacggggcagaaagaaactcctgtatatattcaaacaaccatttatgagaccagtacaaactactcaagaggaagatggctgtagctgccgatttccagaagaagaagaaggaggatgtgaactgagagtgaagttcagcaggagcgcagacgcccccgcgtaccagcagggccagaaccagctctataacgagctgaatctaggacgaagagaggagtacgatgttttggacaagagacgtggccgggaccctgagatggggggaaagccgagaaggaagaaccctcaggaaggcctgtacaatgaactgcagaaagataagatggcggaggcctacagtgagattgggatgaaaggcgagcgccggaggggcaaggggcacgatggcctttaccagggtctcagtacagccaccaaggacacctacgacgcccttcacatgcaggccctgccccctcgctaa

SEQ ID NO: 7911 - DNA, 1479 bp, synthetic construct
  source 1..1479: mol_type = other DNA
atggccttaccagtgaccgccttgctcctgccgctggccttgctgctccacgccgccaggccggacatccagatgacacagagccctagcagcctgtctgccagcgtgggagacagagtgaccatcacatgcaaggccagcgaccacatcaacaactggctggcctggtatcagcagaagcctggacaggcccctaagctgctgatctacggcgctaccacactggaaacaggcgtgcccagcagattttctggcagcggctctggcaccgactacaccctgacaatatccagcctccagcctgaggacttcgccacctactactgtcagcagagctggaacaccccttggacattcggccagggcaccaagctggaaatcaagagactcgagggaggctctcgcggcgaggaccgctacaagggcggaagcttcgaacaagttcagcttcaacagcctggcgctgagctggtcaaacctggcgcttctgtgaagatgagctgcaaagccagcggctacgccttcagcagctactggatcaactggatgaagcagaaacccggccagggactcgaatggatcggccaaatctatcccggcgacggcgacaccaactacaacggcaagttcaagggcagagccacactgaccgccgatacctctagcagcacagcctacatgcagctgagcagcctgaccagcgaagatagcgccgtgtacttctgtgcccggtccatcacaacagtcgtgggctgcgctatggactattggggccagggaacaagcgtgaccgtgtctagtacgcgtaccacgacgccagcgccgcgaccaccaacaccggcgcccaccatcgcgtcgcagcccctgtccctgcgcccagaggcgtgccggccagcggcggggggcgcagtgcacacgagggggctggacttcgcctgtgacatctacatctgggcgcccttggccgggacttgtggggtccttctcctgtcactggttatcaccctttactgcaaacggggcagaaagaaactcctgtatatattcaaacaaccatttatgagaccagtacaaactactcaagaggaagatggctgtagctgccgatttccagaagaagaagaaggaggatgtgaactgagagtgaagttcagcaggagcgcagacgcccccgcgtaccagcagggccagaaccagctctataacgagctgaatctaggacgaagagaggagtacgatgttttggacaagagacgtggccgggaccctgagatggggggaaagccgagaaggaagaaccctcaggaaggcctgtacaatgaactgcagaaagataagatggcggaggcctacagtgagattgggatgaaaggcgagcgccggaggggcaaggggcacgatggcctttaccagggtctcagtacagccaccaaggacacctacgacgcccttcacatgcaggccctgccccctcgctaa

SEQ ID NO: 7912 - DNA, 1479 bp, synthetic construct
  source 1..1479: mol_type = other DNA
atggccttaccagtgaccgccttgctcctgccgctggccttgctgctccacgccgccaggccggacatccagatgacacagagccctagcagcctgtctgccagcgtgggagacagagtgaccatcacatgcaaggccagcgaccacatcaacaactggctggcctggtatcagcagaagcctggacaggcccctaagctgctgatctacggcgctaccacactggaaacaggcgtgcccagcagattttctggcagcggctctggcaccgactacaccctgacaatatccagcctccagcctgaggacttcgccacctactactgtcagcagagctggaacaccccttggacattcggccagggcaccaagctggaaatcaagagactcgagggaggctctcgcaccgaggaccgctacaagggcggaagcttcgaacaagttcagcttcaacagcctggcgctgagctggtcaaacctggcgcttctgtgaagatgagctgcaaagccagcggctacgccttcagcagctactggatcaactggatgaagcagaaacccggccagggactcgaatggatcggccaaatctatcccggcgacggcgacaccaactacaacggcaagttcaagggcagagccacactgaccgccgatacctctagcagcacagcctacatgcagctgagcagcctgaccagcgaagatagcgccgtgtacttctgtgcccggtccatcacaacagtcgtgggctgcgctatggactattggggccagggaacaagcgtgaccgtgtctagtacgcgtaccacgacgccagcgccgcgaccaccaacaccggcgcccaccatcgcgtcgcagcccctgtccctgcgcccagaggcgtgccggccagcggcggggggcgcagtgcacacgagggggctggacttcgcctgtgacatctacatctgggcgcccttggccgggacttgtggggtccttctcctgtcactggttatcaccctttactgcaaacggggcagaaagaaactcctgtatatattcaaacaaccatttatgagaccagtacaaactactcaagaggaagatggctgtagctgccgatttccagaagaagaagaaggaggatgtgaactgagagtgaagttcagcaggagcgcagacgcccccgcgtaccagcagggccagaaccagctctataacgagctgaatctaggacgaagagaggagtacgatgttttggacaagagacgtggccgggaccctgagatggggggaaagccgagaaggaagaaccctcaggaaggcctgtacaatgaactgcagaaagataagatggcggaggcctacagtgagattgggatgaaaggcgagcgccggaggggcaaggggcacgatggcctttaccagggtctcagtacagccaccaaggacacctacgacgcccttcacatgcaggccctgccccctcgctaa

SEQ ID NO: 7913 - DNA, 1479 bp, synthetic construct
  source 1..1479: mol_type = other DNA
atggccttaccagtgaccgccttgctcctgccgctggccttgctgctccacgccgccaggccggacatccagatgacacagagccctagcagcctgtctgccagcgtgggagacagagtgaccatcacatgcaaggccagcgaccacatcaacaactggctggcctggtatcagcagaagcctggacaggcccctaagctgctgatctacggcgctaccacactggaaacaggcgtgcccagcagattttctggcagcggctctggcaccgactacaccctgacaatatccagcctccagcctgaggacttcgccacctactactgtcagcagagctggaacaccccttggacattcggccagggcaccaagctggaaatcaagagactcgagggaggctctagcagcgaggaccgctacaagggcggaagcttcgaacaagttcagcttcaacagcctggcgctgagctggtcaaacctggcgcttctgtgaagatgagctgcaaagccagcggctacgccttcagcagctactggatcaactggatgaagcagaaacccggccagggactcgaatggatcggccaaatctatcccggcgacggcgacaccaactacaacggcaagttcaagggcagagccacactgaccgccgatacctctagcagcacagcctacatgcagctgagcagcctgaccagcgaagatagcgccgtgtacttctgtgcccggtccatcacaacagtcgtgggctgcgctatggactattggggccagggaacaagcgtgaccgtgtctagtacgcgtaccacgacgccagcgccgcgaccaccaacaccggcgcccaccatcgcgtcgcagcccctgtccctgcgcccagaggcgtgccggccagcggcggggggcgcagtgcacacgagggggctggacttcgcctgtgacatctacatctgggcgcccttggccgggacttgtggggtccttctcctgtcactggttatcaccctttactgcaaacggggcagaaagaaactcctgtatatattcaaacaaccatttatgagaccagtacaaactactcaagaggaagatggctgtagctgccgatttccagaagaagaagaaggaggatgtgaactgagagtgaagttcagcaggagcgcagacgcccccgcgtaccagcagggccagaaccagctctataacgagctgaatctaggacgaagagaggagtacgatgttttggacaagagacgtggccgggaccctgagatggggggaaagccgagaaggaagaaccctcaggaaggcctgtacaatgaactgcagaaagataagatggcggaggcctacagtgagattgggatgaaaggcgagcgccggaggggcaaggggcacgatggcctttaccagggtctcagtacagccaccaaggacacctacgacgcccttcacatgcaggccctgccccctcgctaa

SEQ ID NO: 7914 - DNA, 1479 bp, synthetic construct
  source 1..1479: mol_type = other DNA
atggccttaccagtgaccgccttgctcctgccgctggccttgctgctccacgccgccaggccggacatccagatgacacagagccctagcagcctgtctgccagcgtgggagacagagtgaccatcacatgcaaggccagcgaccacatcaacaactggctggcctggtatcagcagaagcctggacaggcccctaagctgctgatctacggcgctaccacactggaaacaggcgtgcccagcagattttctggcagcggctctggcaccgactacaccctgacaatatccagcctccagcctgaggacttcgccacctactactgtcagcagagctggaacaccccttggacattcggccagggcaccaagctggaaatcaagagactcgagggaggctctcacagcgaggaccgctacaagggcggaagcttcgaacaagttcagcttcaacagcctggcgctgagctggtcaaacctggcgcttctgtgaagatgagctgcaaagccagcggctacgccttcagcagctactggatcaactggatgaagcagaaacccggccagggactcgaatggatcggccaaatctatcccggcgacggcgacaccaactacaacggcaagttcaagggcagagccacactgaccgccgatacctctagcagcacagcctacatgcagctgagcagcctgaccagcgaagatagcgccgtgtacttctgtgcccggtccatcacaacagtcgtgggctgcgctatggactattggggccagggaacaagcgtgaccgtgtctagtacgcgtaccacgacgccagcgccgcgaccaccaacaccggcgcccaccatcgcgtcgcagcccctgtccctgcgcccagaggcgtgccggccagcggcggggggcgcagtgcacacgagggggctggacttcgcctgtgacatctacatctgggcgcccttggccgggacttgtggggtccttctcctgtcactggttatcaccctttactgcaaacggggcagaaagaaactcctgtatatattcaaacaaccatttatgagaccagtacaaactactcaagaggaagatggctgtagctgccgatttccagaagaagaagaaggaggatgtgaactgagagtgaagttcagcaggagcgcagacgcccccgcgtaccagcagggccagaaccagctctataacgagctgaatctaggacgaagagaggagtacgatgttttggacaagagacgtggccgggaccctgagatggggggaaagccgagaaggaagaaccctcaggaaggcctgtacaatgaactgcagaaagataagatggcggaggcctacagtgagattgggatgaaaggcgagcgccggaggggcaaggggcacgatggcctttaccagggtctcagtacagccaccaaggacacctacgacgcccttcacatgcaggccctgccccctcgctaa

SEQ ID NO: 7915 - DNA, 1479 bp, synthetic construct
  source 1..1479: mol_type = other DNA
atggccttaccagtgaccgccttgctcctgccgctggccttgctgctccacgccgccaggccggacatccagatgacacagagccctagcagcctgtctgccagcgtgggagacagagtgaccatcacatgcaaggccagcgaccacatcaacaactggctggcctggtatcagcagaagcctggacaggcccctaagctgctgatctacggcgctaccacactggaaacaggcgtgcccagcagattttctggcagcggctctggcaccgactacaccctgacaatatccagcctccagcctgaggacttcgccacctactactgtcagcagagctggaacaccccttggacattcggccagggcaccaagctggaaatcaagagactcgagggaggctctgacagcgaggaccgctacaagggcggaagcttcgaacaagttcagcttcaacagcctggcgctgagctggtcaaacctggcgcttctgtgaagatgagctgcaaagccagcggctacgccttcagcagctactggatcaactggatgaagcagaaacccggccagggactcgaatggatcggccaaatctatcccggcgacggcgacaccaactacaacggcaagttcaagggcagagccacactgaccgccgatacctctagcagcacagcctacatgcagctgagcagcctgaccagcgaagatagcgccgtgtacttctgtgcccggtccatcacaacagtcgtgggctgcgctatggactattggggccagggaacaagcgtgaccgtgtctagtacgcgtaccacgacgccagcgccgcgaccaccaacaccggcgcccaccatcgcgtcgcagcccctgtccctgcgcccagaggcgtgccggccagcggcggggggcgcagtgcacacgagggggctggacttcgcctgtgacatctacatctgggcgcccttggccgggacttgtggggtccttctcctgtcactggttatcaccctttactgcaaacggggcagaaagaaactcctgtatatattcaaacaaccatttatgagaccagtacaaactactcaagaggaagatggctgtagctgccgatttccagaagaagaagaaggaggatgtgaactgagagtgaagttcagcaggagcgcagacgcccccgcgtaccagcagggccagaaccagctctataacgagctgaatctaggacgaagagaggagtacgatgttttggacaagagacgtggccgggaccctgagatggggggaaagccgagaaggaagaaccctcaggaaggcctgtacaatgaactgcagaaagataagatggcggaggcctacagtgagattgggatgaaaggcgagcgccggaggggcaaggggcacgatggcctttaccagggtctcagtacagccaccaaggacacctacgacgcccttcacatgcaggccctgccccctcgctaa

SEQ ID NO: 7916 - DNA, 1479 bp, synthetic construct
  source 1..1479: mol_type = other DNA
atggccttaccagtgaccgccttgctcctgccgctggccttgctgctccacgccgccaggccggacatccagatgacacagagccctagcagcctgtctgccagcgtgggagacagagtgaccatcacatgcaaggccagcgaccacatcaacaactggctggcctggtatcagcagaagcctggacaggcccctaagctgctgatctacggcgctaccacactggaaacaggcgtgcccagcagattttctggcagcggctctggcaccgactacaccctgacaatatccagcctccagcctgaggacttcgccacctactactgtcagcagagctggaacaccccttggacattcggccagggcaccaagctggaaatcaagagactcgagggaggctctttcagcgaggaccgctacaagggcggaagcttcgaacaagttcagcttcaacagcctggcgctgagctggtcaaacctggcgcttctgtgaagatgagctgcaaagccagcggctacgccttcagcagctactggatcaactggatgaagcagaaacccggccagggactcgaatggatcggccaaatctatcccggcgacggcgacaccaactacaacggcaagttcaagggcagagccacactgaccgccgatacctctagcagcacagcctacatgcagctgagcagcctgaccagcgaagatagcgccgtgtacttctgtgcccggtccatcacaacagtcgtgggctgcgctatggactattggggccagggaacaagcgtgaccgtgtctagtacgcgtaccacgacgccagcgccgcgaccaccaacaccggcgcccaccatcgcgtcgcagcccctgtccctgcgcccagaggcgtgccggccagcggcggggggcgcagtgcacacgagggggctggacttcgcctgtgacatctacatctgggcgcccttggccgggacttgtggggtccttctcctgtcactggttatcaccctttactgcaaacggggcagaaagaaactcctgtatatattcaaacaaccatttatgagaccagtacaaactactcaagaggaagatggctgtagctgccgatttccagaagaagaagaaggaggatgtgaactgagagtgaagttcagcaggagcgcagacgcccccgcgtaccagcagggccagaaccagctctataacgagctgaatctaggacgaagagaggagtacgatgttttggacaagagacgtggccgggaccctgagatggggggaaagccgagaaggaagaaccctcaggaaggcctgtacaatgaactgcagaaagataagatggcggaggcctacagtgagattgggatgaaaggcgagcgccggaggggcaaggggcacgatggcctttaccagggtctcagtacagccaccaaggacacctacgacgcccttcacatgcaggccctgccccctcgctaa

SEQ ID NO: 7917 - DNA, 1479 bp, synthetic construct; identical to SEQ ID NO: 7895
  source 1..1479: mol_type = other DNA

SEQ ID NO: 7918 - DNA, 1479 bp, synthetic construct; identical to SEQ ID NO: 7896
  source 1..1479: mol_type = other DNA

SEQ ID NO: 7919 - DNA, 1482 bp, synthetic construct; identical to SEQ ID NO: 7771
  source 1..1482: mol_type = other DNA

SEQ ID NO: 7920 - DNA, 1482 bp, synthetic construct
  source 1..1482: mol_type = other DNA
atggccttaccagtgaccgccttgctcctgccgctggccttgctgctccacgccgccaggccggacatccagatgacacagagccctagcagcctgtctgccagcgtgggagacagagtgaccatcacatgcaaggccagcgaccacatcaacaactggctggcctggtatcagcagaagcctggacaggcccctaagctgctgatctacggcgctaccacactggaaacaggcgtgcccagcagattttctggcagcggctctggcaccgactacaccctgacaatatccagcctccagcctgaggacttcgccacctactactgtcagcagagctggaacaccccttggacattcggccagggcaccaagctggaaatcaagagactcgagggaggctctgcccgcagcgaggaccgcttcaagggcggaagcttcgaacaagttcagcttcaacagcctggcgctgagctggtcaaacctggcgcttctgtgaagatgagctgcaaagccagcggctacgccttcagcagctactggatcaactggatgaagcagaaacccggccagggactcgaatggatcggccaaatctatcccggcgacggcgacaccaactacaacggcaagttcaagggcagagccacactgaccgccgatacctctagcagcacagcctacatgcagctgagcagcctgaccagcgaagatagcgccgtgtacttctgtgcccggtccatcacaacagtcgtgggctgcgctatggactattggggccagggaacaagcgtgaccgtgtctagtacgcgtaccacgacgccagcgccgcgaccaccaacaccggcgcccaccatcgcgtcgcagcccctgtccctgcgcccagaggcgtgccggccagcggcggggggcgcagtgcacacgagggggctggacttcgcctgtgacatctacatctgggcgcccttggccgggacttgtggggtccttctcctgtcactggttatcaccctttactgcaaacggggcagaaagaaactcctgtatatattcaaacaaccatttatgagaccagtacaaactactcaagaggaagatggctgtagctgccgatttccagaagaagaagaaggaggatgtgaactgagagtgaagttcagcaggagcgcagacgcccccgcgtaccagcagggccagaaccagctctataacgagctgaatctaggacgaagagaggagtacgatgttttggacaagagacgtggccgggaccctgagatggggggaaagccgagaaggaagaaccctcaggaaggcctgtacaatgaactgcagaaagataagatggcggaggcctacagtgagattgggatgaaaggcgagcgccggaggggcaaggggcacgatggcctttaccagggtctcagtacagccaccaaggacacctacgacgcccttcacatgcaggccctgccccctcgctaa

SEQ ID NO: 7921 - DNA, 1482 bp, synthetic construct
  source 1..1482: mol_type = other DNA
atggccttaccagtgaccgccttgctcctgccgctggccttgctgctccacgccgccaggccggacatccagatgacacagagccctagcagcctgtctgccagcgtgggagacagagtgaccatcacatgcaaggccagcgaccacatcaacaactggctggcctggtatcagcagaagcctggacaggcccctaagctgctgatctacggcgctaccacactggaaacaggcgtgcccagcagattttctggcagcggctctggcaccgactacaccctgacaatatccagcctccagcctgaggacttcgccacctactactgtcagcagagctggaacaccccttggacattcggccagggcaccaagctggaaatcaagagactcgagggaggctctgcccgcagcgaggaccgccacaagggcggaagcttcgaacaagttcagcttcaacagcctggcgctgagctggtcaaacctggcgcttctgtgaagatgagctgcaaagccagcggctacgccttcagcagctactggatcaactggatgaagcagaaacccggccagggactcgaatggatcggccaaatctatcccggcgacggcgacaccaactacaacggcaagttcaagggcagagccacactgaccgccgatacctctagcagcacagcctacatgcagctgagcagcctgaccagcgaagatagcgccgtgtacttctgtgcccggtccatcacaacagtcgtgggctgcgctatggactattggggccagggaacaagcgtgaccgtgtctagtacgcgtaccacgacgccagcgccgcgaccaccaacaccggcgcccaccatcgcgtcgcagcccctgtccctgcgcccagaggcgtgccggccagcggcggggggcgcagtgcacacgagggggctggacttcgcctgtgacatctacatctgggcgcccttggccgggacttgtggggtccttctcctgtcactggttatcaccctttactgcaaacggggcagaaagaaactcctgtatatattcaaacaaccatttatgagaccagtacaaactactcaagaggaagatggctgtagctgccgatttccagaagaagaagaaggaggatgtgaactgagagtgaagttcagcaggagcgcagacgcccccgcgtaccagcagggccagaaccagctctataacgagctgaatctaggacgaagagaggagtacgatgttttggacaagagacgtggccgggaccctgagatggggggaaagccgagaaggaagaaccctcaggaaggcctgtacaatgaactgcagaaagataagatggcggaggcctacagtgagattgggatgaaaggcgagcgccggaggggcaaggggcacgatggcctttaccagggtctcagtacagccaccaaggacacctacgacgcccttcacatgcaggccctgccccctcgctaa

SEQ ID NO: 7922 - DNA, 1482 bp, synthetic construct; identical to SEQ ID NO: 7791
  source 1..1482: mol_type = other DNA

SEQ ID NO: 7923 - DNA, 1482 bp, synthetic construct; identical to SEQ ID NO: 7794
  source 1..1482: mol_type = other DNA

SEQ ID NO: 7924 - DNA, 1482 bp, synthetic construct; identical to SEQ ID NO: 7795
  source 1..1482: mol_type = other DNA

SEQ ID NO: 7925 - DNA, 1482 bp, synthetic construct
  source 1..1482: mol_type = other DNA
atggccttaccagtgaccgccttgctcctgccgctggccttgctgctccacgccgccaggccggacatccagatgacacagagccctagcagcctgtctgccagcgtgggagacagagtgaccatcacatgcaaggccagcgaccacatcaacaactggctggcctggtatcagcagaagcctggacaggcccctaagctgctgatctacggcgctaccacactggaaacaggcgtgcccagcagattttctggcagcggctctggcaccgactacaccctgacaatatccagcctccagcctgaggacttcgccacctactactgtcagcagagctggaacaccccttggacattcggccagggcaccaagctggaaatcaagagactcgagggaggctctgcccgcagcgagtggcgctacaagggcggaagcttcgaacaagttcagcttcaacagcctggcgctgagctggtcaaacctggcgcttctgtgaagatgagctgcaaagccagcggctacgccttcagcagctactggatcaactggatgaagcagaaacccggccagggactcgaatggatcggccaaatctatcccggcgacggcgacaccaactacaacggcaagttcaagggcagagccacactgaccgccgatacctctagcagcacagcctacatgcagctgagcagcctgaccagcgaagatagcgccgtgtacttctgtgcccggtccatcacaacagtcgtgggctgcgctatggactattggggccagggaacaagcgtgaccgtgtctagtacgcgtaccacgacgccagcgccgcgaccaccaacaccggcgcccaccatcgcgtcgcagcccctgtccctgcgcccagaggcgtgccggccagcggcggggggcgcagtgcacacgagggggctggacttcgcctgtgacatctacatctgggcgcccttggccgggacttgtggggtccttctcctgtcactggttatcaccctttactgcaaacggggcagaaagaaactcctgtatatattcaaacaaccatttatgagaccagtacaaactactcaagaggaagatggctgtagctgccgatttccagaagaagaagaaggaggatgtgaactgagagtgaagttcagcaggagcgcagacgcccccgcgtaccagcagggccagaaccagctctataacgagctgaatctaggacgaagagaggagtacgatgttttggacaagagacgtggccgggaccctgagatggggggaaagccgagaaggaagaaccctcaggaaggcctgtacaatgaactgcagaaagataagatggcggaggcctacagtgagattgggatgaaaggcgagcgccggaggggcaaggggcacgatggcctttaccagggtctcagtacagccaccaaggacacctacgacgcccttcacatgcaggccctgccccctcgctaa

SEQ ID NO: 7926 - DNA, 1482 bp, synthetic construct
  source 1..1482: mol_type = other DNA
atggccttaccagtgaccgccttgctcctgccgctggccttgctgctccacgccgccaggccggacatccagatgacacagagccctagcagcctgtctgccagcgtgggagacagagtgaccatcacatgcaaggccagcgaccacatcaacaactggctggcctggtatcagcagaagcctggacaggcccctaagctgctgatctacggcgctaccacactggaaacaggcgtgcccagcagattttctggcagcggctctggcaccgactacaccctgacaatatccagcctccagcctgaggacttcgccacctactactgtcagcagagctggaacaccccttggacattcggccagggcaccaagctggaaatcaagagactcgagggaggctctgcccgcagcgagtaccgctacaagggcggaagcttcgaacaagttcagcttcaacagcctggcgctgagctggtcaaacctggcgcttctgtgaagatgagctgcaaagccagcggctacgccttcagcagctactggatcaactggatgaagcagaaacccggccagggactcgaatggatcggccaaatctatcccggcgacggcgacaccaactacaacggcaagttcaagggcagagccacactgaccgccgatacctctagcagcacagcctacatgcagctgagcagcctgaccagcgaagatagcgccgtgtacttctgtgcccggtccatcacaacagtcgtgggctgcgctatggactattggggccagggaacaagcgtgaccgtgtctagtacgcgtaccacgacgccagcgccgcgaccaccaacaccggcgcccaccatcgcgtcgcagcccctgtccctgcgcccagaggcgtgccggccagcggcggggggcgcagtgcacacgagggggctggacttcgcctgtgacatctacatctgggcgcccttggccgggacttgtggggtccttctcctgtcactggttatcaccctttactgcaaacggggcagaaagaaactcctgtatatattcaaacaaccatttatgagaccagtacaaactactcaagaggaagatggctgtagctgccgatttccagaagaagaagaaggaggatgtgaactgagagtgaagttcagcaggagcgcagacgcccccgcgtaccagcagggccagaaccagctctataacgagctgaatctaggacgaagagaggagtacgatgttttggacaagagacgtggccgggaccctgagatggggggaaagccgagaaggaagaaccctcaggaaggcctgtacaatgaactgcagaaagataagatggcggaggcctacagtgagattgggatgaaaggcgagcgccggaggggcaaggggcacgatggcctttaccagggtctcagtacagccaccaaggacacctacgacgcccttcacatgcaggccctgccccctcgctaa

SEQ ID NO: 7927 - DNA, 1482 bp, synthetic construct
  source 1..1482: mol_type = other DNA
atggccttaccagtgaccgccttgctcctgccgctggccttgctgctccacgccgccaggccggacatccagatgacacagagccctagcagcctgtctgccagcgtgggagacagagtgaccatcacatgcaaggccagcgaccacatcaacaactggctggcctggtatcagcagaagcctggacaggcccctaagctgctgatctacggcgctaccacactggaaacaggcgtgcccagcagattttctggcagcggctctggcaccgactacaccctgacaatatccagcctccagcctgaggacttcgccacctactactgtcagcagagctggaacaccccttggacattcggccagggcaccaagctggaaatcaagagactcgagggaggctctgcccgcagcgagcgccgctacaagggcggaagcttcgaacaagttcagcttcaacagcctggcgctgagctggtcaaacctggcgcttctgtgaagatgagctgcaaagccagcggctacgccttcagcagctactggatcaactggatgaagcagaaacccggccagggactcgaatggatcggccaaatctatcccggcgacggcgacaccaactacaacggcaagttcaagggcagagccacactgaccgccgatacctctagcagcacagcctacatgcagctgagcagcctgaccagcgaagatagcgccgtgtacttctgtgcccggtccatcacaacagtcgtgggctgcgctatggactattggggccagggaacaagcgtgaccgtgtctagtacgcgtaccacgacgccagcgccgcgaccaccaacaccggcgcccaccatcgcgtcgcagcccctgtccctgcgcccagaggcgtgccggccagcggcggggggcgcagtgcacacgagggggctggacttcgcctgtgacatctacatctgggcgcccttggccgggacttgtggggtccttctcctgtcactggttatcaccctttactgcaaacggggcagaaagaaactcctgtatatattcaaacaaccatttatgagaccagtacaaactactcaagaggaagatggctgtagctgccgatttccagaagaagaagaaggaggatgtgaactgagagtgaagttcagcaggagcgcagacgcccccgcgtaccagcagggccagaaccagctctataacgagctgaatctaggacgaagagaggagtacgatgttttggacaagagacgtggccgggaccctgagatggggggaaagccgagaaggaagaaccctcaggaaggcctgtacaatgaactgcagaaagataagatggcggaggcctacagtgagattgggatgaaaggcgagcgccggaggggcaaggggcacgatggcctttaccagggtctcagtacagccaccaaggacacctacgacgcccttcacatgcaggccctgccccctcgctaa

SEQ ID NO: 7928 - DNA, 1482 bp, synthetic construct
  source 1..1482: mol_type = other DNA
atggccttaccagtgaccgccttgctcctgccgctggccttgctgctccacgccgccaggccggacatccagatgacacagagccctagcagcctgtctgccagcgtgggagacagagtgaccatcacatgcaaggccagcgaccacatcaacaactggctggcctggtatcagcagaagcctggacaggcccctaagctgctgatctacggcgctaccacactggaaacaggcgtgcccagcagattttctggcagcggctctggcaccgactacaccctgacaatatccagcctccagcctgaggacttcgccacctactactgtcagcagagctggaacaccccttggacattcggccagggcaccaagctggaaatcaagagactcgagggaggctctgcccgcagcgaggtgcgctacaagggcggaagcttcgaacaagttcagcttcaacagcctggcgctgagctggtcaaacctggcgcttctgtgaagatgagctgcaaagccagcggctacgccttcagcagctactggatcaactggatgaagcagaaacccggccagggactcgaatggatcggccaaatctatcccggcgacggcgacaccaactacaacggcaagttcaagggcagagccacactgaccgccgatacctctagcagcacagcctacatgcagctgagcagcctgaccagcgaagatagcgccgtgtacttctgtgcccggtccatcacaacagtcgtgggctgcgctatggactattggggccagggaacaagcgtgaccgtgtctagtacgcgtaccacgacgccagcgccgcgaccaccaacaccggcgcccaccatcgcgtcgcagcccctgtccctgcgcccagaggcgtgccggccagcggcggggggcgcagtgcacacgagggggctggacttcgcctgtgacatctacatctgggcgcccttggccgggacttgtggggtccttctcctgtcactggttatcaccctttactgcaaacggggcagaaagaaactcctgtatatattcaaacaaccatttatgagaccagtacaaactactcaagaggaagatggctgtagctgccgatttccagaagaagaagaaggaggatgtgaactgagagtgaagttcagcaggagcgcagacgcccccgcgtaccagcagggccagaaccagctctataacgagctgaatctaggacgaagagaggagtacgatgttttggacaagagacgtggccgggaccctgagatggggggaaagccgagaaggaagaaccctcaggaaggcctgtacaatgaactgcagaaagataagatggcggaggcctacagtgagattgggatgaaaggcgagcgccggaggggcaaggggcacgatggcctttaccagggtctcagtacagccaccaaggacacctacgacgcccttcacatgcaggccctgccccctcgctaa

SEQ ID NO: 7929 - DNA, 1482 bp, synthetic construct
  source 1..1482: mol_type = other DNA
atggccttaccagtgaccgccttgctcctgccgctggccttgctgctccacgccgccaggccggacatccagatgacacagagccctagcagcctgtctgccagcgtgggagacagagtgaccatcacatgcaaggccagcgaccacatcaacaactggctggcctggtatcagcagaagcctggacaggcccctaagctgctgatctacggcgctaccacactggaaacaggcgtgcccagcagattttctggcagcggctctggcaccgactacaccctgacaatatccagcctccagcctgaggacttcgccacctactactgtcagcagagctggaacaccccttggacattcggccagggcaccaagctggaaatcaagagactcgagggaggctctgcccgcatcgaggaccgctacaagggcggaagcttcgaacaagttcagcttcaacagcctggcgctgagctggtcaaacctggcgcttctgtgaagatgagctgcaaagccagcggctacgccttcagcagctactggatcaactggatgaagcagaaacccggccagggactcgaatggatcggccaaatctatcccggcgacggcgacaccaactacaacggcaagttcaagggcagagccacactgaccgccgatacctctagcagcacagcctacatgcagctgagcagcctgaccagcgaagatagcgccgtgtacttctgtgcccggtccatcacaacagtcgtgggctgcgctatggactattggggccagggaacaagcgtgaccgtgtctagtacgcgtaccacgacgccagcgccgcgaccaccaacaccggcgcccaccatcgcgtcgcagcccctgtccctgcgcccagaggcgtgccggccagcggcggggggcgcagtgcacacgagggggctggacttcgcctgtgacatctacatctgggcgcccttggccgggacttgtggggtccttctcctgtcactggttatcaccctttactgcaaacggggcagaaagaaactcctgtatatattcaaacaaccatttatgagaccagtacaaactactcaagaggaagatggctgtagctgccgatttccagaagaagaagaaggaggatgtgaactgagagtgaagttcagcaggagcgcagacgcccccgcgtaccagcagggccagaaccagctctataacgagctgaatctaggacgaagagaggagtacgatgttttggacaagagacgtggccgggaccctgagatggggggaaagccgagaaggaagaaccctcaggaaggcctgtacaatgaactgcagaaagataagatggcggaggcctacagtgagattgggatgaaaggcgagcgccggaggggcaaggggcacgatggcctttaccagggtctcagtacagccaccaaggacacctacgacgcccttcacatgcaggccctgccccctcgctaa

SEQ ID NO: 7930 - DNA, 1482 bp, synthetic construct
  source 1..1482: mol_type = other DNA
atggccttaccagtgaccgccttgctcctgccgctggccttgctgctccacgccgccaggccggacatccagatgacacagagccctagcagcctgtctgccagcgtgggagacagagtgaccatcacatgcaaggccagcgaccacatcaacaactggctggcctggtatcagcagaagcctggacaggcccctaagctgctgatctacggcgctaccacactggaaacaggcgtgcccagcagattttctggcagcggctctggcaccgactacaccctgacaatatccagcctccagcctgaggacttcgccacctactactgtcagcagagctggaacaccccttggacattcggccagggcaccaagctggaaatcaagagactcgagggaggctctgcccgcctggaggaccgctacaagggcggaagcttcgaacaagttcagcttcaacagcctggcgctgagctggtcaaacctggcgcttctgtgaagatgagctgcaaagccagcggctacgccttcagcagctactggatcaactggatgaagcagaaacccggccagggactcgaatggatcggccaaatctatcccggcgacggcgacaccaactacaacggcaagttcaagggcagagccacactgaccgccgatacctctagcagcacagcctacatgcagctgagcagcctgaccagcgaagatagcgccgtgtacttctgtgcccggtccatcacaacagtcgtgggctgcgctatggactattggggccagggaacaagcgtgaccgtgtctagtacgcgtaccacgacgccagcgccgcgaccaccaacaccggcgcccaccatcgcgtcgcagcccctgtccctgcgcccagaggcgtgccggccagcggcggggggcgcagtgcacacgagggggctggacttcgcctgtgacatctacatctgggcgcccttggccgggacttgtggggtccttctcctgtcactggttatcaccctttactgcaaacggggcagaaagaaactcctgtatatattcaaacaaccatttatgagaccagtacaaactactcaagaggaagatggctgtagctgccgatttccagaagaagaagaaggaggatgtgaactgagagtgaagttcagcaggagcgcagacgcccccgcgtaccagcagggccagaaccagctctataacgagctgaatctaggacgaagagaggagtacgatgttttggacaagagacgtggccgggaccctgagatggggggaaagccgagaaggaagaaccctcaggaaggcctgtacaatgaactgcagaaagataagatggcggaggcctacagtgagattgggatgaaaggcgagcgccggaggggcaaggggcacgatggcctttaccagggtctcagtacagccaccaaggacacctacgacgcccttcacatgcaggccctgccccctcgctaa

SEQ ID NO: 7931 - DNA, 1482 bp, synthetic construct
  source 1..1482: mol_type = other DNA
atggccttaccagtgaccgccttgctcctgccgctggccttgctgctccacgccgccaggccggacatccagatgacacagagccctagcagcctgtctgccagcgtgggagacagagtgaccatcacatgcaaggccagcgaccacatcaacaactggctggcctggtatcagcagaagcctggacaggcccctaagctgctgatctacggcgctaccacactggaaacaggcgtgcccagcagattttctggcagcggctctggcaccgactacaccctgacaatatccagcctccagcctgaggacttcgccacctactactgtcagcagagctggaacaccccttggacattcggccagggcaccaagctggaaatcaagagactcgagggaggctctgcccgcatggaggaccgctacaagggcggaagcttcgaacaagttcagcttcaacagcctggcgctgagctggtcaaacctggcgcttctgtgaagatgagctgcaaagccagcggctacgccttcagcagctactggatcaactggatgaagcagaaacccggccagggactcgaatggatcggccaaatctatcccggcgacggcgacaccaactacaacggcaagttcaagggcagagccacactgaccgccgatacctctagcagcacagcctacatgcagctgagcagcctgaccagcgaagatagcgccgtgtacttctgtgcccggtccatcacaacagtcgtgggctgcgctatggactattggggccagggaacaagcgtgaccgtgtctagtacgcgtaccacgacgccagcgccgcgaccaccaacaccggcgcccaccatcgcgtcgcagcccctgtccctgcgcccagaggcgtgccggccagcggcggggggcgcagtgcacacgagggggctggacttcgcctgtgacatctacatctgggcgcccttggccgggacttgtggggtccttctcctgtcactggttatcaccctttactgcaaacggggcagaaagaaactcctgtatatattcaaacaaccatttatgagaccagtacaaactactcaagaggaagatggctgtagctgccgatttccagaagaagaagaaggaggatgtgaactgagagtgaagttcagcaggagcgcagacgcccccgcgtaccagcagggccagaaccagctctataacgagctgaatctaggacgaagagaggagtacgatgttttggacaagagacgtggccgggaccctgagatggggggaaagccgagaaggaagaaccctcaggaaggcctgtacaatgaactgcagaaagataagatggcggaggcctacagtgagattgggatgaaaggcgagcgccggaggggcaaggggcacgatggcctttaccagggtctcagtacagccaccaaggacacctacgacgcccttcacatgcaggccctgccccctcgctaa

SEQ ID NO: 7932 - DNA, 1482 bp, synthetic construct
  source 1..1482: mol_type = other DNA
atggccttaccagtgaccgccttgctcctgccgctggccttgctgctccacgccgccaggccggacatccagatgacacagagccctagcagcctgtctgccagcgtgggagacagagtgaccatcacatgcaaggccagcgaccacatcaacaactggctggcctggtatcagcagaagcctggacaggcccctaagctgctgatctacggcgctaccacactggaaacaggcgtgcccagcagattttctggcagcggctctggcaccgactacaccctgacaatatccagcctccagcctgaggacttcgccacctactactgtcagcagagctggaacaccccttggacattcggccagggcaccaagctggaaatcaagagactcgagggaggctctgcccgcgtggaggaccgctacaagggcggaagcttcgaacaagttcagcttcaacagcctggcgctgagctggtcaaacctggcgcttctgtgaagatgagctgcaaagccagcggctacgccttcagcagctactggatcaactggatgaagcagaaacccggccagggactcgaatggatcggccaaatctatcccggcgacggcgacaccaactacaacggcaagttcaagggcagagccacactgaccgccgatacctctagcagcacagcctacatgcagctgagcagcctgaccagcgaagatagcgccgtgtacttctgtgcccggtccatcacaacagtcgtgggctgcgctatggactattggggccagggaacaagcgtgaccgtgtctagtacgcgtaccacgacgccagcgccgcgaccaccaacaccggcgcccaccatcgcgtcgcagcccctgtccctgcgcccagaggcgtgccggccagcggcggggggcgcagtgcacacgagggggctggacttcgcctgtgacatctacatctgggcgcccttggccgggacttgtggggtccttctcctgtcactggttatcaccctttactgcaaacggggcagaaagaaactcctgtatatattcaaacaaccatttatgagaccagtacaaactactcaagaggaagatggctgtagctgccgatttccagaagaagaagaaggaggatgtgaactgagagtgaagttcagcaggagcgcagacgcccccgcgtaccagcagggccagaaccagctctataacgagctgaatctaggacgaagagaggagtacgatgttttggacaagagacgtggccgggaccctgagatggggggaaagccgagaaggaagaaccctcaggaaggcctgtacaatgaactgcagaaagataagatggcggaggcctacagtgagattgggatgaaaggcgagcgccggaggggcaaggggcacgatggcctttaccagggtctcagtacagccaccaaggacacctacgacgcccttcacatgcaggccctgccccctcgctaa

SEQ ID NO: 7933 - DNA, 1482 bp, synthetic construct
  source 1..1482: mol_type = other DNA
atggccttaccagtgaccgccttgctcctgccgctggccttgctgctccacgccgccaggccggacatccagatgacacagagccctagcagcctgtctgccagcgtgggagacagagtgaccatcacatgcaaggccagcgaccacatcaacaactggctggcctggtatcagcagaagcctggacaggcccctaagctgctgatctacggcgctaccacactggaaacaggcgtgcccagcagattttctggcagcggctctggcaccgactacaccctgacaatatccagcctccagcctgaggacttcgccacctactactgtcagcagagctggaacaccccttggacattcggccagggcaccaagctggaaatcaagagactcgagggaggctctgcccgcgccgaggaccgctacaagggcggaagcttcgaacaagttcagcttcaacagcctggcgctgagctggtcaaacctggcgcttctgtgaagatgagctgcaaagccagcggctacgccttcagcagctactggatcaactggatgaagcagaaacccggccagggactcgaatggatcggccaaatctatcccggcgacggcgacaccaactacaacggcaagttcaagggcagagccacactgaccgccgatacctctagcagcacagcctacatgcagctgagcagcctgaccagcgaagatagcgccgtgtacttctgtgcccggtccatcacaacagtcgtgggctgcgctatggactattggggccagggaacaagcgtgaccgtgtctagtacgcgtaccacgacgccagcgccgcgaccaccaacaccggcgcccaccatcgcgtcgcagcccctgtccctgcgcccagaggcgtgccggccagcggcggggggcgcagtgcacacgagggggctggacttcgcctgtgacatctacatctgggcgcccttggccgggacttgtggggtccttctcctgtcactggttatcaccctttactgcaaacggggcagaaagaaactcctgtatatattcaaacaaccatttatgagaccagtacaaactactcaagaggaagatggctgtagctgccgatttccagaagaagaagaaggaggatgtgaactgagagtgaagttcagcaggagcgcagacgcccccgcgtaccagcagggccagaaccagctctataacgagctgaatctaggacgaagagaggagtacgatgttttggacaagagacgtggccgggaccctgagatggggggaaagccgagaaggaagaaccctcaggaaggcctgtacaatgaactgcagaaagataagatggcggaggcctacagtgagattgggatgaaaggcgagcgccggaggggcaaggggcacgatggcctttaccagggtctcagtacagccaccaaggacacctacgacgcccttcacatgcaggccctgccccctcgctaa

SEQ ID NO: 7934 - DNA, 1482 bp, synthetic construct
  source 1..1482: mol_type = other DNA
atggccttaccagtgaccgccttgctcctgccgctggccttgctgctccacgccgccaggccggacatccagatgacacagagccctagcagcctgtctgccagcgtgggagacagagtgaccatcacatgcaaggccagcgaccacatcaacaactggctggcctggtatcagcagaagcctggacaggcccctaagctgctgatctacggcgctaccacactggaaacaggcgtgcccagcagattttctggcagcggctctggcaccgactacaccctgacaatatccagcctccagcctgaggacttcgccacctactactgtcagcagagctggaacaccccttggacattcggccagggcaccaagctggaaatcaagagactcgagggaggctctgcccgcttcgaggaccgctacaagggcggaagcttcgaacaagttcagcttcaacagcctggcgctgagctggtcaaacctggcgcttctgtgaagatgagctgcaaagccagcggctacgccttcagcagctactggatcaactggatgaagcagaaacccggccagggactcgaatggatcggccaaatctatcccggcgacggcgacaccaactacaacggcaagttcaagggcagagccacactgaccgccgatacctctagcagcacagcctacatgcagctgagcagcctgaccagcgaagatagcgccgtgtacttctgtgcccggtccatcacaacagtcgtgggctgcgctatggactattggggccagggaacaagcgtgaccgtgtctagtacgcgtaccacgacgccagcgccgcgaccaccaacaccggcgcccaccatcgcgtcgcagcccctgtccctgcgcccagaggcgtgccggccagcggcggggggcgcagtgcacacgagggggctggacttcgcctgtgacatctacatctgggcgcccttggccgggacttgtggggtccttctcctgtcactggttatcaccctttactgcaaacggggcagaaagaaactcctgtatatattcaaacaaccatttatgagaccagtacaaactactcaagaggaagatggctgtagctgccgatttccagaagaagaagaaggaggatgtgaactgagagtgaagttcagcaggagcgcagacgcccccgcgtaccagcagggccagaaccagctctataacgagctgaatctaggacgaagagaggagtacgatgttttggacaagagacgtggccgggaccctgagatggggggaaagccgagaaggaagaaccctcaggaaggcctgtacaatgaactgcagaaagataagatggcggaggcctacagtgagattgggatgaaaggcgagcgccggaggggcaaggggcacgatggcctttaccagggtctcagtacagccaccaaggacacctacgacgcccttcacatgcaggccctgccccctcgctaa

SEQ ID NO: 7935 - DNA, 1482 bp, synthetic construct
  source 1..1482: mol_type = other DNA
atggccttaccagtgaccgccttgctcctgccgctggccttgctgctccacgccgccaggccggacatccagatgacacagagccctagcagcctgtctgccagcgtgggagacagagtgaccatcacatgcaaggccagcgaccacatcaacaactggctggcctggtatcagcagaagcctggacaggcccctaagctgctgatctacggcgctaccacactggaaacaggcgtgcccagcagattttctggcagcggctctggcaccgactacaccctgacaatatccagcctccagcctgaggacttcgccacctactactgtcagcagagctggaacaccccttggacattcggccagggcaccaagctggaaatcaagagactcgagggaggctctgcccgccacgaggaccgctacaagggcggaagcttcgaacaagttcagcttcaacagcctggcgctgagctggtcaaacctggcgcttctgtgaagatgagctgcaaagccagcggctacgccttcagcagctactggatcaactggatgaagcagaaacccggccagggactcgaatggatcggccaaatctatcccggcgacggcgacaccaactacaacggcaagttcaagggcagagccacactgaccgccgatacctctagcagcacagcctacatgcagctgagcagcctgaccagcgaagatagcgccgtgtacttctgtgcccggtccatcacaacagtcgtgggctgcgctatggactattggggccagggaacaagcgtgaccgtgtctagtacgcgtaccacgacgccagcgccgcgaccaccaacaccggcgcccaccatcgcgtcgcagcccctgtccctgcgcccagaggcgtgccggccagcggcggggggcgcagtgcacacgagggggctggacttcgcctgtgacatctacatctgggcgcccttggccgggacttgtggggtccttctcctgtcactggttatcaccctttactgcaaacggggcagaaagaaactcctgtatatattcaaacaaccatttatgagaccagtacaaactactcaagaggaagatggctgtagctgccgatttccagaagaagaagaaggaggatgtgaactgagagtgaagttcagcaggagcgcagacgcccccgcgtaccagcagggccagaaccagctctataacgagctgaatctaggacgaagagaggagtacgatgttttggacaagagacgtggccgggaccctgagatggggggaaagccgagaaggaagaaccctcaggaaggcctgtacaatgaactgcagaaagataagatggcggaggcctacagtgagattgggatgaaaggcgagcgccggaggggcaaggggcacgatggcctttaccagggtctcagtacagccaccaaggacacctacgacgcccttcacatgcaggccctgccccctcgctaa

SEQ ID NO: 7936 - DNA, 1482 bp, synthetic construct
  source 1..1482: mol_type = other DNA
atggccttaccagtgaccgccttgctcctgccgctggccttgctgctccacgccgccaggccggacatccagatgacacagagccctagcagcctgtctgccagcgtgggagacagagtgaccatcacatgcaaggccagcgaccacatcaacaactggctggcctggtatcagcagaagcctggacaggcccctaagctgctgatctacggcgctaccacactggaaacaggcgtgcccagcagattttctggcagcggctctggcaccgactacaccctgacaatatccagcctccagcctgaggacttcgccacctactactgtcagcagagctggaacaccccttggacattcggccagggcaccaagctggaaatcaagagactcgagggaggctctgcccgcggcgaggaccgctacaagggcggaagcttcgaacaagttcagcttcaacagcctggcgctgagctggtcaaacctggcgcttctgtgaagatgagctgcaaagccagcggctacgccttcagcagctactggatcaactggatgaagcagaaacccggccagggactcgaatggatcggccaaatctatcccggcgacggcgacaccaactacaacggcaagttcaagggcagagccacactgaccgccgatacctctagcagcacagcctacatgcagctgagcagcctgaccagcgaagatagcgccgtgtacttctgtgcccggtccatcacaacagtcgtgggctgcgctatggactattggggccagggaacaagcgtgaccgtgtctagtacgcgtaccacgacgccagcgccgcgaccaccaacaccggcgcccaccatcgcgtcgcagcccctgtccctgcgcccagaggcgtgccggccagcggcggggggcgcagtgcacacgagggggctggacttcgcctgtgacatctacatctgggcgcccttggccgggacttgtggggtccttctcctgtcactggttatcaccctttactgcaaacggggcagaaagaaactcctgtatatattcaaacaaccatttatgagaccagtacaaactactcaagaggaagatggctgtagctgccgatttccagaagaagaagaaggaggatgtgaactgagagtgaagttcagcaggagcgcagacgcccccgcgtaccagcagggccagaaccagctctataacgagctgaatctaggacgaagagaggagtacgatgttttggacaagagacgtggccgggaccctgagatggggggaaagccgagaaggaagaaccctcaggaaggcctgtacaatgaactgcagaaagataagatggcggaggcctacagtgagattgggatgaaaggcgagcgccggaggggcaaggggcacgatggcctttaccagggtctcagtacagccaccaaggacacctacgacgcccttcacatgcaggccctgccccctcgctaa

SEQ ID NO: 7937 - DNA, 1482 bp, synthetic construct
  source 1..1482: mol_type = other DNA
atggccttaccagtgaccgccttgctcctgccgctggccttgctgctccacgccgccaggccggacatccagatgacacagagccctagcagcctgtctgccagcgtgggagacagagtgaccatcacatgcaaggccagcgaccacatcaacaactggctggcctggtatcagcagaagcctggacaggcccctaagctgctgatctacggcgctaccacactggaaacaggcgtgcccagcagattttctggcagcggctctggcaccgactacaccctgacaatatccagcctccagcctgaggacttcgccacctactactgtcagcagagctggaacaccccttggacattcggccagggcaccaagctggaaatcaagagactcgagggaggctctgcccgcaccgaggaccgctacaagggcggaagcttcgaacaagttcagcttcaacagcctggcgctgagctggtcaaacctggcgcttctgtgaagatgagctgcaaagccagcggctacgccttcagcagctactggatcaactggatgaagcagaaacccggccagggactcgaatggatcggccaaatctatcccggcgacggcgacaccaactacaacggcaagttcaagggcagagccacactgaccgccgatacctctagcagcacagcctacatgcagctgagcagcctgaccagcgaagatagcgccgtgtacttctgtgcccggtccatcacaacagtcgtgggctgcgctatggactattggggccagggaacaagcgtgaccgtgtctagtacgcgtaccacgacgccagcgccgcgaccaccaacaccggcgcccaccatcgcgtcgcagcccctgtccctgcgcccagaggcgtgccggccagcggcggggggcgcagtgcacacgagggggctggacttcgcctgtgacatctacatctgggcgcccttggccgggacttgtggggtccttctcctgtcactggttatcaccctttactgcaaacggggcagaaagaaactcctgtatatattcaaacaaccatttatgagaccagtacaaactactcaagaggaagatggctgtagctgccgatttccagaagaagaagaaggaggatgtgaactgagagtgaagttcagcaggagcgcagacgcccccgcgtaccagcagggccagaaccagctctataacgagctgaatctaggacgaagagaggagtacgatgttttggacaagagacgtggccgggaccctgagatggggggaaagccgagaaggaagaaccctcaggaaggcctgtacaatgaactgcagaaagataagatggcggaggcctacagtgagattgggatgaaaggcgagcgccggaggggcaaggggcacgatggcctttaccagggtctcagtacagccaccaaggacacctacgacgcccttcacatgcaggccctgccccctcgctaa

SEQ ID NO: 7938 - DNA, 1482 bp, synthetic construct
  source 1..1482: mol_type = other DNA
atggccttaccagtgaccgccttgctcctgccgctggccttgctgctccacgccgccaggccggacatccagatgacacagagccctagcagcctgtctgccagcgtgggagacagagtgaccatcacatgcaaggccagcgaccacatcaacaactggctggcctggtatcagcagaagcctggacaggcccctaagctgctgatctacggcgctaccacactggaaacaggcgtgcccagcagattttctggcagcggctctggcaccgactacaccctgacaatatccagcctccagcctgaggacttcgccacctactactgtcagcagagctggaacaccccttggacattcggccagggcaccaagctggaaatcaagagactcgagggaggctctgccagcagcgaggaccgctacaagggcggaagcttcgaacaagttcagcttcaacagcctggcgctgagctggtcaaacctggcgcttctgtgaagatgagctgcaaagccagcggctacgccttcagcagctactggatcaactggatgaagcagaaacccggccagggactcgaatggatcggccaaatctatcccggcgacggcgacaccaactacaacggcaagttcaagggcagagccacactgaccgccgatacctctagcagcacagcctacatgcagctgagcagcctgaccagcgaagatagcgccgtgtacttctgtgcccggtccatcacaacagtcgtgggctgcgctatggactattggggccagggaacaagcgtgaccgtgtctagtacgcgtaccacgacgccagcgccgcgaccaccaacaccggcgcccaccatcgcgtcgcagcccctgtccctgcgcccagaggcgtgccggccagcggcggggggcgcagtgcacacgagggggctggacttcgcctgtgacatctacatctgggcgcccttggccgggacttgtggggtccttctcctgtcactggttatcaccctttactgcaaacggggcagaaagaaactcctgtatatattcaaacaaccatttatgagaccagtacaaactactcaagaggaagatggctgtagctgccgatttccagaagaagaagaaggaggatgtgaactgagagtgaagttcagcaggagcgcagacgcccccgcgtaccagcagggccagaaccagctctataacgagctgaatctaggacgaagagaggagtacgatgttttggacaagagacgtggccgggaccctgagatggggggaaagccgagaaggaagaaccctcaggaaggcctgtacaatgaactgcagaaagataagatggcggaggcctacagtgagattgggatgaaaggcgagcgccggaggggcaaggggcacgatggcctttaccagggtctcagtacagccaccaaggacacctacgacgcccttcacatgcaggccctgccccctcgctaa

SEQ ID NO: 7939 - DNA, 1482 bp, synthetic construct
  source 1..1482: mol_type = other DNA
atggccttaccagtgaccgccttgctcctgccgctggccttgctgctccacgccgccaggccggacatccagatgacacagagccctagcagcctgtctgccagcgtgggagacagagtgaccatcacatgcaaggccagcgaccacatcaacaactggctggcctggtatcagcagaagcctggacaggcccctaagctgctgatctacggcgctaccacactggaaacaggcgtgcccagcagattttctggcagcggctctggcaccgactacaccctgacaatatccagcctccagcctgaggacttcgccacctactactgtcagcagagctggaacaccccttggacattcggccagggcaccaagctggaaatcaagagactcgagggaggctctgcccacagcgaggaccgctacaagggcggaagcttcgaacaagttcagcttcaacagcctggcgctgagctggtcaaacctggcgcttctgtgaagatgagctgcaaagccagcggctacgccttcagcagctactggatcaactggatgaagcagaaacccggccagggactcgaatggatcggccaaatctatcccggcgacggcgacaccaactacaacggcaagttcaagggcagagccacactgaccgccgatacctctagcagcacagcctacatgcagctgagcagcctgaccagcgaagatagcgccgtgtacttctgtgcccggtccatcacaacagtcgtgggctgcgctatggactattggggccagggaacaagcgtgaccgtgtctagtacgcgtaccacgacgccagcgccgcgaccaccaacaccggcgcccaccatcgcgtcgcagcccctgtccctgcgcccagaggcgtgccggccagcggcggggggcgcagtgcacacgagggggctggacttcgcctgtgacatctacatctgggcgcccttggccgggacttgtggggtccttctcctgtcactggttatcaccctttactgcaaacggggcagaaagaaactcctgtatatattcaaacaaccatttatgagaccagtacaaactactcaagaggaagatggctgtagctgccgatttccagaagaagaagaaggaggatgtgaactgagagtgaagttcagcaggagcgcagacgcccccgcgtaccagcagggccagaaccagctctataacgagctgaatctaggacgaagagaggagtacgatgttttggacaagagacgtggccgggaccctgagatggggggaaagccgagaaggaagaaccctcaggaaggcctgtacaatgaactgcagaaagataagatggcggaggcctacagtgagattgggatgaaaggcgagcgccggaggggcaaggggcacgatggcctttaccagggtctcagtacagccaccaaggacacctacgacgcccttcacatgcaggccctgccccctcgctaa

SEQ ID NO: 7940 - DNA, 1482 bp, synthetic construct
  source 1..1482: mol_type = other DNA
atggccttaccagtgaccgccttgctcctgccgctggccttgctgctccacgccgccaggccggacatccagatgacacagagccctagcagcctgtctgccagcgtgggagacagagtgaccatcacatgcaaggccagcgaccacatcaacaactggctggcctggtatcagcagaagcctggacaggcccctaagctgctgatctacggcgctaccacactggaaacaggcgtgcccagcagattttctggcagcggctctggcaccgactacaccctgacaatatccagcctccagcctgaggacttcgccacctactactgtcagcagagctggaacaccccttggacattcggccagggcaccaagctggaaatcaagagactcgagggaggctctgccgacagcgaggaccgctacaagggcggaagcttcgaacaagttcagcttcaacagcctggcgctgagctggtcaaacctggcgcttctgtgaagatgagctgcaaagccagcggctacgccttcagcagctactggatcaactggatgaagcagaaacccggccagggactcgaatggatcggccaaatctatcccggcgacggcgacaccaactacaacggcaagttcaagggcagagccacactgaccgccgatacctctagcagcacagcctacatgcagctgagcagcctgaccagcgaagatagcgccgtgtacttctgtgcccggtccatcacaacagtcgtgggctgcgctatggactattggggccagggaacaagcgtgaccgtgtctagtacgcgtaccacgacgccagcgccgcgaccaccaacaccggcgcccaccatcgcgtcgcagcccctgtccctgcgcccagaggcgtgccggccagcggcggggggcgcagtgcacacgagggggctggacttcgcctgtgacatctacatctgggcgcccttggccgggacttgtggggtccttctcctgtcactggttatcaccctttactgcaaacggggcagaaagaaactcctgtatatattcaaacaaccatttatgagaccagtacaaactactcaagaggaagatggctgtagctgccgatttccagaagaagaagaaggaggatgtgaactgagagtgaagttcagcaggagcgcagacgcccccgcgtaccagcagggccagaaccagctctataacgagctgaatctaggacgaagagaggagtacgatgttttggacaagagacgtggccgggaccctgagatggggggaaagccgagaaggaagaaccctcaggaaggcctgtacaatgaactgcagaaagataagatggcggaggcctacagtgagattgggatgaaaggcgagcgccggaggggcaaggggcacgatggcctttaccagggtctcagtacagccaccaaggacacctacgacgcccttcacatgcaggccctgccccctcgctaa

SEQ ID NO: 7941 - DNA, 1482 bp, synthetic construct
  source 1..1482: mol_type = other DNA
atggccttaccagtgaccgccttgctcctgccgctggccttgctgctccacgccgccaggccggacatccagatgacacagagccctagcagcctgtctgccagcgtgggagacagagtgaccatcacatgcaaggccagcgaccacatcaacaactggctggcctggtatcagcagaagcctggacaggcccctaagctgctgatctacggcgctaccacactggaaacaggcgtgcccagcagattttctggcagcggctctggcaccgactacaccctgacaatatccagcctccagcctgaggacttcgccacctactactgtcagcagagctggaacaccccttggacattcggccagggcaccaagctggaaatcaagagactcgagggaggctctttcgacagcgaggaccgctacaagggcggaagcttcgaacaagttcagcttcaacagcctggcgctgagctggtcaaacctggcgcttctgtgaagatgagctgcaaagccagcggctacgccttcagcagctactggatcaactggatgaagcagaaacccggccagggactcgaatggatcggccaaatctatcccggcgacggcgacaccaactacaacggcaagttcaagggcagagccacactgaccgccgatacctctagcagcacagcctacatgcagctgagcagcctgaccagcgaagatagcgccgtgtacttctgtgcccggtccatcacaacagtcgtgggctgcgctatggactattggggccagggaacaagcgtgaccgtgtctagtacgcgtaccacgacgccagcgccgcgaccaccaacaccggcgcccaccatcgcgtcgcagcccctgtccctgcgcccagaggcgtgccggccagcggcggggggcgcagtgcacacgagggggctggacttcgcctgtgacatctacatctgggcgcccttggccgggacttgtggggtccttctcctgtcactggttatcaccctttactgcaaacggggcagaaagaaactcctgtatatattcaaacaaccatttatgagaccagtacaaactactcaagaggaagatggctgtagctgccgatttccagaagaagaagaaggaggatgtgaactgagagtgaagttcagcaggagcgcagacgcccccgcgtaccagcagggccagaaccagctctataacgagctgaatctaggacgaagagaggagtacgatgttttggacaagagacgtggccgggaccctgagatggggggaaagccgagaaggaagaaccctcaggaaggcctgtacaatgaactgcagaaagataagatggcggaggcctacagtgagattgggatgaaaggcgagcgccggaggggcaaggggcacgatggcctttaccagggtctcagtacagccaccaaggacacctacgacgcccttcacatgcaggccctgccccctcgctaa

SEQ ID NO: 7942 - DNA, 1482 bp, synthetic construct; identical to SEQ ID NO: 7892
  source 1..1482: mol_type = other DNA

SEQ ID NO: 7943 - DNA, 1482 bp, synthetic construct
  source 1..1482: mol_type = other DNA
atggccttaccagtgaccgccttgctcctgccgctggccttgctgctccacgccgccaggccggacatccagatgacacagagccctagcagcctgtctgccagcgtgggagacagagtgaccatcacatgcaaggccagcgaccacatcaacaactggctggcctggtatcagcagaagcctggacaggcccctaagctgctgatctacggcgctaccacactggaaacaggcgtgcccagcagattttctggcagcggctctggcaccgactacaccctgacaatatccagcctccagcctgaggacttcgccacctactactgtcagcagagctggaacaccccttggacattcggccagggcaccaagctggaaatcaagagactcgagggaggctctgcccccagcgaggaccgctaccgcggcggaagcttcgaacaagttcagcttcaacagcctggcgctgagctggtcaaacctggcgcttctgtgaagatgagctgcaaagccagcggctacgccttcagcagctactggatcaactggatgaagcagaaacccggccagggactcgaatggatcggccaaatctatcccggcgacggcgacaccaactacaacggcaagttcaagggcagagccacactgaccgccgatacctctagcagcacagcctacatgcagctgagcagcctgaccagcgaagatagcgccgtgtacttctgtgcccggtccatcacaacagtcgtgggctgcgctatggactattggggccagggaacaagcgtgaccgtgtctagtacgcgtaccacgacgccagcgccgcgaccaccaacaccggcgcccaccatcgcgtcgcagcccctgtccctgcgcccagaggcgtgccggccagcggcggggggcgcagtgcacacgagggggctggacttcgcctgtgacatctacatctgggcgcccttggccgggacttgtggggtccttctcctgtcactggttatcaccctttactgcaaacggggcagaaagaaactcctgtatatattcaaacaaccatttatgagaccagtacaaactactcaagaggaagatggctgtagctgccgatttccagaagaagaagaaggaggatgtgaactgagagtgaagttcagcaggagcgcagacgcccccgcgtaccagcagggccagaaccagctctataacgagctgaatctaggacgaagagaggagtacgatgttttggacaagagacgtggccgggaccctgagatggggggaaagccgagaaggaagaaccctcaggaaggcctgtacaatgaactgcagaaagataagatggcggaggcctacagtgagattgggatgaaaggcgagcgccggaggggcaaggggcacgatggcctttaccagggtctcagtacagccaccaaggacacctacgacgcccttcacatgcaggccctgccccctcgctaa

SEQ ID NO: 7944 - DNA, 1482 bp, synthetic construct
  source 1..1482: mol_type = other DNA
atggccttaccagtgaccgccttgctcctgccgctggccttgctgctccacgccgccaggccggacatccagatgacacagagccctagcagcctgtctgccagcgtgggagacagagtgaccatcacatgcaaggccagcgaccacatcaacaactggctggcctggtatcagcagaagcctggacaggcccctaagctgctgatctacggcgctaccacactggaaacaggcgtgcccagcagattttctggcagcggctctggcaccgactacaccctgacaatatccagcctccagcctgaggacttcgccacctactactgtcagcagagctggaacaccccttggacattcggccagggcaccaagctggaaatcaagagactcgagggaggctctgccggcagcgaggaccgctaccgcggcggaagcttcgaacaagttcagcttcaacagcctggcgctgagctggtcaaacctggcgcttctgtgaagatgagctgcaaagccagcggctacgccttcagcagctactggatcaactggatgaagcagaaacccggccagggactcgaatggatcggccaaatctatcccggcgacggcgacaccaactacaacggcaagttcaagggcagagccacactgaccgccgatacctctagcagcacagcctacatgcagctgagcagcctgaccagcgaagatagcgccgtgtacttctgtgcccggtccatcacaacagtcgtgggctgcgctatggactattggggccagggaacaagcgtgaccgtgtctagtacgcgtaccacgacgccagcgccgcgaccaccaacaccggcgcccaccatcgcgtcgcagcccctgtccctgcgcccagaggcgtgccggccagcggcggggggcgcagtgcacacgagggggctggacttcgcctgtgacatctacatctgggcgcccttggccgggacttgtggggtccttctcctgtcactggttatcaccctttactgcaaacggggcagaaagaaactcctgtatatattcaaacaaccatttatgagaccagtacaaactactcaagaggaagatggctgtagctgccgatttccagaagaagaagaaggaggatgtgaactgagagtgaagttcagcaggagcgcagacgcccccgcgtaccagcagggccagaaccagctctataacgagctgaatctaggacgaagagaggagtacgatgttttggacaagagacgtggccgggaccctgagatggggggaaagccgagaaggaagaaccctcaggaaggcctgtacaatgaactgcagaaagataagatggcggaggcctacagtgagattgggatgaaaggcgagcgccggaggggcaaggggcacgatggcctttaccagggtctcagtacagccaccaaggacacctacgacgcccttcacatgcaggccctgccccctcgctaa

SEQ ID NO: 7945 - DNA, 1482 bp, synthetic construct
  source 1..1482: mol_type = other DNA
atggccttaccagtgaccgccttgctcctgccgctggccttgctgctccacgccgccaggccggacatccagatgacacagagccctagcagcctgtctgccagcgtgggagacagagtgaccatcacatgcaaggccagcgaccacatcaacaactggctggcctggtatcagcagaagcctggacaggcccctaagctgctgatctacggcgctaccacactggaaacaggcgtgcccagcagattttctggcagcggctctggcaccgactacaccctgacaatatccagcctccagcctgaggacttcgccacctactactgtcagcagagctggaacaccccttggacattcggccagggcaccaagctggaaatcaagagactcgagggaggctctgcccgcagcaaggaccgctaccgcggcggaagcttcgaacaagttcagcttcaacagcctggcgctgagctggtcaaacctggcgcttctgtgaagatgagctgcaaagccagcggctacgccttcagcagctactggatcaactggatgaagcagaaacccggccagggactcgaatggatcggccaaatctatcccggcgacggcgacaccaactacaacggcaagttcaagggcagagccacactgaccgccgatacctctagcagcacagcctacatgcagctgagcagcctgaccagcgaagatagcgccgtgtacttctgtgcccggtccatcacaacagtcgtgggctgcgctatggactattggggccagggaacaagcgtgaccgtgtctagtacgcgtaccacgacgccagcgccgcgaccaccaacaccggcgcccaccatcgcgtcgcagcccctgtccctgcgcccagaggcgtgccggccagcggcggggggcgcagtgcacacgagggggctggacttcgcctgtgacatctacatctgggcgcccttggccgggacttgtggggtccttctcctgtcactggttatcaccctttactgcaaacggggcagaaagaaactcctgtatatattcaaacaaccatttatgagaccagtacaaactactcaagaggaagatggctgtagctgccgatttccagaagaagaagaaggaggatgtgaactgagagtgaagttcagcaggagcgcagacgcccccgcgtaccagcagggccagaaccagctctataacgagctgaatctaggacgaagagaggagtacgatgttttggacaagagacgtggccgggaccctgagatggggggaaagccgagaaggaagaaccctcaggaaggcctgtacaatgaactgcagaaagataagatggcggaggcctacagtgagattgggatgaaaggcgagcgccggaggggcaaggggcacgatggcctttaccagggtctcagtacagccaccaaggacacctacgacgcccttcacatgcaggccctgccccctcgctaa

SEQ ID NO: 7946 - DNA, 1482 bp, synthetic construct
  source 1..1482: mol_type = other DNA
atggccttaccagtgaccgccttgctcctgccgctggccttgctgctccacgccgccaggccggacatccagatgacacagagccctagcagcctgtctgccagcgtgggagacagagtgaccatcacatgcaaggccagcgaccacatcaacaactggctggcctggtatcagcagaagcctggacaggcccctaagctgctgatctacggcgctaccacactggaaacaggcgtgcccagcagattttctggcagcggctctggcaccgactacaccctgacaatatccagcctccagcctgaggacttcgccacctactactgtcagcagagctggaacaccccttggacattcggccagggcaccaagctggaaatcaagagactcgagggaggctctgcccgcagccgcgaccgctaccgcggcggaagcttcgaacaagttcagcttcaacagcctggcgctgagctggtcaaacctggcgcttctgtgaagatgagctgcaaagccagcggctacgccttcagcagctactggatcaactggatgaagcagaaacccggccagggactcgaatggatcggccaaatctatcccggcgacggcgacaccaactacaacggcaagttcaagggcagagccacactgaccgccgatacctctagcagcacagcctacatgcagctgagcagcctgaccagcgaagatagcgccgtgtacttctgtgcccggtccatcacaacagtcgtgggctgcgctatggactattggggccagggaacaagcgtgaccgtgtctagtacgcgtaccacgacgccagcgccgcgaccaccaacaccggcgcccaccatcgcgtcgcagcccctgtccctgcgcccagaggcgtgccggccagcggcggggggcgcagtgcacacgagggggctggacttcgcctgtgacatctacatctgggcgcccttggccgggacttgtggggtccttctcctgtcactggttatcaccctttactgcaaacggggcagaaagaaactcctgtatatattcaaacaaccatttatgagaccagtacaaactactcaagaggaagatggctgtagctgccgatttccagaagaagaagaaggaggatgtgaactgagagtgaagttcagcaggagcgcagacgcccccgcgtaccagcagggccagaaccagctctataacgagctgaatctaggacgaagagaggagtacgatgttttggacaagagacgtggccgggaccctgagatggggggaaagccgagaaggaagaaccctcaggaaggcctgtacaatgaactgcagaaagataagatggcggaggcctacagtgagattgggatgaaaggcgagcgccggaggggcaaggggcacgatggcctttaccagggtctcagtacagccaccaaggacacctacgacgcccttcacatgcaggccctgccccctcgctaa

SEQ ID NO: 7947 - DNA, 1482 bp, synthetic construct
  source 1..1482: mol_type = other DNA
atggccttaccagtgaccgccttgctcctgccgctggccttgctgctccacgccgccaggccggacatccagatgacacagagccctagcagcctgtctgccagcgtgggagacagagtgaccatcacatgcaaggccagcgaccacatcaacaactggctggcctggtatcagcagaagcctggacaggcccctaagctgctgatctacggcgctaccacactggaaacaggcgtgcccagcagattttctggcagcggctctggcaccgactacaccctgacaatatccagcctccagcctgaggacttcgccacctactactgtcagcagagctggaacaccccttggacattcggccagggcaccaagctggaaatcaagagactcgagggaggctctgcccgcagcctggaccgctaccgcggcggaagcttcgaacaagttcagcttcaacagcctggcgctgagctggtcaaacctggcgcttctgtgaagatgagctgcaaagccagcggctacgccttcagcagctactggatcaactggatgaagcagaaacccggccagggactcgaatggatcggccaaatctatcccggcgacggcgacaccaactacaacggcaagttcaagggcagagccacactgaccgccgatacctctagcagcacagcctacatgcagctgagcagcctgaccagcgaagatagcgccgtgtacttctgtgcccggtccatcacaacagtcgtgggctgcgctatggactattggggccagggaacaagcgtgaccgtgtctagtacgcgtaccacgacgccagcgccgcgaccaccaacaccggcgcccaccatcgcgtcgcagcccctgtccctgcgcccagaggcgtgccggccagcggcggggggcgcagtgcacacgagggggctggacttcgcctgtgacatctacatctgggcgcccttggccgggacttgtggggtccttctcctgtcactggttatcaccctttactgcaaacggggcagaaagaaactcctgtatatattcaaacaaccatttatgagaccagtacaaactactcaagaggaagatggctgtagctgccgatttccagaagaagaagaaggaggatgtgaactgagagtgaagttcagcaggagcgcagacgcccccgcgtaccagcagggccagaaccagctctataacgagctgaatctaggacgaagagaggagtacgatgttttggacaagagacgtggccgggaccctgagatggggggaaagccgagaaggaagaaccctcaggaaggcctgtacaatgaactgcagaaagataagatggcggaggcctacagtgagattgggatgaaaggcgagcgccggaggggcaaggggcacgatggcctttaccagggtctcagtacagccaccaaggacacctacgacgcccttcacatgcaggccctgccccctcgctaa

SEQ ID NO: 7948 - DNA, 1482 bp, synthetic construct
  source 1..1482: mol_type = other DNA
atggccttaccagtgaccgccttgctcctgccgctggccttgctgctccacgccgccaggccggacatccagatgacacagagccctagcagcctgtctgccagcgtgggagacagagtgaccatcacatgcaaggccagcgaccacatcaacaactggctggcctggtatcagcagaagcctggacaggcccctaagctgctgatctacggcgctaccacactggaaacaggcgtgcccagcagattttctggcagcggctctggcaccgactacaccctgacaatatccagcctccagcctgaggacttcgccacctactactgtcagcagagctggaacaccccttggacattcggccagggcaccaagctggaaatcaagagactcgagggaggctctgcccgcagccccgaccgctaccgcggcggaagcttcgaacaagttcagcttcaacagcctggcgctgagctggtcaaacctggcgcttctgtgaagatgagctgcaaagccagcggctacgccttcagcagctactggatcaactggatgaagcagaaacccggccagggactcgaatggatcggccaaatctatcccggcgacggcgacaccaactacaacggcaagttcaagggcagagccacactgaccgccgatacctctagcagcacagcctacatgcagctgagcagcctgaccagcgaagatagcgccgtgtacttctgtgcccggtccatcacaacagtcgtgggctgcgctatggactattggggccagggaacaagcgtgaccgtgtctagtacgcgtaccacgacgccagcgccgcgaccaccaacaccggcgcccaccatcgcgtcgcagcccctgtccctgcgcccagaggcgtgccggccagcggcggggggcgcagtgcacacgagggggctggacttcgcctgtgacatctacatctgggcgcccttggccgggacttgtggggtccttctcctgtcactggttatcaccctttactgcaaacggggcagaaagaaactcctgtatatattcaaacaaccatttatgagaccagtacaaactactcaagaggaagatggctgtagctgccgatttccagaagaagaagaaggaggatgtgaactgagagtgaagttcagcaggagcgcagacgcccccgcgtaccagcagggccagaaccagctctataacgagctgaatctaggacgaagagaggagtacgatgttttggacaagagacgtggccgggaccctgagatggggggaaagccgagaaggaagaaccctcaggaaggcctgtacaatgaactgcagaaagataagatggcggaggcctacagtgagattgggatgaaaggcgagcgccggaggggcaaggggcacgatggcctttaccagggtctcagtacagccaccaaggacacctacgacgcccttcacatgcaggccctgccccctcgctaa

SEQ ID NO: 7949 - DNA, 1482 bp, synthetic construct
  source 1..1482: mol_type = other DNA
atggccttaccagtgaccgccttgctcctgccgctggccttgctgctccacgccgccaggccggacatccagatgacacagagccctagcagcctgtctgccagcgtgggagacagagtgaccatcacatgcaaggccagcgaccacatcaacaactggctggcctggtatcagcagaagcctggacaggcccctaagctgctgatctacggcgctaccacactggaaacaggcgtgcccagcagattttctggcagcggctctggcaccgactacaccctgacaatatccagcctccagcctgaggacttcgccacctactactgtcagcagagctggaacaccccttggacattcggccagggcaccaagctggaaatcaagagactcgagggaggctctgcccgccgcgaggaccgctaccgcggcggaagcttcgaacaagttcagcttcaacagcctggcgctgagctggtcaaacctggcgcttctgtgaagatgagctgcaaagccagcggctacgccttcagcagctactggatcaactggatgaagcagaaacccggccagggactcgaatggatcggccaaatctatcccggcgacggcgacaccaactacaacggcaagttcaagggcagagccacactgaccgccgatacctctagcagcacagcctacatgcagctgagcagcctgaccagcgaagatagcgccgtgtacttctgtgcccggtccatcacaacagtcgtgggctgcgctatggactattggggccagggaacaagcgtgaccgtgtctagtacgcgtaccacgacgccagcgccgcgaccaccaacaccggcgcccaccatcgcgtcgcagcccctgtccctgcgcccagaggcgtgccggccagcggcggggggcgcagtgcacacgagggggctggacttcgcctgtgacatctacatctgggcgcccttggccgggacttgtggggtccttctcctgtcactggttatcaccctttactgcaaacggggcagaaagaaactcctgtatatattcaaacaaccatttatgagaccagtacaaactactcaagaggaagatggctgtagctgccgatttccagaagaagaagaaggaggatgtgaactgagagtgaagttcagcaggagcgcagacgcccccgcgtaccagcagggccagaaccagctctataacgagctgaatctaggacgaagagaggagtacgatgttttggacaagagacgtggccgggaccctgagatggggggaaagccgagaaggaagaaccctcaggaaggcctgtacaatgaactgcagaaagataagatggcggaggcctacagtgagattgggatgaaaggcgagcgccggaggggcaaggggcacgatggcctttaccagggtctcagtacagccaccaaggacacctacgacgcccttcacatgcaggccctgccccctcgctaa

SEQ ID NO: 7950 - DNA, 1482 bp, synthetic construct
  source 1..1482: mol_type = other DNA
atggccttaccagtgaccgccttgctcctgccgctggccttgctgctccacgccgccaggccggacatccagatgacacagagccctagcagcctgtctgccagcgtgggagacagagtgaccatcacatgcaaggccagcgaccacatcaacaactggctggcctggtatcagcagaagcctggacaggcccctaagctgctgatctacggcgctaccacactggaaacaggcgtgcccagcagattttctggcagcggctctggcaccgactacaccctgacaatatccagcctccagcctgaggacttcgccacctactactgtcagcagagctggaacaccccttggacattcggccagggcaccaagctggaaatcaagagactcgagggaggctctgcccgccaggaggaccgctaccgcggcggaagcttcgaacaagttcagcttcaacagcctggcgctgagctggtcaaacctggcgcttctgtgaagatgagctgcaaagccagcggctacgccttcagcagctactggatcaactggatgaagcagaaacccggccagggactcgaatggatcggccaaatctatcccggcgacggcgacaccaactacaacggcaagttcaagggcagagccacactgaccgccgatacctctagcagcacagcctacatgcagctgagcagcctgaccagcgaagatagcgccgtgtacttctgtgcccggtccatcacaacagtcgtgggctgcgctatggactattggggccagggaacaagcgtgaccgtgtctagtacgcgtaccacgacgccagcgccgcgaccaccaacaccggcgcccaccatcgcgtcgcagcccctgtccctgcgcccagaggcgtgccggccagcggcggggggcgcagtgcacacgagggggctggacttcgcctgtgacatctacatctgggcgcccttggccgggacttgtggggtccttctcctgtcactggttatcaccctttactgcaaacggggcagaaagaaactcctgtatatattcaaacaaccatttatgagaccagtacaaactactcaagaggaagatggctgtagctgccgatttccagaagaagaagaaggaggatgtgaactgagagtgaagttcagcaggagcgcagacgcccccgcgtaccagcagggccagaaccagctctataacgagctgaatctaggacgaagagaggagtacgatgttttggacaagagacgtggccgggaccctgagatggggggaaagccgagaaggaagaaccctcaggaaggcctgtacaatgaactgcagaaagataagatggcggaggcctacagtgagattgggatgaaaggcgagcgccggaggggcaaggggcacgatggcctttaccagggtctcagtacagccaccaaggacacctacgacgcccttcacatgcaggccctgccccctcgctaa

SEQ ID NO: 7951 - DNA, 1476 bp, synthetic construct
  source 1..1476: mol_type = other DNA
atggccttaccagtgaccgccttgctcctgccgctggccttgctgctccacgccgccaggccggacatccagatgacacagagccctagcagcctgtctgccagcgtgggagacagagtgaccatcacatgcaaggccagcgaccacatcaacaactggctggcctggtatcagcagaagcctggacaggcccctaagctgctgatctacggcgctaccacactggaaacaggcgtgcccagcagattttctggcagcggctctggcaccgactacaccctgacaatatccagcctccagcctgaggacttcgccacctactactgtcagcagagctggaacaccccttggacattcggccagggcaccaagctggaaatcaagagactcgagggaggctctcgcagcgaggaccgctacggcggaagcttcgaacaagttcagcttcaacagcctggcgctgagctggtcaaacctggcgcttctgtgaagatgagctgcaaagccagcggctacgccttcagcagctactggatcaactggatgaagcagaaacccggccagggactcgaatggatcggccaaatctatcccggcgacggcgacaccaactacaacggcaagttcaagggcagagccacactgaccgccgatacctctagcagcacagcctacatgcagctgagcagcctgaccagcgaagatagcgccgtgtacttctgtgcccggtccatcacaacagtcgtgggctgcgctatggactattggggccagggaacaagcgtgaccgtgtctagtacgcgtaccacgacgccagcgccgcgaccaccaacaccggcgcccaccatcgcgtcgcagcccctgtccctgcgcccagaggcgtgccggccagcggcggggggcgcagtgcacacgagggggctggacttcgcctgtgacatctacatctgggcgcccttggccgggacttgtggggtccttctcctgtcactggttatcaccctttactgcaaacggggcagaaagaaactcctgtatatattcaaacaaccatttatgagaccagtacaaactactcaagaggaagatggctgtagctgccgatttccagaagaagaagaaggaggatgtgaactgagagtgaagttcagcaggagcgcagacgcccccgcgtaccagcagggccagaaccagctctataacgagctgaatctaggacgaagagaggagtacgatgttttggacaagagacgtggccgggaccctgagatggggggaaagccgagaaggaagaaccctcaggaaggcctgtacaatgaactgcagaaagataagatggcggaggcctacagtgagattgggatgaaaggcgagcgccggaggggcaaggggcacgatggcctttaccagggtctcagtacagccaccaaggacacctacgacgcccttcacatgcaggccctgccccctcgctaa

SEQ ID NO: 7952 - DNA, 1476 bp, synthetic construct
  source 1..1476: mol_type = other DNA
atggccttaccagtgaccgccttgctcctgccgctggccttgctgctccacgccgccaggccggacatccagatgacacagagccctagcagcctgtctgccagcgtgggagacagagtgaccatcacatgcaaggccagcgaccacatcaacaactggctggcctggtatcagcagaagcctggacaggcccctaagctgctgatctacggcgctaccacactggaaacaggcgtgcccagcagattttctggcagcggctctggcaccgactacaccctgacaatatccagcctccagcctgaggacttcgccacctactactgtcagcagagctggaacaccccttggacattcggccagggcaccaagctggaaatcaagagactcgagggaggctctcgcagcgaggaccgcttcggcggaagcttcgaacaagttcagcttcaacagcctggcgctgagctggtcaaacctggcgcttctgtgaagatgagctgcaaagccagcggctacgccttcagcagctactggatcaactggatgaagcagaaacccggccagggactcgaatggatcggccaaatctatcccggcgacggcgacaccaactacaacggcaagttcaagggcagagccacactgaccgccgatacctctagcagcacagcctacatgcagctgagcagcctgaccagcgaagatagcgccgtgtacttctgtgcccggtccatcacaacagtcgtgggctgcgctatggactattggggccagggaacaagcgtgaccgtgtctagtacgcgtaccacgacgccagcgccgcgaccaccaacaccggcgcccaccatcgcgtcgcagcccctgtccctgcgcccagaggcgtgccggccagcggcggggggcgcagtgcacacgagggggctggacttcgcctgtgacatctacatctgggcgcccttggccgggacttgtggggtccttctcctgtcactggttatcaccctttactgcaaacggggcagaaagaaactcctgtatatattcaaacaaccatttatgagaccagtacaaactactcaagaggaagatggctgtagctgccgatttccagaagaagaagaaggaggatgtgaactgagagtgaagttcagcaggagcgcagacgcccccgcgtaccagcagggccagaaccagctctataacgagctgaatctaggacgaagagaggagtacgatgttttggacaagagacgtggccgggaccctgagatggggggaaagccgagaaggaagaaccctcaggaaggcctgtacaatgaactgcagaaagataagatggcggaggcctacagtgagattgggatgaaaggcgagcgccggaggggcaaggggcacgatggcctttaccagggtctcagtacagccaccaaggacacctacgacgcccttcacatgcaggccctgccccctcgctaa

SEQ ID NO: 7953 - DNA, 1476 bp, synthetic construct
  source 1..1476: mol_type = other DNA
atggccttaccagtgaccgccttgctcctgccgctggccttgctgctccacgccgccaggccggacatccagatgacacagagccctagcagcctgtctgccagcgtgggagacagagtgaccatcacatgcaaggccagcgaccacatcaacaactggctggcctggtatcagcagaagcctggacaggcccctaagctgctgatctacggcgctaccacactggaaacaggcgtgcccagcagattttctggcagcggctctggcaccgactacaccctgacaatatccagcctccagcctgaggacttcgccacctactactgtcagcagagctggaacaccccttggacattcggccagggcaccaagctggaaatcaagagactcgagggaggctctcgcagcgaggaccgccacggcggaagcttcgaacaagttcagcttcaacagcctggcgctgagctggtcaaacctggcgcttctgtgaagatgagctgcaaagccagcggctacgccttcagcagctactggatcaactggatgaagcagaaacccggccagggactcgaatggatcggccaaatctatcccggcgacggcgacaccaactacaacggcaagttcaagggcagagccacactgaccgccgatacctctagcagcacagcctacatgcagctgagcagcctgaccagcgaagatagcgccgtgtacttctgtgcccggtccatcacaacagtcgtgggctgcgctatggactattggggccagggaacaagcgtgaccgtgtctagtacgcgtaccacgacgccagcgccgcgaccaccaacaccggcgcccaccatcgcgtcgcagcccctgtccctgcgcccagaggcgtgccggccagcggcggggggcgcagtgcacacgagggggctggacttcgcctgtgacatctacatctgggcgcccttggccgggacttgtggggtccttctcctgtcactggttatcaccctttactgcaaacggggcagaaagaaactcctgtatatattcaaacaaccatttatgagaccagtacaaactactcaagaggaagatggctgtagctgccgatttccagaagaagaagaaggaggatgtgaactgagagtgaagttcagcaggagcgcagacgcccccgcgtaccagcagggccagaaccagctctataacgagctgaatctaggacgaagagaggagtacgatgttttggacaagagacgtggccgggaccctgagatggggggaaagccgagaaggaagaaccctcaggaaggcctgtacaatgaactgcagaaagataagatggcggaggcctacagtgagattgggatgaaaggcgagcgccggaggggcaaggggcacgatggcctttaccagggtctcagtacagccaccaaggacacctacgacgcccttcacatgcaggccctgccccctcgctaa

SEQ ID NO: 7954 - DNA, 1476 bp, synthetic construct; identical to SEQ ID NO: 7719
  source 1..1476: mol_type = other DNA

SEQ ID NO: 7955 - DNA, 1476 bp, synthetic construct; identical to SEQ ID NO: 7722
  source 1..1476: mol_type = other DNA

SEQ ID NO: 7956 - DNA, 1476 bp, synthetic construct; identical to SEQ ID NO: 7723
  source 1..1476: mol_type = other DNA

SEQ ID NO: 7957 - DNA, 1476 bp, synthetic construct
  source 1..1476: mol_type = other DNA
atggccttaccagtgaccgccttgctcctgccgctggccttgctgctccacgccgccaggccggacatccagatgacacagagccctagcagcctgtctgccagcgtgggagacagagtgaccatcacatgcaaggccagcgaccacatcaacaactggctggcctggtatcagcagaagcctggacaggcccctaagctgctgatctacggcgctaccacactggaaacaggcgtgcccagcagattttctggcagcggctctggcaccgactacaccctgacaatatccagcctccagcctgaggacttcgccacctactactgtcagcagagctggaacaccccttggacattcggccagggcaccaagctggaaatcaagagactcgagggaggctctcgcagcgagtggcgctacggcggaagcttcgaacaagttcagcttcaacagcctggcgctgagctggtcaaacctggcgcttctgtgaagatgagctgcaaagccagcggctacgccttcagcagctactggatcaactggatgaagcagaaacccggccagggactcgaatggatcggccaaatctatcccggcgacggcgacaccaactacaacggcaagttcaagggcagagccacactgaccgccgatacctctagcagcacagcctacatgcagctgagcagcctgaccagcgaagatagcgccgtgtacttctgtgcccggtccatcacaacagtcgtgggctgcgctatggactattggggccagggaacaagcgtgaccgtgtctagtacgcgtaccacgacgccagcgccgcgaccaccaacaccggcgcccaccatcgcgtcgcagcccctgtccctgcgcccagaggcgtgccggccagcggcggggggcgcagtgcacacgagggggctggacttcgcctgtgacatctacatctgggcgcccttggccgggacttgtggggtccttctcctgtcactggttatcaccctttactgcaaacggggcagaaagaaactcctgtatatattcaaacaaccatttatgagaccagtacaaactactcaagaggaagatggctgtagctgccgatttccagaagaagaagaaggaggatgtgaactgagagtgaagttcagcaggagcgcagacgcccccgcgtaccagcagggccagaaccagctctataacgagctgaatctaggacgaagagaggagtacgatgttttggacaagagacgtggccgggaccctgagatggggggaaagccgagaaggaagaaccctcaggaaggcctgtacaatgaactgcagaaagataagatggcggaggcctacagtgagattgggatgaaaggcgagcgccggaggggcaaggggcacgatggcctttaccagggtctcagtacagccaccaaggacacctacgacgcccttcacatgcaggccctgccccctcgctaa

SEQ ID NO: 7958 - DNA, 1476 bp, synthetic construct
  source 1..1476: mol_type = other DNA
atggccttaccagtgaccgccttgctcctgccgctggccttgctgctccacgccgccaggccggacatccagatgacacagagccctagcagcctgtctgccagcgtgggagacagagtgaccatcacatgcaaggccagcgaccacatcaacaactggctggcctggtatcagcagaagcctggacaggcccctaagctgctgatctacggcgctaccacactggaaacaggcgtgcccagcagattttctggcagcggctctggcaccgactacaccctgacaatatccagcctccagcctgaggacttcgccacctactactgtcagcagagctggaacaccccttggacattcggccagggcaccaagctggaaatcaagagactcgagggaggctctcgcagcgagtaccgctacggcggaagcttcgaacaagttcagcttcaacagcctggcgctgagctggtcaaacctggcgcttctgtgaagatgagctgcaaagccagcggctacgccttcagcagctactggatcaactggatgaagcagaaacccggccagggactcgaatggatcggccaaatctatcccggcgacggcgacaccaactacaacggcaagttcaagggcagagccacactgaccgccgatacctctagcagcacagcctacatgcagctgagcagcctgaccagcgaagatagcgccgtgtacttctgtgcccggtccatcacaacagtcgtgggctgcgctatggactattggggccagggaacaagcgtgaccgtgtctagtacgcgtaccacgacgccagcgccgcgaccaccaacaccggcgcccaccatcgcgtcgcagcccctgtccctgcgcccagaggcgtgccggccagcggcggggggcgcagtgcacacgagggggctggacttcgcctgtgacatctacatctgggcgcccttggccgggacttgtggggtccttctcctgtcactggttatcaccctttactgcaaacggggcagaaagaaactcctgtatatattcaaacaaccatttatgagaccagtacaaactactcaagaggaagatggctgtagctgccgatttccagaagaagaagaaggaggatgtgaactgagagtgaagttcagcaggagcgcagacgcccccgcgtaccagcagggccagaaccagctctataacgagctgaatctaggacgaagagaggagtacgatgttttggacaagagacgtggccgggaccctgagatggggggaaagccgagaaggaagaaccctcaggaaggcctgtacaatgaactgcagaaagataagatggcggaggcctacagtgagattgggatgaaaggcgagcgccggaggggcaaggggcacgatggcctttaccagggtctcagtacagccaccaaggacacctacgacgcccttcacatgcaggccctgccccctcgctaa

SEQ ID NO: 7959 - DNA, 1476 bp, synthetic construct
  source 1..1476: mol_type = other DNA
atggccttaccagtgaccgccttgctcctgccgctggccttgctgctccacgccgccaggccggacatccagatgacacagagccctagcagcctgtctgccagcgtgggagacagagtgaccatcacatgcaaggccagcgaccacatcaacaactggctggcctggtatcagcagaagcctggacaggcccctaagctgctgatctacggcgctaccacactggaaacaggcgtgcccagcagattttctggcagcggctctggcaccgactacaccctgacaatatccagcctccagcctgaggacttcgccacctactactgtcagcagagctggaacaccccttggacattcggccagggcaccaagctggaaatcaagagactcgagggaggctctcgcagcgagcgccgctacggcggaagcttcgaacaagttcagcttcaacagcctggcgctgagctggtcaaacctggcgcttctgtgaagatgagctgcaaagccagcggctacgccttcagcagctactggatcaactggatgaagcagaaacccggccagggactcgaatggatcggccaaatctatcccggcgacggcgacaccaactacaacggcaagttcaagggcagagccacactgaccgccgatacctctagcagcacagcctacatgcagctgagcagcctgaccagcgaagatagcgccgtgtacttctgtgcccggtccatcacaacagtcgtgggctgcgctatggactattggggccagggaacaagcgtgaccgtgtctagtacgcgtaccacgacgccagcgccgcgaccaccaacaccggcgcccaccatcgcgtcgcagcccctgtccctgcgcccagaggcgtgccggccagcggcggggggcgcagtgcacacgagggggctggacttcgcctgtgacatctacatctgggcgcccttggccgggacttgtggggtccttctcctgtcactggttatcaccctttactgcaaacggggcagaaagaaactcctgtatatattcaaacaaccatttatgagaccagtacaaactactcaagaggaagatggctgtagctgccgatttccagaagaagaagaaggaggatgtgaactgagagtgaagttcagcaggagcgcagacgcccccgcgtaccagcagggccagaaccagctctataacgagctgaatctaggacgaagagaggagtacgatgttttggacaagagacgtggccgggaccctgagatggggggaaagccgagaaggaagaaccctcaggaaggcctgtacaatgaactgcagaaagataagatggcggaggcctacagtgagattgggatgaaaggcgagcgccggaggggcaaggggcacgatggcctttaccagggtctcagtacagccaccaaggacacctacgacgcccttcacatgcaggccctgccccctcgctaa

SEQ ID NO: 7960 - DNA, 1476 bp, synthetic construct
  source 1..1476: mol_type = other DNA
atggccttaccagtgaccgccttgctcctgccgctggccttgctgctccacgccgccaggccggacatccagatgacacagagccctagcagcctgtctgccagcgtgggagacagagtgaccatcacatgcaaggccagcgaccacatcaacaactggctggcctggtatcagcagaagcctggacaggcccctaagctgctgatctacggcgctaccacactggaaacaggcgtgcccagcagattttctggcagcggctctggcaccgactacaccctgacaatatccagcctccagcctgaggacttcgccacctactactgtcagcagagctggaacaccccttggacattcggccagggcaccaagctggaaatcaagagactcgagggaggctctcgcagcgaggtgcgctacggcggaagcttcgaacaagttcagcttcaacagcctggcgctgagctggtcaaacctggcgcttctgtgaagatgagctgcaaagccagcggctacgccttcagcagctactggatcaactggatgaagcagaaacccggccagggactcgaatggatcggccaaatctatcccggcgacggcgacaccaactacaacggcaagttcaagggcagagccacactgaccgccgatacctctagcagcacagcctacatgcagctgagcagcctgaccagcgaagatagcgccgtgtacttctgtgcccggtccatcacaacagtcgtgggctgcgctatggactattggggccagggaacaagcgtgaccgtgtctagtacgcgtaccacgacgccagcgccgcgaccaccaacaccggcgcccaccatcgcgtcgcagcccctgtccctgcgcccagaggcgtgccggccagcggcggggggcgcagtgcacacgagggggctggacttcgcctgtgacatctacatctgggcgcccttggccgggacttgtggggtccttctcctgtcactggttatcaccctttactgcaaacggggcagaaagaaactcctgtatatattcaaacaaccatttatgagaccagtacaaactactcaagaggaagatggctgtagctgccgatttccagaagaagaagaaggaggatgtgaactgagagtgaagttcagcaggagcgcagacgcccccgcgtaccagcagggccagaaccagctctataacgagctgaatctaggacgaagagaggagtacgatgttttggacaagagacgtggccgggaccctgagatggggggaaagccgagaaggaagaaccctcaggaaggcctgtacaatgaactgcagaaagataagatggcggaggcctacagtgagattgggatgaaaggcgagcgccggaggggcaaggggcacgatggcctttaccagggtctcagtacagccaccaaggacacctacgacgcccttcacatgcaggccctgccccctcgctaa

SEQ ID NO: 7961 - DNA, 1476 bp, synthetic construct
  source 1..1476: mol_type = other DNA
atggccttaccagtgaccgccttgctcctgccgctggccttgctgctccacgccgccaggccggacatccagatgacacagagccctagcagcctgtctgccagcgtgggagacagagtgaccatcacatgcaaggccagcgaccacatcaacaactggctggcctggtatcagcagaagcctggacaggcccctaagctgctgatctacggcgctaccacactggaaacaggcgtgcccagcagattttctggcagcggctctggcaccgactacaccctgacaatatccagcctccagcctgaggacttcgccacctactactgtcagcagagctggaacaccccttggacattcggccagggcaccaagctggaaatcaagagactcgagggaggctctcgcatcgaggaccgctacggcggaagcttcgaacaagttcagcttcaacagcctggcgctgagctggtcaaacctggcgcttctgtgaagatgagctgcaaagccagcggctacgccttcagcagctactggatcaactggatgaagcagaaacccggccagggactcgaatggatcggccaaatctatcccggcgacggcgacaccaactacaacggcaagttcaagggcagagccacactgaccgccgatacctctagcagcacagcctacatgcagctgagcagcctgaccagcgaagatagcgccgtgtacttctgtgcccggtccatcacaacagtcgtgggctgcgctatggactattggggccagggaacaagcgtgaccgtgtctagtacgcgtaccacgacgccagcgccgcgaccaccaacaccggcgcccaccatcgcgtcgcagcccctgtccctgcgcccagaggcgtgccggccagcggcggggggcgcagtgcacacgagggggctggacttcgcctgtgacatctacatctgggcgcccttggccgggacttgtggggtccttctcctgtcactggttatcaccctttactgcaaacggggcagaaagaaactcctgtatatattcaaacaaccatttatgagaccagtacaaactactcaagaggaagatggctgtagctgccgatttccagaagaagaagaaggaggatgtgaactgagagtgaagttcagcaggagcgcagacgcccccgcgtaccagcagggccagaaccagctctataacgagctgaatctaggacgaagagaggagtacgatgttttggacaagagacgtggccgggaccctgagatggggggaaagccgagaaggaagaaccctcaggaaggcctgtacaatgaactgcagaaagataagatggcggaggcctacagtgagattgggatgaaaggcgagcgccggaggggcaaggggcacgatggcctttaccagggtctcagtacagccaccaaggacacctacgacgcccttcacatgcaggccctgccccctcgctaa

SEQ ID NO: 7962 - DNA, 1476 bp, synthetic construct
  source 1..1476: mol_type = other DNA
atggccttaccagtgaccgccttgctcctgccgctggccttgctgctccacgccgccaggccggacatccagatgacacagagccctagcagcctgtctgccagcgtgggagacagagtgaccatcacatgcaaggccagcgaccacatcaacaactggctggcctggtatcagcagaagcctggacaggcccctaagctgctgatctacggcgctaccacactggaaacaggcgtgcccagcagattttctggcagcggctctggcaccgactacaccctgacaatatccagcctccagcctgaggacttcgccacctactactgtcagcagagctggaacaccccttggacattcggccagggcaccaagctggaaatcaagagactcgagggaggctctcgcctggaggaccgctacggcggaagcttcgaacaagttcagcttcaacagcctggcgctgagctggtcaaacctggcgcttctgtgaagatgagctgcaaagccagcggctacgccttcagcagctactggatcaactggatgaagcagaaacccggccagggactcgaatggatcggccaaatctatcccggcgacggcgacaccaactacaacggcaagttcaagggcagagccacactgaccgccgatacctctagcagcacagcctacatgcagctgagcagcctgaccagcgaagatagcgccgtgtacttctgtgcccggtccatcacaacagtcgtgggctgcgctatggactattggggccagggaacaagcgtgaccgtgtctagtacgcgtaccacgacgccagcgccgcgaccaccaacaccggcgcccaccatcgcgtcgcagcccctgtccctgcgcccagaggcgtgccggccagcggcggggggcgcagtgcacacgagggggctggacttcgcctgtgacatctacatctgggcgcccttggccgggacttgtggggtccttctcctgtcactggttatcaccctttactgcaaacggggcagaaagaaactcctgtatatattcaaacaaccatttatgagaccagtacaaactactcaagaggaagatggctgtagctgccgatttccagaagaagaagaaggaggatgtgaactgagagtgaagttcagcaggagcgcagacgcccccgcgtaccagcagggccagaaccagctctataacgagctgaatctaggacgaagagaggagtacgatgttttggacaagagacgtggccgggaccctgagatggggggaaagccgagaaggaagaaccctcaggaaggcctgtacaatgaactgcagaaagataagatggcggaggcctacagtgagattgggatgaaaggcgagcgccggaggggcaaggggcacgatggcctttaccagggtctcagtacagccaccaaggacacctacgacgcccttcacatgcaggccctgccccctcgctaa

SEQ ID NO: 7963 - DNA, 1476 bp, synthetic construct
  source 1..1476: mol_type = other DNA
atggccttaccagtgaccgccttgctcctgccgctggccttgctgctccacgccgccaggccggacatccagatgacacagagccctagcagcctgtctgccagcgtgggagacagagtgaccatcacatgcaaggccagcgaccacatcaacaactggctggcctggtatcagcagaagcctggacaggcccctaagctgctgatctacggcgctaccacactggaaacaggcgtgcccagcagattttctggcagcggctctggcaccgactacaccctgacaatatccagcctccagcctgaggacttcgccacctactactgtcagcagagctggaacaccccttggacattcggccagggcaccaagctggaaatcaagagactcgagggaggctctcgcatggaggaccgctacggcggaagcttcgaacaagttcagcttcaacagcctggcgctgagctggtcaaacctggcgcttctgtgaagatgagctgcaaagccagcggctacgccttcagcagctactggatcaactggatgaagcagaaacccggccagggactcgaatggatcggccaaatctatcccggcgacggcgacaccaactacaacggcaagttcaagggcagagccacactgaccgccgatacctctagcagcacagcctacatgcagctgagcagcctgaccagcgaagatagcgccgtgtacttctgtgcccggtccatcacaacagtcgtgggctgcgctatggactattggggccagggaacaagcgtgaccgtgtctagtacgcgtaccacgacgccagcgccgcgaccaccaacaccggcgcccaccatcgcgtcgcagcccctgtccctgcgcccagaggcgtgccggccagcggcggggggcgcagtgcacacgagggggctggacttcgcctgtgacatctacatctgggcgcccttggccgggacttgtggggtccttctcctgtcactggttatcaccctttactgcaaacggggcagaaagaaactcctgtatatattcaaacaaccatttatgagaccagtacaaactactcaagaggaagatggctgtagctgccgatttccagaagaagaagaaggaggatgtgaactgagagtgaagttcagcaggagcgcagacgcccccgcgtaccagcagggccagaaccagctctataacgagctgaatctaggacgaagagaggagtacgatgttttggacaagagacgtggccgggaccctgagatggggggaaagccgagaaggaagaaccctcaggaaggcctgtacaatgaactgcagaaagataagatggcggaggcctacagtgagattgggatgaaaggcgagcgccggaggggcaaggggcacgatggcctttaccagggtctcagtacagccaccaaggacacctacgacgcccttcacatgcaggccctgccccctcgctaa

SEQ ID NO: 7964 - DNA, 1476 bp, synthetic construct
  source 1..1476: mol_type = other DNA
atggccttaccagtgaccgccttgctcctgccgctggccttgctgctccacgccgccaggccggacatccagatgacacagagccctagcagcctgtctgccagcgtgggagacagagtgaccatcacatgcaaggccagcgaccacatcaacaactggctggcctggtatcagcagaagcctggacaggcccctaagctgctgatctacggcgctaccacactggaaacaggcgtgcccagcagattttctggcagcggctctggcaccgactacaccctgacaatatccagcctccagcctgaggacttcgccacctactactgtcagcagagctggaacaccccttggacattcggccagggcaccaagctggaaatcaagagactcgagggaggctctcgcgtggaggaccgctacggcggaagcttcgaacaagttcagcttcaacagcctggcgctgagctggtcaaacctggcgcttctgtgaagatgagctgcaaagccagcggctacgccttcagcagctactggatcaactggatgaagcagaaacccggccagggactcgaatggatcggccaaatctatcccggcgacggcgacaccaactacaacggcaagttcaagggcagagccacactgaccgccgatacctctagcagcacagcctacatgcagctgagcagcctgaccagcgaagatagcgccgtgtacttctgtgcccggtccatcacaacagtcgtgggctgcgctatggactattggggccagggaacaagcgtgaccgtgtctagtacgcgtaccacgacgccagcgccgcgaccaccaacaccggcgcccaccatcgcgtcgcagcccctgtccctgcgcccagaggcgtgccggccagcggcggggggcgcagtgcacacgagggggctggacttcgcctgtgacatctacatctgggcgcccttggccgggacttgtggggtccttctcctgtcactggttatcaccctttactgcaaacggggcagaaagaaactcctgtatatattcaaacaaccatttatgagaccagtacaaactactcaagaggaagatggctgtagctgccgatttccagaagaagaagaaggaggatgtgaactgagagtgaagttcagcaggagcgcagacgcccccgcgtaccagcagggccagaaccagctctataacgagctgaatctaggacgaagagaggagtacgatgttttggacaagagacgtggccgggaccctgagatggggggaaagccgagaaggaagaaccctcaggaaggcctgtacaatgaactgcagaaagataagatggcggaggcctacagtgagattgggatgaaaggcgagcgccggaggggcaaggggcacgatggcctttaccagggtctcagtacagccaccaaggacacctacgacgcccttcacatgcaggccctgccccctcgctaa

SEQ ID NO: 7965 - DNA, 1476 bp, synthetic construct
  source 1..1476: mol_type = other DNA
atggccttaccagtgaccgccttgctcctgccgctggccttgctgctccacgccgccaggccggacatccagatgacacagagccctagcagcctgtctgccagcgtgggagacagagtgaccatcacatgcaaggccagcgaccacatcaacaactggctggcctggtatcagcagaagcctggacaggcccctaagctgctgatctacggcgctaccacactggaaacaggcgtgcccagcagattttctggcagcggctctggcaccgactacaccctgacaatatccagcctccagcctgaggacttcgccacctactactgtcagcagagctggaacaccccttggacattcggccagggcaccaagctggaaatcaagagactcgagggaggctctcgcgccgaggaccgctacggcggaagcttcgaacaagttcagcttcaacagcctggcgctgagctggtcaaacctggcgcttctgtgaagatgagctgcaaagccagcggctacgccttcagcagctactggatcaactggatgaagcagaaacccggccagggactcgaatggatcggccaaatctatcccggcgacggcgacaccaactacaacggcaagttcaagggcagagccacactgaccgccgatacctctagcagcacagcctacatgcagctgagcagcctgaccagcgaagatagcgccgtgtacttctgtgcccggtccatcacaacagtcgtgggctgcgctatggactattggggccagggaacaagcgtgaccgtgtctagtacgcgtaccacgacgccagcgccgcgaccaccaacaccggcgcccaccatcgcgtcgcagcccctgtccctgcgcccagaggcgtgccggccagcggcggggggcgcagtgcacacgagggggctggacttcgcctgtgacatctacatctgggcgcccttggccgggacttgtggggtccttctcctgtcactggttatcaccctttactgcaaacggggcagaaagaaactcctgtatatattcaaacaaccatttatgagaccagtacaaactactcaagaggaagatggctgtagctgccgatttccagaagaagaagaaggaggatgtgaactgagagtgaagttcagcaggagcgcagacgcccccgcgtaccagcagggccagaaccagctctataacgagctgaatctaggacgaagagaggagtacgatgttttggacaagagacgtggccgggaccctgagatggggggaaagccgagaaggaagaaccctcaggaaggcctgtacaatgaactgcagaaagataagatggcggaggcctacagtgagattgggatgaaaggcgagcgccggaggggcaaggggcacgatggcctttaccagggtctcagtacagccaccaaggacacctacgacgcccttcacatgcaggccctgccccctcgctaa

SEQ ID NO: 7966 - DNA, 1476 bp, synthetic construct
  source 1..1476: mol_type = other DNA
atggccttaccagtgaccgccttgctcctgccgctggccttgctgctccacgccgccaggccggacatccagatgacacagagccctagcagcctgtctgccagcgtgggagacagagtgaccatcacatgcaaggccagcgaccacatcaacaactggctggcctggtatcagcagaagcctggacaggcccctaagctgctgatctacggcgctaccacactggaaacaggcgtgcccagcagattttctggcagcggctctggcaccgactacaccctgacaatatccagcctccagcctgaggacttcgccacctactactgtcagcagagctggaacaccccttggacattcggccagggcaccaagctggaaatcaagagactcgagggaggctctcgcttcgaggaccgctacggcggaagcttcgaacaagttcagcttcaacagcctggcgctgagctggtcaaacctggcgcttctgtgaagatgagctgcaaagccagcggctacgccttcagcagctactggatcaactggatgaagcagaaacccggccagggactcgaatggatcggccaaatctatcccggcgacggcgacaccaactacaacggcaagttcaagggcagagccacactgaccgccgatacctctagcagcacagcctacatgcagctgagcagcctgaccagcgaagatagcgccgtgtacttctgtgcccggtccatcacaacagtcgtgggctgcgctatggactattggggccagggaacaagcgtgaccgtgtctagtacgcgtaccacgacgccagcgccgcgaccaccaacaccggcgcccaccatcgcgtcgcagcccctgtccctgcgcccagaggcgtgccggccagcggcggggggcgcagtgcacacgagggggctggacttcgcctgtgacatctacatctgggcgcccttggccgggacttgtggggtccttctcctgtcactggttatcaccctttactgcaaacggggcagaaagaaactcctgtatatattcaaacaaccatttatgagaccagtacaaactactcaagaggaagatggctgtagctgccgatttccagaagaagaagaaggaggatgtgaactgagagtgaagttcagcaggagcgcagacgcccccgcgtaccagcagggccagaaccagctctataacgagctgaatctaggacgaagagaggagtacgatgttttggacaagagacgtggccgggaccctgagatggggggaaagccgagaaggaagaaccctcaggaaggcctgtacaatgaactgcagaaagataagatggcggaggcctacagtgagattgggatgaaaggcgagcgccggaggggcaaggggcacgatggcctttaccagggtctcagtacagccaccaaggacacctacgacgcccttcacatgcaggccctgccccctcgctaa

SEQ ID NO: 7967 - DNA, 1476 bp, synthetic construct
  source 1..1476: mol_type = other DNA
atggccttaccagtgaccgccttgctcctgccgctggccttgctgctccacgccgccaggccggacatccagatgacacagagccctagcagcctgtctgccagcgtgggagacagagtgaccatcacatgcaaggccagcgaccacatcaacaactggctggcctggtatcagcagaagcctggacaggcccctaagctgctgatctacggcgctaccacactggaaacaggcgtgcccagcagattttctggcagcggctctggcaccgactacaccctgacaatatccagcctccagcctgaggacttcgccacctactactgtcagcagagctggaacaccccttggacattcggccagggcaccaagctggaaatcaagagactcgagggaggctctcgccacgaggaccgctacggcggaagcttcgaacaagttcagcttcaacagcctggcgctgagctggtcaaacctggcgcttctgtgaagatgagctgcaaagccagcggctacgccttcagcagctactggatcaactggatgaagcagaaacccggccagggactcgaatggatcggccaaatctatcccggcgacggcgacaccaactacaacggcaagttcaagggcagagccacactgaccgccgatacctctagcagcacagcctacatgcagctgagcagcctgaccagcgaagatagcgccgtgtacttctgtgcccggtccatcacaacagtcgtgggctgcgctatggactattggggccagggaacaagcgtgaccgtgtctagtacgcgtaccacgacgccagcgccgcgaccaccaacaccggcgcccaccatcgcgtcgcagcccctgtccctgcgcccagaggcgtgccggccagcggcggggggcgcagtgcacacgagggggctggacttcgcctgtgacatctacatctgggcgcccttggccgggacttgtggggtccttctcctgtcactggttatcaccctttactgcaaacggggcagaaagaaactcctgtatatattcaaacaaccatttatgagaccagtacaaactactcaagaggaagatggctgtagctgccgatttccagaagaagaagaaggaggatgtgaactgagagtgaagttcagcaggagcgcagacgcccccgcgtaccagcagggccagaaccagctctataacgagctgaatctaggacgaagagaggagtacgatgttttggacaagagacgtggccgggaccctgagatggggggaaagccgagaaggaagaaccctcaggaaggcctgtacaatgaactgcagaaagataagatggcggaggcctacagtgagattgggatgaaaggcgagcgccggaggggcaaggggcacgatggcctttaccagggtctcagtacagccaccaaggacacctacgacgcccttcacatgcaggccctgccccctcgctaa

SEQ ID NO: 7968 - DNA, 1476 bp, synthetic construct
  source 1..1476: mol_type = other DNA
atggccttaccagtgaccgccttgctcctgccgctggccttgctgctccacgccgccaggccggacatccagatgacacagagccctagcagcctgtctgccagcgtgggagacagagtgaccatcacatgcaaggccagcgaccacatcaacaactggctggcctggtatcagcagaagcctggacaggcccctaagctgctgatctacggcgctaccacactggaaacaggcgtgcccagcagattttctggcagcggctctggcaccgactacaccctgacaatatccagcctccagcctgaggacttcgccacctactactgtcagcagagctggaacaccccttggacattcggccagggcaccaagctggaaatcaagagactcgagggaggctctcgcggcgaggaccgctacggcggaagcttcgaacaagttcagcttcaacagcctggcgctgagctggtcaaacctggcgcttctgtgaagatgagctgcaaagccagcggctacgccttcagcagctactggatcaactggatgaagcagaaacccggccagggactcgaatggatcggccaaatctatcccggcgacggcgacaccaactacaacggcaagttcaagggcagagccacactgaccgccgatacctctagcagcacagcctacatgcagctgagcagcctgaccagcgaagatagcgccgtgtacttctgtgcccggtccatcacaacagtcgtgggctgcgctatggactattggggccagggaacaagcgtgaccgtgtctagtacgcgtaccacgacgccagcgccgcgaccaccaacaccggcgcccaccatcgcgtcgcagcccctgtccctgcgcccagaggcgtgccggccagcggcggggggcgcagtgcacacgagggggctggacttcgcctgtgacatctacatctgggcgcccttggccgggacttgtggggtccttctcctgtcactggttatcaccctttactgcaaacggggcagaaagaaactcctgtatatattcaaacaaccatttatgagaccagtacaaactactcaagaggaagatggctgtagctgccgatttccagaagaagaagaaggaggatgtgaactgagagtgaagttcagcaggagcgcagacgcccccgcgtaccagcagggccagaaccagctctataacgagctgaatctaggacgaagagaggagtacgatgttttggacaagagacgtggccgggaccctgagatggggggaaagccgagaaggaagaaccctcaggaaggcctgtacaatgaactgcagaaagataagatggcggaggcctacagtgagattgggatgaaaggcgagcgccggaggggcaaggggcacgatggcctttaccagggtctcagtacagccaccaaggacacctacgacgcccttcacatgcaggccctgccccctcgctaa

SEQ ID NO: 7969 - DNA, 1476 bp, synthetic construct
  source 1..1476: mol_type = other DNA
atggccttaccagtgaccgccttgctcctgccgctggccttgctgctccacgccgccaggccggacatccagatgacacagagccctagcagcctgtctgccagcgtgggagacagagtgaccatcacatgcaaggccagcgaccacatcaacaactggctggcctggtatcagcagaagcctggacaggcccctaagctgctgatctacggcgctaccacactggaaacaggcgtgcccagcagattttctggcagcggctctggcaccgactacaccctgacaatatccagcctccagcctgaggacttcgccacctactactgtcagcagagctggaacaccccttggacattcggccagggcaccaagctggaaatcaagagactcgagggaggctctcgcaccgaggaccgctacggcggaagcttcgaacaagttcagcttcaacagcctggcgctgagctggtcaaacctggcgcttctgtgaagatgagctgcaaagccagcggctacgccttcagcagctactggatcaactggatgaagcagaaacccggccagggactcgaatggatcggccaaatctatcccggcgacggcgacaccaactacaacggcaagttcaagggcagagccacactgaccgccgatacctctagcagcacagcctacatgcagctgagcagcctgaccagcgaagatagcgccgtgtacttctgtgcccggtccatcacaacagtcgtgggctgcgctatggactattggggccagggaacaagcgtgaccgtgtctagtacgcgtaccacgacgccagcgccgcgaccaccaacaccggcgcccaccatcgcgtcgcagcccctgtccctgcgcccagaggcgtgccggccagcggcggggggcgcagtgcacacgagggggctggacttcgcctgtgacatctacatctgggcgcccttggccgggacttgtggggtccttctcctgtcactggttatcaccctttactgcaaacggggcagaaagaaactcctgtatatattcaaacaaccatttatgagaccagtacaaactactcaagaggaagatggctgtagctgccgatttccagaagaagaagaaggaggatgtgaactgagagtgaagttcagcaggagcgcagacgcccccgcgtaccagcagggccagaaccagctctataacgagctgaatctaggacgaagagaggagtacgatgttttggacaagagacgtggccgggaccctgagatggggggaaagccgagaaggaagaaccctcaggaaggcctgtacaatgaactgcagaaagataagatggcggaggcctacagtgagattgggatgaaaggcgagcgccggaggggcaaggggcacgatggcctttaccagggtctcagtacagccaccaaggacacctacgacgcccttcacatgcaggccctgccccctcgctaa

SEQ ID NO: 7970 - DNA, 1476 bp, synthetic construct
  source 1..1476: mol_type = other DNA
atggccttaccagtgaccgccttgctcctgccgctggccttgctgctccacgccgccaggccggacatccagatgacacagagccctagcagcctgtctgccagcgtgggagacagagtgaccatcacatgcaaggccagcgaccacatcaacaactggctggcctggtatcagcagaagcctggacaggcccctaagctgctgatctacggcgctaccacactggaaacaggcgtgcccagcagattttctggcagcggctctggcaccgactacaccctgacaatatccagcctccagcctgaggacttcgccacctactactgtcagcagagctggaacaccccttggacattcggccagggcaccaagctggaaatcaagagactcgagggaggctctagcagcgaggaccgctacggcggaagcttcgaacaagttcagcttcaacagcctggcgctgagctggtcaaacctggcgcttctgtgaagatgagctgcaaagccagcggctacgccttcagcagctactggatcaactggatgaagcagaaacccggccagggactcgaatggatcggccaaatctatcccggcgacggcgacaccaactacaacggcaagttcaagggcagagccacactgaccgccgatacctctagcagcacagcctacatgcagctgagcagcctgaccagcgaagatagcgccgtgtacttctgtgcccggtccatcacaacagtcgtgggctgcgctatggactattggggccagggaacaagcgtgaccgtgtctagtacgcgtaccacgacgccagcgccgcgaccaccaacaccggcgcccaccatcgcgtcgcagcccctgtccctgcgcccagaggcgtgccggccagcggcggggggcgcagtgcacacgagggggctggacttcgcctgtgacatctacatctgggcgcccttggccgggacttgtggggtccttctcctgtcactggttatcaccctttactgcaaacggggcagaaagaaactcctgtatatattcaaacaaccatttatgagaccagtacaaactactcaagaggaagatggctgtagctgccgatttccagaagaagaagaaggaggatgtgaactgagagtgaagttcagcaggagcgcagacgcccccgcgtaccagcagggccagaaccagctctataacgagctgaatctaggacgaagagaggagtacgatgttttggacaagagacgtggccgggaccctgagatggggggaaagccgagaaggaagaaccctcaggaaggcctgtacaatgaactgcagaaagataagatggcggaggcctacagtgagattgggatgaaaggcgagcgccggaggggcaaggggcacgatggcctttaccagggtctcagtacagccaccaaggacacctacgacgcccttcacatgcaggccctgccccctcgctaa

SEQ ID NO: 7971 - DNA, 1476 bp, synthetic construct
  source 1..1476: mol_type = other DNA
atggccttaccagtgaccgccttgctcctgccgctggccttgctgctccacgccgccaggccggacatccagatgacacagagccctagcagcctgtctgccagcgtgggagacagagtgaccatcacatgcaaggccagcgaccacatcaacaactggctggcctggtatcagcagaagcctggacaggcccctaagctgctgatctacggcgctaccacactggaaacaggcgtgcccagcagattttctggcagcggctctggcaccgactacaccctgacaatatccagcctccagcctgaggacttcgccacctactactgtcagcagagctggaacaccccttggacattcggccagggcaccaagctggaaatcaagagactcgagggaggctctcacagcgaggaccgctacggcggaagcttcgaacaagttcagcttcaacagcctggcgctgagctggtcaaacctggcgcttctgtgaagatgagctgcaaagccagcggctacgccttcagcagctactggatcaactggatgaagcagaaacccggccagggactcgaatggatcggccaaatctatcccggcgacggcgacaccaactacaacggcaagttcaagggcagagccacactgaccgccgatacctctagcagcacagcctacatgcagctgagcagcctgaccagcgaagatagcgccgtgtacttctgtgcccggtccatcacaacagtcgtgggctgcgctatggactattggggccagggaacaagcgtgaccgtgtctagtacgcgtaccacgacgccagcgccgcgaccaccaacaccggcgcccaccatcgcgtcgcagcccctgtccctgcgcccagaggcgtgccggccagcggcggggggcgcagtgcacacgagggggctggacttcgcctgtgacatctacatctgggcgcccttggccgggacttgtggggtccttctcctgtcactggttatcaccctttactgcaaacggggcagaaagaaactcctgtatatattcaaacaaccatttatgagaccagtacaaactactcaagaggaagatggctgtagctgccgatttccagaagaagaagaaggaggatgtgaactgagagtgaagttcagcaggagcgcagacgcccccgcgtaccagcagggccagaaccagctctataacgagctgaatctaggacgaagagaggagtacgatgttttggacaagagacgtggccgggaccctgagatggggggaaagccgagaaggaagaaccctcaggaaggcctgtacaatgaactgcagaaagataagatggcggaggcctacagtgagattgggatgaaaggcgagcgccggaggggcaaggggcacgatggcctttaccagggtctcagtacagccaccaaggacacctacgacgcccttcacatgcaggccctgccccctcgctaa

SEQ ID NO: 7972 - DNA, 1476 bp, synthetic construct
  source 1..1476: mol_type = other DNA
atggccttaccagtgaccgccttgctcctgccgctggccttgctgctccacgccgccaggccggacatccagatgacacagagccctagcagcctgtctgccagcgtgggagacagagtgaccatcacatgcaaggccagcgaccacatcaacaactggctggcctggtatcagcagaagcctggacaggcccctaagctgctgatctacggcgctaccacactggaaacaggcgtgcccagcagattttctggcagcggctctggcaccgactacaccctgacaatatccagcctccagcctgaggacttcgccacctactactgtcagcagagctggaacaccccttggacattcggccagggcaccaagctggaaatcaagagactcgagggaggctctgacagcgaggaccgctacggcggaagcttcgaacaagttcagcttcaacagcctggcgctgagctggtcaaacctggcgcttctgtgaagatgagctgcaaagccagcggctacgccttcagcagctactggatcaactggatgaagcagaaacccggccagggactcgaatggatcggccaaatctatcccggcgacggcgacaccaactacaacggcaagttcaagggcagagccacactgaccgccgatacctctagcagcacagcctacatgcagctgagcagcctgaccagcgaagatagcgccgtgtacttctgtgcccggtccatcacaacagtcgtgggctgcgctatggactattggggccagggaacaagcgtgaccgtgtctagtacgcgtaccacgacgccagcgccgcgaccaccaacaccggcgcccaccatcgcgtcgcagcccctgtccctgcgcccagaggcgtgccggccagcggcggggggcgcagtgcacacgagggggctggacttcgcctgtgacatctacatctgggcgcccttggccgggacttgtggggtccttctcctgtcactggttatcaccctttactgcaaacggggcagaaagaaactcctgtatatattcaaacaaccatttatgagaccagtacaaactactcaagaggaagatggctgtagctgccgatttccagaagaagaagaaggaggatgtgaactgagagtgaagttcagcaggagcgcagacgcccccgcgtaccagcagggccagaaccagctctataacgagctgaatctaggacgaagagaggagtacgatgttttggacaagagacgtggccgggaccctgagatggggggaaagccgagaaggaagaaccctcaggaaggcctgtacaatgaactgcagaaagataagatggcggaggcctacagtgagattgggatgaaaggcgagcgccggaggggcaaggggcacgatggcctttaccagggtctcagtacagccaccaaggacacctacgacgcccttcacatgcaggccctgccccctcgctaa

SEQ ID NO: 7973 - DNA, 1476 bp, synthetic construct
  source 1..1476: mol_type = other DNA
atggccttaccagtgaccgccttgctcctgccgctggccttgctgctccacgccgccaggccggacatccagatgacacagagccctagcagcctgtctgccagcgtgggagacagagtgaccatcacatgcaaggccagcgaccacatcaacaactggctggcctggtatcagcagaagcctggacaggcccctaagctgctgatctacggcgctaccacactggaaacaggcgtgcccagcagattttctggcagcggctctggcaccgactacaccctgacaatatccagcctccagcctgaggacttcgccacctactactgtcagcagagctggaacaccccttggacattcggccagggcaccaagctggaaatcaagagactcgagggaggctctttcagcgaggaccgctacggcggaagcttcgaacaagttcagcttcaacagcctggcgctgagctggtcaaacctggcgcttctgtgaagatgagctgcaaagccagcggctacgccttcagcagctactggatcaactggatgaagcagaaacccggccagggactcgaatggatcggccaaatctatcccggcgacggcgacaccaactacaacggcaagttcaagggcagagccacactgaccgccgatacctctagcagcacagcctacatgcagctgagcagcctgaccagcgaagatagcgccgtgtacttctgtgcccggtccatcacaacagtcgtgggctgcgctatggactattggggccagggaacaagcgtgaccgtgtctagtacgcgtaccacgacgccagcgccgcgaccaccaacaccggcgcccaccatcgcgtcgcagcccctgtccctgcgcccagaggcgtgccggccagcggcggggggcgcagtgcacacgagggggctggacttcgcctgtgacatctacatctgggcgcccttggccgggacttgtggggtccttctcctgtcactggttatcaccctttactgcaaacggggcagaaagaaactcctgtatatattcaaacaaccatttatgagaccagtacaaactactcaagaggaagatggctgtagctgccgatttccagaagaagaagaaggaggatgtgaactgagagtgaagttcagcaggagcgcagacgcccccgcgtaccagcagggccagaaccagctctataacgagctgaatctaggacgaagagaggagtacgatgttttggacaagagacgtggccgggaccctgagatggggggaaagccgagaaggaagaaccctcaggaaggcctgtacaatgaactgcagaaagataagatggcggaggcctacagtgagattgggatgaaaggcgagcgccggaggggcaaggggcacgatggcctttaccagggtctcagtacagccaccaaggacacctacgacgcccttcacatgcaggccctgccccctcgctaa

SEQ ID NO: 7974 - DNA, 1482 bp, synthetic construct; identical to SEQ ID NO: 7884
  source 1..1482: mol_type = other DNA

SEQ ID NO: 7975 - DNA, 1482 bp, synthetic construct; identical to SEQ ID NO: 7888
  source 1..1482: mol_type = other DNA

SEQ ID NO: 7976 - DNA, 1482 bp, synthetic construct; identical to SEQ ID NO: 7771
  source 1..1482: mol_type = other DNA

SEQ ID NO: 7977 - DNA, 1482 bp, synthetic construct; identical to SEQ ID NO: 7774
  source 1..1482: mol_type = other DNA

SEQ ID NO: 7978 - DNA, 1491 bp, synthetic construct
  source 1..1491: mol_type = other DNA
atggccttaccagtgaccgccttgctcctgccgctggccttgctgctccacgccgccaggccggacatccagatgacacagagccctagcagcctgtctgccagcgtgggagacagagtgaccatcacatgcaaggccagcgaccacatcaacaactggctggcctggtatcagcagaagcctggacaggcccctaagctgctgatctacggcgctaccacactggaaacaggcgtgcccagcagattttctggcagcggctctggcaccgactacaccctgacaatatccagcctccagcctgaggacttcgccacctactactgtcagcagagctggaacaccccttggacattcggccagggcaccaagctggaaatcaagagactcgagggaggctctgcccgcagcgaggaccgctaccgcaaccactacggcggaagcttcgaacaagttcagcttcaacagcctggcgctgagctggtcaaacctggcgcttctgtgaagatgagctgcaaagccagcggctacgccttcagcagctactggatcaactggatgaagcagaaacccggccagggactcgaatggatcggccaaatctatcccggcgacggcgacaccaactacaacggcaagttcaagggcagagccacactgaccgccgatacctctagcagcacagcctacatgcagctgagcagcctgaccagcgaagatagcgccgtgtacttctgtgcccggtccatcacaacagtcgtgggctgcgctatggactattggggccagggaacaagcgtgaccgtgtctagtacgcgtaccacgacgccagcgccgcgaccaccaacaccggcgcccaccatcgcgtcgcagcccctgtccctgcgcccagaggcgtgccggccagcggcggggggcgcagtgcacacgagggggctggacttcgcctgtgacatctacatctgggcgcccttggccgggacttgtggggtccttctcctgtcactggttatcaccctttactgcaaacggggcagaaagaaactcctgtatatattcaaacaaccatttatgagaccagtacaaactactcaagaggaagatggctgtagctgccgatttccagaagaagaagaaggaggatgtgaactgagagtgaagttcagcaggagcgcagacgcccccgcgtaccagcagggccagaaccagctctataacgagctgaatctaggacgaagagaggagtacgatgttttggacaagagacgtggccgggaccctgagatggggggaaagccgagaaggaagaaccctcaggaaggcctgtacaatgaactgcagaaagataagatggcggaggcctacagtgagattgggatgaaaggcgagcgccggaggggcaaggggcacgatggcctttaccagggtctcagtacagccaccaaggacacctacgacgcccttcacatgcaggccctgccccctcgctaa

SEQ ID NO: 7979 - DNA, 1491 bp, synthetic construct
  source 1..1491: mol_type = other DNA
atggccttaccagtgaccgccttgctcctgccgctggccttgctgctccacgccgccaggccggacatccagatgacacagagccctagcagcctgtctgccagcgtgggagacagagtgaccatcacatgcaaggccagcgaccacatcaacaactggctggcctggtatcagcagaagcctggacaggcccctaagctgctgatctacggcgctaccacactggaaacaggcgtgcccagcagattttctggcagcggctctggcaccgactacaccctgacaatatccagcctccagcctgaggacttcgccacctactactgtcagcagagctggaacaccccttggacattcggccagggcaccaagctggaaatcaagagactcgagggaggctctgcccgcagcgaggaccgctaccgcaaccaccccggcggaagcttcgaacaagttcagcttcaacagcctggcgctgagctggtcaaacctggcgcttctgtgaagatgagctgcaaagccagcggctacgccttcagcagctactggatcaactggatgaagcagaaacccggccagggactcgaatggatcggccaaatctatcccggcgacggcgacaccaactacaacggcaagttcaagggcagagccacactgaccgccgatacctctagcagcacagcctacatgcagctgagcagcctgaccagcgaagatagcgccgtgtacttctgtgcccggtccatcacaacagtcgtgggctgcgctatggactattggggccagggaacaagcgtgaccgtgtctagtacgcgtaccacgacgccagcgccgcgaccaccaacaccggcgcccaccatcgcgtcgcagcccctgtccctgcgcccagaggcgtgccggccagcggcggggggcgcagtgcacacgagggggctggacttcgcctgtgacatctacatctgggcgcccttggccgggacttgtggggtccttctcctgtcactggttatcaccctttactgcaaacggggcagaaagaaactcctgtatatattcaaacaaccatttatgagaccagtacaaactactcaagaggaagatggctgtagctgccgatttccagaagaagaagaaggaggatgtgaactgagagtgaagttcagcaggagcgcagacgcccccgcgtaccagcagggccagaaccagctctataacgagctgaatctaggacgaagagaggagtacgatgttttggacaagagacgtggccgggaccctgagatggggggaaagccgagaaggaagaaccctcaggaaggcctgtacaatgaactgcagaaagataagatggcggaggcctacagtgagattgggatgaaaggcgagcgccggaggggcaaggggcacgatggcctttaccagggtctcagtacagccaccaaggacacctacgacgcccttcacatgcaggccctgccccctcgctaa

SEQ ID NO: 7980 - DNA, 1491 bp, synthetic construct
  source 1..1491: mol_type = other DNA
atggccttaccagtgaccgccttgctcctgccgctggccttgctgctccacgccgccaggccggacatccagatgacacagagccctagcagcctgtctgccagcgtgggagacagagtgaccatcacatgcaaggccagcgaccacatcaacaactggctggcctggtatcagcagaagcctggacaggcccctaagctgctgatctacggcgctaccacactggaaacaggcgtgcccagcagattttctggcagcggctctggcaccgactacaccctgacaatatccagcctccagcctgaggacttcgccacctactactgtcagcagagctggaacaccccttggacattcggccagggcaccaagctggaaatcaagagactcgagggaggctctgcccgcagcgaggaccgctaccgcaaccacgccggcggaagcttcgaacaagttcagcttcaacagcctggcgctgagctggtcaaacctggcgcttctgtgaagatgagctgcaaagccagcggctacgccttcagcagctactggatcaactggatgaagcagaaacccggccagggactcgaatggatcggccaaatctatcccggcgacggcgacaccaactacaacggcaagttcaagggcagagccacactgaccgccgatacctctagcagcacagcctacatgcagctgagcagcctgaccagcgaagatagcgccgtgtacttctgtgcccggtccatcacaacagtcgtgggctgcgctatggactattggggccagggaacaagcgtgaccgtgtctagtacgcgtaccacgacgccagcgccgcgaccaccaacaccggcgcccaccatcgcgtcgcagcccctgtccctgcgcccagaggcgtgccggccagcggcggggggcgcagtgcacacgagggggctggacttcgcctgtgacatctacatctgggcgcccttggccgggacttgtggggtccttctcctgtcactggttatcaccctttactgcaaacggggcagaaagaaactcctgtatatattcaaacaaccatttatgagaccagtacaaactactcaagaggaagatggctgtagctgccgatttccagaagaagaagaaggaggatgtgaactgagagtgaagttcagcaggagcgcagacgcccccgcgtaccagcagggccagaaccagctctataacgagctgaatctaggacgaagagaggagtacgatgttttggacaagagacgtggccgggaccctgagatggggggaaagccgagaaggaagaaccctcaggaaggcctgtacaatgaactgcagaaagataagatggcggaggcctacagtgagattgggatgaaaggcgagcgccggaggggcaaggggcacgatggcctttaccagggtctcagtacagccaccaaggacacctacgacgcccttcacatgcaggccctgccccctcgctaa

SEQ ID NO: 7981 - DNA, 1491 bp, synthetic construct; identical to SEQ ID NO: 7757
  source 1..1491: mol_type = other DNA

SEQ ID NO: 7982 - DNA, 1491 bp, synthetic construct
  source 1..1491: mol_type = other DNA
atggccttaccagtgaccgccttgctcctgccgctggccttgctgctccacgccgccaggccggacatccagatgacacagagccctagcagcctgtctgccagcgtgggagacagagtgaccatcacatgcaaggccagcgaccacatcaacaactggctggcctggtatcagcagaagcctggacaggcccctaagctgctgatctacggcgctaccacactggaaacaggcgtgcccagcagattttctggcagcggctctggcaccgactacaccctgacaatatccagcctccagcctgaggacttcgccacctactactgtcagcagagctggaacaccccttggacattcggccagggcaccaagctggaaatcaagagactcgagggaggctctgcccgcagcgaggaccgctaccgcaaccgccacggcggaagcttcgaacaagttcagcttcaacagcctggcgctgagctggtcaaacctggcgcttctgtgaagatgagctgcaaagccagcggctacgccttcagcagctactggatcaactggatgaagcagaaacccggccagggactcgaatggatcggccaaatctatcccggcgacggcgacaccaactacaacggcaagttcaagggcagagccacactgaccgccgatacctctagcagcacagcctacatgcagctgagcagcctgaccagcgaagatagcgccgtgtacttctgtgcccggtccatcacaacagtcgtgggctgcgctatggactattggggccagggaacaagcgtgaccgtgtctagtacgcgtaccacgacgccagcgccgcgaccaccaacaccggcgcccaccatcgcgtcgcagcccctgtccctgcgcccagaggcgtgccggccagcggcggggggcgcagtgcacacgagggggctggacttcgcctgtgacatctacatctgggcgcccttggccgggacttgtggggtccttctcctgtcactggttatcaccctttactgcaaacggggcagaaagaaactcctgtatatattcaaacaaccatttatgagaccagtacaaactactcaagaggaagatggctgtagctgccgatttccagaagaagaagaaggaggatgtgaactgagagtgaagttcagcaggagcgcagacgcccccgcgtaccagcagggccagaaccagctctataacgagctgaatctaggacgaagagaggagtacgatgttttggacaagagacgtggccgggaccctgagatggggggaaagccgagaaggaagaaccctcaggaaggcctgtacaatgaactgcagaaagataagatggcggaggcctacagtgagattgggatgaaaggcgagcgccggaggggcaaggggcacgatggcctttaccagggtctcagtacagccaccaaggacacctacgacgcccttcacatgcaggccctgccccctcgctaa

SEQ ID NO: 7983 - DNA, 1491 bp, synthetic construct
  source 1..1491: mol_type = other DNA
atggccttaccagtgaccgccttgctcctgccgctggccttgctgctccacgccgccaggccggacatccagatgacacagagccctagcagcctgtctgccagcgtgggagacagagtgaccatcacatgcaaggccagcgaccacatcaacaactggctggcctggtatcagcagaagcctggacaggcccctaagctgctgatctacggcgctaccacactggaaacaggcgtgcccagcagattttctggcagcggctctggcaccgactacaccctgacaatatccagcctccagcctgaggacttcgccacctactactgtcagcagagctggaacaccccttggacattcggccagggcaccaagctggaaatcaagagactcgagggaggctctgcccgcagcgaggaccgctaccgcaacctgcgcggcggaagcttcgaacaagttcagcttcaacagcctggcgctgagctggtcaaacctggcgcttctgtgaagatgagctgcaaagccagcggctacgccttcagcagctactggatcaactggatgaagcagaaacccggccagggactcgaatggatcggccaaatctatcccggcgacggcgacaccaactacaacggcaagttcaagggcagagccacactgaccgccgatacctctagcagcacagcctacatgcagctgagcagcctgaccagcgaagatagcgccgtgtacttctgtgcccggtccatcacaacagtcgtgggctgcgctatggactattggggccagggaacaagcgtgaccgtgtctagtacgcgtaccacgacgccagcgccgcgaccaccaacaccggcgcccaccatcgcgtcgcagcccctgtccctgcgcccagaggcgtgccggccagcggcggggggcgcagtgcacacgagggggctggacttcgcctgtgacatctacatctgggcgcccttggccgggacttgtggggtccttctcctgtcactggttatcaccctttactgcaaacggggcagaaagaaactcctgtatatattcaaacaaccatttatgagaccagtacaaactactcaagaggaagatggctgtagctgccgatttccagaagaagaagaaggaggatgtgaactgagagtgaagttcagcaggagcgcagacgcccccgcgtaccagcagggccagaaccagctctataacgagctgaatctaggacgaagagaggagtacgatgttttggacaagagacgtggccgggaccctgagatggggggaaagccgagaaggaagaaccctcaggaaggcctgtacaatgaactgcagaaagataagatggcggaggcctacagtgagattgggatgaaaggcgagcgccggaggggcaaggggcacgatggcctttaccagggtctcagtacagccaccaaggacacctacgacgcccttcacatgcaggccctgccccctcgctaa

SEQ ID NO: 7984 - DNA, 1491 bp, synthetic construct
  source 1..1491: mol_type = other DNA
atggccttaccagtgaccgccttgctcctgccgctggccttgctgctccacgccgccaggccggacatccagatgacacagagccctagcagcctgtctgccagcgtgggagacagagtgaccatcacatgcaaggccagcgaccacatcaacaactggctggcctggtatcagcagaagcctggacaggcccctaagctgctgatctacggcgctaccacactggaaacaggcgtgcccagcagattttctggcagcggctctggcaccgactacaccctgacaatatccagcctccagcctgaggacttcgccacctactactgtcagcagagctggaacaccccttggacattcggccagggcaccaagctggaaatcaagagactcgagggaggctctgcccgcagcgaggaccgctaccgcaaccgcctgggcggaagcttcgaacaagttcagcttcaacagcctggcgctgagctggtcaaacctggcgcttctgtgaagatgagctgcaaagccagcggctacgccttcagcagctactggatcaactggatgaagcagaaacccggccagggactcgaatggatcggccaaatctatcccggcgacggcgacaccaactacaacggcaagttcaagggcagagccacactgaccgccgatacctctagcagcacagcctacatgcagctgagcagcctgaccagcgaagatagcgccgtgtacttctgtgcccggtccatcacaacagtcgtgggctgcgctatggactattggggccagggaacaagcgtgaccgtgtctagtacgcgtaccacgacgccagcgccgcgaccaccaacaccggcgcccaccatcgcgtcgcagcccctgtccctgcgcccagaggcgtgccggccagcggcggggggcgcagtgcacacgagggggctggacttcgcctgtgacatctacatctgggcgcccttggccgggacttgtggggtccttctcctgtcactggttatcaccctttactgcaaacggggcagaaagaaactcctgtatatattcaaacaaccatttatgagaccagtacaaactactcaagaggaagatggctgtagctgccgatttccagaagaagaagaaggaggatgtgaactgagagtgaagttcagcaggagcgcagacgcccccgcgtaccagcagggccagaaccagctctataacgagctgaatctaggacgaagagaggagtacgatgttttggacaagagacgtggccgggaccctgagatggggggaaagccgagaaggaagaaccctcaggaaggcctgtacaatgaactgcagaaagataagatggcggaggcctacagtgagattgggatgaaaggcgagcgccggaggggcaaggggcacgatggcctttaccagggtctcagtacagccaccaaggacacctacgacgcccttcacatgcaggccctgccccctcgctaa

SEQ ID NO: 7985 - DNA, 1491 bp, synthetic construct
  source 1..1491: mol_type = other DNA
atggccttaccagtgaccgccttgctcctgccgctggccttgctgctccacgccgccaggccggacatccagatgacacagagccctagcagcctgtctgccagcgtgggagacagagtgaccatcacatgcaaggccagcgaccacatcaacaactggctggcctggtatcagcagaagcctggacaggcccctaagctgctgatctacggcgctaccacactggaaacaggcgtgcccagcagattttctggcagcggctctggcaccgactacaccctgacaatatccagcctccagcctgaggacttcgccacctactactgtcagcagagctggaacaccccttggacattcggccagggcaccaagctggaaatcaagagactcgagggaggctctgcccgcagcgaggaccgctaccgcaaccccaccggcggaagcttcgaacaagttcagcttcaacagcctggcgctgagctggtcaaacctggcgcttctgtgaagatgagctgcaaagccagcggctacgccttcagcagctactggatcaactggatgaagcagaaacccggccagggactcgaatggatcggccaaatctatcccggcgacggcgacaccaactacaacggcaagttcaagggcagagccacactgaccgccgatacctctagcagcacagcctacatgcagctgagcagcctgaccagcgaagatagcgccgtgtacttctgtgcccggtccatcacaacagtcgtgggctgcgctatggactattggggccagggaacaagcgtgaccgtgtctagtacgcgtaccacgacgccagcgccgcgaccaccaacaccggcgcccaccatcgcgtcgcagcccctgtccctgcgcccagaggcgtgccggccagcggcggggggcgcagtgcacacgagggggctggacttcgcctgtgacatctacatctgggcgcccttggccgggacttgtggggtccttctcctgtcactggttatcaccctttactgcaaacggggcagaaagaaactcctgtatatattcaaacaaccatttatgagaccagtacaaactactcaagaggaagatggctgtagctgccgatttccagaagaagaagaaggaggatgtgaactgagagtgaagttcagcaggagcgcagacgcccccgcgtaccagcagggccagaaccagctctataacgagctgaatctaggacgaagagaggagtacgatgttttggacaagagacgtggccgggaccctgagatggggggaaagccgagaaggaagaaccctcaggaaggcctgtacaatgaactgcagaaagataagatggcggaggcctacagtgagattgggatgaaaggcgagcgccggaggggcaaggggcacgatggcctttaccagggtctcagtacagccaccaaggacacctacgacgcccttcacatgcaggccctgccccctcgctaa

SEQ ID NO: 7986 - DNA, 1491 bp, synthetic construct
  source 1..1491: mol_type = other DNA
atggccttaccagtgaccgccttgctcctgccgctggccttgctgctccacgccgccaggccggacatccagatgacacagagccctagcagcctgtctgccagcgtgggagacagagtgaccatcacatgcaaggccagcgaccacatcaacaactggctggcctggtatcagcagaagcctggacaggcccctaagctgctgatctacggcgctaccacactggaaacaggcgtgcccagcagattttctggcagcggctctggcaccgactacaccctgacaatatccagcctccagcctgaggacttcgccacctactactgtcagcagagctggaacaccccttggacattcggccagggcaccaagctggaaatcaagagactcgagggaggctctgcccgcagcgaggaccgctaccgcaaccacagcggcggaagcttcgaacaagttcagcttcaacagcctggcgctgagctggtcaaacctggcgcttctgtgaagatgagctgcaaagccagcggctacgccttcagcagctactggatcaactggatgaagcagaaacccggccagggactcgaatggatcggccaaatctatcccggcgacggcgacaccaactacaacggcaagttcaagggcagagccacactgaccgccgatacctctagcagcacagcctacatgcagctgagcagcctgaccagcgaagatagcgccgtgtacttctgtgcccggtccatcacaacagtcgtgggctgcgctatggactattggggccagggaacaagcgtgaccgtgtctagtacgcgtaccacgacgccagcgccgcgaccaccaacaccggcgcccaccatcgcgtcgcagcccctgtccctgcgcccagaggcgtgccggccagcggcggggggcgcagtgcacacgagggggctggacttcgcctgtgacatctacatctgggcgcccttggccgggacttgtggggtccttctcctgtcactggttatcaccctttactgcaaacggggcagaaagaaactcctgtatatattcaaacaaccatttatgagaccagtacaaactactcaagaggaagatggctgtagctgccgatttccagaagaagaagaaggaggatgtgaactgagagtgaagttcagcaggagcgcagacgcccccgcgtaccagcagggccagaaccagctctataacgagctgaatctaggacgaagagaggagtacgatgttttggacaagagacgtggccgggaccctgagatggggggaaagccgagaaggaagaaccctcaggaaggcctgtacaatgaactgcagaaagataagatggcggaggcctacagtgagattgggatgaaaggcgagcgccggaggggcaaggggcacgatggcctttaccagggtctcagtacagccaccaaggacacctacgacgcccttcacatgcaggccctgccccctcgctaa

SEQ ID NO: 7987 - DNA, 1479 bp, synthetic construct
  source 1..1479: mol_type = other DNA
atggccttaccagtgaccgccttgctcctgccgctggccttgctgctccacgccgccaggccggacatccagatgacacagagccctagcagcctgtctgccagcgtgggagacagagtgaccatcacatgcaaggccagcgaccacatcaacaactggctggcctggtatcagcagaagcctggacaggcccctaagctgctgatctacggcgctaccacactggaaacaggcgtgcccagcagattttctggcagcggctctggcaccgactacaccctgacaatatccagcctccagcctgaggacttcgccacctactactgtcagcagagctggaacaccccttggacattcggccagggcaccaagctggaaatcaagagactcgagggaggctctgccaagagcgaggacctgtacggcggaagcttcgaacaagttcagcttcaacagcctggcgctgagctggtcaaacctggcgcttctgtgaagatgagctgcaaagccagcggctacgccttcagcagctactggatcaactggatgaagcagaaacccggccagggactcgaatggatcggccaaatctatcccggcgacggcgacaccaactacaacggcaagttcaagggcagagccacactgaccgccgatacctctagcagcacagcctacatgcagctgagcagcctgaccagcgaagatagcgccgtgtacttctgtgcccggtccatcacaacagtcgtgggctgcgctatggactattggggccagggaacaagcgtgaccgtgtctagtacgcgtaccacgacgccagcgccgcgaccaccaacaccggcgcccaccatcgcgtcgcagcccctgtccctgcgcccagaggcgtgccggccagcggcggggggcgcagtgcacacgagggggctggacttcgcctgtgacatctacatctgggcgcccttggccgggacttgtggggtccttctcctgtcactggttatcaccctttactgcaaacggggcagaaagaaactcctgtatatattcaaacaaccatttatgagaccagtacaaactactcaagaggaagatggctgtagctgccgatttccagaagaagaagaaggaggatgtgaactgagagtgaagttcagcaggagcgcagacgcccccgcgtaccagcagggccagaaccagctctataacgagctgaatctaggacgaagagaggagtacgatgttttggacaagagacgtggccgggaccctgagatggggggaaagccgagaaggaagaaccctcaggaaggcctgtacaatgaactgcagaaagataagatggcggaggcctacagtgagattgggatgaaaggcgagcgccggaggggcaaggggcacgatggcctttaccagggtctcagtacagccaccaaggacacctacgacgcccttcacatgcaggccctgccccctcgctaa

SEQ ID NO: 7988 - DNA, 1506 bp, synthetic construct
  source 1..1506: mol_type = other DNA
atggccttaccagtgaccgccttgctcctgccgctggccttgctgctccacgccgccaggccggacatccagatgacacagagccctagcagcctgtctgccagcgtgggagacagagtgaccatcacatgcaaggccagcgaccacatcaacaactggctggcctggtatcagcagaagcctggacaggcccctaagctgctgatctacggcgctaccacactggaaacaggcgtgcccagcagattttctggcagcggctctggcaccgactacaccctgacaatatccagcctccagcctgaggacttcgccacctactactgtcagcagagctggaacaccccttggacattcggccagggcaccaagctggaaatcaagagactcgagggaggctctgcccgccccgccaagagcgaggacctgtaccccaaccccaagggcagcggcggaagcttcgaacaagttcagcttcaacagcctggcgctgagctggtcaaacctggcgcttctgtgaagatgagctgcaaagccagcggctacgccttcagcagctactggatcaactggatgaagcagaaacccggccagggactcgaatggatcggccaaatctatcccggcgacggcgacaccaactacaacggcaagttcaagggcagagccacactgaccgccgatacctctagcagcacagcctacatgcagctgagcagcctgaccagcgaagatagcgccgtgtacttctgtgcccggtccatcacaacagtcgtgggctgcgctatggactattggggccagggaacaagcgtgaccgtgtctagtacgcgtaccacgacgccagcgccgcgaccaccaacaccggcgcccaccatcgcgtcgcagcccctgtccctgcgcccagaggcgtgccggccagcggcggggggcgcagtgcacacgagggggctggacttcgcctgtgacatctacatctgggcgcccttggccgggacttgtggggtccttctcctgtcactggttatcaccctttactgcaaacggggcagaaagaaactcctgtatatattcaaacaaccatttatgagaccagtacaaactactcaagaggaagatggctgtagctgccgatttccagaagaagaagaaggaggatgtgaactgagagtgaagttcagcaggagcgcagacgcccccgcgtaccagcagggccagaaccagctctataacgagctgaatctaggacgaagagaggagtacgatgttttggacaagagacgtggccgggaccctgagatggggggaaagccgagaaggaagaaccctcaggaaggcctgtacaatgaactgcagaaagataagatggcggaggcctacagtgagattgggatgaaaggcgagcgccggaggggcaaggggcacgatggcctttaccagggtctcagtacagccaccaaggacacctacgacgcccttcacatgcaggccctgccccctcgctaa

SEQ ID NO: 7989 - DNA, 1503 bp, synthetic construct
  source 1..1503: mol_type = other DNA
atggccttaccagtgaccgccttgctcctgccgctggccttgctgctccacgccgccaggccggacatccagatgacacagagccctagcagcctgtctgccagcgtgggagacagagtgaccatcacatgcaaggccagcgaccacatcaacaactggctggcctggtatcagcagaagcctggacaggcccctaagctgctgatctacggcgctaccacactggaaacaggcgtgcccagcagattttctggcagcggctctggcaccgactacaccctgacaatatccagcctccagcctgaggacttcgccacctactactgtcagcagagctggaacaccccttggacattcggccagggcaccaagctggaaatcaagagactcgagggaggctctgcccgccccgccaagagcgaggacctgtaccccaaccccaagggcggcggaagcttcgaacaagttcagcttcaacagcctggcgctgagctggtcaaacctggcgcttctgtgaagatgagctgcaaagccagcggctacgccttcagcagctactggatcaactggatgaagcagaaacccggccagggactcgaatggatcggccaaatctatcccggcgacggcgacaccaactacaacggcaagttcaagggcagagccacactgaccgccgatacctctagcagcacagcctacatgcagctgagcagcctgaccagcgaagatagcgccgtgtacttctgtgcccggtccatcacaacagtcgtgggctgcgctatggactattggggccagggaacaagcgtgaccgtgtctagtacgcgtaccacgacgccagcgccgcgaccaccaacaccggcgcccaccatcgcgtcgcagcccctgtccctgcgcccagaggcgtgccggccagcggcggggggcgcagtgcacacgagggggctggacttcgcctgtgacatctacatctgggcgcccttggccgggacttgtggggtccttctcctgtcactggttatcaccctttactgcaaacggggcagaaagaaactcctgtatatattcaaacaaccatttatgagaccagtacaaactactcaagaggaagatggctgtagctgccgatttccagaagaagaagaaggaggatgtgaactgagagtgaagttcagcaggagcgcagacgcccccgcgtaccagcagggccagaaccagctctataacgagctgaatctaggacgaagagaggagtacgatgttttggacaagagacgtggccgggaccctgagatggggggaaagccgagaaggaagaaccctcaggaaggcctgtacaatgaactgcagaaagataagatggcggaggcctacagtgagattgggatgaaaggcgagcgccggaggggcaaggggcacgatggcctttaccagggtctcagtacagccaccaaggacacctacgacgcccttcacatgcaggccctgccccctcgctaa

SEQ ID NO: 7990 - DNA, 1500 bp, synthetic construct
  source 1..1500: mol_type = other DNA
atggccttaccagtgaccgccttgctcctgccgctggccttgctgctccacgccgccaggccggacatccagatgacacagagccctagcagcctgtctgccagcgtgggagacagagtgaccatcacatgcaaggccagcgaccacatcaacaactggctggcctggtatcagcagaagcctggacaggcccctaagctgctgatctacggcgctaccacactggaaacaggcgtgcccagcagattttctggcagcggctctggcaccgactacaccctgacaatatccagcctccagcctgaggacttcgccacctactactgtcagcagagctggaacaccccttggacattcggccagggcaccaagctggaaatcaagagactcgagggaggctctgcccgccccgccaagagcgaggacctgtaccccaaccccaagggcggaagcttcgaacaagttcagcttcaacagcctggcgctgagctggtcaaacctggcgcttctgtgaagatgagctgcaaagccagcggctacgccttcagcagctactggatcaactggatgaagcagaaacccggccagggactcgaatggatcggccaaatctatcccggcgacggcgacaccaactacaacggcaagttcaagggcagagccacactgaccgccgatacctctagcagcacagcctacatgcagctgagcagcctgaccagcgaagatagcgccgtgtacttctgtgcccggtccatcacaacagtcgtgggctgcgctatggactattggggccagggaacaagcgtgaccgtgtctagtacgcgtaccacgacgccagcgccgcgaccaccaacaccggcgcccaccatcgcgtcgcagcccctgtccctgcgcccagaggcgtgccggccagcggcggggggcgcagtgcacacgagggggctggacttcgcctgtgacatctacatctgggcgcccttggccgggacttgtggggtccttctcctgtcactggttatcaccctttactgcaaacggggcagaaagaaactcctgtatatattcaaacaaccatttatgagaccagtacaaactactcaagaggaagatggctgtagctgccgatttccagaagaagaagaaggaggatgtgaactgagagtgaagttcagcaggagcgcagacgcccccgcgtaccagcagggccagaaccagctctataacgagctgaatctaggacgaagagaggagtacgatgttttggacaagagacgtggccgggaccctgagatggggggaaagccgagaaggaagaaccctcaggaaggcctgtacaatgaactgcagaaagataagatggcggaggcctacagtgagattgggatgaaaggcgagcgccggaggggcaaggggcacgatggcctttaccagggtctcagtacagccaccaaggacacctacgacgcccttcacatgcaggccctgccccctcgctaa

SEQ ID NO: 7991 - DNA, 1497 bp, synthetic construct
  source 1..1497: mol_type = other DNA
atggccttaccagtgaccgccttgctcctgccgctggccttgctgctccacgccgccaggccggacatccagatgacacagagccctagcagcctgtctgccagcgtgggagacagagtgaccatcacatgcaaggccagcgaccacatcaacaactggctggcctggtatcagcagaagcctggacaggcccctaagctgctgatctacggcgctaccacactggaaacaggcgtgcccagcagattttctggcagcggctctggcaccgactacaccctgacaatatccagcctccagcctgaggacttcgccacctactactgtcagcagagctggaacaccccttggacattcggccagggcaccaagctggaaatcaagagactcgagggaggctctgcccgccccgccaagagcgaggacctgtaccccaaccccggcggaagcttcgaacaagttcagcttcaacagcctggcgctgagctggtcaaacctggcgcttctgtgaagatgagctgcaaagccagcggctacgccttcagcagctactggatcaactggatgaagcagaaacccggccagggactcgaatggatcggccaaatctatcccggcgacggcgacaccaactacaacggcaagttcaagggcagagccacactgaccgccgatacctctagcagcacagcctacatgcagctgagcagcctgaccagcgaagatagcgccgtgtacttctgtgcccggtccatcacaacagtcgtgggctgcgctatggactattggggccagggaacaagcgtgaccgtgtctagtacgcgtaccacgacgccagcgccgcgaccaccaacaccggcgcccaccatcgcgtcgcagcccctgtccctgcgcccagaggcgtgccggccagcggcggggggcgcagtgcacacgagggggctggacttcgcctgtgacatctacatctgggcgcccttggccgggacttgtggggtccttctcctgtcactggttatcaccctttactgcaaacggggcagaaagaaactcctgtatatattcaaacaaccatttatgagaccagtacaaactactcaagaggaagatggctgtagctgccgatttccagaagaagaagaaggaggatgtgaactgagagtgaagttcagcaggagcgcagacgcccccgcgtaccagcagggccagaaccagctctataacgagctgaatctaggacgaagagaggagtacgatgttttggacaagagacgtggccgggaccctgagatggggggaaagccgagaaggaagaaccctcaggaaggcctgtacaatgaactgcagaaagataagatggcggaggcctacagtgagattgggatgaaaggcgagcgccggaggggcaaggggcacgatggcctttaccagggtctcagtacagccaccaaggacacctacgacgcccttcacatgcaggccctgccccctcgctaa

SEQ ID NO: 7992 - DNA, 1494 bp, synthetic construct
  source 1..1494: mol_type = other DNA
atggccttaccagtgaccgccttgctcctgccgctggccttgctgctccacgccgccaggccggacatccagatgacacagagccctagcagcctgtctgccagcgtgggagacagagtgaccatcacatgcaaggccagcgaccacatcaacaactggctggcctggtatcagcagaagcctggacaggcccctaagctgctgatctacggcgctaccacactggaaacaggcgtgcccagcagattttctggcagcggctctggcaccgactacaccctgacaatatccagcctccagcctgaggacttcgccacctactactgtcagcagagctggaacaccccttggacattcggccagggcaccaagctggaaatcaagagactcgagggaggctctgcccgccccgccaagagcgaggacctgtaccccaacggcggaagcttcgaacaagttcagcttcaacagcctggcgctgagctggtcaaacctggcgcttctgtgaagatgagctgcaaagccagcggctacgccttcagcagctactggatcaactggatgaagcagaaacccggccagggactcgaatggatcggccaaatctatcccggcgacggcgacaccaactacaacggcaagttcaagggcagagccacactgaccgccgatacctctagcagcacagcctacatgcagctgagcagcctgaccagcgaagatagcgccgtgtacttctgtgcccggtccatcacaacagtcgtgggctgcgctatggactattggggccagggaacaagcgtgaccgtgtctagtacgcgtaccacgacgccagcgccgcgaccaccaacaccggcgcccaccatcgcgtcgcagcccctgtccctgcgcccagaggcgtgccggccagcggcggggggcgcagtgcacacgagggggctggacttcgcctgtgacatctacatctgggcgcccttggccgggacttgtggggtccttctcctgtcactggttatcaccctttactgcaaacggggcagaaagaaactcctgtatatattcaaacaaccatttatgagaccagtacaaactactcaagaggaagatggctgtagctgccgatttccagaagaagaagaaggaggatgtgaactgagagtgaagttcagcaggagcgcagacgcccccgcgtaccagcagggccagaaccagctctataacgagctgaatctaggacgaagagaggagtacgatgttttggacaagagacgtggccgggaccctgagatggggggaaagccgagaaggaagaaccctcaggaaggcctgtacaatgaactgcagaaagataagatggcggaggcctacagtgagattgggatgaaaggcgagcgccggaggggcaaggggcacgatggcctttaccagggtctcagtacagccaccaaggacacctacgacgcccttcacatgcaggccctgccccctcgctaa

SEQ ID NO: 7993 - DNA, 1491 bp, synthetic construct
  source 1..1491: mol_type = other DNA
atggccttaccagtgaccgccttgctcctgccgctggccttgctgctccacgccgccaggccggacatccagatgacacagagccctagcagcctgtctgccagcgtgggagacagagtgaccatcacatgcaaggccagcgaccacatcaacaactggctggcctggtatcagcagaagcctggacaggcccctaagctgctgatctacggcgctaccacactggaaacaggcgtgcccagcagattttctggcagcggctctggcaccgactacaccctgacaatatccagcctccagcctgaggacttcgccacctactactgtcagcagagctggaacaccccttggacattcggccagggcaccaagctggaaatcaagagactcgagggaggctctgcccgccccgccaagagcgaggacctgtaccccggcggaagcttcgaacaagttcagcttcaacagcctggcgctgagctggtcaaacctggcgcttctgtgaagatgagctgcaaagccagcggctacgccttcagcagctactggatcaactggatgaagcagaaacccggccagggactcgaatggatcggccaaatctatcccggcgacggcgacaccaactacaacggcaagttcaagggcagagccacactgaccgccgatacctctagcagcacagcctacatgcagctgagcagcctgaccagcgaagatagcgccgtgtacttctgtgcccggtccatcacaacagtcgtgggctgcgctatggactattggggccagggaacaagcgtgaccgtgtctagtacgcgtaccacgacgccagcgccgcgaccaccaacaccggcgcccaccatcgcgtcgcagcccctgtccctgcgcccagaggcgtgccggccagcggcggggggcgcagtgcacacgagggggctggacttcgcctgtgacatctacatctgggcgcccttggccgggacttgtggggtccttctcctgtcactggttatcaccctttactgcaaacggggcagaaagaaactcctgtatatattcaaacaaccatttatgagaccagtacaaactactcaagaggaagatggctgtagctgccgatttccagaagaagaagaaggaggatgtgaactgagagtgaagttcagcaggagcgcagacgcccccgcgtaccagcagggccagaaccagctctataacgagctgaatctaggacgaagagaggagtacgatgttttggacaagagacgtggccgggaccctgagatggggggaaagccgagaaggaagaaccctcaggaaggcctgtacaatgaactgcagaaagataagatggcggaggcctacagtgagattgggatgaaaggcgagcgccggaggggcaaggggcacgatggcctttaccagggtctcagtacagccaccaaggacacctacgacgcccttcacatgcaggccctgccccctcgctaa

SEQ ID NO: 7994 - DNA, 1488 bp, synthetic construct
  source 1..1488: mol_type = other DNA
atggccttaccagtgaccgccttgctcctgccgctggccttgctgctccacgccgccaggccggacatccagatgacacagagccctagcagcctgtctgccagcgtgggagacagagtgaccatcacatgcaaggccagcgaccacatcaacaactggctggcctggtatcagcagaagcctggacaggcccctaagctgctgatctacggcgctaccacactggaaacaggcgtgcccagcagattttctggcagcggctctggcaccgactacaccctgacaatatccagcctccagcctgaggacttcgccacctactactgtcagcagagctggaacaccccttggacattcggccagggcaccaagctggaaatcaagagactcgagggaggctctgcccgccccgccaagagcgaggacctgtacggcggaagcttcgaacaagttcagcttcaacagcctggcgctgagctggtcaaacctggcgcttctgtgaagatgagctgcaaagccagcggctacgccttcagcagctactggatcaactggatgaagcagaaacccggccagggactcgaatggatcggccaaatctatcccggcgacggcgacaccaactacaacggcaagttcaagggcagagccacactgaccgccgatacctctagcagcacagcctacatgcagctgagcagcctgaccagcgaagatagcgccgtgtacttctgtgcccggtccatcacaacagtcgtgggctgcgctatggactattggggccagggaacaagcgtgaccgtgtctagtacgcgtaccacgacgccagcgccgcgaccaccaacaccggcgcccaccatcgcgtcgcagcccctgtccctgcgcccagaggcgtgccggccagcggcggggggcgcagtgcacacgagggggctggacttcgcctgtgacatctacatctgggcgcccttggccgggacttgtggggtccttctcctgtcactggttatcaccctttactgcaaacggggcagaaagaaactcctgtatatattcaaacaaccatttatgagaccagtacaaactactcaagaggaagatggctgtagctgccgatttccagaagaagaagaaggaggatgtgaactgagagtgaagttcagcaggagcgcagacgcccccgcgtaccagcagggccagaaccagctctataacgagctgaatctaggacgaagagaggagtacgatgttttggacaagagacgtggccgggaccctgagatggggggaaagccgagaaggaagaaccctcaggaaggcctgtacaatgaactgcagaaagataagatggcggaggcctacagtgagattgggatgaaaggcgagcgccggaggggcaaggggcacgatggcctttaccagggtctcagtacagccaccaaggacacctacgacgcccttcacatgcaggccctgccccctcgctaa

SEQ ID NO: 7995 - DNA, 1485 bp, synthetic construct
  source 1..1485: mol_type = other DNA
atggccttaccagtgaccgccttgctcctgccgctggccttgctgctccacgccgccaggccggacatccagatgacacagagccctagcagcctgtctgccagcgtgggagacagagtgaccatcacatgcaaggccagcgaccacatcaacaactggctggcctggtatcagcagaagcctggacaggcccctaagctgctgatctacggcgctaccacactggaaacaggcgtgcccagcagattttctggcagcggctctggcaccgactacaccctgacaatatccagcctccagcctgaggacttcgccacctactactgtcagcagagctggaacaccccttggacattcggccagggcaccaagctggaaatcaagagactcgagggaggctctcgccccgccaagagcgaggacctgtacggcggaagcttcgaacaagttcagcttcaacagcctggcgctgagctggtcaaacctggcgcttctgtgaagatgagctgcaaagccagcggctacgccttcagcagctactggatcaactggatgaagcagaaacccggccagggactcgaatggatcggccaaatctatcccggcgacggcgacaccaactacaacggcaagttcaagggcagagccacactgaccgccgatacctctagcagcacagcctacatgcagctgagcagcctgaccagcgaagatagcgccgtgtacttctgtgcccggtccatcacaacagtcgtgggctgcgctatggactattggggccagggaacaagcgtgaccgtgtctagtacgcgtaccacgacgccagcgccgcgaccaccaacaccggcgcccaccatcgcgtcgcagcccctgtccctgcgcccagaggcgtgccggccagcggcggggggcgcagtgcacacgagggggctggacttcgcctgtgacatctacatctgggcgcccttggccgggacttgtggggtccttctcctgtcactggttatcaccctttactgcaaacggggcagaaagaaactcctgtatatattcaaacaaccatttatgagaccagtacaaactactcaagaggaagatggctgtagctgccgatttccagaagaagaagaaggaggatgtgaactgagagtgaagttcagcaggagcgcagacgcccccgcgtaccagcagggccagaaccagctctataacgagctgaatctaggacgaagagaggagtacgatgttttggacaagagacgtggccgggaccctgagatggggggaaagccgagaaggaagaaccctcaggaaggcctgtacaatgaactgcagaaagataagatggcggaggcctacagtgagattgggatgaaaggcgagcgccggaggggcaaggggcacgatggcctttaccagggtctcagtacagccaccaaggacacctacgacgcccttcacatgcaggccctgccccctcgctaa

SEQ ID NO: 7996 - DNA, 1482 bp, synthetic construct
  source 1..1482: mol_type = other DNA
atggccttaccagtgaccgccttgctcctgccgctggccttgctgctccacgccgccaggccggacatccagatgacacagagccctagcagcctgtctgccagcgtgggagacagagtgaccatcacatgcaaggccagcgaccacatcaacaactggctggcctggtatcagcagaagcctggacaggcccctaagctgctgatctacggcgctaccacactggaaacaggcgtgcccagcagattttctggcagcggctctggcaccgactacaccctgacaatatccagcctccagcctgaggacttcgccacctactactgtcagcagagctggaacaccccttggacattcggccagggcaccaagctggaaatcaagagactcgagggaggctctcccgccaagagcgaggacctgtacggcggaagcttcgaacaagttcagcttcaacagcctggcgctgagctggtcaaacctggcgcttctgtgaagatgagctgcaaagccagcggctacgccttcagcagctactggatcaactggatgaagcagaaacccggccagggactcgaatggatcggccaaatctatcccggcgacggcgacaccaactacaacggcaagttcaagggcagagccacactgaccgccgatacctctagcagcacagcctacatgcagctgagcagcctgaccagcgaagatagcgccgtgtacttctgtgcccggtccatcacaacagtcgtgggctgcgctatggactattggggccagggaacaagcgtgaccgtgtctagtacgcgtaccacgacgccagcgccgcgaccaccaacaccggcgcccaccatcgcgtcgcagcccctgtccctgcgcccagaggcgtgccggccagcggcggggggcgcagtgcacacgagggggctggacttcgcctgtgacatctacatctgggcgcccttggccgggacttgtggggtccttctcctgtcactggttatcaccctttactgcaaacggggcagaaagaaactcctgtatatattcaaacaaccatttatgagaccagtacaaactactcaagaggaagatggctgtagctgccgatttccagaagaagaagaaggaggatgtgaactgagagtgaagttcagcaggagcgcagacgcccccgcgtaccagcagggccagaaccagctctataacgagctgaatctaggacgaagagaggagtacgatgttttggacaagagacgtggccgggaccctgagatggggggaaagccgagaaggaagaaccctcaggaaggcctgtacaatgaactgcagaaagataagatggcggaggcctacagtgagattgggatgaaaggcgagcgccggaggggcaaggggcacgatggcctttaccagggtctcagtacagccaccaaggacacctacgacgcccttcacatgcaggccctgccccctcgctaa

SEQ ID NO: 7997 - DNA, 1479 bp, synthetic construct; identical to SEQ ID NO: 7987
  source 1..1479: mol_type = other DNA

SEQ ID NO: 7998 - DNA, 1491 bp, synthetic construct
  source 1..1491: mol_type = other DNA
atggccttaccagtgaccgccttgctcctgccgctggccttgctgctccacgccgccaggccggacatccagatgacacagagccctagcagcctgtctgccagcgtgggagacagagtgaccatcacatgcaaggccagcgaccacatcaacaactggctggcctggtatcagcagaagcctggacaggcccctaagctgctgatctacggcgctaccacactggaaacaggcgtgcccagcagattttctggcagcggctctggcaccgactacaccctgacaatatccagcctccagcctgaggacttcgccacctactactgtcagcagagctggaacaccccttggacattcggccagggcaccaagctggaaatcaagagactcgagggaggctctgccaagagcgaggacctgtaccccaaccccaagggcggaagcttcgaacaagttcagcttcaacagcctggcgctgagctggtcaaacctggcgcttctgtgaagatgagctgcaaagccagcggctacgccttcagcagctactggatcaactggatgaagcagaaacccggccagggactcgaatggatcggccaaatctatcccggcgacggcgacaccaactacaacggcaagttcaagggcagagccacactgaccgccgatacctctagcagcacagcctacatgcagctgagcagcctgaccagcgaagatagcgccgtgtacttctgtgcccggtccatcacaacagtcgtgggctgcgctatggactattggggccagggaacaagcgtgaccgtgtctagtacgcgtaccacgacgccagcgccgcgaccaccaacaccggcgcccaccatcgcgtcgcagcccctgtccctgcgcccagaggcgtgccggccagcggcggggggcgcagtgcacacgagggggctggacttcgcctgtgacatctacatctgggcgcccttggccgggacttgtggggtccttctcctgtcactggttatcaccctttactgcaaacggggcagaaagaaactcctgtatatattcaaacaaccatttatgagaccagtacaaactactcaagaggaagatggctgtagctgccgatttccagaagaagaagaaggaggatgtgaactgagagtgaagttcagcaggagcgcagacgcccccgcgtaccagcagggccagaaccagctctataacgagctgaatctaggacgaagagaggagtacgatgttttggacaagagacgtggccgggaccctgagatggggggaaagccgagaaggaagaaccctcaggaaggcctgtacaatgaactgcagaaagataagatggcggaggcctacagtgagattgggatgaaaggcgagcgccggaggggcaaggggcacgatggcctttaccagggtctcagtacagccaccaaggacacctacgacgcccttcacatgcaggccctgccccctcgctaa

SEQ ID NO: 7999 - DNA, 1488 bp, synthetic construct
  source 1..1488: mol_type = other DNA
atggccttaccagtgaccgccttgctcctgccgctggccttgctgctccacgccgccaggccggacatccagatgacacagagccctagcagcctgtctgccagcgtgggagacagagtgaccatcacatgcaaggccagcgaccacatcaacaactggctggcctggtatcagcagaagcctggacaggcccctaagctgctgatctacggcgctaccacactggaaacaggcgtgcccagcagattttctggcagcggctctggcaccgactacaccctgacaatatccagcctccagcctgaggacttcgccacctactactgtcagcagagctggaacaccccttggacattcggccagggcaccaagctggaaatcaagagactcgagggaggctctgccaagagcgaggacctgtaccccaaccccggcggaagcttcgaacaagttcagcttcaacagcctggcgctgagctggtcaaacctggcgcttctgtgaagatgagctgcaaagccagcggctacgccttcagcagctactggatcaactggatgaagcagaaacccggccagggactcgaatggatcggccaaatctatcccggcgacggcgacaccaactacaacggcaagttcaagggcagagccacactgaccgccgatacctctagcagcacagcctacatgcagctgagcagcctgaccagcgaagatagcgccgtgtacttctgtgcccggtccatcacaacagtcgtgggctgcgctatggactattggggccagggaacaagcgtgaccgtgtctagtacgcgtaccacgacgccagcgccgcgaccaccaacaccggcgcccaccatcgcgtcgcagcccctgtccctgcgcccagaggcgtgccggccagcggcggggggcgcagtgcacacgagggggctggacttcgcctgtgacatctacatctgggcgcccttggccgggacttgtggggtccttctcctgtcactggttatcaccctttactgcaaacggggcagaaagaaactcctgtatatattcaaacaaccatttatgagaccagtacaaactactcaagaggaagatggctgtagctgccgatttccagaagaagaagaaggaggatgtgaactgagagtgaagttcagcaggagcgcagacgcccccgcgtaccagcagggccagaaccagctctataacgagctgaatctaggacgaagagaggagtacgatgttttggacaagagacgtggccgggaccctgagatggggggaaagccgagaaggaagaaccctcaggaaggcctgtacaatgaactgcagaaagataagatggcggaggcctacagtgagattgggatgaaaggcgagcgccggaggggcaaggggcacgatggcctttaccagggtctcagtacagccaccaaggacacctacgacgcccttcacatgcaggccctgccccctcgctaa

SEQ ID NO: 8000 - DNA, 1485 bp, synthetic construct
  source 1..1485: mol_type = other DNA
atggccttaccagtgaccgccttgctcctgccgctggccttgctgctccacgccgccaggccggacatccagatgacacagagccctagcagcctgtctgccagcgtgggagacagagtgaccatcacatgcaaggccagcgaccacatcaacaactggctggcctggtatcagcagaagcctggacaggcccctaagctgctgatctacggcgctaccacactggaaacaggcgtgcccagcagattttctggcagcggctctggcaccgactacaccctgacaatatccagcctccagcctgaggacttcgccacctactactgtcagcagagctggaacaccccttggacattcggccagggcaccaagctggaaatcaagagactcgagggaggctctgccaagagcgaggacctgtaccccaacggcggaagcttcgaacaagttcagcttcaacagcctggcgctgagctggtcaaacctggcgcttctgtgaagatgagctgcaaagccagcggctacgccttcagcagctactggatcaactggatgaagcagaaacccggccagggactcgaatggatcggccaaatctatcccggcgacggcgacaccaactacaacggcaagttcaagggcagagccacactgaccgccgatacctctagcagcacagcctacatgcagctgagcagcctgaccagcgaagatagcgccgtgtacttctgtgcccggtccatcacaacagtcgtgggctgcgctatggactattggggccagggaacaagcgtgaccgtgtctagtacgcgtaccacgacgccagcgccgcgaccaccaacaccggcgcccaccatcgcgtcgcagcccctgtccctgcgcccagaggcgtgccggccagcggcggggggcgcagtgcacacgagggggctggacttcgcctgtgacatctacatctgggcgcccttggccgggacttgtggggtccttctcctgtcactggttatcaccctttactgcaaacggggcagaaagaaactcctgtatatattcaaacaaccatttatgagaccagtacaaactactcaagaggaagatggctgtagctgccgatttccagaagaagaagaaggaggatgtgaactgagagtgaagttcagcaggagcgcagacgcccccgcgtaccagcagggccagaaccagctctataacgagctgaatctaggacgaagagaggagtacgatgttttggacaagagacgtggccgggaccctgagatggggggaaagccgagaaggaagaaccctcaggaaggcctgtacaatgaactgcagaaagataagatggcggaggcctacagtgagattgggatgaaaggcgagcgccggaggggcaaggggcacgatggcctttaccagggtctcagtacagccaccaaggacacctacgacgcccttcacatgcaggccctgccccctcgctaa

SEQ ID NO: 8001 - DNA, 1482 bp, synthetic construct
  source 1..1482: mol_type = other DNA
atggccttaccagtgaccgccttgctcctgccgctggccttgctgctccacgccgccaggccggacatccagatgacacagagccctagcagcctgtctgccagcgtgggagacagagtgaccatcacatgcaaggccagcgaccacatcaacaactggctggcctggtatcagcagaagcctggacaggcccctaagctgctgatctacggcgctaccacactggaaacaggcgtgcccagcagattttctggcagcggctctggcaccgactacaccctgacaatatccagcctccagcctgaggacttcgccacctactactgtcagcagagctggaacaccccttggacattcggccagggcaccaagctggaaatcaagagactcgagggaggctctgccaagagcgaggacctgtaccccggcggaagcttcgaacaagttcagcttcaacagcctggcgctgagctggtcaaacctggcgcttctgtgaagatgagctgcaaagccagcggctacgccttcagcagctactggatcaactggatgaagcagaaacccggccagggactcgaatggatcggccaaatctatcccggcgacggcgacaccaactacaacggcaagttcaagggcagagccacactgaccgccgatacctctagcagcacagcctacatgcagctgagcagcctgaccagcgaagatagcgccgtgtacttctgtgcccggtccatcacaacagtcgtgggctgcgctatggactattggggccagggaacaagcgtgaccgtgtctagtacgcgtaccacgacgccagcgccgcgaccaccaacaccggcgcccaccatcgcgtcgcagcccctgtccctgcgcccagaggcgtgccggccagcggcggggggcgcagtgcacacgagggggctggacttcgcctgtgacatctacatctgggcgcccttggccgggacttgtggggtccttctcctgtcactggttatcaccctttactgcaaacggggcagaaagaaactcctgtatatattcaaacaaccatttatgagaccagtacaaactactcaagaggaagatggctgtagctgccgatttccagaagaagaagaaggaggatgtgaactgagagtgaagttcagcaggagcgcagacgcccccgcgtaccagcagggccagaaccagctctataacgagctgaatctaggacgaagagaggagtacgatgttttggacaagagacgtggccgggaccctgagatggggggaaagccgagaaggaagaaccctcaggaaggcctgtacaatgaactgcagaaagataagatggcggaggcctacagtgagattgggatgaaaggcgagcgccggaggggcaaggggcacgatggcctttaccagggtctcagtacagccaccaaggacacctacgacgcccttcacatgcaggccctgccccctcgctaa

SEQ ID NO: 8002 - DNA, 1479 bp, synthetic construct; identical to SEQ ID NO: 7987
  source 1..1479: mol_type = other DNA

SEQ ID NO: 8003 - DNA, 1488 bp, synthetic construct
  source 1..1488: mol_type = other DNA
atggccttaccagtgaccgccttgctcctgccgctggccttgctgctccacgccgccaggccggacatccagatgacacagagccctagcagcctgtctgccagcgtgggagacagagtgaccatcacatgcaaggccagcgaccacatcaacaactggctggcctggtatcagcagaagcctggacaggcccctaagctgctgatctacggcgctaccacactggaaacaggcgtgcccagcagattttctggcagcggctctggcaccgactacaccctgacaatatccagcctccagcctgaggacttcgccacctactactgtcagcagagctggaacaccccttggacattcggccagggcaccaagctggaaatcaagagactcgagggaggctctaagagcgaggacctgtaccccaaccccaagggcggaagcttcgaacaagttcagcttcaacagcctggcgctgagctggtcaaacctggcgcttctgtgaagatgagctgcaaagccagcggctacgccttcagcagctactggatcaactggatgaagcagaaacccggccagggactcgaatggatcggccaaatctatcccggcgacggcgacaccaactacaacggcaagttcaagggcagagccacactgaccgccgatacctctagcagcacagcctacatgcagctgagcagcctgaccagcgaagatagcgccgtgtacttctgtgcccggtccatcacaacagtcgtgggctgcgctatggactattggggccagggaacaagcgtgaccgtgtctagtacgcgtaccacgacgccagcgccgcgaccaccaacaccggcgcccaccatcgcgtcgcagcccctgtccctgcgcccagaggcgtgccggccagcggcggggggcgcagtgcacacgagggggctggacttcgcctgtgacatctacatctgggcgcccttggccgggacttgtggggtccttctcctgtcactggttatcaccctttactgcaaacggggcagaaagaaactcctgtatatattcaaacaaccatttatgagaccagtacaaactactcaagaggaagatggctgtagctgccgatttccagaagaagaagaaggaggatgtgaactgagagtgaagttcagcaggagcgcagacgcccccgcgtaccagcagggccagaaccagctctataacgagctgaatctaggacgaagagaggagtacgatgttttggacaagagacgtggccgggaccctgagatggggggaaagccgagaaggaagaaccctcaggaaggcctgtacaatgaactgcagaaagataagatggcggaggcctacagtgagattgggatgaaaggcgagcgccggaggggcaaggggcacgatggcctttaccagggtctcagtacagccaccaaggacacctacgacgcccttcacatgcaggccctgccccctcgctaa

SEQ ID NO: 8004 - DNA, 1485 bp, synthetic construct
  source 1..1485: mol_type = other DNA
atggccttaccagtgaccgccttgctcctgccgctggccttgctgctccacgccgccaggccggacatccagatgacacagagccctagcagcctgtctgccagcgtgggagacagagtgaccatcacatgcaaggccagcgaccacatcaacaactggctggcctggtatcagcagaagcctggacaggcccctaagctgctgatctacggcgctaccacactggaaacaggcgtgcccagcagattttctggcagcggctctggcaccgactacaccctgacaatatccagcctccagcctgaggacttcgccacctactactgtcagcagagctggaacaccccttggacattcggccagggcaccaagctggaaatcaagagactcgagggaggctctaagagcgaggacctgtaccccaaccccggcggaagcttcgaacaagttcagcttcaacagcctggcgctgagctggtcaaacctggcgcttctgtgaagatgagctgcaaagccagcggctacgccttcagcagctactggatcaactggatgaagcagaaacccggccagggactcgaatggatcggccaaatctatcccggcgacggcgacaccaactacaacggcaagttcaagggcagagccacactgaccgccgatacctctagcagcacagcctacatgcagctgagcagcctgaccagcgaagatagcgccgtgtacttctgtgcccggtccatcacaacagtcgtgggctgcgctatggactattggggccagggaacaagcgtgaccgtgtctagtacgcgtaccacgacgccagcgccgcgaccaccaacaccggcgcccaccatcgcgtcgcagcccctgtccctgcgcccagaggcgtgccggccagcggcggggggcgcagtgcacacgagggggctggacttcgcctgtgacatctacatctgggcgcccttggccgggacttgtggggtccttctcctgtcactggttatcaccctttactgcaaacggggcagaaagaaactcctgtatatattcaaacaaccatttatgagaccagtacaaactactcaagaggaagatggctgtagctgccgatttccagaagaagaagaaggaggatgtgaactgagagtgaagttcagcaggagcgcagacgcccccgcgtaccagcagggccagaaccagctctataacgagctgaatctaggacgaagagaggagtacgatgttttggacaagagacgtggccgggaccctgagatggggggaaagccgagaaggaagaaccctcaggaaggcctgtacaatgaactgcagaaagataagatggcggaggcctacagtgagattgggatgaaaggcgagcgccggaggggcaaggggcacgatggcctttaccagggtctcagtacagccaccaaggacacctacgacgcccttcacatgcaggccctgccccctcgctaa

SEQ ID NO: 8005 - DNA, 1482 bp, synthetic construct
  source 1..1482: mol_type = other DNA
atggccttaccagtgaccgccttgctcctgccgctggccttgctgctccacgccgccaggccggacatccagatgacacagagccctagcagcctgtctgccagcgtgggagacagagtgaccatcacatgcaaggccagcgaccacatcaacaactggctggcctggtatcagcagaagcctggacaggcccctaagctgctgatctacggcgctaccacactggaaacaggcgtgcccagcagattttctggcagcggctctggcaccgactacaccctgacaatatccagcctccagcctgaggacttcgccacctactactgtcagcagagctggaacaccccttggacattcggccagggcaccaagctggaaatcaagagactcgagggaggctctaagagcgaggacctgtaccccaacggcggaagcttcgaacaagttcagcttcaacagcctggcgctgagctggtcaaacctggcgcttctgtgaagatgagctgcaaagccagcggctacgccttcagcagctactggatcaactggatgaagcagaaacccggccagggactcgaatggatcggccaaatctatcccggcgacggcgacaccaactacaacggcaagttcaagggcagagccacactgaccgccgatacctctagcagcacagcctacatgcagctgagcagcctgaccagcgaagatagcgccgtgtacttctgtgcccggtccatcacaacagtcgtgggctgcgctatggactattggggccagggaacaagcgtgaccgtgtctagtacgcgtaccacgacgccagcgccgcgaccaccaacaccggcgcccaccatcgcgtcgcagcccctgtccctgcgcccagaggcgtgccggccagcggcggggggcgcagtgcacacgagggggctggacttcgcctgtgacatctacatctgggcgcccttggccgggacttgtggggtccttctcctgtcactggttatcaccctttactgcaaacggggcagaaagaaactcctgtatatattcaaacaaccatttatgagaccagtacaaactactcaagaggaagatggctgtagctgccgatttccagaagaagaagaaggaggatgtgaactgagagtgaagttcagcaggagcgcagacgcccccgcgtaccagcagggccagaaccagctctataacgagctgaatctaggacgaagagaggagtacgatgttttggacaagagacgtggccgggaccctgagatggggggaaagccgagaaggaagaaccctcaggaaggcctgtacaatgaactgcagaaagataagatggcggaggcctacagtgagattgggatgaaaggcgagcgccggaggggcaaggggcacgatggcctttaccagggtctcagtacagccaccaaggacacctacgacgcccttcacatgcaggccctgccccctcgctaa

SEQ ID NO: 8006 - DNA, 1479 bp, synthetic construct
  source 1..1479: mol_type = other DNA
atggccttaccagtgaccgccttgctcctgccgctggccttgctgctccacgccgccaggccggacatccagatgacacagagccctagcagcctgtctgccagcgtgggagacagagtgaccatcacatgcaaggccagcgaccacatcaacaactggctggcctggtatcagcagaagcctggacaggcccctaagctgctgatctacggcgctaccacactggaaacaggcgtgcccagcagattttctggcagcggctctggcaccgactacaccctgacaatatccagcctccagcctgaggacttcgccacctactactgtcagcagagctggaacaccccttggacattcggccagggcaccaagctggaaatcaagagactcgagggaggctctaagagcgaggacctgtaccccggcggaagcttcgaacaagttcagcttcaacagcctggcgctgagctggtcaaacctggcgcttctgtgaagatgagctgcaaagccagcggctacgccttcagcagctactggatcaactggatgaagcagaaacccggccagggactcgaatggatcggccaaatctatcccggcgacggcgacaccaactacaacggcaagttcaagggcagagccacactgaccgccgatacctctagcagcacagcctacatgcagctgagcagcctgaccagcgaagatagcgccgtgtacttctgtgcccggtccatcacaacagtcgtgggctgcgctatggactattggggccagggaacaagcgtgaccgtgtctagtacgcgtaccacgacgccagcgccgcgaccaccaacaccggcgcccaccatcgcgtcgcagcccctgtccctgcgcccagaggcgtgccggccagcggcggggggcgcagtgcacacgagggggctggacttcgcctgtgacatctacatctgggcgcccttggccgggacttgtggggtccttctcctgtcactggttatcaccctttactgcaaacggggcagaaagaaactcctgtatatattcaaacaaccatttatgagaccagtacaaactactcaagaggaagatggctgtagctgccgatttccagaagaagaagaaggaggatgtgaactgagagtgaagttcagcaggagcgcagacgcccccgcgtaccagcagggccagaaccagctctataacgagctgaatctaggacgaagagaggagtacgatgttttggacaagagacgtggccgggaccctgagatggggggaaagccgagaaggaagaaccctcaggaaggcctgtacaatgaactgcagaaagataagatggcggaggcctacagtgagattgggatgaaaggcgagcgccggaggggcaaggggcacgatggcctttaccagggtctcagtacagccaccaaggacacctacgacgcccttcacatgcaggccctgccccctcgctaa

SEQ ID NO: 8007 - DNA, 1476 bp, synthetic construct
  source 1..1476: mol_type = other DNA
atggccttaccagtgaccgccttgctcctgccgctggccttgctgctccacgccgccaggccggacatccagatgacacagagccctagcagcctgtctgccagcgtgggagacagagtgaccatcacatgcaaggccagcgaccacatcaacaactggctggcctggtatcagcagaagcctggacaggcccctaagctgctgatctacggcgctaccacactggaaacaggcgtgcccagcagattttctggcagcggctctggcaccgactacaccctgacaatatccagcctccagcctgaggacttcgccacctactactgtcagcagagctggaacaccccttggacattcggccagggcaccaagctggaaatcaagagactcgagggaggctctaagagcgaggacctgtacggcggaagcttcgaacaagttcagcttcaacagcctggcgctgagctggtcaaacctggcgcttctgtgaagatgagctgcaaagccagcggctacgccttcagcagctactggatcaactggatgaagcagaaacccggccagggactcgaatggatcggccaaatctatcccggcgacggcgacaccaactacaacggcaagttcaagggcagagccacactgaccgccgatacctctagcagcacagcctacatgcagctgagcagcctgaccagcgaagatagcgccgtgtacttctgtgcccggtccatcacaacagtcgtgggctgcgctatggactattggggccagggaacaagcgtgaccgtgtctagtacgcgtaccacgacgccagcgccgcgaccaccaacaccggcgcccaccatcgcgtcgcagcccctgtccctgcgcccagaggcgtgccggccagcggcggggggcgcagtgcacacgagggggctggacttcgcctgtgacatctacatctgggcgcccttggccgggacttgtggggtccttctcctgtcactggttatcaccctttactgcaaacggggcagaaagaaactcctgtatatattcaaacaaccatttatgagaccagtacaaactactcaagaggaagatggctgtagctgccgatttccagaagaagaagaaggaggatgtgaactgagagtgaagttcagcaggagcgcagacgcccccgcgtaccagcagggccagaaccagctctataacgagctgaatctaggacgaagagaggagtacgatgttttggacaagagacgtggccgggaccctgagatggggggaaagccgagaaggaagaaccctcaggaaggcctgtacaatgaactgcagaaagataagatggcggaggcctacagtgagattgggatgaaaggcgagcgccggaggggcaaggggcacgatggcctttaccagggtctcagtacagccaccaaggacacctacgacgcccttcacatgcaggccctgccccctcgctaa

SEQ ID NO: 8008 - DNA, 1491 bp, synthetic construct
  source 1..1491: mol_type = other DNA
atggccttaccagtgaccgccttgctcctgccgctggccttgctgctccacgccgccaggccggacatccagatgacacagagccctagcagcctgtctgccagcgtgggagacagagtgaccatcacatgcaaggccagcgaccacatcaacaactggctggcctggtatcagcagaagcctggacaggcccctaagctgctgatctacggcgctaccacactggaaacaggcgtgcccagcagattttctggcagcggctctggcaccgactacaccctgacaatatccagcctccagcctgaggacttcgccacctactactgtcagcagagctggaacaccccttggacattcggccagggcaccaagctggaaatcaagagactcgagggaggctctcaggccgccgccgagaccctgagcgaggtggccggcggaagcttcgaacaagttcagcttcaacagcctggcgctgagctggtcaaacctggcgcttctgtgaagatgagctgcaaagccagcggctacgccttcagcagctactggatcaactggatgaagcagaaacccggccagggactcgaatggatcggccaaatctatcccggcgacggcgacaccaactacaacggcaagttcaagggcagagccacactgaccgccgatacctctagcagcacagcctacatgcagctgagcagcctgaccagcgaagatagcgccgtgtacttctgtgcccggtccatcacaacagtcgtgggctgcgctatggactattggggccagggaacaagcgtgaccgtgtctagtacgcgtaccacgacgccagcgccgcgaccaccaacaccggcgcccaccatcgcgtcgcagcccctgtccctgcgcccagaggcgtgccggccagcggcggggggcgcagtgcacacgagggggctggacttcgcctgtgacatctacatctgggcgcccttggccgggacttgtggggtccttctcctgtcactggttatcaccctttactgcaaacggggcagaaagaaactcctgtatatattcaaacaaccatttatgagaccagtacaaactactcaagaggaagatggctgtagctgccgatttccagaagaagaagaaggaggatgtgaactgagagtgaagttcagcaggagcgcagacgcccccgcgtaccagcagggccagaaccagctctataacgagctgaatctaggacgaagagaggagtacgatgttttggacaagagacgtggccgggaccctgagatggggggaaagccgagaaggaagaaccctcaggaaggcctgtacaatgaactgcagaaagataagatggcggaggcctacagtgagattgggatgaaaggcgagcgccggaggggcaaggggcacgatggcctttaccagggtctcagtacagccaccaaggacacctacgacgcccttcacatgcaggccctgccccctcgctaa

SEQ ID NO: 8009 - DNA, 1491 bp, synthetic construct
  source 1..1491: mol_type = other DNA
atggccttaccagtgaccgccttgctcctgccgctggccttgctgctccacgccgccaggccggacatccagatgacacagagccctagcagcctgtctgccagcgtgggagacagagtgaccatcacatgcaaggccagcgaccacatcaacaactggctggcctggtatcagcagaagcctggacaggcccctaagctgctgatctacggcgctaccacactggaaacaggcgtgcccagcagattttctggcagcggctctggcaccgactacaccctgacaatatccagcctccagcctgaggacttcgccacctactactgtcagcagagctggaacaccccttggacattcggccagggcaccaagctggaaatcaagagactcgagggaggctctgtgagcggctggcgcctgttcaagaagatcagcggcggaagcttcgaacaagttcagcttcaacagcctggcgctgagctggtcaaacctggcgcttctgtgaagatgagctgcaaagccagcggctacgccttcagcagctactggatcaactggatgaagcagaaacccggccagggactcgaatggatcggccaaatctatcccggcgacggcgacaccaactacaacggcaagttcaagggcagagccacactgaccgccgatacctctagcagcacagcctacatgcagctgagcagcctgaccagcgaagatagcgccgtgtacttctgtgcccggtccatcacaacagtcgtgggctgcgctatggactattggggccagggaacaagcgtgaccgtgtctagtacgcgtaccacgacgccagcgccgcgaccaccaacaccggcgcccaccatcgcgtcgcagcccctgtccctgcgcccagaggcgtgccggccagcggcggggggcgcagtgcacacgagggggctggacttcgcctgtgacatctacatctgggcgcccttggccgggacttgtggggtccttctcctgtcactggttatcaccctttactgcaaacggggcagaaagaaactcctgtatatattcaaacaaccatttatgagaccagtacaaactactcaagaggaagatggctgtagctgccgatttccagaagaagaagaaggaggatgtgaactgagagtgaagttcagcaggagcgcagacgcccccgcgtaccagcagggccagaaccagctctataacgagctgaatctaggacgaagagaggagtacgatgttttggacaagagacgtggccgggaccctgagatggggggaaagccgagaaggaagaaccctcaggaaggcctgtacaatgaactgcagaaagataagatggcggaggcctacagtgagattgggatgaaaggcgagcgccggaggggcaaggggcacgatggcctttaccagggtctcagtacagccaccaaggacacctacgacgcccttcacatgcaggccctgccccctcgctaa

SEQ ID NO: 8010 - DNA, 1485 bp, synthetic construct
  source 1..1485: mol_type = other DNA
atggccttaccagtgaccgccttgctcctgccgctggccttgctgctccacgccgccaggccggacatccagatgacacagagccctagcagcctgtctgccagcgtgggagacagagtgaccatcacatgcaaggccagcgaccacatcaacaactggctggcctggtatcagcagaagcctggacaggcccctaagctgctgatctacggcgctaccacactggaaacaggcgtgcccagcagattttctggcagcggctctggcaccgactacaccctgacaatatccagcctccagcctgaggacttcgccacctactactgtcagcagagctggaacaccccttggacattcggccagggcaccaagctggaaatcaagagactcgagggaggctctcaggccgccgccgagaccctgagcgagggcggaagcttcgaacaagttcagcttcaacagcctggcgctgagctggtcaaacctggcgcttctgtgaagatgagctgcaaagccagcggctacgccttcagcagctactggatcaactggatgaagcagaaacccggccagggactcgaatggatcggccaaatctatcccggcgacggcgacaccaactacaacggcaagttcaagggcagagccacactgaccgccgatacctctagcagcacagcctacatgcagctgagcagcctgaccagcgaagatagcgccgtgtacttctgtgcccggtccatcacaacagtcgtgggctgcgctatggactattggggccagggaacaagcgtgaccgtgtctagtacgcgtaccacgacgccagcgccgcgaccaccaacaccggcgcccaccatcgcgtcgcagcccctgtccctgcgcccagaggcgtgccggccagcggcggggggcgcagtgcacacgagggggctggacttcgcctgtgacatctacatctgggcgcccttggccgggacttgtggggtccttctcctgtcactggttatcaccctttactgcaaacggggcagaaagaaactcctgtatatattcaaacaaccatttatgagaccagtacaaactactcaagaggaagatggctgtagctgccgatttccagaagaagaagaaggaggatgtgaactgagagtgaagttcagcaggagcgcagacgcccccgcgtaccagcagggccagaaccagctctataacgagctgaatctaggacgaagagaggagtacgatgttttggacaagagacgtggccgggaccctgagatggggggaaagccgagaaggaagaaccctcaggaaggcctgtacaatgaactgcagaaagataagatggcggaggcctacagtgagattgggatgaaaggcgagcgccggaggggcaaggggcacgatggcctttaccagggtctcagtacagccaccaaggacacctacgacgcccttcacatgcaggccctgccccctcgctaa

SEQ ID NO: 8011 - DNA, 1482 bp, synthetic construct
  source 1..1482: mol_type = other DNA
atggccttaccagtgaccgccttgctcctgccgctggccttgctgctccacgccgccaggccggacatccagatgacacagagccctagcagcctgtctgccagcgtgggagacagagtgaccatcacatgcaaggccagcgaccacatcaacaactggctggcctggtatcagcagaagcctggacaggcccctaagctgctgatctacggcgctaccacactggaaacaggcgtgcccagcagattttctggcagcggctctggcaccgactacaccctgacaatatccagcctccagcctgaggacttcgccacctactactgtcagcagagctggaacaccccttggacattcggccagggcaccaagctggaaatcaagagactcgagggaggctctgccgccgccgagaccctgagcgagggcggaagcttcgaacaagttcagcttcaacagcctggcgctgagctggtcaaacctggcgcttctgtgaagatgagctgcaaagccagcggctacgccttcagcagctactggatcaactggatgaagcagaaacccggccagggactcgaatggatcggccaaatctatcccggcgacggcgacaccaactacaacggcaagttcaagggcagagccacactgaccgccgatacctctagcagcacagcctacatgcagctgagcagcctgaccagcgaagatagcgccgtgtacttctgtgcccggtccatcacaacagtcgtgggctgcgctatggactattggggccagggaacaagcgtgaccgtgtctagtacgcgtaccacgacgccagcgccgcgaccaccaacaccggcgcccaccatcgcgtcgcagcccctgtccctgcgcccagaggcgtgccggccagcggcggggggcgcagtgcacacgagggggctggacttcgcctgtgacatctacatctgggcgcccttggccgggacttgtggggtccttctcctgtcactggttatcaccctttactgcaaacggggcagaaagaaactcctgtatatattcaaacaaccatttatgagaccagtacaaactactcaagaggaagatggctgtagctgccgatttccagaagaagaagaaggaggatgtgaactgagagtgaagttcagcaggagcgcagacgcccccgcgtaccagcagggccagaaccagctctataacgagctgaatctaggacgaagagaggagtacgatgttttggacaagagacgtggccgggaccctgagatggggggaaagccgagaaggaagaaccctcaggaaggcctgtacaatgaactgcagaaagataagatggcggaggcctacagtgagattgggatgaaaggcgagcgccggaggggcaaggggcacgatggcctttaccagggtctcagtacagccaccaaggacacctacgacgcccttcacatgcaggccctgccccctcgctaa

SEQ ID NO: 8012 - DNA, 1479 bp, synthetic construct
  source 1..1479: mol_type = other DNA
atggccttaccagtgaccgccttgctcctgccgctggccttgctgctccacgccgccaggccggacatccagatgacacagagccctagcagcctgtctgccagcgtgggagacagagtgaccatcacatgcaaggccagcgaccacatcaacaactggctggcctggtatcagcagaagcctggacaggcccctaagctgctgatctacggcgctaccacactggaaacaggcgtgcccagcagattttctggcagcggctctggcaccgactacaccctgacaatatccagcctccagcctgaggacttcgccacctactactgtcagcagagctggaacaccccttggacattcggccagggcaccaagctggaaatcaagagactcgagggaggctctgccgcccagcccaacaacagcggcggaagcttcgaacaagttcagcttcaacagcctggcgctgagctggtcaaacctggcgcttctgtgaagatgagctgcaaagccagcggctacgccttcagcagctactggatcaactggatgaagcagaaacccggccagggactcgaatggatcggccaaatctatcccggcgacggcgacaccaactacaacggcaagttcaagggcagagccacactgaccgccgatacctctagcagcacagcctacatgcagctgagcagcctgaccagcgaagatagcgccgtgtacttctgtgcccggtccatcacaacagtcgtgggctgcgctatggactattggggccagggaacaagcgtgaccgtgtctagtacgcgtaccacgacgccagcgccgcgaccaccaacaccggcgcccaccatcgcgtcgcagcccctgtccctgcgcccagaggcgtgccggccagcggcggggggcgcagtgcacacgagggggctggacttcgcctgtgacatctacatctgggcgcccttggccgggacttgtggggtccttctcctgtcactggttatcaccctttactgcaaacggggcagaaagaaactcctgtatatattcaaacaaccatttatgagaccagtacaaactactcaagaggaagatggctgtagctgccgatttccagaagaagaagaaggaggatgtgaactgagagtgaagttcagcaggagcgcagacgcccccgcgtaccagcagggccagaaccagctctataacgagctgaatctaggacgaagagaggagtacgatgttttggacaagagacgtggccgggaccctgagatggggggaaagccgagaaggaagaaccctcaggaaggcctgtacaatgaactgcagaaagataagatggcggaggcctacagtgagattgggatgaaaggcgagcgccggaggggcaaggggcacgatggcctttaccagggtctcagtacagccaccaaggacacctacgacgcccttcacatgcaggccctgccccctcgctaa

SEQ ID NO: 8013 - DNA, 1479 bp, synthetic construct
  source 1..1479: mol_type = other DNA
atggccttaccagtgaccgccttgctcctgccgctggccttgctgctccacgccgccaggccggacatccagatgacacagagccctagcagcctgtctgccagcgtgggagacagagtgaccatcacatgcaaggccagcgaccacatcaacaactggctggcctggtatcagcagaagcctggacaggcccctaagctgctgatctacggcgctaccacactggaaacaggcgtgcccagcagattttctggcagcggctctggcaccgactacaccctgacaatatccagcctccagcctgaggacttcgccacctactactgtcagcagagctggaacaccccttggacattcggccagggcaccaagctggaaatcaagagactcgagggaggctcttgggtgagccagccccccgagggcggaagcttcgaacaagttcagcttcaacagcctggcgctgagctggtcaaacctggcgcttctgtgaagatgagctgcaaagccagcggctacgccttcagcagctactggatcaactggatgaagcagaaacccggccagggactcgaatggatcggccaaatctatcccggcgacggcgacaccaactacaacggcaagttcaagggcagagccacactgaccgccgatacctctagcagcacagcctacatgcagctgagcagcctgaccagcgaagatagcgccgtgtacttctgtgcccggtccatcacaacagtcgtgggctgcgctatggactattggggccagggaacaagcgtgaccgtgtctagtacgcgtaccacgacgccagcgccgcgaccaccaacaccggcgcccaccatcgcgtcgcagcccctgtccctgcgcccagaggcgtgccggccagcggcggggggcgcagtgcacacgagggggctggacttcgcctgtgacatctacatctgggcgcccttggccgggacttgtggggtccttctcctgtcactggttatcaccctttactgcaaacggggcagaaagaaactcctgtatatattcaaacaaccatttatgagaccagtacaaactactcaagaggaagatggctgtagctgccgatttccagaagaagaagaaggaggatgtgaactgagagtgaagttcagcaggagcgcagacgcccccgcgtaccagcagggccagaaccagctctataacgagctgaatctaggacgaagagaggagtacgatgttttggacaagagacgtggccgggaccctgagatggggggaaagccgagaaggaagaaccctcaggaaggcctgtacaatgaactgcagaaagataagatggcggaggcctacagtgagattgggatgaaaggcgagcgccggaggggcaaggggcacgatggcctttaccagggtctcagtacagccaccaaggacacctacgacgcccttcacatgcaggccctgccccctcgctaa

SEQ ID NO: 8014 - DNA, 1482 bp, synthetic construct
  source 1..1482: mol_type = other DNA
atggccttaccagtgaccgccttgctcctgccgctggccttgctgctccacgccgccaggccggacatccagatgacacagagccctagcagcctgtctgccagcgtgggagacagagtgaccatcacatgcaaggccagcgaccacatcaacaactggctggcctggtatcagcagaagcctggacaggcccctaagctgctgatctacggcgctaccacactggaaacaggcgtgcccagcagattttctggcagcggctctggcaccgactacaccctgacaatatccagcctccagcctgaggacttcgccacctactactgtcagcagagctggaacaccccttggacattcggccagggcaccaagctggaaatcaagagactcgagggaggctctcagcagcagaccctgcccaagcccggcggaagcttcgaacaagttcagcttcaacagcctggcgctgagctggtcaaacctggcgcttctgtgaagatgagctgcaaagccagcggctacgccttcagcagctactggatcaactggatgaagcagaaacccggccagggactcgaatggatcggccaaatctatcccggcgacggcgacaccaactacaacggcaagttcaagggcagagccacactgaccgccgatacctctagcagcacagcctacatgcagctgagcagcctgaccagcgaagatagcgccgtgtacttctgtgcccggtccatcacaacagtcgtgggctgcgctatggactattggggccagggaacaagcgtgaccgtgtctagtacgcgtaccacgacgccagcgccgcgaccaccaacaccggcgcccaccatcgcgtcgcagcccctgtccctgcgcccagaggcgtgccggccagcggcggggggcgcagtgcacacgagggggctggacttcgcctgtgacatctacatctgggcgcccttggccgggacttgtggggtccttctcctgtcactggttatcaccctttactgcaaacggggcagaaagaaactcctgtatatattcaaacaaccatttatgagaccagtacaaactactcaagaggaagatggctgtagctgccgatttccagaagaagaagaaggaggatgtgaactgagagtgaagttcagcaggagcgcagacgcccccgcgtaccagcagggccagaaccagctctataacgagctgaatctaggacgaagagaggagtacgatgttttggacaagagacgtggccgggaccctgagatggggggaaagccgagaaggaagaaccctcaggaaggcctgtacaatgaactgcagaaagataagatggcggaggcctacagtgagattgggatgaaaggcgagcgccggaggggcaaggggcacgatggcctttaccagggtctcagtacagccaccaaggacacctacgacgcccttcacatgcaggccctgccccctcgctaa

SEQ ID NO: 8015 - DNA, 1476 bp, synthetic construct
  source 1..1476: mol_type = other DNA
atggccttaccagtgaccgccttgctcctgccgctggccttgctgctccacgccgccaggccggacatccagatgacacagagccctagcagcctgtctgccagcgtgggagacagagtgaccatcacatgcaaggccagcgaccacatcaacaactggctggcctggtatcagcagaagcctggacaggcccctaagctgctgatctacggcgctaccacactggaaacaggcgtgcccagcagattttctggcagcggctctggcaccgactacaccctgacaatatccagcctccagcctgaggacttcgccacctactactgtcagcagagctggaacaccccttggacattcggccagggcaccaagctggaaatcaagagactcgagggaggctctcagagcaaggcccaggtgggcggaagcttcgaacaagttcagcttcaacagcctggcgctgagctggtcaaacctggcgcttctgtgaagatgagctgcaaagccagcggctacgccttcagcagctactggatcaactggatgaagcagaaacccggccagggactcgaatggatcggccaaatctatcccggcgacggcgacaccaactacaacggcaagttcaagggcagagccacactgaccgccgatacctctagcagcacagcctacatgcagctgagcagcctgaccagcgaagatagcgccgtgtacttctgtgcccggtccatcacaacagtcgtgggctgcgctatggactattggggccagggaacaagcgtgaccgtgtctagtacgcgtaccacgacgccagcgccgcgaccaccaacaccggcgcccaccatcgcgtcgcagcccctgtccctgcgcccagaggcgtgccggccagcggcggggggcgcagtgcacacgagggggctggacttcgcctgtgacatctacatctgggcgcccttggccgggacttgtggggtccttctcctgtcactggttatcaccctttactgcaaacggggcagaaagaaactcctgtatatattcaaacaaccatttatgagaccagtacaaactactcaagaggaagatggctgtagctgccgatttccagaagaagaagaaggaggatgtgaactgagagtgaagttcagcaggagcgcagacgcccccgcgtaccagcagggccagaaccagctctataacgagctgaatctaggacgaagagaggagtacgatgttttggacaagagacgtggccgggaccctgagatggggggaaagccgagaaggaagaaccctcaggaaggcctgtacaatgaactgcagaaagataagatggcggaggcctacagtgagattgggatgaaaggcgagcgccggaggggcaaggggcacgatggcctttaccagggtctcagtacagccaccaaggacacctacgacgcccttcacatgcaggccctgccccctcgctaa

SEQ ID NO: 8016 - DNA, 1482 bp, synthetic construct
  source 1..1482: mol_type = other DNA
atggccttaccagtgaccgccttgctcctgccgctggccttgctgctccacgccgccaggccggacatccagatgacacagagccctagcagcctgtctgccagcgtgggagacagagtgaccatcacatgcaaggccagcgaccacatcaacaactggctggcctggtatcagcagaagcctggacaggcccctaagctgctgatctacggcgctaccacactggaaacaggcgtgcccagcagattttctggcagcggctctggcaccgactacaccctgacaatatccagcctccagcctgaggacttcgccacctactactgtcagcagagctggaacaccccttggacattcggccagggcaccaagctggaaatcaagagactcgagggaggctctcgcaccgaggacctgcccaaggccggcggaagcttcgaacaagttcagcttcaacagcctggcgctgagctggtcaaacctggcgcttctgtgaagatgagctgcaaagccagcggctacgccttcagcagctactggatcaactggatgaagcagaaacccggccagggactcgaatggatcggccaaatctatcccggcgacggcgacaccaactacaacggcaagttcaagggcagagccacactgaccgccgatacctctagcagcacagcctacatgcagctgagcagcctgaccagcgaagatagcgccgtgtacttctgtgcccggtccatcacaacagtcgtgggctgcgctatggactattggggccagggaacaagcgtgaccgtgtctagtacgcgtaccacgacgccagcgccgcgaccaccaacaccggcgcccaccatcgcgtcgcagcccctgtccctgcgcccagaggcgtgccggccagcggcggggggcgcagtgcacacgagggggctggacttcgcctgtgacatctacatctgggcgcccttggccgggacttgtggggtccttctcctgtcactggttatcaccctttactgcaaacggggcagaaagaaactcctgtatatattcaaacaaccatttatgagaccagtacaaactactcaagaggaagatggctgtagctgccgatttccagaagaagaagaaggaggatgtgaactgagagtgaagttcagcaggagcgcagacgcccccgcgtaccagcagggccagaaccagctctataacgagctgaatctaggacgaagagaggagtacgatgttttggacaagagacgtggccgggaccctgagatggggggaaagccgagaaggaagaaccctcaggaaggcctgtacaatgaactgcagaaagataagatggcggaggcctacagtgagattgggatgaaaggcgagcgccggaggggcaaggggcacgatggcctttaccagggtctcagtacagccaccaaggacacctacgacgcccttcacatgcaggccctgccccctcgctaa

SEQ ID NO: 8017 - DNA, 1482 bp, synthetic construct
  source 1..1482: mol_type = other DNA
atggccttaccagtgaccgccttgctcctgccgctggccttgctgctccacgccgccaggccggacatccagatgacacagagccctagcagcctgtctgccagcgtgggagacagagtgaccatcacatgcaaggccagcgaccacatcaacaactggctggcctggtatcagcagaagcctggacaggcccctaagctgctgatctacggcgctaccacactggaaacaggcgtgcccagcagattttctggcagcggctctggcaccgactacaccctgacaatatccagcctccagcctgaggacttcgccacctactactgtcagcagagctggaacaccccttggacattcggccagggcaccaagctggaaatcaagagactcgagggaggctctatgcccatctggaagttccccgacggcggaagcttcgaacaagttcagcttcaacagcctggcgctgagctggtcaaacctggcgcttctgtgaagatgagctgcaaagccagcggctacgccttcagcagctactggatcaactggatgaagcagaaacccggccagggactcgaatggatcggccaaatctatcccggcgacggcgacaccaactacaacggcaagttcaagggcagagccacactgaccgccgatacctctagcagcacagcctacatgcagctgagcagcctgaccagcgaagatagcgccgtgtacttctgtgcccggtccatcacaacagtcgtgggctgcgctatggactattggggccagggaacaagcgtgaccgtgtctagtacgcgtaccacgacgccagcgccgcgaccaccaacaccggcgcccaccatcgcgtcgcagcccctgtccctgcgcccagaggcgtgccggccagcggcggggggcgcagtgcacacgagggggctggacttcgcctgtgacatctacatctgggcgcccttggccgggacttgtggggtccttctcctgtcactggttatcaccctttactgcaaacggggcagaaagaaactcctgtatatattcaaacaaccatttatgagaccagtacaaactactcaagaggaagatggctgtagctgccgatttccagaagaagaagaaggaggatgtgaactgagagtgaagttcagcaggagcgcagacgcccccgcgtaccagcagggccagaaccagctctataacgagctgaatctaggacgaagagaggagtacgatgttttggacaagagacgtggccgggaccctgagatggggggaaagccgagaaggaagaaccctcaggaaggcctgtacaatgaactgcagaaagataagatggcggaggcctacagtgagattgggatgaaaggcgagcgccggaggggcaaggggcacgatggcctttaccagggtctcagtacagccaccaaggacacctacgacgcccttcacatgcaggccctgccccctcgctaa

SEQ ID NO: 8018 - DNA, 1479 bp, synthetic construct
  source 1..1479: mol_type = other DNA
atggccttaccagtgaccgccttgctcctgccgctggccttgctgctccacgccgccaggccggacatccagatgacacagagccctagcagcctgtctgccagcgtgggagacagagtgaccatcacatgcaaggccagcgaccacatcaacaactggctggcctggtatcagcagaagcctggacaggcccctaagctgctgatctacggcgctaccacactggaaacaggcgtgcccagcagattttctggcagcggctctggcaccgactacaccctgacaatatccagcctccagcctgaggacttcgccacctactactgtcagcagagctggaacaccccttggacattcggccagggcaccaagctggaaatcaagagactcgagggaggctctatgcccatctggaagttccccggcggaagcttcgaacaagttcagcttcaacagcctggcgctgagctggtcaaacctggcgcttctgtgaagatgagctgcaaagccagcggctacgccttcagcagctactggatcaactggatgaagcagaaacccggccagggactcgaatggatcggccaaatctatcccggcgacggcgacaccaactacaacggcaagttcaagggcagagccacactgaccgccgatacctctagcagcacagcctacatgcagctgagcagcctgaccagcgaagatagcgccgtgtacttctgtgcccggtccatcacaacagtcgtgggctgcgctatggactattggggccagggaacaagcgtgaccgtgtctagtacgcgtaccacgacgccagcgccgcgaccaccaacaccggcgcccaccatcgcgtcgcagcccctgtccctgcgcccagaggcgtgccggccagcggcggggggcgcagtgcacacgagggggctggacttcgcctgtgacatctacatctgggcgcccttggccgggacttgtggggtccttctcctgtcactggttatcaccctttactgcaaacggggcagaaagaaactcctgtatatattcaaacaaccatttatgagaccagtacaaactactcaagaggaagatggctgtagctgccgatttccagaagaagaagaaggaggatgtgaactgagagtgaagttcagcaggagcgcagacgcccccgcgtaccagcagggccagaaccagctctataacgagctgaatctaggacgaagagaggagtacgatgttttggacaagagacgtggccgggaccctgagatggggggaaagccgagaaggaagaaccctcaggaaggcctgtacaatgaactgcagaaagataagatggcggaggcctacagtgagattgggatgaaaggcgagcgccggaggggcaaggggcacgatggcctttaccagggtctcagtacagccaccaaggacacctacgacgcccttcacatgcaggccctgccccctcgctaa

SEQ ID NO: 8019 - DNA, 1476 bp, synthetic construct
  source 1..1476: mol_type = other DNA
atggccttaccagtgaccgccttgctcctgccgctggccttgctgctccacgccgccaggccggacatccagatgacacagagccctagcagcctgtctgccagcgtgggagacagagtgaccatcacatgcaaggccagcgaccacatcaacaactggctggcctggtatcagcagaagcctggacaggcccctaagctgctgatctacggcgctaccacactggaaacaggcgtgcccagcagattttctggcagcggctctggcaccgactacaccctgacaatatccagcctccagcctgaggacttcgccacctactactgtcagcagagctggaacaccccttggacattcggccagggcaccaagctggaaatcaagagactcgagggaggctctcccatctggaagttccccggcggaagcttcgaacaagttcagcttcaacagcctggcgctgagctggtcaaacctggcgcttctgtgaagatgagctgcaaagccagcggctacgccttcagcagctactggatcaactggatgaagcagaaacccggccagggactcgaatggatcggccaaatctatcccggcgacggcgacaccaactacaacggcaagttcaagggcagagccacactgaccgccgatacctctagcagcacagcctacatgcagctgagcagcctgaccagcgaagatagcgccgtgtacttctgtgcccggtccatcacaacagtcgtgggctgcgctatggactattggggccagggaacaagcgtgaccgtgtctagtacgcgtaccacgacgccagcgccgcgaccaccaacaccggcgcccaccatcgcgtcgcagcccctgtccctgcgcccagaggcgtgccggccagcggcggggggcgcagtgcacacgagggggctggacttcgcctgtgacatctacatctgggcgcccttggccgggacttgtggggtccttctcctgtcactggttatcaccctttactgcaaacggggcagaaagaaactcctgtatatattcaaacaaccatttatgagaccagtacaaactactcaagaggaagatggctgtagctgccgatttccagaagaagaagaaggaggatgtgaactgagagtgaagttcagcaggagcgcagacgcccccgcgtaccagcagggccagaaccagctctataacgagctgaatctaggacgaagagaggagtacgatgttttggacaagagacgtggccgggaccctgagatggggggaaagccgagaaggaagaaccctcaggaaggcctgtacaatgaactgcagaaagataagatggcggaggcctacagtgagattgggatgaaaggcgagcgccggaggggcaaggggcacgatggcctttaccagggtctcagtacagccaccaaggacacctacgacgcccttcacatgcaggccctgccccctcgctaa

SEQ ID NO: 8020 - DNA, 1473 bp, synthetic construct
  source 1..1473: mol_type = other DNA
atggccttaccagtgaccgccttgctcctgccgctggccttgctgctccacgccgccaggccggacatccagatgacacagagccctagcagcctgtctgccagcgtgggagacagagtgaccatcacatgcaaggccagcgaccacatcaacaactggctggcctggtatcagcagaagcctggacaggcccctaagctgctgatctacggcgctaccacactggaaacaggcgtgcccagcagattttctggcagcggctctggcaccgactacaccctgacaatatccagcctccagcctgaggacttcgccacctactactgtcagcagagctggaacaccccttggacattcggccagggcaccaagctggaaatcaagagactcgagggaggctctatctggaagttccccggcggaagcttcgaacaagttcagcttcaacagcctggcgctgagctggtcaaacctggcgcttctgtgaagatgagctgcaaagccagcggctacgccttcagcagctactggatcaactggatgaagcagaaacccggccagggactcgaatggatcggccaaatctatcccggcgacggcgacaccaactacaacggcaagttcaagggcagagccacactgaccgccgatacctctagcagcacagcctacatgcagctgagcagcctgaccagcgaagatagcgccgtgtacttctgtgcccggtccatcacaacagtcgtgggctgcgctatggactattggggccagggaacaagcgtgaccgtgtctagtacgcgtaccacgacgccagcgccgcgaccaccaacaccggcgcccaccatcgcgtcgcagcccctgtccctgcgcccagaggcgtgccggccagcggcggggggcgcagtgcacacgagggggctggacttcgcctgtgacatctacatctgggcgcccttggccgggacttgtggggtccttctcctgtcactggttatcaccctttactgcaaacggggcagaaagaaactcctgtatatattcaaacaaccatttatgagaccagtacaaactactcaagaggaagatggctgtagctgccgatttccagaagaagaagaaggaggatgtgaactgagagtgaagttcagcaggagcgcagacgcccccgcgtaccagcagggccagaaccagctctataacgagctgaatctaggacgaagagaggagtacgatgttttggacaagagacgtggccgggaccctgagatggggggaaagccgagaaggaagaaccctcaggaaggcctgtacaatgaactgcagaaagataagatggcggaggcctacagtgagattgggatgaaaggcgagcgccggaggggcaaggggcacgatggcctttaccagggtctcagtacagccaccaaggacacctacgacgcccttcacatgcaggccctgccccctcgctaa

SEQ ID NO: 8021 - DNA, 1479 bp, synthetic construct
  source 1..1479: mol_type = other DNA
atggccttaccagtgaccgccttgctcctgccgctggccttgctgctccacgccgccaggccggacatccagatgacacagagccctagcagcctgtctgccagcgtgggagacagagtgaccatcacatgcaaggccagcgaccacatcaacaactggctggcctggtatcagcagaagcctggacaggcccctaagctgctgatctacggcgctaccacactggaaacaggcgtgcccagcagattttctggcagcggctctggcaccgactacaccctgacaatatccagcctccagcctgaggacttcgccacctactactgtcagcagagctggaacaccccttggacattcggccagggcaccaagctggaaatcaagagactcgagggaggctctcccatctggaagttccccgacggcggaagcttcgaacaagttcagcttcaacagcctggcgctgagctggtcaaacctggcgcttctgtgaagatgagctgcaaagccagcggctacgccttcagcagctactggatcaactggatgaagcagaaacccggccagggactcgaatggatcggccaaatctatcccggcgacggcgacaccaactacaacggcaagttcaagggcagagccacactgaccgccgatacctctagcagcacagcctacatgcagctgagcagcctgaccagcgaagatagcgccgtgtacttctgtgcccggtccatcacaacagtcgtgggctgcgctatggactattggggccagggaacaagcgtgaccgtgtctagtacgcgtaccacgacgccagcgccgcgaccaccaacaccggcgcccaccatcgcgtcgcagcccctgtccctgcgcccagaggcgtgccggccagcggcggggggcgcagtgcacacgagggggctggacttcgcctgtgacatctacatctgggcgcccttggccgggacttgtggggtccttctcctgtcactggttatcaccctttactgcaaacggggcagaaagaaactcctgtatatattcaaacaaccatttatgagaccagtacaaactactcaagaggaagatggctgtagctgccgatttccagaagaagaagaaggaggatgtgaactgagagtgaagttcagcaggagcgcagacgcccccgcgtaccagcagggccagaaccagctctataacgagctgaatctaggacgaagagaggagtacgatgttttggacaagagacgtggccgggaccctgagatggggggaaagccgagaaggaagaaccctcaggaaggcctgtacaatgaactgcagaaagataagatggcggaggcctacagtgagattgggatgaaaggcgagcgccggaggggcaaggggcacgatggcctttaccagggtctcagtacagccaccaaggacacctacgacgcccttcacatgcaggccctgccccctcgctaa

SEQ ID NO: 8022 - DNA, 1506 bp, synthetic construct
  source 1..1506: mol_type = other DNA
atggccttaccagtgaccgccttgctcctgccgctggccttgctgctccacgccgccaggccggacatccagatgacacagagccctagcagcctgtctgccagcgtgggagacagagtgaccatcacatgcaaggccagcgaccacatcaacaactggctggcctggtatcagcagaagcctggacaggcccctaagctgctgatctacggcgctaccacactggaaacaggcgtgcccagcagattttctggcagcggctctggcaccgactacaccctgacaatatccagcctccagcctgaggacttcgccacctactactgtcagcagagctggaacaccccttggacattcggccagggcaccaagctggaaatcaagagactcgagggaggctctgacctgagctacatgcccatctggaagttccccgacgaggagggcgccggcggaagcttcgaacaagttcagcttcaacagcctggcgctgagctggtcaaacctggcgcttctgtgaagatgagctgcaaagccagcggctacgccttcagcagctactggatcaactggatgaagcagaaacccggccagggactcgaatggatcggccaaatctatcccggcgacggcgacaccaactacaacggcaagttcaagggcagagccacactgaccgccgatacctctagcagcacagcctacatgcagctgagcagcctgaccagcgaagatagcgccgtgtacttctgtgcccggtccatcacaacagtcgtgggctgcgctatggactattggggccagggaacaagcgtgaccgtgtctagtacgcgtaccacgacgccagcgccgcgaccaccaacaccggcgcccaccatcgcgtcgcagcccctgtccctgcgcccagaggcgtgccggccagcggcggggggcgcagtgcacacgagggggctggacttcgcctgtgacatctacatctgggcgcccttggccgggacttgtggggtccttctcctgtcactggttatcaccctttactgcaaacggggcagaaagaaactcctgtatatattcaaacaaccatttatgagaccagtacaaactactcaagaggaagatggctgtagctgccgatttccagaagaagaagaaggaggatgtgaactgagagtgaagttcagcaggagcgcagacgcccccgcgtaccagcagggccagaaccagctctataacgagctgaatctaggacgaagagaggagtacgatgttttggacaagagacgtggccgggaccctgagatggggggaaagccgagaaggaagaaccctcaggaaggcctgtacaatgaactgcagaaagataagatggcggaggcctacagtgagattgggatgaaaggcgagcgccggaggggcaaggggcacgatggcctttaccagggtctcagtacagccaccaaggacacctacgacgcccttcacatgcaggccctgccccctcgctaa

SEQ ID NO: 8023 - DNA, 1503 bp, synthetic construct
  source 1..1503: mol_type = other DNA
atggccttaccagtgaccgccttgctcctgccgctggccttgctgctccacgccgccaggccggacatccagatgacacagagccctagcagcctgtctgccagcgtgggagacagagtgaccatcacatgcaaggccagcgaccacatcaacaactggctggcctggtatcagcagaagcctggacaggcccctaagctgctgatctacggcgctaccacactggaaacaggcgtgcccagcagattttctggcagcggctctggcaccgactacaccctgacaatatccagcctccagcctgaggacttcgccacctactactgtcagcagagctggaacaccccttggacattcggccagggcaccaagctggaaatcaagagactcgagggaggctctctgagctacatgcccatctggaagttccccgacgaggagggcgccggcggaagcttcgaacaagttcagcttcaacagcctggcgctgagctggtcaaacctggcgcttctgtgaagatgagctgcaaagccagcggctacgccttcagcagctactggatcaactggatgaagcagaaacccggccagggactcgaatggatcggccaaatctatcccggcgacggcgacaccaactacaacggcaagttcaagggcagagccacactgaccgccgatacctctagcagcacagcctacatgcagctgagcagcctgaccagcgaagatagcgccgtgtacttctgtgcccggtccatcacaacagtcgtgggctgcgctatggactattggggccagggaacaagcgtgaccgtgtctagtacgcgtaccacgacgccagcgccgcgaccaccaacaccggcgcccaccatcgcgtcgcagcccctgtccctgcgcccagaggcgtgccggccagcggcggggggcgcagtgcacacgagggggctggacttcgcctgtgacatctacatctgggcgcccttggccgggacttgtggggtccttctcctgtcactggttatcaccctttactgcaaacggggcagaaagaaactcctgtatatattcaaacaaccatttatgagaccagtacaaactactcaagaggaagatggctgtagctgccgatttccagaagaagaagaaggaggatgtgaactgagagtgaagttcagcaggagcgcagacgcccccgcgtaccagcagggccagaaccagctctataacgagctgaatctaggacgaagagaggagtacgatgttttggacaagagacgtggccgggaccctgagatggggggaaagccgagaaggaagaaccctcaggaaggcctgtacaatgaactgcagaaagataagatggcggaggcctacagtgagattgggatgaaaggcgagcgccggaggggcaaggggcacgatggcctttaccagggtctcagtacagccaccaaggacacctacgacgcccttcacatgcaggccctgccccctcgctaa

SEQ ID NO: 8024 - DNA, 1500 bp, synthetic construct
  source 1..1500: mol_type = other DNA
atggccttaccagtgaccgccttgctcctgccgctggccttgctgctccacgccgccaggccggacatccagatgacacagagccctagcagcctgtctgccagcgtgggagacagagtgaccatcacatgcaaggccagcgaccacatcaacaactggctggcctggtatcagcagaagcctggacaggcccctaagctgctgatctacggcgctaccacactggaaacaggcgtgcccagcagattttctggcagcggctctggcaccgactacaccctgacaatatccagcctccagcctgaggacttcgccacctactactgtcagcagagctggaacaccccttggacattcggccagggcaccaagctggaaatcaagagactcgagggaggctctagctacatgcccatctggaagttccccgacgaggagggcgccggcggaagcttcgaacaagttcagcttcaacagcctggcgctgagctggtcaaacctggcgcttctgtgaagatgagctgcaaagccagcggctacgccttcagcagctactggatcaactggatgaagcagaaacccggccagggactcgaatggatcggccaaatctatcccggcgacggcgacaccaactacaacggcaagttcaagggcagagccacactgaccgccgatacctctagcagcacagcctacatgcagctgagcagcctgaccagcgaagatagcgccgtgtacttctgtgcccggtccatcacaacagtcgtgggctgcgctatggactattggggccagggaacaagcgtgaccgtgtctagtacgcgtaccacgacgccagcgccgcgaccaccaacaccggcgcccaccatcgcgtcgcagcccctgtccctgcgcccagaggcgtgccggccagcggcggggggcgcagtgcacacgagggggctggacttcgcctgtgacatctacatctgggcgcccttggccgggacttgtggggtccttctcctgtcactggttatcaccctttactgcaaacggggcagaaagaaactcctgtatatattcaaacaaccatttatgagaccagtacaaactactcaagaggaagatggctgtagctgccgatttccagaagaagaagaaggaggatgtgaactgagagtgaagttcagcaggagcgcagacgcccccgcgtaccagcagggccagaaccagctctataacgagctgaatctaggacgaagagaggagtacgatgttttggacaagagacgtggccgggaccctgagatggggggaaagccgagaaggaagaaccctcaggaaggcctgtacaatgaactgcagaaagataagatggcggaggcctacagtgagattgggatgaaaggcgagcgccggaggggcaaggggcacgatggcctttaccagggtctcagtacagccaccaaggacacctacgacgcccttcacatgcaggccctgccccctcgctaa

SEQ ID NO: 8025 - DNA, 1497 bp, synthetic construct
  source 1..1497: mol_type = other DNA
atggccttaccagtgaccgccttgctcctgccgctggccttgctgctccacgccgccaggccggacatccagatgacacagagccctagcagcctgtctgccagcgtgggagacagagtgaccatcacatgcaaggccagcgaccacatcaacaactggctggcctggtatcagcagaagcctggacaggcccctaagctgctgatctacggcgctaccacactggaaacaggcgtgcccagcagattttctggcagcggctctggcaccgactacaccctgacaatatccagcctccagcctgaggacttcgccacctactactgtcagcagagctggaacaccccttggacattcggccagggcaccaagctggaaatcaagagactcgagggaggctcttacatgcccatctggaagttccccgacgaggagggcgccggcggaagcttcgaacaagttcagcttcaacagcctggcgctgagctggtcaaacctggcgcttctgtgaagatgagctgcaaagccagcggctacgccttcagcagctactggatcaactggatgaagcagaaacccggccagggactcgaatggatcggccaaatctatcccggcgacggcgacaccaactacaacggcaagttcaagggcagagccacactgaccgccgatacctctagcagcacagcctacatgcagctgagcagcctgaccagcgaagatagcgccgtgtacttctgtgcccggtccatcacaacagtcgtgggctgcgctatggactattggggccagggaacaagcgtgaccgtgtctagtacgcgtaccacgacgccagcgccgcgaccaccaacaccggcgcccaccatcgcgtcgcagcccctgtccctgcgcccagaggcgtgccggccagcggcggggggcgcagtgcacacgagggggctggacttcgcctgtgacatctacatctgggcgcccttggccgggacttgtggggtccttctcctgtcactggttatcaccctttactgcaaacggggcagaaagaaactcctgtatatattcaaacaaccatttatgagaccagtacaaactactcaagaggaagatggctgtagctgccgatttccagaagaagaagaaggaggatgtgaactgagagtgaagttcagcaggagcgcagacgcccccgcgtaccagcagggccagaaccagctctataacgagctgaatctaggacgaagagaggagtacgatgttttggacaagagacgtggccgggaccctgagatggggggaaagccgagaaggaagaaccctcaggaaggcctgtacaatgaactgcagaaagataagatggcggaggcctacagtgagattgggatgaaaggcgagcgccggaggggcaaggggcacgatggcctttaccagggtctcagtacagccaccaaggacacctacgacgcccttcacatgcaggccctgccccctcgctaa

SEQ ID NO: 8026 - DNA, 1491 bp, synthetic construct
  source 1..1491: mol_type = other DNA
atggccttaccagtgaccgccttgctcctgccgctggccttgctgctccacgccgccaggccggacatccagatgacacagagccctagcagcctgtctgccagcgtgggagacagagtgaccatcacatgcaaggccagcgaccacatcaacaactggctggcctggtatcagcagaagcctggacaggcccctaagctgctgatctacggcgctaccacactggaaacaggcgtgcccagcagattttctggcagcggctctggcaccgactacaccctgacaatatccagcctccagcctgaggacttcgccacctactactgtcagcagagctggaacaccccttggacattcggccagggcaccaagctggaaatcaagagactcgagggaggctcttacatgcccatctggaagttccccgacgaggagggcggaagcttcgaacaagttcagcttcaacagcctggcgctgagctggtcaaacctggcgcttctgtgaagatgagctgcaaagccagcggctacgccttcagcagctactggatcaactggatgaagcagaaacccggccagggactcgaatggatcggccaaatctatcccggcgacggcgacaccaactacaacggcaagttcaagggcagagccacactgaccgccgatacctctagcagcacagcctacatgcagctgagcagcctgaccagcgaagatagcgccgtgtacttctgtgcccggtccatcacaacagtcgtgggctgcgctatggactattggggccagggaacaagcgtgaccgtgtctagtacgcgtaccacgacgccagcgccgcgaccaccaacaccggcgcccaccatcgcgtcgcagcccctgtccctgcgcccagaggcgtgccggccagcggcggggggcgcagtgcacacgagggggctggacttcgcctgtgacatctacatctgggcgcccttggccgggacttgtggggtccttctcctgtcactggttatcaccctttactgcaaacggggcagaaagaaactcctgtatatattcaaacaaccatttatgagaccagtacaaactactcaagaggaagatggctgtagctgccgatttccagaagaagaagaaggaggatgtgaactgagagtgaagttcagcaggagcgcagacgcccccgcgtaccagcagggccagaaccagctctataacgagctgaatctaggacgaagagaggagtacgatgttttggacaagagacgtggccgggaccctgagatggggggaaagccgagaaggaagaaccctcaggaaggcctgtacaatgaactgcagaaagataagatggcggaggcctacagtgagattgggatgaaaggcgagcgccggaggggcaaggggcacgatggcctttaccagggtctcagtacagccaccaaggacacctacgacgcccttcacatgcaggccctgccccctcgctaa

SEQ ID NO: 8027 - DNA, 1494 bp, synthetic construct
  source 1..1494: mol_type = other DNA
atggccttaccagtgaccgccttgctcctgccgctggccttgctgctccacgccgccaggccggacatccagatgacacagagccctagcagcctgtctgccagcgtgggagacagagtgaccatcacatgcaaggccagcgaccacatcaacaactggctggcctggtatcagcagaagcctggacaggcccctaagctgctgatctacggcgctaccacactggaaacaggcgtgcccagcagattttctggcagcggctctggcaccgactacaccctgacaatatccagcctccagcctgaggacttcgccacctactactgtcagcagagctggaacaccccttggacattcggccagggcaccaagctggaaatcaagagactcgagggaggctctaacaacaccctggtgtggaagtacgccgacgccggcggcggaagcttcgaacaagttcagcttcaacagcctggcgctgagctggtcaaacctggcgcttctgtgaagatgagctgcaaagccagcggctacgccttcagcagctactggatcaactggatgaagcagaaacccggccagggactcgaatggatcggccaaatctatcccggcgacggcgacaccaactacaacggcaagttcaagggcagagccacactgaccgccgatacctctagcagcacagcctacatgcagctgagcagcctgaccagcgaagatagcgccgtgtacttctgtgcccggtccatcacaacagtcgtgggctgcgctatggactattggggccagggaacaagcgtgaccgtgtctagtacgcgtaccacgacgccagcgccgcgaccaccaacaccggcgcccaccatcgcgtcgcagcccctgtccctgcgcccagaggcgtgccggccagcggcggggggcgcagtgcacacgagggggctggacttcgcctgtgacatctacatctgggcgcccttggccgggacttgtggggtccttctcctgtcactggttatcaccctttactgcaaacggggcagaaagaaactcctgtatatattcaaacaaccatttatgagaccagtacaaactactcaagaggaagatggctgtagctgccgatttccagaagaagaagaaggaggatgtgaactgagagtgaagttcagcaggagcgcagacgcccccgcgtaccagcagggccagaaccagctctataacgagctgaatctaggacgaagagaggagtacgatgttttggacaagagacgtggccgggaccctgagatggggggaaagccgagaaggaagaaccctcaggaaggcctgtacaatgaactgcagaaagataagatggcggaggcctacagtgagattgggatgaaaggcgagcgccggaggggcaaggggcacgatggcctttaccagggtctcagtacagccaccaaggacacctacgacgcccttcacatgcaggccctgccccctcgctaa

SEQ ID NO: 8028 - DNA, 1491 bp, synthetic construct
  source 1..1491: mol_type = other DNA
atggccttaccagtgaccgccttgctcctgccgctggccttgctgctccacgccgccaggccggacatccagatgacacagagccctagcagcctgtctgccagcgtgggagacagagtgaccatcacatgcaaggccagcgaccacatcaacaactggctggcctggtatcagcagaagcctggacaggcccctaagctgctgatctacggcgctaccacactggaaacaggcgtgcccagcagattttctggcagcggctctggcaccgactacaccctgacaatatccagcctccagcctgaggacttcgccacctactactgtcagcagagctggaacaccccttggacattcggccagggcaccaagctggaaatcaagagactcgagggaggctctaacaccctggtgtggaagtacgccgacgccggcggcggaagcttcgaacaagttcagcttcaacagcctggcgctgagctggtcaaacctggcgcttctgtgaagatgagctgcaaagccagcggctacgccttcagcagctactggatcaactggatgaagcagaaacccggccagggactcgaatggatcggccaaatctatcccggcgacggcgacaccaactacaacggcaagttcaagggcagagccacactgaccgccgatacctctagcagcacagcctacatgcagctgagcagcctgaccagcgaagatagcgccgtgtacttctgtgcccggtccatcacaacagtcgtgggctgcgctatggactattggggccagggaacaagcgtgaccgtgtctagtacgcgtaccacgacgccagcgccgcgaccaccaacaccggcgcccaccatcgcgtcgcagcccctgtccctgcgcccagaggcgtgccggccagcggcggggggcgcagtgcacacgagggggctggacttcgcctgtgacatctacatctgggcgcccttggccgggacttgtggggtccttctcctgtcactggttatcaccctttactgcaaacggggcagaaagaaactcctgtatatattcaaacaaccatttatgagaccagtacaaactactcaagaggaagatggctgtagctgccgatttccagaagaagaagaaggaggatgtgaactgagagtgaagttcagcaggagcgcagacgcccccgcgtaccagcagggccagaaccagctctataacgagctgaatctaggacgaagagaggagtacgatgttttggacaagagacgtggccgggaccctgagatggggggaaagccgagaaggaagaaccctcaggaaggcctgtacaatgaactgcagaaagataagatggcggaggcctacagtgagattgggatgaaaggcgagcgccggaggggcaaggggcacgatggcctttaccagggtctcagtacagccaccaaggacacctacgacgcccttcacatgcaggccctgccccctcgctaa

SEQ ID NO: 8029 - DNA, 1488 bp, synthetic construct
  source 1..1488: mol_type = other DNA
atggccttaccagtgaccgccttgctcctgccgctggccttgctgctccacgccgccaggccggacatccagatgacacagagccctagcagcctgtctgccagcgtgggagacagagtgaccatcacatgcaaggccagcgaccacatcaacaactggctggcctggtatcagcagaagcctggacaggcccctaagctgctgatctacggcgctaccacactggaaacaggcgtgcccagcagattttctggcagcggctctggcaccgactacaccctgacaatatccagcctccagcctgaggacttcgccacctactactgtcagcagagctggaacaccccttggacattcggccagggcaccaagctggaaatcaagagactcgagggaggctctaccctggtgtggaagtacgccgacgccggcggcggaagcttcgaacaagttcagcttcaacagcctggcgctgagctggtcaaacctggcgcttctgtgaagatgagctgcaaagccagcggctacgccttcagcagctactggatcaactggatgaagcagaaacccggccagggactcgaatggatcggccaaatctatcccggcgacggcgacaccaactacaacggcaagttcaagggcagagccacactgaccgccgatacctctagcagcacagcctacatgcagctgagcagcctgaccagcgaagatagcgccgtgtacttctgtgcccggtccatcacaacagtcgtgggctgcgctatggactattggggccagggaacaagcgtgaccgtgtctagtacgcgtaccacgacgccagcgccgcgaccaccaacaccggcgcccaccatcgcgtcgcagcccctgtccctgcgcccagaggcgtgccggccagcggcggggggcgcagtgcacacgagggggctggacttcgcctgtgacatctacatctgggcgcccttggccgggacttgtggggtccttctcctgtcactggttatcaccctttactgcaaacggggcagaaagaaactcctgtatatattcaaacaaccatttatgagaccagtacaaactactcaagaggaagatggctgtagctgccgatttccagaagaagaagaaggaggatgtgaactgagagtgaagttcagcaggagcgcagacgcccccgcgtaccagcagggccagaaccagctctataacgagctgaatctaggacgaagagaggagtacgatgttttggacaagagacgtggccgggaccctgagatggggggaaagccgagaaggaagaaccctcaggaaggcctgtacaatgaactgcagaaagataagatggcggaggcctacagtgagattgggatgaaaggcgagcgccggaggggcaaggggcacgatggcctttaccagggtctcagtacagccaccaaggacacctacgacgcccttcacatgcaggccctgccccctcgctaa

SEQ ID NO: 8030 - DNA, 1482 bp, synthetic construct
  source 1..1482: mol_type = other DNA
atggccttaccagtgaccgccttgctcctgccgctggccttgctgctccacgccgccaggccggacatccagatgacacagagccctagcagcctgtctgccagcgtgggagacagagtgaccatcacatgcaaggccagcgaccacatcaacaactggctggcctggtatcagcagaagcctggacaggcccctaagctgctgatctacggcgctaccacactggaaacaggcgtgcccagcagattttctggcagcggctctggcaccgactacaccctgacaatatccagcctccagcctgaggacttcgccacctactactgtcagcagagctggaacaccccttggacattcggccagggcaccaagctggaaatcaagagactcgagggaggctctgtgtggaagtacgccgacgccggcggcggaagcttcgaacaagttcagcttcaacagcctggcgctgagctggtcaaacctggcgcttctgtgaagatgagctgcaaagccagcggctacgccttcagcagctactggatcaactggatgaagcagaaacccggccagggactcgaatggatcggccaaatctatcccggcgacggcgacaccaactacaacggcaagttcaagggcagagccacactgaccgccgatacctctagcagcacagcctacatgcagctgagcagcctgaccagcgaagatagcgccgtgtacttctgtgcccggtccatcacaacagtcgtgggctgcgctatggactattggggccagggaacaagcgtgaccgtgtctagtacgcgtaccacgacgccagcgccgcgaccaccaacaccggcgcccaccatcgcgtcgcagcccctgtccctgcgcccagaggcgtgccggccagcggcggggggcgcagtgcacacgagggggctggacttcgcctgtgacatctacatctgggcgcccttggccgggacttgtggggtccttctcctgtcactggttatcaccctttactgcaaacggggcagaaagaaactcctgtatatattcaaacaaccatttatgagaccagtacaaactactcaagaggaagatggctgtagctgccgatttccagaagaagaagaaggaggatgtgaactgagagtgaagttcagcaggagcgcagacgcccccgcgtaccagcagggccagaaccagctctataacgagctgaatctaggacgaagagaggagtacgatgttttggacaagagacgtggccgggaccctgagatggggggaaagccgagaaggaagaaccctcaggaaggcctgtacaatgaactgcagaaagataagatggcggaggcctacagtgagattgggatgaaaggcgagcgccggaggggcaaggggcacgatggcctttaccagggtctcagtacagccaccaaggacacctacgacgcccttcacatgcaggccctgccccctcgctaa

SEQ ID NO: 8031 - DNA, 1479 bp, synthetic construct
  source 1..1479: mol_type = other DNA
atggccttaccagtgaccgccttgctcctgccgctggccttgctgctccacgccgccaggccggacatccagatgacacagagccctagcagcctgtctgccagcgtgggagacagagtgaccatcacatgcaaggccagcgaccacatcaacaactggctggcctggtatcagcagaagcctggacaggcccctaagctgctgatctacggcgctaccacactggaaacaggcgtgcccagcagattttctggcagcggctctggcaccgactacaccctgacaatatccagcctccagcctgaggacttcgccacctactactgtcagcagagctggaacaccccttggacattcggccagggcaccaagctggaaatcaagagactcgagggaggctctgtgtggaagtacgccgacgccggcggaagcttcgaacaagttcagcttcaacagcctggcgctgagctggtcaaacctggcgcttctgtgaagatgagctgcaaagccagcggctacgccttcagcagctactggatcaactggatgaagcagaaacccggccagggactcgaatggatcggccaaatctatcccggcgacggcgacaccaactacaacggcaagttcaagggcagagccacactgaccgccgatacctctagcagcacagcctacatgcagctgagcagcctgaccagcgaagatagcgccgtgtacttctgtgcccggtccatcacaacagtcgtgggctgcgctatggactattggggccagggaacaagcgtgaccgtgtctagtacgcgtaccacgacgccagcgccgcgaccaccaacaccggcgcccaccatcgcgtcgcagcccctgtccctgcgcccagaggcgtgccggccagcggcggggggcgcagtgcacacgagggggctggacttcgcctgtgacatctacatctgggcgcccttggccgggacttgtggggtccttctcctgtcactggttatcaccctttactgcaaacggggcagaaagaaactcctgtatatattcaaacaaccatttatgagaccagtacaaactactcaagaggaagatggctgtagctgccgatttccagaagaagaagaaggaggatgtgaactgagagtgaagttcagcaggagcgcagacgcccccgcgtaccagcagggccagaaccagctctataacgagctgaatctaggacgaagagaggagtacgatgttttggacaagagacgtggccgggaccctgagatggggggaaagccgagaaggaagaaccctcaggaaggcctgtacaatgaactgcagaaagataagatggcggaggcctacagtgagattgggatgaaaggcgagcgccggaggggcaaggggcacgatggcctttaccagggtctcagtacagccaccaaggacacctacgacgcccttcacatgcaggccctgccccctcgctaa

SEQ ID NO: 8032 - DNA, 1497 bp, synthetic construct
  source 1..1497: mol_type = other DNA
atggccttaccagtgaccgccttgctcctgccgctggccttgctgctccacgccgccaggccggacatccagatgacacagagccctagcagcctgtctgccagcgtgggagacagagtgaccatcacatgcaaggccagcgaccacatcaacaactggctggcctggtatcagcagaagcctggacaggcccctaagctgctgatctacggcgctaccacactggaaacaggcgtgcccagcagattttctggcagcggctctggcaccgactacaccctgacaatatccagcctccagcctgaggacttcgccacctactactgtcagcagagctggaacaccccttggacattcggccagggcaccaagctggaaatcaagagactcgagggaggctctgccaacagcttcatcttcaagtacgccgaccccgaccgcggcggaagcttcgaacaagttcagcttcaacagcctggcgctgagctggtcaaacctggcgcttctgtgaagatgagctgcaaagccagcggctacgccttcagcagctactggatcaactggatgaagcagaaacccggccagggactcgaatggatcggccaaatctatcccggcgacggcgacaccaactacaacggcaagttcaagggcagagccacactgaccgccgatacctctagcagcacagcctacatgcagctgagcagcctgaccagcgaagatagcgccgtgtacttctgtgcccggtccatcacaacagtcgtgggctgcgctatggactattggggccagggaacaagcgtgaccgtgtctagtacgcgtaccacgacgccagcgccgcgaccaccaacaccggcgcccaccatcgcgtcgcagcccctgtccctgcgcccagaggcgtgccggccagcggcggggggcgcagtgcacacgagggggctggacttcgcctgtgacatctacatctgggcgcccttggccgggacttgtggggtccttctcctgtcactggttatcaccctttactgcaaacggggcagaaagaaactcctgtatatattcaaacaaccatttatgagaccagtacaaactactcaagaggaagatggctgtagctgccgatttccagaagaagaagaaggaggatgtgaactgagagtgaagttcagcaggagcgcagacgcccccgcgtaccagcagggccagaaccagctctataacgagctgaatctaggacgaagagaggagtacgatgttttggacaagagacgtggccgggaccctgagatggggggaaagccgagaaggaagaaccctcaggaaggcctgtacaatgaactgcagaaagataagatggcggaggcctacagtgagattgggatgaaaggcgagcgccggaggggcaaggggcacgatggcctttaccagggtctcagtacagccaccaaggacacctacgacgcccttcacatgcaggccctgccccctcgctaa

SEQ ID NO: 8033 - DNA, 1494 bp, synthetic construct
  source 1..1494: mol_type = other DNA
atggccttaccagtgaccgccttgctcctgccgctggccttgctgctccacgccgccaggccggacatccagatgacacagagccctagcagcctgtctgccagcgtgggagacagagtgaccatcacatgcaaggccagcgaccacatcaacaactggctggcctggtatcagcagaagcctggacaggcccctaagctgctgatctacggcgctaccacactggaaacaggcgtgcccagcagattttctggcagcggctctggcaccgactacaccctgacaatatccagcctccagcctgaggacttcgccacctactactgtcagcagagctggaacaccccttggacattcggccagggcaccaagctggaaatcaagagactcgagggaggctctaacagcttcatcttcaagtacgccgaccccgaccgcggcggaagcttcgaacaagttcagcttcaacagcctggcgctgagctggtcaaacctggcgcttctgtgaagatgagctgcaaagccagcggctacgccttcagcagctactggatcaactggatgaagcagaaacccggccagggactcgaatggatcggccaaatctatcccggcgacggcgacaccaactacaacggcaagttcaagggcagagccacactgaccgccgatacctctagcagcacagcctacatgcagctgagcagcctgaccagcgaagatagcgccgtgtacttctgtgcccggtccatcacaacagtcgtgggctgcgctatggactattggggccagggaacaagcgtgaccgtgtctagtacgcgtaccacgacgccagcgccgcgaccaccaacaccggcgcccaccatcgcgtcgcagcccctgtccctgcgcccagaggcgtgccggccagcggcggggggcgcagtgcacacgagggggctggacttcgcctgtgacatctacatctgggcgcccttggccgggacttgtggggtccttctcctgtcactggttatcaccctttactgcaaacggggcagaaagaaactcctgtatatattcaaacaaccatttatgagaccagtacaaactactcaagaggaagatggctgtagctgccgatttccagaagaagaagaaggaggatgtgaactgagagtgaagttcagcaggagcgcagacgcccccgcgtaccagcagggccagaaccagctctataacgagctgaatctaggacgaagagaggagtacgatgttttggacaagagacgtggccgggaccctgagatggggggaaagccgagaaggaagaaccctcaggaaggcctgtacaatgaactgcagaaagataagatggcggaggcctacagtgagattgggatgaaaggcgagcgccggaggggcaaggggcacgatggcctttaccagggtctcagtacagccaccaaggacacctacgacgcccttcacatgcaggccctgccccctcgctaa

SEQ ID NO: 8034 - DNA, 1488 bp, synthetic construct
  source 1..1488: mol_type = other DNA
atggccttaccagtgaccgccttgctcctgccgctggccttgctgctccacgccgccaggccggacatccagatgacacagagccctagcagcctgtctgccagcgtgggagacagagtgaccatcacatgcaaggccagcgaccacatcaacaactggctggcctggtatcagcagaagcctggacaggcccctaagctgctgatctacggcgctaccacactggaaacaggcgtgcccagcagattttctggcagcggctctggcaccgactacaccctgacaatatccagcctccagcctgaggacttcgccacctactactgtcagcagagctggaacaccccttggacattcggccagggcaccaagctggaaatcaagagactcgagggaggctctaacagcttcatcttcaagtacgccgaccccggcggaagcttcgaacaagttcagcttcaacagcctggcgctgagctggtcaaacctggcgcttctgtgaagatgagctgcaaagccagcggctacgccttcagcagctactggatcaactggatgaagcagaaacccggccagggactcgaatggatcggccaaatctatcccggcgacggcgacaccaactacaacggcaagttcaagggcagagccacactgaccgccgatacctctagcagcacagcctacatgcagctgagcagcctgaccagcgaagatagcgccgtgtacttctgtgcccggtccatcacaacagtcgtgggctgcgctatggactattggggccagggaacaagcgtgaccgtgtctagtacgcgtaccacgacgccagcgccgcgaccaccaacaccggcgcccaccatcgcgtcgcagcccctgtccctgcgcccagaggcgtgccggccagcggcggggggcgcagtgcacacgagggggctggacttcgcctgtgacatctacatctgggcgcccttggccgggacttgtggggtccttctcctgtcactggttatcaccctttactgcaaacggggcagaaagaaactcctgtatatattcaaacaaccatttatgagaccagtacaaactactcaagaggaagatggctgtagctgccgatttccagaagaagaagaaggaggatgtgaactgagagtgaagttcagcaggagcgcagacgcccccgcgtaccagcagggccagaaccagctctataacgagctgaatctaggacgaagagaggagtacgatgttttggacaagagacgtggccgggaccctgagatggggggaaagccgagaaggaagaaccctcaggaaggcctgtacaatgaactgcagaaagataagatggcggaggcctacagtgagattgggatgaaaggcgagcgccggaggggcaaggggcacgatggcctttaccagggtctcagtacagccaccaaggacacctacgacgcccttcacatgcaggccctgccccctcgctaa

SEQ ID NO: 8035 - DNA, 1485 bp, synthetic construct
  source 1..1485: mol_type = other DNA
atggccttaccagtgaccgccttgctcctgccgctggccttgctgctccacgccgccaggccggacatccagatgacacagagccctagcagcctgtctgccagcgtgggagacagagtgaccatcacatgcaaggccagcgaccacatcaacaactggctggcctggtatcagcagaagcctggacaggcccctaagctgctgatctacggcgctaccacactggaaacaggcgtgcccagcagattttctggcagcggctctggcaccgactacaccctgacaatatccagcctccagcctgaggacttcgccacctactactgtcagcagagctggaacaccccttggacattcggccagggcaccaagctggaaatcaagagactcgagggaggctctaacagcttcatcttcaagtacgccgacggcggaagcttcgaacaagttcagcttcaacagcctggcgctgagctggtcaaacctggcgcttctgtgaagatgagctgcaaagccagcggctacgccttcagcagctactggatcaactggatgaagcagaaacccggccagggactcgaatggatcggccaaatctatcccggcgacggcgacaccaactacaacggcaagttcaagggcagagccacactgaccgccgatacctctagcagcacagcctacatgcagctgagcagcctgaccagcgaagatagcgccgtgtacttctgtgcccggtccatcacaacagtcgtgggctgcgctatggactattggggccagggaacaagcgtgaccgtgtctagtacgcgtaccacgacgccagcgccgcgaccaccaacaccggcgcccaccatcgcgtcgcagcccctgtccctgcgcccagaggcgtgccggccagcggcggggggcgcagtgcacacgagggggctggacttcgcctgtgacatctacatctgggcgcccttggccgggacttgtggggtccttctcctgtcactggttatcaccctttactgcaaacggggcagaaagaaactcctgtatatattcaaacaaccatttatgagaccagtacaaactactcaagaggaagatggctgtagctgccgatttccagaagaagaagaaggaggatgtgaactgagagtgaagttcagcaggagcgcagacgcccccgcgtaccagcagggccagaaccagctctataacgagctgaatctaggacgaagagaggagtacgatgttttggacaagagacgtggccgggaccctgagatggggggaaagccgagaaggaagaaccctcaggaaggcctgtacaatgaactgcagaaagataagatggcggaggcctacagtgagattgggatgaaaggcgagcgccggaggggcaaggggcacgatggcctttaccagggtctcagtacagccaccaaggacacctacgacgcccttcacatgcaggccctgccccctcgctaa

SEQ ID NO: 8036 - DNA, 1479 bp, synthetic construct
  source 1..1479: mol_type = other DNA
atggccttaccagtgaccgccttgctcctgccgctggccttgctgctccacgccgccaggccggacatccagatgacacagagccctagcagcctgtctgccagcgtgggagacagagtgaccatcacatgcaaggccagcgaccacatcaacaactggctggcctggtatcagcagaagcctggacaggcccctaagctgctgatctacggcgctaccacactggaaacaggcgtgcccagcagattttctggcagcggctctggcaccgactacaccctgacaatatccagcctccagcctgaggacttcgccacctactactgtcagcagagctggaacaccccttggacattcggccagggcaccaagctggaaatcaagagactcgagggaggctctcccatctacaagtaccccgacggcggaagcttcgaacaagttcagcttcaacagcctggcgctgagctggtcaaacctggcgcttctgtgaagatgagctgcaaagccagcggctacgccttcagcagctactggatcaactggatgaagcagaaacccggccagggactcgaatggatcggccaaatctatcccggcgacggcgacaccaactacaacggcaagttcaagggcagagccacactgaccgccgatacctctagcagcacagcctacatgcagctgagcagcctgaccagcgaagatagcgccgtgtacttctgtgcccggtccatcacaacagtcgtgggctgcgctatggactattggggccagggaacaagcgtgaccgtgtctagtacgcgtaccacgacgccagcgccgcgaccaccaacaccggcgcccaccatcgcgtcgcagcccctgtccctgcgcccagaggcgtgccggccagcggcggggggcgcagtgcacacgagggggctggacttcgcctgtgacatctacatctgggcgcccttggccgggacttgtggggtccttctcctgtcactggttatcaccctttactgcaaacggggcagaaagaaactcctgtatatattcaaacaaccatttatgagaccagtacaaactactcaagaggaagatggctgtagctgccgatttccagaagaagaagaaggaggatgtgaactgagagtgaagttcagcaggagcgcagacgcccccgcgtaccagcagggccagaaccagctctataacgagctgaatctaggacgaagagaggagtacgatgttttggacaagagacgtggccgggaccctgagatggggggaaagccgagaaggaagaaccctcaggaaggcctgtacaatgaactgcagaaagataagatggcggaggcctacagtgagattgggatgaaaggcgagcgccggaggggcaaggggcacgatggcctttaccagggtctcagtacagccaccaaggacacctacgacgcccttcacatgcaggccctgccccctcgctaa

SEQ ID NO: 8037 - DNA, 1521 bp, synthetic construct
  source 1..1521: mol_type = other DNA
atggccttaccagtgaccgccttgctcctgccgctggccttgctgctccacgccgccaggccggacatccagatgacacagagccctagcagcctgtctgccagcgtgggagacagagtgaccatcacatgcaaggccagcgaccacatcaacaactggctggcctggtatcagcagaagcctggacaggcccctaagctgctgatctacggcgctaccacactggaaacaggcgtgcccagcagattttctggcagcggctctggcaccgactacaccctgacaatatccagcctccagcctgaggacttcgccacctactactgtcagcagagctggaacaccccttggacattcggccagggcaccaagctggaaatcaagagactcgagggaggctctcgcggcaacctgaccatgagcttccacctggagatcaccgcccgccccgtgctgtggcactggggcggaagcttcgaacaagttcagcttcaacagcctggcgctgagctggtcaaacctggcgcttctgtgaagatgagctgcaaagccagcggctacgccttcagcagctactggatcaactggatgaagcagaaacccggccagggactcgaatggatcggccaaatctatcccggcgacggcgacaccaactacaacggcaagttcaagggcagagccacactgaccgccgatacctctagcagcacagcctacatgcagctgagcagcctgaccagcgaagatagcgccgtgtacttctgtgcccggtccatcacaacagtcgtgggctgcgctatggactattggggccagggaacaagcgtgaccgtgtctagtacgcgtaccacgacgccagcgccgcgaccaccaacaccggcgcccaccatcgcgtcgcagcccctgtccctgcgcccagaggcgtgccggccagcggcggggggcgcagtgcacacgagggggctggacttcgcctgtgacatctacatctgggcgcccttggccgggacttgtggggtccttctcctgtcactggttatcaccctttactgcaaacggggcagaaagaaactcctgtatatattcaaacaaccatttatgagaccagtacaaactactcaagaggaagatggctgtagctgccgatttccagaagaagaagaaggaggatgtgaactgagagtgaagttcagcaggagcgcagacgcccccgcgtaccagcagggccagaaccagctctataacgagctgaatctaggacgaagagaggagtacgatgttttggacaagagacgtggccgggaccctgagatggggggaaagccgagaaggaagaaccctcaggaaggcctgtacaatgaactgcagaaagataagatggcggaggcctacagtgagattgggatgaaaggcgagcgccggaggggcaaggggcacgatggcctttaccagggtctcagtacagccaccaaggacacctacgacgcccttcacatgcaggccctgccccctcgctaa

SEQ ID NO: 8038 - DNA, 1506 bp, synthetic construct
  source 1..1506: mol_type = other DNA
atggccttaccagtgaccgccttgctcctgccgctggccttgctgctccacgccgccaggccggacatccagatgacacagagccctagcagcctgtctgccagcgtgggagacagagtgaccatcacatgcaaggccagcgaccacatcaacaactggctggcctggtatcagcagaagcctggacaggcccctaagctgctgatctacggcgctaccacactggaaacaggcgtgcccagcagattttctggcagcggctctggcaccgactacaccctgacaatatccagcctccagcctgaggacttcgccacctactactgtcagcagagctggaacaccccttggacattcggccagggcaccaagctggaaatcaagagactcgagggaggctctcgcggcaacctgaccatgagcttccacctggagatcaccgcccgccccggcggaagcttcgaacaagttcagcttcaacagcctggcgctgagctggtcaaacctggcgcttctgtgaagatgagctgcaaagccagcggctacgccttcagcagctactggatcaactggatgaagcagaaacccggccagggactcgaatggatcggccaaatctatcccggcgacggcgacaccaactacaacggcaagttcaagggcagagccacactgaccgccgatacctctagcagcacagcctacatgcagctgagcagcctgaccagcgaagatagcgccgtgtacttctgtgcccggtccatcacaacagtcgtgggctgcgctatggactattggggccagggaacaagcgtgaccgtgtctagtacgcgtaccacgacgccagcgccgcgaccaccaacaccggcgcccaccatcgcgtcgcagcccctgtccctgcgcccagaggcgtgccggccagcggcggggggcgcagtgcacacgagggggctggacttcgcctgtgacatctacatctgggcgcccttggccgggacttgtggggtccttctcctgtcactggttatcaccctttactgcaaacggggcagaaagaaactcctgtatatattcaaacaaccatttatgagaccagtacaaactactcaagaggaagatggctgtagctgccgatttccagaagaagaagaaggaggatgtgaactgagagtgaagttcagcaggagcgcagacgcccccgcgtaccagcagggccagaaccagctctataacgagctgaatctaggacgaagagaggagtacgatgttttggacaagagacgtggccgggaccctgagatggggggaaagccgagaaggaagaaccctcaggaaggcctgtacaatgaactgcagaaagataagatggcggaggcctacagtgagattgggatgaaaggcgagcgccggaggggcaaggggcacgatggcctttaccagggtctcagtacagccaccaaggacacctacgacgcccttcacatgcaggccctgccccctcgctaa

SEQ ID NO: 8039 - DNA, 1494 bp, synthetic construct
  source 1..1494: mol_type = other DNA
atggccttaccagtgaccgccttgctcctgccgctggccttgctgctccacgccgccaggccggacatccagatgacacagagccctagcagcctgtctgccagcgtgggagacagagtgaccatcacatgcaaggccagcgaccacatcaacaactggctggcctggtatcagcagaagcctggacaggcccctaagctgctgatctacggcgctaccacactggaaacaggcgtgcccagcagattttctggcagcggctctggcaccgactacaccctgacaatatccagcctccagcctgaggacttcgccacctactactgtcagcagagctggaacaccccttggacattcggccagggcaccaagctggaaatcaagagactcgagggaggctctaccatgagcttccacctggagatcaccgcccgccccggcggaagcttcgaacaagttcagcttcaacagcctggcgctgagctggtcaaacctggcgcttctgtgaagatgagctgcaaagccagcggctacgccttcagcagctactggatcaactggatgaagcagaaacccggccagggactcgaatggatcggccaaatctatcccggcgacggcgacaccaactacaacggcaagttcaagggcagagccacactgaccgccgatacctctagcagcacagcctacatgcagctgagcagcctgaccagcgaagatagcgccgtgtacttctgtgcccggtccatcacaacagtcgtgggctgcgctatggactattggggccagggaacaagcgtgaccgtgtctagtacgcgtaccacgacgccagcgccgcgaccaccaacaccggcgcccaccatcgcgtcgcagcccctgtccctgcgcccagaggcgtgccggccagcggcggggggcgcagtgcacacgagggggctggacttcgcctgtgacatctacatctgggcgcccttggccgggacttgtggggtccttctcctgtcactggttatcaccctttactgcaaacggggcagaaagaaactcctgtatatattcaaacaaccatttatgagaccagtacaaactactcaagaggaagatggctgtagctgccgatttccagaagaagaagaaggaggatgtgaactgagagtgaagttcagcaggagcgcagacgcccccgcgtaccagcagggccagaaccagctctataacgagctgaatctaggacgaagagaggagtacgatgttttggacaagagacgtggccgggaccctgagatggggggaaagccgagaaggaagaaccctcaggaaggcctgtacaatgaactgcagaaagataagatggcggaggcctacagtgagattgggatgaaaggcgagcgccggaggggcaaggggcacgatggcctttaccagggtctcagtacagccaccaaggacacctacgacgcccttcacatgcaggccctgccccctcgctaa

SEQ ID NO: 8040 - DNA, 1956 bp, synthetic construct
  source 1..1956: mol_type = other DNA
atggccttaccagtgaccgccttgctcctgccgctggccttgctgctccacgccgccaggccggcatgcagaagcgaagatcggtatggtaccggcggaggcggatctggcggcggaggtagcggtggcggaggatctgaattcgacatccagatgacacagagccctagcagcctgtctgccagcgtgggagacagagtgaccatcacatgcaaggccagcgaccacatcaacaactggctggcctggtatcagcagaagcctggacaggcccctaagctgctgatctacggcgctaccacactggaaacaggcgtgcccagcagattttctggcagcggctctggcaccgactacaccctgacaatatccagcctccagcctgaggacttcgccacctactactgtcagcagagctggaacaccccttggacattcggccagggcaccaagctggaaatcaagagactcgaggacctgaagaacgtgttcccacctgaggtggccgtgttcgagcctagcgaggccgagatcagccacacccagaaagccaccctcgtgtgcctggctaccggcttctaccccgaccatgtggaactgtcttggtgggtcaacggcaaagaggtgcacagcggcgtgtgtaccgacccccagccactgaaagaacagcccgccctgaacgacagccggtactgcctgagcagcagactgagagtgtccgccaccttctggcagaacccccggaaccacttcagatgccaggtgcagttctacggcctgagcgagaacgacgagtggacccaggacagagccaagcccgtgacccagatcgtgtctgccgaagcctggggcagagccgattgcggctttaccagcgagagctaccagcagggcgtgctgagcgccaccatcctgtacgagatcctgctgggcaaggccaccctgtacgccgtgctggtgtctgccctggtgctgatggctatggtcaagcggaaggacagccggggaagggccaagcgatctggatctggagcaacaaacttctcactactcaaacaagcaggtgacgtggaggagaatcccgggcctactagtgccaccatggactggatttggcgcatccttttccttgtcggcgctgctaccggcgcccattccttcgaacaagttcagcttcaacagcctggcgctgagctggtcaaacctggcgcttctgtgaagatgagctgcaaagccagcggctacgccttcagcagctactggatcaactggatgaagcagaaacccggccagggactcgaatggatcggccaaatctatcccggcgacggcgacaccaactacaacggcaagttcaagggcagagccacactgaccgccgatacctctagcagcacagcctacatgcagctgagcagcctgaccagcgaagatagcgccgtgtacttctgtgcccggtccatcacaacagtcgtgggctgcgctatggactattggggccagggaacaagcgtgaccgtgtctagtacgcgtatccagaaccctgatcctgccgtgtaccagctgcgggatagcaagagcagcgacaagagcgtgtgtctgttcaccgacttcgacagccagaccaacgtgtcccagagcaaggactccgacgtgtacatcaccgataagtgcgtgctggacatgcggagcatggacttcaagagcaactccgccgtggcctggtccaacaagtccgatttcgcctgcgccaacgccttcaacaacagcattatccccgaggacacattcttcccaagccccgagagcagctgcgacgtgaagctggtggaaaagagcttcgagacagacaccaacctgaacttccagaacctgagcgtgatcggcttcagaatcctgctgctgaaagtggccggctttaacctgctgatgaccctgcggctgtggtccagctaa

SEQ ID NO: 8041 - DNA, 1959 bp, synthetic construct
  source 1..1959: mol_type = other DNA
atggccttaccagtgaccgccttgctcctgccgctggccttgctgctccacgccgccaggccggcatgcagaagcgaagatcggtatcggggtaccggcggaggcggatctggcggcggaggtagcggtggcggaggatctgaattcgacatccagatgacacagagccctagcagcctgtctgccagcgtgggagacagagtgaccatcacatgcaaggccagcgaccacatcaacaactggctggcctggtatcagcagaagcctggacaggcccctaagctgctgatctacggcgctaccacactggaaacaggcgtgcccagcagattttctggcagcggctctggcaccgactacaccctgacaatatccagcctccagcctgaggacttcgccacctactactgtcagcagagctggaacaccccttggacattcggccagggcaccaagctggaaatcaagagactcgaggacctgaagaacgtgttcccacctgaggtggccgtgttcgagcctagcgaggccgagatcagccacacccagaaagccaccctcgtgtgcctggctaccggcttctaccccgaccatgtggaactgtcttggtgggtcaacggcaaagaggtgcacagcggcgtgtgtaccgacccccagccactgaaagaacagcccgccctgaacgacagccggtactgcctgagcagcagactgagagtgtccgccaccttctggcagaacccccggaaccacttcagatgccaggtgcagttctacggcctgagcgagaacgacgagtggacccaggacagagccaagcccgtgacccagatcgtgtctgccgaagcctggggcagagccgattgcggctttaccagcgagagctaccagcagggcgtgctgagcgccaccatcctgtacgagatcctgctgggcaaggccaccctgtacgccgtgctggtgtctgccctggtgctgatggctatggtcaagcggaaggacagccggggaagggccaagcgatctggatctggagcaacaaacttctcactactcaaacaagcaggtgacgtggaggagaatcccgggcctactagtgccaccatggactggatttggcgcatccttttccttgtcggcgctgctaccggcgcccattccttcgaacaagttcagcttcaacagcctggcgctgagctggtcaaacctggcgcttctgtgaagatgagctgcaaagccagcggctacgccttcagcagctactggatcaactggatgaagcagaaacccggccagggactcgaatggatcggccaaatctatcccggcgacggcgacaccaactacaacggcaagttcaagggcagagccacactgaccgccgatacctctagcagcacagcctacatgcagctgagcagcctgaccagcgaagatagcgccgtgtacttctgtgcccggtccatcacaacagtcgtgggctgcgctatggactattggggccagggaacaagcgtgaccgtgtctagtacgcgtatccagaaccctgatcctgccgtgtaccagctgcgggatagcaagagcagcgacaagagcgtgtgtctgttcaccgacttcgacagccagaccaacgtgtcccagagcaaggactccgacgtgtacatcaccgataagtgcgtgctggacatgcggagcatggacttcaagagcaactccgccgtggcctggtccaacaagtccgatttcgcctgcgccaacgccttcaacaacagcattatccccgaggacacattcttcccaagccccgagagcagctgcgacgtgaagctggtggaaaagagcttcgagacagacaccaacctgaacttccagaacctgagcgtgatcggcttcagaatcctgctgctgaaagtggccggctttaacctgctgatgaccctgcggctgtggtccagctaa

SEQ ID NO: 8042 - DNA, 1962 bp, synthetic construct
  source 1..1962: mol_type = other DNA
atggccttaccagtgaccgccttgctcctgccgctggccttgctgctccacgccgccaggccggcatgccgcagcgaggaccgctaccgcaacggtaccggcggaggcggatctggcggcggaggtagcggtggcggaggatctgaattcgacatccagatgacacagagccctagcagcctgtctgccagcgtgggagacagagtgaccatcacatgcaaggccagcgaccacatcaacaactggctggcctggtatcagcagaagcctggacaggcccctaagctgctgatctacggcgctaccacactggaaacaggcgtgcccagcagattttctggcagcggctctggcaccgactacaccctgacaatatccagcctccagcctgaggacttcgccacctactactgtcagcagagctggaacaccccttggacattcggccagggcaccaagctggaaatcaagagactcgaggacctgaagaacgtgttcccacctgaggtggccgtgttcgagcctagcgaggccgagatcagccacacccagaaagccaccctcgtgtgcctggctaccggcttctaccccgaccatgtggaactgtcttggtgggtcaacggcaaagaggtgcacagcggcgtgtgtaccgacccccagccactgaaagaacagcccgccctgaacgacagccggtactgcctgagcagcagactgagagtgtccgccaccttctggcagaacccccggaaccacttcagatgccaggtgcagttctacggcctgagcgagaacgacgagtggacccaggacagagccaagcccgtgacccagatcgtgtctgccgaagcctggggcagagccgattgcggctttaccagcgagagctaccagcagggcgtgctgagcgccaccatcctgtacgagatcctgctgggcaaggccaccctgtacgccgtgctggtgtctgccctggtgctgatggctatggtcaagcggaaggacagccggggaagggccaagcgatctggatctggagcaacaaacttctcactactcaaacaagcaggtgacgtggaggagaatcccgggcctactagtgccaccatggactggatttggcgcatccttttccttgtcggcgctgctaccggcgcccattccttcgaacaagttcagcttcaacagcctggcgctgagctggtcaaacctggcgcttctgtgaagatgagctgcaaagccagcggctacgccttcagcagctactggatcaactggatgaagcagaaacccggccagggactcgaatggatcggccaaatctatcccggcgacggcgacaccaactacaacggcaagttcaagggcagagccacactgaccgccgatacctctagcagcacagcctacatgcagctgagcagcctgaccagcgaagatagcgccgtgtacttctgtgcccggtccatcacaacagtcgtgggctgcgctatggactattggggccagggaacaagcgtgaccgtgtctagtacgcgtatccagaaccctgatcctgccgtgtaccagctgcgggatagcaagagcagcgacaagagcgtgtgtctgttcaccgacttcgacagccagaccaacgtgtcccagagcaaggactccgacgtgtacatcaccgataagtgcgtgctggacatgcggagcatggacttcaagagcaactccgccgtggcctggtccaacaagtccgatttcgcctgcgccaacgccttcaacaacagcattatccccgaggacacattcttcccaagccccgagagcagctgcgacgtgaagctggtggaaaagagcttcgagacagacaccaacctgaacttccagaacctgagcgtgatcggcttcagaatcctgctgctgaaagtggccggctttaacctgctgatgaccctgcggctgtggtccagctaa
